(19) United States
(12) Patent Application Publication
(10) Pub. No.: US 2006/0263774 A1
(43) Pub. Date: Nov. 23, 2006

(54) Compositions and methods for the treatment of immune related diseases

(75) Inventors: Hilary Clark, South San Francisco, CA (US); Jill R Schoenfeld, Ashland, OR (US); Menno VanLookeren, San Francisco, CA (US); P Mickey Williams, Half Moon Bay, CA (US); William I Wood, Cupertino, CA (US); Thomas D Wu, San Francisco, CA (US)

Correspondence Address: GENENTECH, INC., 1 DNA WAY, SOUTH SAN FRANCISCO, CA, 94080, US

(73) Assignee: Genentech, Inc., South San Francisco, CA (US)

(21) Appl. No.: 10/533,519

(22) PCT Filed: Oct. 30, 2003
(86) PCT No.: PCT/US03/34312

§ 371 Date: Mar. 3, 2006

Related U.S. Application Data
(60) Provisional application No. 60/423,394, filed on Nov. 1, 2002.

(51) Int. Cl. C12Q 1/68; C07H 21/04; C12P 21/06; C07K 14/705; C07K 16/28

(52) U.S. Cl. 435/6; 435/69.1; 435/320.1; 435/325; 530/350; 530/388.22; 536/23.5

(57) ABSTRACT

The present invention relates to compositions containing novel proteins and methods of using those compositions for the diagnosis and treatment of immune related diseases.

### FIELD OF THE INVENTION

[0001] The present invention relates to compositions and methods useful for the diagnosis and treatment of immune related diseases.

### BACKGROUND OF THE INVENTION

[0002] Immune related and inflammatory diseases are the manifestation or consequence of fairly complex, often multiple interconnected biological pathways which in normal physiology are critical to respond to insult or injury, initiate repair from insult or injury, and mount innate and acquired defense against foreign organisms. Disease or pathology occurs when these normal physiological pathways cause additional insult or injury either as directly related to the intensity of the response, as a consequence of abnormal regulation or excessive stimulation, as a reaction to self or as a combination of these.

[0003] Though the genesis of these diseases often involves multistep pathways and often multiple different biological systems/pathways, intervention at critical points in one or more of these pathways can have an ameliorative or therapeutic effect. Therapeutic intervention can occur by either antagonism of a detrimental process/pathway or stimulation of a beneficial process/pathway.

[0004] Many immune related diseases are known and have been extensively studied. Such diseases include immune-mediated inflammatory diseases, non-immune-mediated inflammatory diseases, infectious diseases, immunodeficiency diseases, neoplasia, etc.

[0005] Immune related diseases could be treated by suppressing the immune response. Using neutralizing antibodies that inhibit molecules having immune stimulatory activity would be beneficial in the treatment of immune-mediated and inflammatory diseases. Molecules which inhibit the immune response can be utilized (proteins directly or via the use of antibody agonists) to inhibit the immune response and thus ameliorate immune related disease.

[0006] Macrophages represent an ubiquitously distributed population of fixed and circulating mononuclear phagocytes that express a variety of functions including cytokine production, killing of microbes and tumor cells and processing and presentation of antigens. Macrophages originate in the bone marrow from stem cells that give rise to a bipotent granulocyte/macrophage cell population. Distinct granulocyte and macrophage colony forming cell lineages arise from GM-CSF under the influence of specific cytokines. Upon division, monoblasts give rise to promonocytes and monocytes in the bone marrow. From there, monocytes enter the circulation. In response to particular stimuli (e.g. infection or foreign bodies) monocytes migrate into tissues and organs where they differentiate into macrophages.

[0007] Macrophages in various tissues vary in their morphology and function and have been assigned different names, e.g. Kupffer cells in the liver, pulmonary and alveolar macrophages in the lung and microglial cells in the central nervous system. However, the relationship between blood monocytes and tissue macrophages remains unclear.

[0008] In the present study monocytes were differentiated into macrophages by adherence to plastic in the presence of a combination of human and bovine serum. After 7 days in culture, monocytes-derived macrophages display features typical of differentiated tissue macrophages including their ability to phagocytose opsonized particles, secretion of TNF-alpha upon lipopolysaccharide (LPS) stimulation, formation of processes and the presence of macrophage cell surface markers.

[0009] Using microarray technologies, gene transcripts from non-differentiated monocytes harvested before adhering were compared with those at 1 day and 7 days in culture. Genes selectively expressed in monocytes or macrophages could be used for the diagnosis and treatment of various chronic inflammatory or autoimmune diseases in the human. In particular, surface expressed molecules or transmembrane receptors involved in monocyte/macrophage adhesion and endothelial cell transmigration could provide novel targets to treat chronic inflammation by interference with the homing of these cells to the site of inflammation. In addition, transmembrane inhibitory receptors could be used to down-regulate monocyte/macrophage effector functions. Therapeutic molecules can be antibodies, peptides, fusion proteins or small molecules.

[0010] Despite the above research in monocyte/macrophages, there is a great need for additional diagnostic and therapeutic agents capable of detecting the presence of monocyte/macrophage mediated disorders in a mammal and for effectively reducing these disorders. Accordingly, it is an objective of the present invention to identify polypeptides that are differentially expressed in macrophages as compared to non-differentiated monocytes, and to use those polypeptides, and their encoding nucleic acids, to produce compositions of matter useful in the therapeutic treatment and diagnostic detection of monocyte/macrophage mediated disorders in mammals.

### SUMMARY OF THE INVENTION

[0011] A. Embodiments

[0012] The present invention concerns compositions and methods useful for the diagnosis and treatment of immune related disease in mammals, including humans. The present invention is based on the identification of proteins (including agonist and antagonist antibodies) which are a result of stimulation of the immune response in mammals. Immune related diseases can be treated by suppressing or enhancing the immune response. Molecules that enhance the immune response stimulate or potentiate the immune response to an antigen. Molecules which stimulate the immune response can be used therapeutically where enhancement of the immune response would be beneficial. Alternatively, molecules that suppress the immune response attenuate or reduce the immune response to an antigen (e.g., neutralizing antibodies) can be used therapeutically where attenuation of the immune response would be beneficial (e.g., inflammation). Accordingly, the PRO polypeptides, agonists and antagonists thereof are also useful to prepare medicines and medicaments for the treatment of immune-related and inflammatory diseases. In a specific aspect, such medicines and medicaments comprise a therapeutically effective amount of a PRO polypeptide, agonist or antagonist thereof with a pharmaceutically acceptable carrier. Preferably, the admixture is sterile.

[0013] In a further embodiment, the invention concerns a method of identifying agonists or antagonists to a PRO polypeptide which comprises contacting the PRO polypeptide with a candidate molecule and monitoring a biological activity mediated by said PRO polypeptide. Preferably, the PRO polypeptide is a native sequence PRO polypeptide. In a specific aspect, the PRO agonist or antagonist is an anti-PRO antibody.

[0014] In another embodiment, the invention concerns a composition of matter comprising a PRO polypeptide or an agonist or antagonist antibody which binds the polypeptide in admixture with a carrier or excipient. In one aspect, the composition comprises a therapeutically effective amount of the polypeptide or antibody. In another aspect, when the composition comprises an immune stimulating molecule, the composition is useful for: (a) increasing infiltration of inflammatory cells into a tissue of a mammal in need thereof, (b) stimulating or enhancing an immune response in a mammal in need thereof (c) increasing the proliferation of monocytes/macrophages in a mammal in need thereof in response to an antigen, (d) stimulating the activity of monocytes/macrophages or (e) increasing the vascular permeability. In a further aspect, when the composition comprises an immune inhibiting molecule, the composition is useful for: (a) decreasing infiltration of inflammatory cells into a tissue of a mammal in need thereof, (b) inhibiting or reducing an immune response in a mammal in need thereof, (c) decreasing the activity of monocytes/macrophages or (d) decreasing the proliferation of monocytes/macrophages in a mammal in need thereof in response to an antigen. In another aspect, the composition comprises a further active ingredient, which may, for example, be a further antibody or a cytotoxic or chemotherapeutic agent. Preferably, the composition is sterile.

[0015] In another embodiment, the invention concerns a method of treating an immune related disorder in a mammal in need thereof comprising administering to the mammal an effective amount of a PRO polypeptide, an agonist thereof, or an antagonist thereto. In a preferred aspect, the immune related disorder is selected from the group consisting of systemic lupus erythematosis, rheumatoid arthritis, osteoarthritis, juvenile chronic arthritis, spondyloarthropathies, systemic sclerosis, idiopathic inflammatory myopathies, Sjögren's syndrome, systemic vasculitis, sarcoidosis, autoimmune hemolytic anemia, autoimmune thrombocytopenia, thyroiditis, diabetes mellitus, immune-mediated renal disease, demyelinating diseases of the central and peripheral nervous systems such as multiple sclerosis, idiopathic demyelinating polyneuropathy or Guillain-Barré syndrome, and chronic inflammatory demyelinating polyneuropathy, hepatobiliary diseases such as infectious, autoimmune chronic active hepatitis, primary biliary cirrhosis, granulomatous hepatitis, and sclerosing cholangitis, inflammatory bowel disease, gluten-sensitive enteropathy, and Whipple's disease, autoimmune or immune-mediated skin diseases including bullous skin diseases, erythema multiforme and contact dermatitis, psoriasis, allergic diseases such as asthma, allergic rhinitis, atopic dermatitis, food hypersensitivity and urticaria, immunologic diseases of the lung such as eosinophilic pneumonias, idiopathic pulmonary fibrosis and hypersensitivity pneumonitis, transplantation associated diseases including graft rejection and graft-versus-host-disease.

[0016] In another embodiment, the invention provides an antibody which specifically binds to any of the above or below described polypeptides. Optionally, the antibody is a monoclonal antibody, humanized antibody, antibody fragment or single-chain antibody. In one aspect, the present invention concerns an isolated antibody which binds a PRO polypeptide. In another aspect, the antibody mimics the activity of a PRO polypeptide (an agonist antibody) or conversely the antibody inhibits or neutralizes the activity of a PRO polypeptide (an antagonist antibody). In another aspect, the antibody is a monoclonal antibody, which preferably has nonhuman complementarity determining region (CDR) residues and human framework region (FR) residues. The antibody may be labeled and may be immobilized on a solid support. In a further aspect, the antibody is an antibody fragment, a monoclonal antibody, a single-chain antibody, or an anti-idiotypic antibody.

[0017] In yet another embodiment, the present invention provides a composition comprising an anti-PRO antibody in admixture with a pharmaceutically acceptable carrier. In one aspect, the composition comprises a therapeutically effective amount of the antibody. Preferably, the composition is sterile. The composition may be administered in the form of a liquid pharmaceutical formulation, which may be preserved to achieve extended storage stability. Alternatively, the antibody is a monoclonal antibody, an antibody fragment, a humanized antibody, or a single-chain antibody.

[0018] In a further embodiment, the invention concerns an article of manufacture, comprising:

[0019] (a) a composition of matter comprising a PRO polypeptide or agonist or antagonist thereof;

[0020] (b) a container containing said composition; and

[0021] (c) a label affixed to said container, or a package insert included in said container referring to the use of said PRO polypeptide or agonist or antagonist thereof in the treatment of an immune related disease. The composition may comprise a therapeutically effective amount of the PRO polypeptide or the agonist or antagonist thereof.

[0022] In yet another embodiment, the present invention concerns a method of diagnosing an immune related disease in a mammal, comprising detecting the level of expression of a gene encoding a PRO polypeptide (a) in a test sample of tissue cells obtained from the mammal, and (b) in a control sample of known normal tissue cells of the same cell type, wherein a higher or lower expression level in the test sample as compared to the control sample indicates the presence of immune related disease in the mammal from which the test tissue cells were obtained.

[0023] In another embodiment, the present invention concerns a method of diagnosing an immune disease in a mammal, comprising (a) contacting an anti-PRO antibody with a test sample of tissue cells obtained from the mammal, and (b) detecting the formation of a complex between the antibody and a PRO polypeptide, in the test sample; wherein the formation of said complex is indicative of the presence or absence of said disease. The detection may be qualitative or quantitative, and may be performed in comparison with monitoring the complex formation in a control sample of known normal tissue cells of the same cell type. A larger quantity of complexes formed in the test sample indicates the presence or absence of an immune disease in the mammal from which the test tissue cells were obtained. The antibody preferably carries a detectable label. Complex formation can be monitored, for example, by light microscopy, flow cytometry, fluorimetry, or other techniques known in the art. The test sample is usually obtained from an individual suspected of having a deficiency or abnormality of the immune system.

[0024] In another embodiment, the invention provides a method for determining the presence of a PRO polypeptide in a sample comprising exposing a test sample of cells suspected of containing the PRO polypeptide to an anti-PRO antibody and determining the binding of said antibody to said cell sample. In a specific aspect, the sample comprises a cell suspected of containing the PRO polypeptide and the antibody binds to the cell. The antibody is preferably detectably labeled and/or bound to a solid support.

[0025] In another embodiment, the present invention concerns an immune-related disease diagnostic kit, comprising an anti-PRO antibody and a carrier in suitable packaging. The kit preferably contains instruction for using the antibody to detect the presence of the PRO polypeptide. Preferably the carrier is pharmaceutically acceptable.

[0026] In another embodiment, the present invention concerns a diagnostic kit, containing an anti-PRO antibody in suitable packaging. The kit preferably contains instructions for using the antibody to detect the PRO polypeptide.

[0027] In another embodiment, the invention provides a method of diagnosing an immune-related disease in a mammal which comprises detecting the presence or absence or a PRO polypeptide in a test sample of tissue cells obtained from said mammal, wherein the presence or absence of the PRO polypeptide in said test sample is indicative of the presence of an immune-related disease in said mammal.

[0028] In another embodiment, the present invention concerns a method for identifying an agonist of a PRO polypeptide comprising:

[0029] (a) contacting cells and a test compound to be screened under conditions suitable for the induction of a cellular response normally induced by a PRO polypeptide; and

[0030] (b) determining the induction of said cellular response to determine if the test compound is an effective agonist, wherein the induction of said cellular response is indicative of said test compound being an effective agonist.

[0031] In another embodiment, the invention concerns a method for identifying a compound capable of inhibiting the activity of a PRO polypeptide comprising contacting a candidate compound with a PRO polypeptide under conditions and for a time sufficient to allow these two components to interact and determining whether the activity of the PRO polypeptide is inhibited. In a specific aspect, either the candidate compound or the PRO polypeptide is immobilized on a solid support. In another aspect, the non-immobilized component carries a detectable label. In a preferred aspect, this method comprises the steps of

[0032] (a) contacting cells and a test compound to be screened in the presence of a PRO polypeptide under conditions suitable for the induction of a cellular response normally induced by a PRO polypeptide; and

[0033] (b) determining the induction of said cellular response to determine if the test compound is an effective antagonist.

[0034] In another embodiment, the invention provides a method for identifying a compound that inhibits the expression of a PRO polypeptide in cells that normally express the polypeptide, wherein the method comprises contacting the cells with a test compound and determining whether the expression of the PRO polypeptide is inhibited. In a preferred aspect this method comprises the steps of:

[0035] (a) contacting cells and a test compound to be screened under conditions suitable for allowing expression of the PRO polypeptide; and

[0036] (b) determining the inhibition of expression of said polypeptide.

[0037] In yet another embodiment, the present invention concerns a method for treating an immune-related disorder in a mammal that suffers therefrom comprising administering to the mammal a nucleic acid molecule that codes for either (a) a PRO polypeptide, (b) an agonist of a PRO polypeptide or (c) an antagonist of a PRO polypeptide, wherein said agonist or antagonist may be an anti-PRO antibody. In a preferred embodiment, the mammal is human. In another preferred embodiment, the nucleic acid is administered via ex vivo gene therapy. In a further preferred embodiment, the nucleic acid is comprised within a vector, more preferably an adenoviral, adeno-associated viral, lentiviral or retroviral vector.

[0038] In yet another aspect, the invention provides a recombinant viral particle comprising a viral vector consisting essentially of a promoter, nucleic acid encoding (a) a PRO polypeptide, (b) an agonist polypeptide of a PRO polypeptide, or (c) an antagonist polypeptide of a PRO polypeptide, and a signal sequence for cellular secretion of the polypeptide, wherein the viral vector is in association with viral structural proteins. Preferably, the signal sequence is from a mammal, such as from a native PRO polypeptide.

[0039] In a still further embodiment, the invention concerns an ex vivo producer cell comprising a nucleic acid construct that expresses retroviral structural proteins and also comprises a retroviral vector consisting essentially of a promoter, nucleic acid encoding (a) a PRO polypeptide, (b) an agonist polypeptide of a PRO polypeptide or (c) an antagonist polypeptide of a PRO polypeptide, and a signal sequence for cellular secretion of the polypeptide, wherein said producer cell packages the retroviral vector in association with the structural proteins to produce recombinant retroviral particles.

[0040] In a still further embodiment, the invention provides a method of increasing the activity of monocytes/macrophages in a mammal comprising administering to said mammal (a) a PRO polypeptide, (b) an agonist of a PRO polypeptide, or (c) an antagonist of a PRO polypeptide, wherein the activity of monocytes/macrophages in the mammal is increased.

[0041] In a still further embodiment, the invention provides a method of decreasing the activity of monocytes/macrophages in a mammal comprising administering to said mammal (a) a PRO polypeptide, (b) an agonist of a PRO polypeptide, or (c) an antagonist of a PRO polypeptide, wherein the activity of monocytes/macrophages in the mammal is decreased.

[0042] In a still further embodiment, the invention provides a method of increasing the proliferation of monocytes/macrophages in a mammal comprising administering to said mammal (a) a PRO polypeptide, (b) an agonist of a PRO polypeptide, or (c) an antagonist of a PRO polypeptide, wherein the proliferation of monocytes/macrophages in the mammal is increased.

[0043] In a still further embodiment, the invention provides a method of decreasing the proliferation of monocytes/macrophages in a mammal comprising administering to said mammal (a) a PRO polypeptide, (b) an agonist of a PRO polypeptide, or (c) an antagonist of a PRO polypeptide, wherein the proliferation of monocytes/macrophages in the mammal is decreased.

[0044] B. Additional Embodiments

[0045] In other embodiments of the present invention, the invention provides vectors comprising DNA encoding any of the herein described polypeptides. Host cell comprising any such vector are also provided. By way of example, the host cells may be CHO cells, E. coli, or yeast. A process for producing any of the herein described polypeptides is further provided and comprises culturing host cells under conditions suitable for expression of the desired polypeptide and recovering the desired polypeptide from the cell culture.

[0046] In other embodiments, the invention provides chimeric molecules comprising any of the herein described polypeptides fused to a heterologous polypeptide or amino acid sequence. Example of such chimeric molecules comprise any of the herein described polypeptides fused to an epitope tag sequence or a Fc region of an immunoglobulin.

[0047] In another embodiment, the invention provides an antibody which specifically binds to any of the above or below described polypeptides. Optionally, the antibody is a monoclonal antibody, humanized antibody, antibody fragment or single-chain antibody.

[0048] In yet other embodiments, the invention provides oligonucleotide probes useful for isolating genomic and cDNA nucleotide sequences or as antisense probes, wherein those probes may be derived from any of the above or below described nucleotide sequences.

[0049] In other embodiments, the invention provides an isolated nucleic acid molecule comprising a nucleotide sequence that encodes a PRO polypeptide.

[0050] In one aspect, the isolated nucleic acid molecule comprises a nucleotide sequence having at least about 80% nucleic acid sequence identity, alternatively at least about 81% nucleic acid sequence identity, alternatively at least about 82% nucleic acid sequence identity, alternatively at least about 83% nucleic acid sequence identity, alternatively at least about 84% nucleic acid sequence identity, alternatively at least about 85% nucleic acid sequence identity, alternatively at least about 86% nucleic acid sequence identity, alternatively at least about 87% nucleic acid sequence identity, alternatively at least about 88% nucleic acid sequence identity, alternatively at least about 89% nucleic acid sequence identity, alternatively at least about 90% nucleic acid sequence identity, alternatively at least about 91% nucleic acid sequence identity, alternatively at least about 92% nucleic acid sequence identity, alternatively at least about 93% nucleic acid sequence identity, alternatively at least about 94% nucleic acid sequence identity, alternatively at least about 95% nucleic acid sequence identity, alternatively at least about 96% nucleic acid sequence identity, alternatively at least about 97% nucleic acid sequence identity, alternatively at least about 98% nucleic acid sequence identity and alternatively at least about 99% nucleic acid sequence identity to (a) a DNA molecule encoding a PRO polypeptide having a full-length amino acid sequence as disclosed herein, an amino acid sequence lacking the signal peptide as disclosed herein, an extracellular domain of a membrane protein, with or without the signal peptide, as disclosed herein or any other specifically defined fragment of the full-length amino acid sequence as disclosed herein, or (a) the complement of the DNA molecule of (a).

[0051] In other aspects, the isolated nucleic acid molecule comprises a nucleotide sequence having at least about 80% nucleic acid sequence identity, alternatively at least about 81% nucleic acid sequence identity, alternatively at least about 82% nucleic acid sequence identity, alternatively at least about 83% nucleic acid sequence identity, alternatively at least about 84% nucleic acid sequence identity, alternatively at least about 85% nucleic acid sequence identity, alternatively at least about 86% nucleic acid sequence identity, alternatively at least about 87% nucleic acid sequence identity, alternatively at least about 88% nucleic acid sequence identity, alternatively at least about 89% nucleic acid sequence identity, alternatively at least about 90% nucleic acid sequence identity, alternatively at least about 91% nucleic acid sequence identity, alternatively at least about 92% nucleic acid sequence identity, alternatively at least about 93% nucleic acid sequence identity, alternatively at least about 94% nucleic acid sequence identity, alternatively at least about 95% nucleic acid sequence identity, alternatively at least about 96% nucleic acid sequence identity, alternatively at least about 97% nucleic acid sequence identity, alternatively at least about 98% nucleic acid sequence identity and alternatively at least about 99% nucleic acid sequence identity to (a) a DNA molecule comprising the coding sequence of a full-length PRO polypeptide cDNA as disclosed herein, the coding sequence of a PRO polypeptide lacking the signal peptide as disclosed herein, the coding sequence of an extracellular domain of a transmembrane PRO polypeptide, with or without the signal peptide, as disclosed herein or the coding sequence of any other specifically defined fragment of the full-length amino acid sequence as disclosed herein, or (b) the complement of the DNA molecule of (a).

[0052] In a further aspect, the invention concerns an isolated nucleic acid molecule comprising a nucleotide sequence having at least about 80% nucleic acid sequence identity, alternatively at least about 81% nucleic acid sequence identity, alternatively at least about 82% nucleic acid sequence identity, alternatively at least about 83% nucleic acid sequence identity, alternatively at least about 84% nucleic acid sequence identity, alternatively at least about 85% nucleic acid sequence identity, alternatively at least about 86% nucleic acid sequence identity, alternatively at least about 87% nucleic acid sequence identity, alternatively at least about 88% nucleic acid sequence identity, alternatively at least about 89% nucleic acid sequence identity, alternatively at least about 90% nucleic acid sequence identity, alternatively at least about 91% nucleic acid sequence identity, alternatively at least about 92% nucleic acid sequence identity, alternatively at least about 93% nucleic acid sequence identity, alternatively at least about 94% nucleic acid sequence identity, alternatively at least about 95% nucleic acid sequence identity, alternatively at least about 96% nucleic acid sequence identity, alternatively at least about 97% nucleic acid sequence identity, alternatively at least about 98% nucleic acid sequence identity and alternatively at least about 99% nucleic acid sequence identity to (a) a DNA molecule that encodes the same mature polypeptide encoded by any of the human protein cDNAs as disclosed herein, or (b) the complement of the DNA molecule of (a).

[0053] Another aspect the invention provides an isolated nucleic acid molecule comprising a nucleotide sequence encoding a PRO polypeptide which is either transmembrane domain-deleted or transmembrane domain-inactivated, or is complementary to such encoding nucleotide sequence, wherein the transmembrane domain(s) of such polypeptide are disclosed herein. Therefore, soluble extracellular domains of the herein described PRO polypeptides are contemplated.

[0054] Another embodiment is directed to fragments of a PRO polypeptide coding sequence, or the complement thereof, that may find use as, for example, hybridization probes, for encoding fragments of a PRO polypeptide that may optionally encode a polypeptide comprising a binding site for an anti-PRO antibody or as antisense oligonucleotide probes. Such nucleic acid fragments are usually at least about 20 nucleotides in length, alternatively at least about 30 nucleotides in length, alternatively at least about 40 nucleotides in length, alternatively at least about 50 nucleotides in length, alternatively at least about 60 nucleotides in length, alternatively at least about 70 nucleotides in length, alternatively at least about 80 nucleotides in length, alternatively at least about 90 nucleotides in length, alternatively at least about 100 nucleotides in length, alternatively at least about 110 nucleotides in length, alternatively at least about 120 nucleotides in length, alternatively at least about 130 nucleotides in length, alternatively at least about 140 nucleotides in length, alternatively at least about 150 nucleotides in length, alternatively at least about 160 nucleotides in length, alternatively at least about 170 nucleotides in length, alternatively at least about 180 nucleotides in length, alternatively at least about 190 nucleotides in length, alternatively at least about 200 nucleotides in length, alternatively at least about 250 nucleotides in length, alternatively at least about 300 nucleotides in length, alternatively at least about 350 nucleotides in length, alternatively at least about 400 nucleotides in length, alternatively at least about 450 nucleotides in length, alternatively at least about 500 nucleotides in length, alternatively at least about 600 nucleotides in length, alternatively at least about 700 nucleotides in length, alternatively at least about 800 nucleotides in length, alternatively at least about 900 nucleotides in length and alternatively at least about 1000 nucleotides in length, wherein in this context the term “about” means the referenced nucleotide sequence length plus or minus 10% of that referenced length. It is noted that novel fragments of a PRO polypeptide-encoding nucleotide sequence may be determined in a routine manner by aligning the PRO polypeptide-encoding nucleotide sequence with other known nucleotide sequences using any of a number of well known sequence alignment programs and determining which PRO polypeptide-encoding nucleotide sequence fragment(s) are novel. All of such PRO polypeptide-encoding nucleotide sequences are contemplated herein. Also contemplated are the PRO polypeptide fragments encoded by these nucleotide molecule fragments, preferably those PRO polypeptide fragments that comprise a binding site for an anti-PRO antibody.

[0055] In another embodiment, the invention provides isolated PRO polypeptide encoded by any of the isolated nucleic acid sequences herein above identified.

[0056] In a certain aspect, the invention concerns an isolated PRO polypeptide, comprising an amino acid sequence having at least about 80% amino acid sequence identity, alternatively at least about 81% amino acid sequence identity, alternatively at least about 82% amino acid sequence identity, alternatively at least about 83% amino acid sequence identity, alternatively at least about 84% amino acid sequence identity, alternatively at least about 85% amino acid sequence identity, alternatively at least about 86% amino acid sequence identity, alternatively at least about 87% amino acid sequence identity, alternatively at least about 88% amino acid sequence identity, alternatively at least about 89% amino acid sequence identity, alternatively at least about 90% amino acid sequence identity, alternatively at least about 91% amino acid sequence identity, alternatively at least about 92% amino acid sequence identity, alternatively at least about 93% amino acid sequence identity, alternatively at least about 94% amino acid sequence identity, alternatively at least about 95% amino acid sequence identity, alternatively at least about 96% amino acid sequence identity, alternatively at least about 97% amino acid sequence identity, alternatively at least about 98% amino acid sequence identity and alternatively at least about 99% amino acid sequence identity to a PRO polypeptide having a full-length amino acid sequence as disclosed herein, an amino acid sequence lacking the signal peptide as disclosed herein, an extracellular domain of a transmembrane protein, with or without the signal peptide, as disclosed herein or any other specifically defined fragment of the full-length amino acid sequence as disclosed herein.

[0057] In a further aspect, the invention concerns an isolated PRO polypeptide comprising an amino acid sequence having at least about 80% amino acid sequence identity, alternatively at least about 81% amino acid sequence identity, alternatively at least about 82% amino acid sequence identity, alternatively at least about 83% amino acid sequence identity, alternatively at least about 84% amino acid sequence identity, alternatively at least about 85% amino acid sequence identity, alternatively at least about 86% amino acid sequence identity, alternatively at least about 87% amino acid sequence identity, alternatively at least about 88% amino acid sequence identity, alternatively at least about 89% amino acid sequence identity, alternatively at least about 90% amino acid sequence identity, alternatively at least about 91% amino acid sequence identity, alternatively at least about 92% amino acid sequence identity, alternatively at least about 93% amino acid sequence identity, alternatively at least about 94% amino acid sequence identity, alternatively at least about 95% amino acid sequence identity, alternatively at least about 96% amino acid sequence identity, alternatively at least about 97% amino acid sequence identity, alternatively at least about 98% amino acid sequence identity and alternatively at least about 99% amino acid sequence identity to an amino acid sequence encoded by any of the human protein cDNAs as disclosed herein.

[0058] In a specific aspect, the invention provides an isolated PRO polypeptide without the N-terminal signal sequence and/or the initiating methionine and is encoded by a nucleotide sequence that encodes such an amino acid sequence as herein before described. Processes for producing the same are also herein described, wherein those processes comprise culturing a host cell comprising a vector which comprises the appropriate encoding nucleic acid molecule under conditions suitable for expression of the PRO polypeptide and recovering the PRO polypeptide from the cell culture.

[0059] Another aspect the invention provides an isolated PRO polypeptide which is either transmembrane domain-deleted or transmembrane domain-inactivated. Processes for producing the same are also herein described, wherein those processes comprise culturing a host cell comprising a vector which comprises the appropriate encoding nucleic acid molecule under conditions suitable for expression of the PRO polypeptide and recovering the PRO polypeptide from the cell culture.

[0060] In yet another embodiment, the invention concerns agonists and antagonists of a native PRO polypeptide as defined herein. In a particular embodiment, the agonist or antagonist is an anti-PRO antibody or a small molecule.

[0061] In a further embodiment, the invention concerns a method of identifying agonists or antagonists to a PRO polypeptide which comprise contacting the PRO polypeptide with a candidate molecule and monitoring a biological activity mediated by said PRO polypeptide. Preferably, the PRO polypeptide is a native PRO polypeptide.

[0062] In a still further embodiment, the invention concerns a composition of matter comprising a PRO polypeptide, or an agonist or antagonist of a PRO polypeptide as herein described, or an anti-PRO antibody, in combination with a carrier. Optionally, the carrier is a pharmaceutically acceptable carrier.

[0063] Another embodiment of the present invention is directed to the use of a PRO polypeptide, or an agonist or antagonist thereof as herein before described, or an anti-PRO antibody, for the preparation of a medicament useful in the treatment of a condition which is responsive to the PRO polypeptide, an agonist or antagonist thereof or an anti-PRO antibody.

### BRIEF DESCRIPTION OF THE DRAWINGS

[0064] In the list of figures for the present application, specific cDNA sequences which are differentially expressed in differentiated macrophages as compared to normal undifferentiated monocytes are individually identified with a specific alphanumerical designation. These cDNA sequences are differentially expressed in monocytes that are specifically treated as described in Example 1 below. If start and/or stop codons have been identified in a cDNA sequence shown in the attached figures, they are shown in bold and underlined font, and the encoded polypeptide is shown in the next consecutive figure.

[0065] The FIGS. 1-2517 show the nucleic acids of the invention and their encoded PRO polypeptides. Also included, for convenience is a List of Figures attached hereto as Appendix A, which gives the figure number and the corresponding DNA or PRO number.

List of Figures

FIG. 1: DNA227321, NP_001335.1, 200046_at
FIG. 2: PRO37784
FIG. 3: DNA304680, HSPCB, 200064_at
FIG. 4: PRO71106
FIG. 5: DNA328347, NP_002146.1, 117_at
FIG. 6: PRO58142
FIG. 7A-B: DNA328348, MAP4, 243_g_at
FIG. 8: PRO84209
FIG. 9: DNA83128, NP_002979.1, 32128_at
FIG. 10: PRO2601
FIG. 11: DNA272223, NP_004444.1, 33494_at
FIG. 12: PRO60485
FIG. 13: DNA327522, NP_000396.1, 33646_g_at
FIG. 14: PRO2874
FIG. 15: DNA328349, NP_004556.1, 33760_at
FIG. 16: PRO84210
FIG. 17A-B: DNA328350, NP_056155.1, 34764_at
FIG. 18: PRO84211
FIG. 19: DNA328351, NP_006143.1, 35974_at
FIG. 20: PRO84212
FIG. 21: DNA328352, NP_004183.1, 36553_at
FIG. 22: PRO84213
FIG. 23: DNA271996, NP_004928.1, 36566_at
FIG. 24: PRO60271
FIG. 25: DNA326969, NP_036455.1, 36711_at
FIG. 26: PRO83282
FIG. 27: DNA304703, NP_005923.1, 36830_at
FIG. 28: PRO71129
FIG. 29: DNA328353, AAB72234.1, 37079_at
FIG. 30: PRO84214
FIG. 31: DNA103289, NP_006229.1, 37152_at
FIG. 32: PRO4619
FIG. 33A-B: DNA255096, NP_055449.1, 37384_at
FIG. 34: PRO50180
FIG. 35: DNA256295, NP_002310.1, 37796_at
FIG. 36: PRO51339
FIG. 37: DNA328354, PARVB, 37965_at
FIG. 38: PRO84215
FIG. 39: DNA53531, NP_001936.1, 38037_at
FIG. 40: PRO131
FIG. 41: DNA254127, NP_008925.1, 38241_at
FIG. 42: PRO49242
FIG. 43: DNA328355, NP_006471.2, 38290_at
FIG. 44: PRO84216
FIG. 45: DNA328356, BC013566, 39248_at
FIG. 46: PRO38028
FIG. 47: DNA328357, 1452321.2, 39582_at
FIG. 48: PRO84217
FIG. 49A-B: DNA328358, STK10, 40420_at
FIG. 50: PRO84218
FIG. 51A-B: DNA328359, BAA21572.1, 41386_i_at
FIG. 52: PRO84219
FIG. 53A-D: DNA328360, NP_055061.1, 41660_at
FIG. 54: PRO84220
FIG. 55: DNA327526, BC001698, 45288_at
FIG. 56: PRO83574
FIG. 57A-B: DNA328361, BAA92570.1, 47773_at
FIG. 58: PRO84221
FIG. 59: DNA328362, NP_060312.1, 48106_at
FIG. 60: PRO84222
FIG. 61: DNA328363, DNA328363, 52651_at
FIG. 62: PRO84685
FIG. 63: DNA328364, NP_068577.1, 52940_at
FIG. 64: PRO84223
FIG. 65A-B: DNA327528, BAB33338.1, 55081_at
FIG. 66: PRO83576
FIG. 67: DNA225650, NP_057246.1, 48825_at
FIG. 68: PRO36113
FIG. 69: DNA328365, NP_060541.1, 58780_s_at
FIG. 70: PRO84224
FIG. 71: DNA328366, NP_079233.1, 59375_at
FIG. 72: PRO84225
FIG. 73: DNA328367, NP_079108.2, 60471_at
FIG. 74: PRO84226
FIG. 75: DNA327876, NP_005081.1, 60528_at
FIG. 76: PRO83815
FIG. 77A-B: DNA328368, 1503444.3, 87100_at
FIG. 78: PRO84227
FIG. 79: DNA328369, BC007634, 90610_at
FIG. 80A-B: DNA328370, NP_001273.1,
200615_s_at
FIG. 81: PRO84228
FIG. 82: DNA323806, NP_075385.1, 200644_at
FIG. 83: PRO80555
FIG. 84: DNA327532, GLUL, 200648_s_at
FIG. 85: PRO71134
FIG. 86: DNA227055, NP_002625.1, 200658_s_at
FIG. 87: PRO37518
FIG. 88: DNA325702, NP_001771.1, 200663_at
FIG. 89: PRO283
FIG. 90: DNA83172, NP_003109.1, 200665_s_at
FIG. 91: PRO2120
FIG. 92: DNA328371, NP_004347.1, 200675_at
FIG. 93: PRO4866
FIG. 94A-B: DNA328372, 105551.7, 200685_at
FIG. 95: PRO84229
FIG. 96: DNA324633, BC000478, 200691_s_at
FIG. 97: PRO81277
FIG. 98: DNA324633, NP_004125.2, 200692_s_at
FIG. 99: PRO81277
FIG. 100: DNA88350, NP_000168.1, 200696_s_at
FIG. 101: PRO2758
FIG. 102: DNA328373, AB034747, 200704_at
FIG. 103: PRO84230
FIG. 104: DNA328374, NP_004853.1, 200706_s_at
FIG. 105: PRO84231
FIG. 106: DNA328375, NP_002071.1, 200708_at
FIG. 107: PRO80880
FIG. 108: DNA328376, NP_001210.1, 200755_s_at
FIG. 109: PRO1015
FIG. 110A-B: DNA269826, NP_003195.1,
200758_s_at
FIG. 111: PRO58228
FIG. 112: DNA325414, NP_001900.1, 200766_at
FIG. 113: PRO292
FIG. 114A-C: DNA188738, NP_002284.2, 200771_at
FIG. 115: PRO25580
FIG. 116: DNA328377, NP_003759.1, 200787_s_at
FIG. 117: PRO84232
FIG. 118: DNA270954, NP_001089.1, 200793_s_at
FIG. 119: PRO59285
FIG. 120: DNA272928, NP_055579.1, 200794_x_at
FIG. 121: PRO61012
FIG. 122A-B: DNA327536, BC017197, 200797_s_at
FIG. 123: PRO37003
FIG. 124: DNA287211, NP_002147.1, 200806_s_at
FIG. 125: PRO69492
FIG. 126: DNA326655, NP_002803.1, 200820_at
FIG. 127: PRO83005
FIG. 128A-B: DNA328378, AB032261, 200832_s_at
FIG. 129: PRO84233
FIG. 130: DNA103558, NP_005736.1, 200837_at
FIG. 131: PRO4885
FIG. 132: DNA196817, NP_001899.1, 200838_at
FIG. 133: PRO3344
FIG. 134A-B: DNA327537, NP_004437.1,
200842_s_at
FIG. 135: PRO83581
FIG. 136: DNA323982, NP_004896.1, 200844_s_at
FIG. 137: PRO80709
FIG. 138: DNA323876, NP_006612.2, 200850_s_at
FIG. 139: PRO80619
FIG. 140A-B: DNA228029, NP_055577.1, 200862_at
FIG. 141: PRO38492
FIG. 142: DNA328379, BC015869, 200878_at
FIG. 143: PRO84234
FIG. 144: DNA325584, NP_002005.1, 200895_s_at
FIG. 145: PRO59262
FIG. 146A-B: DNA274281, NP_036347.1,
200899_s_at
FIG. 147: PRO62204
FIG. 148: DNA226028, NP_002346.1, 200900_s_at
FIG. 149: PRO36491
FIG. 150: DNA326819, NP_000678.1, 200903_s_at
FIG. 151: PRO83152
FIG. 152: DNA328380, HSHLAEHCM, 200904_at
FIG. 153: DNA328381, NP_005507.1, 200905_x_at
FIG. 154: PRO84236
FIG. 155: DNA272695, NP_001722.1, 200920_s_at
FIG. 156: PRO60817
FIG. 157: DNA327255, NP_002385.2, 200924_s_at
FIG. 158: PRO57298
FIG. 159: DNA327540, NP_006818.1, 200929_at
FIG. 160: PRO38005
FIG. 161: DNA225878, NP_004334.1, 200935_at
FIG. 162: PRO36341
FIG. 163: DNA328382, 160963.2, 200941_at
FIG. 164: PRO84237
FIG. 165: DNA328383, NP_004956.3, 200944_s_at
FIG. 166: PRO84238
FIG. 167A-B: DNA287217, NP_001750.1,
200953_s_at
FIG. 168: PRO36766
FIG. 169: DNA328384, NP_036380.2, 200961_at
FIG. 170: PRO84239
FIG. 171: DNA328385, AK001310, 200972_at
FIG. 172: PRO730
FIG. 173: DNA326040, NP_005715.1, 200973_s_at
FIG. 174: PRO730
FIG. 175: DNA324110, NP_005908.1, 200978_at
FIG. 176: PRO4918
FIG. 177: DNA328386, NP_000602.1, 200983_x_at
FIG. 178: PRO2697
FIG. 179: DNA275408, NP_001596.1, 201000_at
FIG. 180: PRO63068
FIG. 181: DNA328387, NP_001760.1, 201005_at
FIG. 182: PRO4769
FIG. 183: DNA103593, NP_000174.1, 201007_at
FIG. 184: PRO4917
FIG. 185: DNA304713, NP_006463.2, 201008_s_at
FIG. 186: PRO71139
FIG. 187: DNA328388, BC010273, 201013_s_at
FIG. 188: PRO84240
FIG. 189: DNA328389, NP_006861.1, 201021_s_at
FIG. 190: PRO84241
FIG. 191: DNA328390, NP_002291.1, 201030_x_at
FIG. 192: PRO82116
FIG. 193: DNA196628, NP_005318.1, 201036_s_at
FIG. 194: PRO25105
FIG. 195: DNA287372, NP_002618.1, 201037_at
FIG. 196: PRO69632
FIG. 197: DNA328391, NP_004408.1, 201041_s_at
FIG. 198: PRO84242
FIG. 199: DNA196484, DNA196484, 201042_at
FIG. 200: DNA227143, NP_036400.1, 201050_at
FIG. 201: PRO37606
FIG. 202: DNA328392, 1500938.11, 201051_at
FIG. 203: PRO84243
FIG. 204: DNA328261, AF130103, 201060_x_at
FIG. 205: DNA325001, NP_002794.1, 201068_s_at
FIG. 206: PRO81592
FIG. 207: DNA328393, NP_001651.1, 201096_s_at
FIG. 208: PRO81010
FIG. 209: DNA328394, AF131738, 201103_x_at
FIG. 210A-B: DNA328395, NP_056198.1,
201104_x_at
FIG. 211: PRO84245
FIG. 212: DNA328396, NP_002076.1, 201106_at
FIG. 213: PRO84246
FIG. 214: DNA328397, NP_002622.1, 201118_at
FIG. 215: PRO84247
FIG. 216: DNA328398, NP_002204.1, 201125_s_at
FIG. 217: PRO34737
FIG. 218: DNA325398, NP_004083.2, 201135_at
FIG. 219: PRO81930
FIG. 220: DNA88520, NP_002501.1, 201141_at
FIG. 221: PRO2824
FIG. 222: DNA324480, NP_001544.1, 201163_s_at
FIG. 223: PRO81141
FIG. 224: DNA151802, NP_003661.1, 201169_s_at
FIG. 225: PRO12890
FIG. 226: DNA226662, NP_057043.1, 201175_at
FIG. 227: PRO37125
FIG. 228: DNA88066, NP_002328.1, 201186_at
FIG. 229: PRO2638
FIG. 230: DNA273342, NP_005887.1, 201193_at
FIG. 231: PRO61345
FIG. 232: DNA328399, NP_003000.1, 201194_at
FIG. 233: PRO84248
FIG. 234A-B: DNA103453, HUME16GEN,
201195_s_at
FIG. 235: PRO4780
FIG. 236: DNA328400, NP_003842.1, 201200_at
FIG. 237: PRO1409
FIG. 238: DNA327542, NP_000091.1, 201201_at
FIG. 239: PRO83582
FIG. 240: DNA103488, NP_002583.1, 201202_at
FIG. 241: PRO4815
FIG. 242: DNA328401, BC013678, 201212_at
FIG. 243A-B: DNA328402, NP_073713.1,
201220_x_at
FIG. 244: PRO84249
FIG. 245: DNA325380, NP_004995.1, 201226_at
FIG. 246: PRO81914
FIG. 247: DNA226615, NP_001668.1, 201242_s_at
FIG. 248: PRO37078
FIG. 249: DNA328403, NP_037462.1, 201243_s_at
FIG. 250: PRO84250
FIG. 251: DNA270950, NP_003182.1, 201263_at
FIG. 252: PRO59281
FIG. 253A-B: DNA328404, NP_003321.1, 201266_at
FIG. 254: PRO84251
FIG. 255: DNA97290, NP_002503.1, 201268_at
FIG. 256: PRO3637
FIG. 257: DNA325028, NP_001619.1, 201272_at
FIG. 258: PRO81617
FIG. 259: DNA328405, NP_112556.1, 201277_s_at
FIG. 260: PRO84252
FIG. 261: DNA328406, NP_001334.1, 201279_s_at
FIG. 262: PRO84253
FIG. 263: DNA328407, WSB1, 201296_s_at
FIG. 264: PRO84254
FIG. 265: DNA328408, NP_060713.1, 201308_s_at
FIG. 266: PRO84255
FIG. 267: DNA325595, NP_001966.1, 201313_at
FIG. 268: PRO38010
FIG. 269: DNA255078, NP_006426.1, 201315_x_at
FIG. 270: PRO50165
FIG. 271: DNA150781, NP_001414.1, 201324_at
FIG. 272: PRO12467
FIG. 273: DNA328409, NP_002075.2, 201348_at
FIG. 274: PRO81281
FIG. 275: DNA324475, NP_004172.2, 201387_s_at
FIG. 276: PRO81137
FIG. 277: DNA226353, NP_005769.1, 201395_at
FIG. 278: PRO36816
FIG. 279: DNA328410, NP_004519.1, 201403_s_at
FIG. 280: PRO60174
FIG. 281A-B: DNA328411, 1400253.2, 201408_at
FIG. 282: PRO84256
FIG. 283: DNA328412, NP_060428.1, 201411_s_at
FIG. 284: PRO84257
FIG. 285: DNA273517, NP_000169.1, 201415_at
FIG. 286: PRO61498
FIG. 287: DNA327550, NP_001959.1, 201435_s_at
FIG. 288: PRO81164
FIG. 289: DNA273396, DNA273396, 201449_at
FIG. 290: DNA325049, NP_005605.1, 201453_x_at
FIG. 291: PRO37938
FIG. 292: DNA274343, NP_000894.1, 201467_s_at
FIG. 293: PRO62259
FIG. 294: DNA328413, NP_004823.1, 201470_at
FIG. 295: PRO84258
FIG. 296: DNA328414, NP_003891.1, 201471_s_at
FIG. 297: PRO81346
FIG. 298: DNA103320, NP_002220.1, 201473_at
FIG. 299: PRO4650
FIG. 300: DNA88608, NP_002893.1, 201485_s_at
FIG. 301: PRO2864
FIG. 302: DNA304459, BC005020, 201489_at
FIG. 303: PRO37073
FIG. 304: DNA304459, NP_005720.1, 201490_s_at
FIG. 305: PRO37073
FIG. 306: DNA253807, NP_065390.1, 201502_s_at
FIG. 307: PRO49210
FIG. 308: DNA328415, BC006997, 201503_at
FIG. 309: PRO60207
FIG. 310: DNA328416, NP_002613.2, 201507_at
FIG. 311: PRO84259
FIG. 312: DNA271931, NP_005745.1, 201514_s_at
FIG. 313: PRO60207
FIG. 314A-B: DNA150463, NP_055635.1, 201519_at
FIG. 315: PRO12269
FIG. 316: DNA328417, ATP6V1F, 201527_at
FIG. 317: PRO84260
FIG. 318: DNA328418, NP_003398.1, 201531_at
FIG. 319: PRO84261
FIG. 320: DNA328419, NP_002779.1, 201532_at
FIG. 321: PRO84262
FIG. 322: DNA328420, BC002682, 201537_s_at
FIG. 323: PRO58245
FIG. 324: DNA88464, NP_005552.2, 201551_s_at
FIG. 325: PRO2804
FIG. 326A-B: DNA290226, NP_039234.1,
201559_s_at
FIG. 327: PRO70317
FIG. 328: DNA227071, NP_000260.1, 201577_at
FIG. 329: PRO37534
FIG. 330A-B: DNA227307, NP_009115.1,
201591_s_at
FIG. 331: PRO37770
FIG. 332: DNA255406, NP_005533.1, 201625_s_at
FIG. 333: PRO50473
FIG. 334A-B: DNA328421, 475621.10, 201646_at
FIG. 335: PRO51048
FIG. 336A-B: DNA220748, NP_000201.1, 201656_at
FIG. 337: PRO34726
FIG. 338: DNA269791, NP_001168.1, 201659_s_at
FIG. 339: PRO58197
FIG. 340A-B: DNA328422, NP_004448.1,
201661_s_at
FIG. 341: PRO84263
FIG. 342: DNA328423, NP_003245.1, 201666_at
FIG. 343: PRO2121
FIG. 344: DNA273090, NP_002347.4, 201670_s_at
FIG. 345: PRO61148
FIG. 346: DNA328424, NP_005142.1, 201672_s_at
FIG. 347: PRO59291
FIG. 348: DNA271223, NP_005070.1, 201689_s_at
FIG. 349: PRO59538
FIG. 350A-B: DNA323965, NP_002848.1,
201706_s_at
FIG. 351: PRO80695
FIG. 352: DNA270883, NP_001061.1, 201714_at
FIG. 353: PRO59218
FIG. 354A-B: DNA328425, NP_065207.2,
201722_s_at
FIG. 355: PRO84264
FIG. 356: DNA328426, NP_000582.1, 201743_at
FIG. 357: PRO384
FIG. 358: DNA150429, NP_002813.1, 201745_at
FIG. 359: PRO12769
FIG. 360: DNA272465, NP_004543.1, 201757_at
FIG. 361: PRO60713
FIG. 362: DNA328427, NP_061109.1, 201760_s_at
FIG. 363: PRO84265
FIG. 364: DNA287167, NP_006627.1, 201761_at
FIG. 365: PRO59136
FIG. 366: DNA323937, NP_005689.2, 201771_at
FIG. 367: PRO80670
FIG. 368: DNA88619, NP_002924.1, 201785_at
FIG. 369: PRO2871
FIG. 370A-B: DNA328428, NP_038479.1,
201798_s_at
FIG. 371: PRO84266
FIG. 372: DNA227563, NP_004946.1, 201801_s_at
FIG. 373: PRO38026
FIG. 374: DNA225896, NP_000109.1, 201808_s_at
FIG. 375: PRO36359
FIG. 376: DNA151017, NP_004835.1, 201810_s_at
FIG. 377: PRO12841
FIG. 378: DNA328429, NP_079106.2, 201818_at
FIG. 379: PRO81201
FIG. 380: DNA328430, NP_005496.2, 201819_at
FIG. 381: PRO84267
FIG. 382: DNA324015, NP_006326.1, 201821_s_at
FIG. 383: PRO80735
FIG. 384: DNA150650, NP_057086.1, 201825_s_at
FIG. 385: PRO12393
FIG. 386: DNA304710, NP_001531.1, 201841_s_at
FIG. 387: PRO71136
FIG. 388: DNA88450, NP_000226.1, 201847_at
FIG. 389: PRO2795
FIG. 390: DNA150725, NP_001738.1, 201850_at
FIG. 391: PRO12792
FIG. 392: DNA272066, NP_002931.1, 201872_s_at
FIG. 393: PRO60337
FIG. 394: DNA328431, NP_001817.1, 201897_s_at
FIG. 395: PRO45093
FIG. 396: DNA103214, NP_006057.1, 201900_s_at
FIG. 397: PRO4544
FIG. 398: DNA227112, NP_006397.1, 201923_at
FIG. 399: PRO37575
FIG. 400: DNA83046, NP_000565.1, 201926_s_at
FIG. 401: PRO2569
FIG. 402: DNA273014, NP_000117.1, 201931_at
FIG. 403: PRO61085
FIG. 404: DNA254147, NP_000512.1, 201944_at
FIG. 405: PRO49262
FIG. 406: DNA274167, NP_006422.1, 201946_s_at
FIG. 407: PRO62097
FIG. 408A-B: DNA327562, HSMEMD, 201951_at
FIG. 409A-B: DNA327563, NP_066945.1, 201963_at
FIG. 410: PRO83592
FIG. 411: DNA227290, NP_055861.1, 201965_s_at
FIG. 412: PRO37753
FIG. 413A-B: DNA328432, NP_005768.1, 201967_at
FIG. 414: PRO61793
FIG. 415A-B: DNA328433, ATP6V1A1,
201971_s_at
FIG. 416: PRO84268
FIG. 417: DNA327073, NP_036418.1, 201994_at
FIG. 418: PRO83365
FIG. 419: DNA226878, NP_000118.1, 201995_at
FIG. 420: PRO37341
FIG. 421A-D: DNA328434, NP_055816.2,
201996_s_at
FIG. 422: PRO84269
FIG. 423: DNA328435, NP_002481.1, 202001_s_at
FIG. 424: PRO60236
FIG. 425: DNA275246, NP_006102.1, 202003_s_at
FIG. 426: PRO62933
FIG. 427: DNA327841, NP_068813.1, 202005_at
FIG. 428: PRO12377
FIG. 429: DNA328436, 1171619.4, 202007_at
FIG. 430: PRO84270
FIG. 431: DNA327564, NP_000111.1, 202017_at
FIG. 432: PRO83593
FIG. 433: DNA328437, AF083441, 202021_x_at
FIG. 434: PRO84271
FIG. 435A-B: DNA270997, NP_005047.1,
202040_s_at
FIG. 436: PRO59326
FIG. 437A-B: DNA327565, NP_056392.1,
202052_s_at
FIG. 438: PRO83594
FIG. 439A-B: DNA327566, NP_000373.1,
202053_s_at
FIG. 440: PRO83595
FIG. 441: DNA226116, NP_002990.1, 202071_at
FIG. 442: PRO36579
FIG. 443A-B: DNA328438, 100983.30, 202073_at
FIG. 444: PRO84272
FIG. 445: DNA328439, NP_068815.1, 202074_s_at
FIG. 446: PRO84273
FIG. 447: DNA290272, NP_004898.1, 202081_at
FIG. 448: PRO70409
FIG. 449: DNA327569, NP_001903.1, 202087_s_at
FIG. 450: PRO2683
FIG. 451: DNA328440, NP_004517.1, 202107_s_at
FIG. 452: PRO84274
FIG. 453: DNA272777, NP_000276.1, 202108_at
FIG. 454: PRO60884
FIG. 455A-B: DNA328441, AL136139, 202149_at
FIG. 456: PRO0
FIG. 457: DNA328442, NP_006078.2, 202154_x_at
FIG. 458: PRO84275
FIG. 459A-C: DNA328443, NP_004371.1, 202160_at
FIG. 460: PRO84276
FIG. 461A-C: DNA271201, NP_005881.1,
202191_s_at
FIG. 462: PRO59518
FIG. 463: DNA328258, SLC16A1, 202236_s_at
FIG. 464: PRO84151
FIG. 465: DNA328444, MGC14458, 202246_s_at
FIG. 466: PRO84277
FIG. 467: DNA294794, NP_002861.1, 202252_at
FIG. 468: PRO70754
FIG. 469A-B: DNA227176, NP_056371.1,
202255_s_at
FIG. 470: PRO37639
FIG. 471: DNA325823, NP_055702.1, 202258_s_at
FIG. 472: PRO82289
FIG. 473: DNA256533, NP_006105.1, 202264_s_at
FIG. 474: PRO51565
FIG. 475: DNA328445, NP_057698.1, 202266_at
FIG. 476: PRO84278
FIG. 477: DNA328446, NP_003896.1, 202268_s_at
FIG. 478: PRO59821
FIG. 479: DNA328447, NP_000393.2, 202275_at
FIG. 480: PRO84279
FIG. 481: DNA304716, NP_510867.1, 202284_s_at
FIG. 482: PRO71142
FIG. 483: DNA270142, NP_005947.2, 202309_at
FIG. 484: PRO58531
FIG. 485: DNA328448, NP_000777.1, 202314_at
FIG. 486: PRO62362
FIG. 487: DNA325115, NP_001435.1, 202345_s_at
FIG. 488: PRO81689
FIG. 489: DNA106239, DNA106239, 202351_at
FIG. 490: DNA270502, NP_002807.1, 202352_s_at
FIG. 491: PRO58880
FIG. 492: DNA327074, FLJ21174, 202371_at
FIG. 493: PRO83366
FIG. 494: DNA149091, DNA149091, 202377_at
FIG. 495A-B: DNA151045, NP_005376.2,
202379_s_at
FIG. 496: PRO12587
FIG. 497A-B: DNA200236, NP_003807.1, 202381_at
FIG. 498: PRO34137
FIG. 499: DNA328449, NP_005462.1, 202382_s_at
FIG. 500: PRO60304
FIG. 501: DNA290234, NP_002914.1, 202388_at
FIG. 502: PRO70333
FIG. 503: DNA269766, NP_005646.1, 202393_s_at
FIG. 504: PRO58175
FIG. 505: DNA227612, NP_056230.1, 202427_s_at
FIG. 506: PRO38075
FIG. 507: DNA324171, NP_065438.1, 202428_x_at
FIG. 508: PRO60753
FIG. 509A-B: DNA327576, NP_000095.1,
202434_s_at
FIG. 510: PRO83600
FIG. 511A-D: DNA328450, NP_077719.1,
202443_x_at
FIG. 512: PRO84280
FIG. 513: DNA225809, NP_000387.1, 202450_s_at
FIG. 514: PRO36272
FIG. 515: DNA227921, NP_003789.1, 202468_s_at
FIG. 516: PRO38384
FIG. 517: DNA150942, HSY18007, 202475_at
FIG. 518: PRO12549
FIG. 519: DNA225566, NP_004744.1, 202481_at
FIG. 520: PRO36029
FIG. 521A-B: DNA103449, NP_008862.1,
202497_x_at
FIG. 522: PRO4776
FIG. 523: DNA328451, NP_000007.1, 202502_at
FIG. 524: PRO62139
FIG. 525A-B: DNA274893, NP_006282.1,
202510_s_at
FIG. 526: PRO62634
FIG. 527: DNA328452, NP_000394.1, 202528_at
FIG. 528: PRO63289
FIG. 529: DNA219229, NP_002189.1, 202531_at
FIG. 530: PRO34544
FIG. 531A-B: DNA274852, NP_004115.1,
202543_s_at
FIG. 532: PRO62605
FIG. 533: DNA328453, NP_003752.2, 202546_at
FIG. 534: PRO84281
FIG. 535A-B: DNA328454, NP_057525.1,
202551_s_at
FIG. 536: PRO4330
FIG. 537: DNA150817, NP_000840.1, 202554_s_at
FIG. 538: PRO12808
FIG. 539: DNA227994, NP_009107.1, 202562_s_at
FIG. 540: PRO38457
FIG. 541: DNA328455, AY007134, 202573_at
FIG. 542: PRO84282
FIG. 543: DNA323923, NP_001869.1, 202575_at
FIG. 544: PRO80657
FIG. 545: DNA328456, NP_000467.1, 202587_s_at
FIG. 546: PRO84283
FIG. 547: DNA328457, NP_036422.1, 202606_s_at
FIG. 548: PRO70421
FIG. 549: DNA103245, NP_002341.1, 202626_s_at
FIG. 550: PRO4575
FIG. 551: DNA83141, NP_000593.1, 202627_s_at
FIG. 552: PRO2604
FIG. 553: DNA254129, NP_006001.1, 202655_at
FIG. 554: PRO49244
FIG. 555: DNA270379, NP_002792.1, 202659_at
FIG. 556: PRO58763
FIG. 557: DNA326896, NP_003672.1, 202671_s_at
FIG. 558: PRO69486
FIG. 559: DNA289526, NP_004015.2, 202672_s_at
FIG. 560: PRO70282
FIG. 561: DNA273542, NP_002991.1, 202675_at
FIG. 562: PRO61522
FIG. 563: DNA328458, NP_037458.2, 202679_at
FIG. 564: PRO84284
FIG. 565: DNA84130, NP_003801.1, 202687_s_at
FIG. 566: PRO1096
FIG. 567: DNA271085, NP_004751.1, 202693_s_at
FIG. 568: PRO59409
FIG. 569A-B: DNA150467, NP_055513.1,
202699_s_at
FIG. 570: PRO12272
FIG. 571A-B: DNA328459, NP_004332.2, 202715_at
FIG. 572: PRO84285
FIG. 573: DNA273290, NP_002047.1, 202722_s_at
FIG. 574: PRO61300
FIG. 575: DNA328460, NP_004190.1, 202733_at
FIG. 576: PRO84286
FIG. 577: DNA150713, NP_006570.1, 202735_at
FIG. 578: PRO12082
FIG. 579A-B: DNA328461, 350230.2, 202741_at
FIG. 580: PRO84287
FIG. 581: DNA271973, NP_002722.1, 202742_s_at
FIG. 582: PRO60248
FIG. 583A-B: DNA150943, NP_036376.1,
202752_x_at
FIG. 584: PRO12550
FIG. 585A-C: DNA328462, HSA303079,
202759_s_at
FIG. 586: PRO84288
FIG. 587A-C: DNA328463, NP_009134.1,
202760_s_at
FIG. 588: PRO84289
FIG. 589: DNA226080, NP_001601.1, 202767_at
FIG. 590: PRO36543
FIG. 591A-B: DNA150977, NP_006723.1, 202768_at
FIG. 592: PRO12828
FIG. 593A-B: DNA328464, 977954.20, 202769_at
FIG. 594: PRO84290
FIG. 595: DNA226578, NP_004345.1, 202770_s_at
FIG. 596: PRO37041
FIG. 597A-B: DNA103521, NP_004163.1, 202800_at
FIG. 598: PRO4848
FIG. 599A-B: DNA327583, ABCC1, 202805_s_at
FIG. 600: PRO83604
FIG. 601: DNA328465, NP_005639.1, 202823_at
FIG. 602: PRO84291
FIG. 603: DNA225865, NP_004986.1, 202827_s_at
FIG. 604: PRO36328
FIG. 605: DNA225926, NP_000138.1, 202838_at
FIG. 606: PRO36389
FIG. 607: DNA328466, NP_004554.1, 202847_at
FIG. 608: PRO84292
FIG. 609: DNA103394, NP_004198.1, 202855_s_at
FIG. 610: PRO4722
FIG. 611: DNA275144, NP_000128.1, 202862_at
FIG. 612: PRO62852
FIG. 613: DNA328467, SP100, 202864_s_at
FIG. 614: PRO84293
FIG. 615: DNA287289, NP_058132.1, 202869_at
FIG. 616: PRO69559
FIG. 617: DNA328468, BC010960, 202872_at
FIG. 618: PRO84294
FIG. 619: DNA328469, NP_001686.1, 202874_s_at
FIG. 620: PRO84295
FIG. 621A-B: DNA255318, NP_036204.1,
202877_s_at
FIG. 622: PRO50388
FIG. 623A-B: DNA328470, NP_055620.1, 202909_at
FIG. 624: PRO84296
FIG. 625: DNA327584, NP_002955.2, 202917_s_at
FIG. 626: PRO80649
FIG. 627: DNA272425, NP_001489.1, 202923_s_at
FIG. 628: PRO60677
FIG. 629: DNA328471, ZMPSTE24, 202939_at
FIG. 630: PRO84297
FIG. 631: DNA269481, NP_001976.1, 202942_at
FIG. 632: PRO57901
FIG. 633: DNA328472, NP_000482.2, 202953_at
FIG. 634: PRO84298
FIG. 635A-B: DNA328473, NP_006473.1,
202968_s_at
FIG. 636: PRO84299
FIG. 637A-C: DNA328474, 1501914.1, 202969_at
FIG. 638: PRO84300
FIG. 639: DNA325915, ZAP128, 202982_s_at
FIG. 640: PRO82369
FIG. 641: DNA271272, NP_000366.1, 203031_s_at
FIG. 642: PRO59583
FIG. 643: DNA324049, FH, 203032_s_at
FIG. 644: PRO62607
FIG. 645A-B: DNA271865, NP_055566.1,
203037_s_at
FIG. 646: PRO60145
FIG. 647: DNA328475, LAMP2, 203042_at
FIG. 648: PRO84301
FIG. 649A-B: DNA328476, AF074331, 203058_s_at
FIG. 650: PRO84302
FIG. 651: DNA256830, NP_004815.1, 203100_s_at
FIG. 652: PRO51761
FIG. 653: DNA272867, NP_003960.1, 203109_at
FIG. 654: PRO60960
FIG. 655A-B: DNA227582, NP_000608.1,
203124_s_at
FIG. 656: PRO38045
FIG. 657: DNA328477, NP_003767.1, 203152_at
FIG. 658: PRO84303
FIG. 659A-B: DNA328478, NP_055720.2,
203158_s_at
FIG. 660: PRO84304
FIG. 661: DNA226136, NP_003246.1, 203167_at
FIG. 662: PRO36599
FIG. 663: DNA328479, NP_001473.1, 203178_at
FIG. 664: PRO84305
FIG. 665A-C: DNA328480, NP_001990.1, 203184_at
FIG. 666: PRO84306
FIG. 667A-B: DNA271010, NP_055552.1, 203185_at
FIG. 668: PRO59339
FIG. 669: DNA270448, NP_002487.1, 203189_s_at
FIG. 670: PRO58827
FIG. 671A-B: DNA328481, MTMR2, 203211_s_at
FIG. 672: PRO84307
FIG. 673A-C: DNA328482, NP_000426.1,
203238_s_at
FIG. 674: PRO84308
FIG. 675: DNA328483, NP_061163.1, 203255_at
FIG. 676: PRO84309
FIG. 677: DNA227127, NP_003571.1, 203269_at
FIG. 678: PRO37590
FIG. 679: DNA328484, UNC119, 203271_s_at
FIG. 680: PRO84310
FIG. 681: DNA302020, NP_005564.1, 203276_at
FIG. 682: PRO70993
FIG. 683A-B: DNA328485, BHC80, 203278_s_at
FIG. 684: PRO84311
FIG. 685: DNA328486, NP_000149.1, 203282_at
FIG. 686: PRO60119
FIG. 687: DNA328487, AF251295, 203299_s_at
FIG. 688: PRO84312
FIG. 689: DNA328488, NP_003907.2, 203300_x_at
FIG. 690: PRO84313
FIG. 691: DNA328489, NP_006511.1, 203303_at
FIG. 692: PRO84314
FIG. 693A-B: DNA328490, NP_000120.1, 203305_at
FIG. 694: PRO84315
FIG. 695: DNA327593, NP_006205.1, 203335_at
FIG. 696: PRO59733
FIG. 697: DNA328491, ICAP-1A, 203336_s_at
FIG. 698: PRO61323
FIG. 699A-B: DNA328492, NP_056125.1,
203354_s_at
FIG. 700: PRO84316
FIG. 701: DNA328493, NP_008957.1, 203367_at
FIG. 702: PRO84317
FIG. 703: DNA328494, RPS6KA1, 203379_at
FIG. 704: PRO84318
FIG. 705: DNA274960, NP_008856.1, 203380_x_at
FIG. 706: PRO62694
FIG. 707: DNA88084, NP_000032.1, 203381_s_at
FIG. 708: PRO2644
FIG. 709A-B: DNA254616, NP_004473.1,
203397_s_at
FIG. 710: PRO49718
FIG. 711: DNA326892, NP_003711.1, 203405_at
FIG. 712: PRO83213
FIG. 713: DNA323927, NP_005563.1, 203411_s_at
FIG. 714: PRO80660
FIG. 715: DNA151037, NP_036461.1, 203414_at
FIG. 716: PRO12586
FIG. 717: DNA273410, NP_004036.1, 203454_s_at
FIG. 718: PRO61409
FIG. 719: DNA328495, NP_055578.1, 203465_at
FIG. 720: PRO58967
FIG. 721: DNA328496, NP_002428.1, 203466_at
FIG. 722: PRO80786
FIG. 723A-B: DNA255622, NP_009187.1,
203472_s_at
FIG. 724: PRO50686
FIG. 725A-C: DNA328497, NP_005493.1,
203504_s_at
FIG. 726: PRO84319
FIG. 727A-C: DNA328498, AF285167, 203505_at
FIG. 728: PRO84320
FIG. 729A-B: DNA188400, NP_001057.1, 203508_at
FIG. 730: PRO21928
FIG. 731A-B: DNA328499, NP_003096.1, 203509_at
FIG. 732: PRO84321
FIG. 733: DNA272911, NP_006545.1, 203517_at
FIG. 734: PRO60997
FIG. 735A-D: DNA328500, NP_000072.1,
203518_at
FIG. 736: PRO84322
FIG. 737A-B: DNA103296, NP_006369.1, 203528_at
FIG. 738: PRO4626
FIG. 739: DNA323910, NP_002956.1, 203535_at
FIG. 740: PRO80648
FIG. 741A-B: DNA272399, NP_001197.1,
203543_s_at
FIG. 742: PRO60653
FIG. 743: DNA328501, NP_076984.1, 203545_at
FIG. 744: PRO84323
FIG. 745: DNA88453, NP_000228.1, 203548_s_at
FIG. 746: PRO2797
FIG. 747: DNA328502, NP_006566.2, 203553_s_at
FIG. 748: PRO84324
FIG. 749: DNA328503, NP_000272.1, 203557_s_at
FIG. 750: PRO10850
FIG. 751: DNA327594, NP_003869.1, 203560_at
FIG. 752: PRO83611
FIG. 753: DNA225916, NP_067674.1, 203561_at
FIG. 754: PRO36379
FIG. 755: DNA273676, NP_055488.1, 203584_at
FIG. 756: PRO61644
FIG. 757: DNA83085, NP_000751.1, 203591_s_at
FIG. 758: PRO2583
FIG. 759: DNA271003, NP_003720.1, 203594_at
FIG. 760: PRO59332
FIG. 761A-B: DNA328504, 1400155.1, 203608_at
FIG. 762: PRO84325
FIG. 763: DNA328505, NP_002484.1, 203613_s_at
FIG. 764: PRO62117
FIG. 765: DNA328506, NP_001046.1, 203615_x_at
FIG. 766: PRO84326
FIG. 767: DNA225774, NP_005079.1, 203624_at
FIG. 768: PRO36237
FIG. 769: DNA254642, NP_004100.1, 203646_at
FIG. 770: PRO49743
FIG. 771: DNA328507, NP_006395.1, 203650_at
FIG. 772: PRO4761
FIG. 773A-B: DNA272998, NP_055548.1, 203651_at
FIG. 774: PRO61070
FIG. 775: DNA328508, NP_003368.1, 203683_s_at
FIG. 776: PRO35975
FIG. 777: DNA255298, NP_004394.1, 203695_s_at
FIG. 778: PRO50371
FIG. 779: DNA227020, NP_001416.1, 203729_at
FIG. 780: PRO37483
FIG. 781: DNA328509, NP_006739.1, 203760_s_at
FIG. 782: PRO57996
FIG. 783: DNA328510, NP_055066.1, 203775_at
FIG. 784: PRO84327
FIG. 785A-B: DNA194602, NP_006370.1,
203789_s_at
FIG. 786: PRO23944
FIG. 787: DNA328511, NP_031397.1, 203825_at
FIG. 788: PRO57838
FIG. 789A-B: DNA328512, NP_005772.2,
203839_s_at
FIG. 790: PRO84328
FIG. 791A-B: DNA272451, HSU86453, 203879_at
FIG. 792: PRO60700
FIG. 793: DNA82429, NP_003011.1, 203889_at
FIG. 794: PRO2558
FIG. 795: DNA328513, NP_057367.1, 203893_at
FIG. 796: PRO37815
FIG. 797: DNA150974, NP_005684.1, 203920_at
FIG. 798: PRO12224
FIG. 799: DNA271676, NP_002052.1, 203925_at
FIG. 800: PRO59961
FIG. 801: DNA88239, NP_004985.1, 203936_s_at
FIG. 802: PRO2711
FIG. 803: DNA227232, NP_001850.1, 203971_at
FIG. 804: PRO37695
FIG. 805: DNA328514, NP_005186.1, 203973_s_at
FIG. 806: PRO84329
FIG. 807: DNA328515, NP_000775.1, 203979_at
FIG. 808: PRO84330
FIG. 809: DNA327608, NP_001433.1, 203980_at
FIG. 810: PRO83617
FIG. 811: DNA328516, NP_005833.1, 204011_at
FIG. 812: PRO12323
FIG. 813: DNA328517, NP_003558.1, 204032_at
FIG. 814: PRO84331
FIG. 815: DNA226342, NP_000305.1, 204054_at
FIG. 816: PRO36805
FIG. 817: DNA327609, 1448428.2, 204058_at
FIG. 818: PRO83618
FIG. 819: DNA328518, ME1, 204059_s_at
FIG. 820: PRO84332
FIG. 821: DNA226737, NP_004576.1, 204070_at
FIG. 822: PRO37200
FIG. 823A-C: DNA328519, NP_075463.1,
204072_s_at
FIG. 824: PRO84333
FIG. 825: DNA328520, NP_079353.1, 204080_at
FIG. 826: PRO84334
FIG. 827A-B: DNA150739, NP_006484.1,
204084_s_at
FIG. 828: PRO12442
FIG. 829: DNA227130, NP_002551.1, 204088_at
FIG. 830: PRO37593
FIG. 831: DNA328521, NP_003069.1, 204099_at
FIG. 832: PRO62553
FIG. 833: DNA328522, NP_001769.2, 204118_at
FIG. 834: PRO2696
FIG. 835: DNA328523, NP_006712.1, 204119_s_at
FIG. 836: PRO84335
FIG. 837: DNA328524, NP_057097.1, 204125_at
FIG. 838: PRO84336
FIG. 839: DNA328525, BC021224, 204131_s_at
FIG. 840: PRO84337
FIG. 841: DNA103532, NP_003263.1, 204137_at
FIG. 842: PRO4859
FIG. 843: DNA324816, NP_001060.1, 204141_at
FIG. 844: PRO81429
FIG. 845: DNA270524, NP_059982.1, 204142_at
FIG. 846: PRO58901
FIG. 847: DNA328526, NP_000841.1, 204149_s_at
FIG. 848: PRO37856
FIG. 849A-B: DNA150497, DNA150497,
204155_s_at
FIG. 850: PRO12296
FIG. 851A-B: DNA328527, NP_055751.1,
204160_s_at
FIG. 852: PRO4351
FIG. 853: DNA328528, MLC1SA, 204173_at
FIG. 854: PRO60636
FIG. 855: DNA328529, NP_001620.2, 204174_at
FIG. 856: PRO49814
FIG. 857: DNA226380, NP_001765.1, 204192_at
FIG. 858: PRO4695
FIG. 859: DNA273070, NP_005189.2, 204193_at
FIG. 860: PRO70107
FIG. 861: DNA227514, NP_000152.1, 204224_s_at
FIG. 862: PRO37977
FIG. 863: DNA270434, NP_006434.1, 204238_s_at
FIG. 864: PRO58814
FIG. 865: DNA307936, NP_004926.1, 204247_s_at
FIG. 866: PRO71356
FIG. 867A-B: DNA188734, NP_001261.1, 204258_at
FIG. 868: PRO22296
FIG. 869: DNA226577, NP_071390.1, 204265_s_at
FIG. 870: PRO37040
FIG. 871: DNA273802, NP_066950.1, 204285_s_at
FIG. 872: PRO61763
FIG. 873: DNA328530, NP_009198.2, 204328_at
FIG. 874: PRO24118
FIG. 875: DNA328531, NP_037542.1, 204348_s_at
FIG. 876: PRO84338
FIG. 877: DNA328532, LIMK1, 204357_s_at
FIG. 878: PRO84339
FIG. 879: DNA225750, NP_000254.1, 204360_s_at
FIG. 880: PRO36213
FIG. 881: DNA328533, NP_003647.1, 204392_at
FIG. 882: PRO84340
FIG. 883: DNA272469, NP_005299.1, 204396_s_at
FIG. 884: PRO60717
FIG. 885: DNA226462, NP_002241.1, 204401_at
FIG. 886: PRO36925
FIG. 887: DNA225756, NP_001636.1, 204416_x_at
FIG. 888: PRO36219
FIG. 889: DNA226286, NP_001657.1, 204425_at
FIG. 890: PRO36749
FIG. 891A-B: DNA88476, NP_002429.1, 204438_at
FIG. 892: PRO2811
FIG. 893: DNA150972, NP_005252.1, 204472_at
FIG. 894: PRO12162
FIG. 895: DNA194652, NP_001187.1, 204493_at
FIG. 896: PRO23974
FIG. 897: DNA328534, NP_056307.1, 204494_s_at
FIG. 898: PRO84341
FIG. 899: DNA328254, BC002678, 204517_at
FIG. 900: PRO11581
FIG. 901: DNA328254, NP_000934.1, 204518_s_at
FIG. 902: PRO11581
FIG. 903A-B: DNA328535, NP_009147.1, 204544_at
FIG. 904: PRO60044
FIG. 905: DNA225993, NP_000646.1, 204563_at
FIG. 906: PRO36456
FIG. 907: DNA287284, NP_060943.1, 204565_at
FIG. 908: PRO59915
FIG. 909: DNA151910, NP_004906.2, 204567_s_at
FIG. 910: PRO12754
FIG. 911: DNA270564, NP_004499.1, 204615_x_at
FIG. 912: PRO58939
FIG. 913: DNA328536, 1099945.20, 204619_s_at
FIG. 914: PRO84342
FIG. 915A-D: DNA328537, NP_004376.2,
204620_s_at
FIG. 916: PRO84343
FIG. 917: DNA151048, NP_006177.1, 204621_s_at
FIG. 918: PRO12850
FIG. 919A-B: DNA328538, 351122.2, 204627_s_at
FIG. 920: PRO84344
FIG. 921A-B: DNA88429, NP_000203.1,
204628_s_at
FIG. 922: PRO2344
FIG. 923: DNA226079, NP_001602.1, 204638_at
FIG. 924: PRO36542
FIG. 925: DNA272078, NP_003019.1, 204657_s_at
FIG. 926: PRO60348
FIG. 927: DNA227425, NP_001038.1, 204675_at
FIG. 928: PRO37888
FIG. 929A-B: DNA328539, NP_000121.1,
204713_s_at
FIG. 930: PRO84345
FIG. 931: DNA328540, NP_006144.1, 204725_s_at
FIG. 932: PRO12168
FIG. 933A-B: DNA325192, NP_038203.1,
204744_s_at
FIG. 934: PRO81753
FIG. 935: DNA328541, NP_004503.1, 204773_at
FIG. 936: PRO4843
FIG. 937: DNA328542, NP_055025.1, 204774_at
FIG. 938: PRO2577
FIG. 939: DNA327050, NP_009199.1, 204787_at
FIG. 940: PRO34043
FIG. 941: DNA328543, NP_005883.1, 204789_at
FIG. 942: PRO84346
FIG. 943: DNA272121, NP_005895.1, 204790_at
FIG. 944: PRO60391
FIG. 945: DNA324799, NP_061823.1, 204806_x_at
FIG. 946: PRO81414
FIG. 947: DNA154704, DNA154704, 204807_at
FIG. 948: DNA328544, NP_006673.1, 204834_at
FIG. 949: PRO84347
FIG. 950: DNA225661, NP_001944.1, 204858_s_at
FIG. 951: PRO36124
FIG. 952: DNA328545, NP_064525.1, 204859_s_at
FIG. 953: PRO84348
FIG. 954A-B: DNA227629, NP_004527.1,
204860_s_at
FIG. 955: PRO38092
FIG. 956: DNA328546, NP_005249.1, 204867_at
FIG. 957: PRO84349
FIG. 958: DNA255993, NP_008936.1, 204872_at
FIG. 959: PRO51044
FIG. 960: DNA273666, NP_003349.1, 204881_s_at
FIG. 961: PRO61634
FIG. 962A-B: DNA76503, NP_001549.1, 204912_at
FIG. 963: PRO2536
FIG. 964: DNA328547, TLR2, 204924_at
FIG. 965: PRO208
FIG. 966: DNA228014, NP_002153.1, 204949_at
FIG. 967: PRO38477
FIG. 968: DNA328548, NP_006298.1, 204955_at
FIG. 969: PRO2618
FIG. 970: DNA103283, NP_002423.1, 204959_at
FIG. 971: PRO4613
FIG. 972: DNA227091, NP_000256.1, 204961_s_at
FIG. 973: PRO37554
FIG. 974A-B: DNA328549, NP_002897.1,
204969_s_at
FIG. 975: PRO84350
FIG. 976: DNA328301, NP_005204.1, 204971_at
FIG. 977: PRO70371
FIG. 978A-B: DNA328550, NP_001439.2,
204983_s_at
FIG. 979: PRO937
FIG. 980: DNA269665, NP_002454.1, 204994_at
FIG. 981: PRO58076
FIG. 982A-B: DNA273686, NP_055520.1, 205003_at
FIG. 983: PRO61653
FIG. 984: DNA272427, NP_004799.1, 205005_s_at
FIG. 985: PRO60679
FIG. 986: DNA194830, NP_055437.1, 205011_at
FIG. 987: PRO24094
FIG. 988: DNA328551, NP_003823.1, 205048_s_at
FIG. 989: PRO84351
FIG. 990A-B: DNA328552, NP_055886.1,
205068_s_at
FIG. 991: PRO84352
FIG. 992: DNA328553, NP_061944.1, 205070_at
FIG. 993: PRO84353
FIG. 994: DNA194627, NP_003051.1, 205074_at
FIG. 995: PRO23962
FIG. 996: DNA272181, NP_006688.1, 205076_s_at
FIG. 997: PRO60446
FIG. 998: DNA254216, NP_002020.1, 205119_s_at
FIG. 999: PRO49328
FIG. 1000: DNA299899, NP_002148.1, 205133_s_at
FIG. 1001: PRO62760
FIG. 1002: DNA328554, NP_038202.1, 205147_x_at
FIG. 1003: PRO84354
FIG. 1004: DNA328555, NP_001241.1, 205153_s_at
FIG. 1005: PRO34457
FIG. 1006: DNA80896, NP_001100.1, 205180_s_at
FIG. 1007: PRO1686
FIG. 1008: DNA328556, NP_004568.1, 205194_s_at
FIG. 1009: PRO84355
FIG. 1010: DNA273535, NP_004217.1, 205214_at
FIG. 1011: PRO61515
FIG. 1012: DNA93504, NP_006009.1, 205220_at
FIG. 1013: PRO4923
FIG. 1014: DNA325255, NP_001994.2, 205237_at
FIG. 1015: PRO1910
FIG. 1016: DNA327634, NP_005129.1, 205241_at
FIG. 1017: PRO83636
FIG. 1018: DNA227081, NP_000390.2, 205249_at
FIG. 1019: PRO37544
FIG. 1020: DNA328557, NP_001098.1, 205260_s_at
FIG. 1021: PRO84356
FIG. 1022: DNA328558, BC016618, 205269_at
FIG. 1023: PRO84357
FIG. 1024: DNA328559, NP_005556.1, 205270_s_at
FIG. 1025: PRO84358
FIG. 1026A-B: DNA227505, NP_003670.1,
205306_x_at
FIG. 1027: PRO37968
FIG. 1028: DNA325783, NP_002558.1, 205353_s_at
FIG. 1029: PRO59001
FIG. 1030: DNA88215, NP_001919.1, 205382_s_at
FIG. 1031: PRO2703
FIG. 1032: DNA328560, NP_003650.1, 205401_at
FIG. 1033: PRO84359
FIG. 1034: DNA328561, NP_004624.1, 205403_at
FIG. 1035: PRO2019
FIG. 1036: DNA327638, NP_005516.1, 205404_at
FIG. 1037: PRO83639
FIG. 1038: DNA328562, NP_000010.1, 205412_at
FIG. 1039: PRO84360
FIG. 1040A-B: DNA328563, NP_005329.2,
205425_at
FIG. 1041: PRO81554
FIG. 1042: DNA328564, HPCAL1, 205462_s_at
FIG. 1043: PRO84361
FIG. 1044: DNA196825, NP_005105.1, 205466_s_at
FIG. 1045: PRO25266
FIG. 1046: DNA328565, NP_057070.1, 205474_at
FIG. 1047: PRO84362
FIG. 1048: DNA226153, NP_002649.1, 205479_s_at
FIG. 1049: PRO36616
FIG. 1050: DNA287224, NP_005092.1, 205483_s_at
FIG. 1051: PRO69503
FIG. 1052: DNA328566, NP_060446.1, 205510_s_at
FIG. 1053: PRO84363
FIG. 1054: DNA328567, NP_006797.2, 205548_s_at
FIG. 1055: PRO84364
FIG. 1056: DNA227535, NP_066190.1, 205568_at
FIG. 1057: PRO37998
FIG. 1058A-B: DNA327643, NP_055712.1,
205594_at
FIG. 1059: PRO83644
FIG. 1060A-C: DNA328568, NP_006720.1,
205603_s_at
FIG. 1061: PRO59731
FIG. 1062: DNA324324, NP_000679.1, 205633_s_at
FIG. 1063: PRO81000
FIG. 1064: DNA328569, NP_077274.1, 205634_x_at
FIG. 1065: PRO84365
FIG. 1066: DNA88076, NP_001628.1, 205639_at
FIG. 1067: PRO2640
FIG. 1068: DNA287317, NP_003724.1, 205660_at
FIG. 1069: PRO69582
FIG. 1070: DNA328570, NP_004040.1, 205681_at
FIG. 1071: PRO37843
FIG. 1072: DNA327644, NP_060395.2, 205684_s_at
FIG. 1073: PRO83645
FIG. 1074: DNA150621, NP_036595.1, 205704_s_at
FIG. 1075: PRO12374
FIG. 1076: DNA328571, NP_001254.1, 205709_s_at
FIG. 1077: PRO84366
FIG. 1078: DNA88106, NP_004325.1, 205715_at
FIG. 1079: PRO2655
FIG. 1080: DNA270401, NP_003140.1, 205743_at
FIG. 1081: PRO58784
FIG. 1082: DNA275620, NP_000628.1, 205770_at
FIG. 1083: PRO63244
FIG. 1084: DNA88187, NP_001757.1, 205789_at
FIG. 1085: PRO2689
FIG. 1086: DNA76517, NP_002176.1, 205798_at
FIG. 1087: PRO2541
FIG. 1088A-B: DNA271915, NP_056191.1,
205801_s_at
FIG. 1089: PRO60192
FIG. 1090: DNA194766, NP_079504.1, 205804_s_at
FIG. 1091: PRO24046
FIG. 1092: DNA328572, NP_004309.2, 205808_at
FIG. 1093: PRO84367
FIG. 1094: DNA328573, NP_006761.1, 205819_at
FIG. 1095: PRO1559
FIG. 1096A-B: DNA328574, NP_004963.1,
205842_s_at
FIG. 1097: PRO84368
FIG. 1098: DNA327651, NP_005612.1, 205863_at
FIG. 1099: PRO83649
FIG. 1100: DNA328575, NP_071754.2, 205872_x_at
FIG. 1101: PRO84369
FIG. 1102A-B: DNA220746, NP_000876.1,
205884_at
FIG. 1103: PRO34724
FIG. 1104A-B: DNA273962, NP_055605.1,
205888_s_at
FIG. 1105: PRO61910
FIG. 1106: DNA93423, NP_000667.1, 205891_at
FIG. 1107: PRO4944
FIG. 1108: DNA328576, HSU20350, 205898_at
FIG. 1109: PRO4940
FIG. 1110: DNA328577, NP_003905.1, 205899_at
FIG. 1111: PRO59588
FIG. 1112A-B: DNA196549, NP_003034.1,
205920_at
FIG. 1113: PRO25031
FIG. 1114: DNA328578, NP_004656.2, 205922_at
FIG. 1115: PRO7426
FIG. 1116A-B: DNA270867, NP_006217.1,
205934_at
FIG. 1117: PRO59203
FIG. 1118: DNA76516, NP_000556.1, 205945_at
FIG. 1119: PRO2022
FIG. 1120: DNA196439, NP_003865.1, 205988_at
FIG. 1121: PRO24934
FIG. 1122: DNA36722, NP_000576.1, 205992_s_at
FIG. 1123: PRO77
FIG. 1124: DNA328579, BC020082, 206020_at
FIG. 1125: PRO84370
FIG. 1126: DNA328580, HSU27699, 206058_at
FIG. 1127: PRO4627
FIG. 1128: DNA328581, NP_002122.1, 206074_s_at
FIG. 1129: PRO34536
FIG. 1130: DNA328582, NP_001865.1, 206100_at
FIG. 1131: PRO84371
FIG. 1132: DNA226105, NP_002925.1, 206111_at
FIG. 1133: PRO36568
FIG. 1134: DNA225764, NP_000037.1, 206129_s_at
FIG. 1135: PRO36227
FIG. 1136: DNA328583, ASGR2, 206130_s_at
FIG. 1137: PRO84372
FIG. 1138: DNA327656, NP_055294.1, 206134_at
FIG. 1139: PRO36117
FIG. 1140A-B: DNA271837, NP_055497.1,
206135_at
FIG. 1141: PRO60117
FIG. 1142: DNA328584, NP_001148.1, 206200_s_at
FIG. 1143: PRO4833
FIG. 1144: DNA226058, NP_005075.1, 206214_at
FIG. 1145: PRO36521
FIG. 1146: DNA218691, NP_003832.1, 206222_at
FIG. 1147: PRO34469
FIG. 1148A-C: DNA328585, AF286028,
206239_s_at
FIG. 1149: DNA328586, NP_002369.2, 206267_s_at
FIG. 1150: PRO84373
FIG. 1151: DNA328587, NP_002612.1, 206380_s_at
FIG. 1152: PRO2854
FIG. 1153: DNA255814, NP_005840.1, 206420_at
FIG. 1154: PRO50869
FIG. 1155: DNA328588, NP_060823.1, 206500_s_at
FIG. 1156: PRO84374
FIG. 1157: DNA270444, NP_004824.1, 206513_at
FIG. 1158: PRO58823
FIG. 1159: DNA196614, NP_001158.1, 206536_s_at
FIG. 1160: PRO25091
FIG. 1161: DNA270019, NP_036351.1, 206538_at
FIG. 1162: PRO58414
FIG. 1163: DNA327663, NP_006771.1, 206565_x_at
FIG. 1164: PRO83654
FIG. 1165: DNA327665, NP_002099.1, 206643_at
FIG. 1166: PRO83655
FIG. 1167: DNA328589, BCL2L1, 206665_s_at
FIG. 1168: PRO83141
FIG. 1169: DNA328590, C6orf32, 206707_x_at
FIG. 1170: PRO84375
FIG. 1171A-B: DNA88191, NP_001234.1, 206729_at
FIG. 1172: PRO2691
FIG. 1173: DNA327669, NP_000914.1, 206792_x_at
FIG. 1174: PRO83657
FIG. 1175: DNA270107, NP_006856.1, 206881_s_at
FIG. 1176: PRO58498
FIG. 1177: DNA256561, NP_062550.1, 206914_at
FIG. 1178: PRO51592
FIG. 1179: DNA328591, NP_006635.1, 206976_s_at
FIG. 1180: PRO84376
FIG. 1181A-B: DNA227659, NP_000570.1,
206991_s_at
FIG. 1182: PRO38122
FIG. 1183: DNA188289, NP_001548.1, 207008_at
FIG. 1184: PRO21820
FIG. 1185: DNA328592, AB015228, 207016_s_at
FIG. 1186: PRO84377
FIG. 1187: DNA227531, NP_004722.1, 207057_at
FIG. 1188: PRO37994
FIG. 1189: DNA327673, NP_002188.1, 207071_s_at
FIG. 1190: PRO83660
FIG. 1191A-B: DNA328593, CLAS1, 207075_at
FIG. 1192: PRO84378
FIG. 1193A-B: DNA328594, CSF1, 207082_at
FIG. 1194: PRO84379
FIG. 1195: DNA88291, NP_001965.1, 207111_at
FIG. 1196: PRO2729
FIG. 1197A-B: DNA327674, NP_002739.1,
207121_s_at
FIG. 1198: PRO83661
FIG. 1199: DNA328595, NP_001045.1, 207122_x_at
FIG. 1200: PRO84380
FIG. 1201: DNA226996, NP_000239.1, 207233_s_at
FIG. 1202: PRO37459
FIG. 1203A-B: DNA226536, NP_003225.1,
207332_s_at
FIG. 1204: PRO36999
FIG. 1205: DNA227668, NP_000158.1, 207387_s_at
FIG. 1206: PRO38131
FIG. 1207: DNA328596, DEGS, 207431_s_at
FIG. 1208: PRO37741
FIG. 1209: DNA274829, NP_003653.1, 207469_s_at
FIG. 1210: PRO62588
FIG. 1211: DNA328597, NP_001680.1, 207507_s_at
FIG. 1212: PRO84381
FIG. 1213: DNA328598, NP_055146.1, 207528_s_at
FIG. 1214: PRO23276
FIG. 1215: DNA328599, NFKB2, 207535_s_at
FIG. 1216: PRO84382
FIG. 1217: DNA328600, NP_004839.1, 207571_x_at
FIG. 1218: PRO84383
FIG. 1219: DNA328601, NP_056490.1, 207574_s_at
FIG. 1220: PRO84384
FIG. 1221: DNA328602, NP_002261.1, 207657_x_at
FIG. 1222: PRO84385
FIG. 1223: DNA226278, NP_005865.1, 207697_x_at
FIG. 1224: PRO36741
FIG. 1225: DNA227395, NP_005331.1, 207721_x_at
FIG. 1226: PRO37858
FIG. 1227: DNA325654, NP_054752.1, 207761_s_at
FIG. 1228: PRO4348
FIG. 1229: DNA226930, NP_004152.1, 207791_s_at
FIG. 1230: PRO37393
FIG. 1231: DNA328603, NP_000304.1, 207808_s_at
FIG. 1232: PRO84386
FIG. 1233: DNA328604, NP_001174.2, 207809_s_at
FIG. 1234: PRO84387
FIG. 1235: DNA327682, NP_001905.1, 207843_x_at
FIG. 1236: PRO83666
FIG. 1237: DNA36708, NP_002081.1, 207850_at
FIG. 1238: PRO34256
FIG. 1239: DNA199788, NP_002981.1, 207861_at
FIG. 1240: PRO34107
FIG. 1241: DNA328605, ST7, 207871_s_at
FIG. 1242: PRO84388
FIG. 1243: DNA256523, NP_006854.1, 207872_s_at
FIG. 1244: PRO51557
FIG. 1245: DNA218651, NP_003798.1, 207907_at
FIG. 1246: PRO34447
FIG. 1247: DNA275286, NP_009205.1, 208002_s_at
FIG. 1248: PRO62967
FIG. 1249A-B: DNA328606, CBFA2T3, 208056_s_at
FIG. 1250: PRO84389
FIG. 1251A-B: DNA328607, NP_003639.1,
208072_s_at
FIG. 1252: PRO84390
FIG. 1253: DNA327685, NP_067586.1, 208074_s_at
FIG. 1254: PRO83669
FIG. 1255: DNA328608, NP_006264.2, 208075_s_at
FIG. 1256: PRO9932
FIG. 1257: DNA255376, NP_110423.1, 208091_s_at
FIG. 1258: PRO50444
FIG. 1259: DNA327686, NP_005898.1, 208116_s_at
FIG. 1260: PRO83670
FIG. 1261A-B: DNA328609, NP_109592.1,
208121_s_at
FIG. 1262: PRO84391
FIG. 1263: DNA328610, NP_112601.1, 208146_s_at
FIG. 1264: PRO84392
FIG. 1265A-B: DNA226706, NP_003777.2,
208161_s_at
FIG. 1266: PRO37169
FIG. 1267: DNA328611, RASGRP2, 208206_s_at
FIG. 1268: PRO84393
FIG. 1269: DNA328612, NP_000166.2, 208308_s_at
FIG. 1270: PRO84394
FIG. 1271: DNA270558, NP_006734.1, 208319_s_at
FIG. 1272: PRO58933
FIG. 1273: DNA227614, NP_004859.1, 208336_s_at
FIG. 1274: PRO38077
FIG. 1275: DNA327690, NP_004022.1, 208436_s_at
FIG. 1276: PRO83673
FIG. 1277: DNA328613, NP_056953.2, 208510_s_at
FIG. 1278: PRO84395
FIG. 1279A-C: DNA328614, SRRM2, 208610_s_at
FIG. 1280: PRO84396
FIG. 1281A-C: DNA328615, NP_003118.1,
208611_s_at
FIG. 1282: PRO84397
FIG. 1283A-C: DNA328616, NP_001448.1,
208613_s_at
FIG. 1284: PRO84398
FIG. 1285: DNA326362, VATI, 208626_s_at
FIG. 1286: PRO82758
FIG. 1287: DNA325912, NP_001093.1, 208637_x_at
FIG. 1288: PRO82367
FIG. 1289: DNA271268, NP_009057.1, 208649_s_at
FIG. 1290: PRO59579
FIG. 1291: DNA328617, AF299343, 208653_s_at
FIG. 1292: PRO84399
FIG. 1293A-C: DNA328618, NP_003307.2,
208664_s_at
FIG. 1294: PRO84400
FIG. 1295: DNA304686, NP_002565.1, 208680_at
FIG. 1296: PRO71112
FIG. 1297: DNA304499, NP_006588.1, 208687_x_at
FIG. 1298: PRO71063
FIG. 1299A-B: DNA328619, BC001188, 208691_at
FIG. 1300: PRO84401
FIG. 1301: DNA287189, NP_002038.1, 208693_s_at
FIG. 1302: PRO69475
FIG. 1303: DNA324217, ATIC, 208758_at
FIG. 1304: PRO80908
FIG. 1305: DNA327696, AF228339, 208763_s_at
FIG. 1306: PRO83679
FIG. 1307: DNA328620, AK000295, 208772_at
FIG. 1308: PRO84402
FIG. 1309: DNA328621, NP_002788.1, 208799_at
FIG. 1310: PRO84403
FIG. 1311: DNA287169, CAA42052.1, 2088051_at
FIG. 1312: PRO10404
FIG. 1313: DNA324531, NP_002120.1, 208808_s_at
FIG. 1314: PRO81185
FIG. 1315: DNA273521, NP_002070.1, 208813_at
FIG. 1316: PRO61502
FIG. 1317: DNA328622, BC000835, 208827_at
FIG. 1318: PRO82662
FIG. 1319: DNA227556, NP_001670.1, 208836_at
FIG. 1320: PRO38019
FIG. 1321: DNA326042, NP_031390.1, 208837_at
FIG. 1322: PRO1078
FIG. 1323A-B: DNA328623, NP_056107.1,
208858_s_at
FIG. 1324: PRO61321
FIG. 1325: DNA227874, NP_003320.1, 208864_s_at
FIG. 1326: PRO38337
FIG. 1327: DNA328624, BC003562, 208891_at
FIG. 1328: PRO59076
FIG. 1329: DNA328625, NP_073143.1, 208892_s_at
FIG. 1330: PRO84404
FIG. 1331: DNA328626, NP_057078.1, 208898_at
FIG. 1332: PRO61768
FIG. 1333: DNA327700, BC015130, 208905_at
FIG. 1334: PRO83683
FIG. 1335: DNA325472, NP_116056.2, 208906_at
FIG. 1336: PRO1995
FIG. 1337A-B: DNA328627, FLJ13052, 208918_s_at
FIG. 1338: PRO84405
FIG. 1339: DNA325473, NP_006353.2, 208922_s_at
FIG. 1340: PRO81996
FIG. 1341: DNA287238, NP_000425.1, 208926_at
FIG. 1342: PRO69515
FIG. 1343: DNA328628, NP_060542.2, 208933_s_at
FIG. 1344: PRO84406
FIG. 1345: DNA290261, NP_001291.2, 208960_s_at
FIG. 1346: PRO70387
FIG. 1347A-B: DNA325478, NP_037534.2,
208962_s_at
FIG. 1348: PRO81999
FIG. 1349: DNA328629, NP_006079.1, 208977_x_at
FIG. 1350: PRO84407
FIG. 1351: DNA328630, NP_036293.1, 209004_s_at
FIG. 1352: PRO84408
FIG. 1353: DNA328631, AK027318, 209006_s_at
FIG. 1354: PRO84409
FIG. 1355: DNA328632, DJ465N24.2.1Homo,
209007_s_at
FIG. 1356: DNA328633, NP_004784.2, 209017_s_at
FIG. 1357: PRO84411
FIG. 1358A-B: DNA328634, NP_006594.1,
209023_s_at
FIG. 1359: PRO84412
FIG. 1360: DNA328635, BC020946, 209026_x_at
FIG. 1361: PRO84413
FIG. 1362: DNA274202, NP_006804.1, 209034_at
FIG. 1363: PRO62131
FIG. 1364: DNA328636, PAPSS1, 209043_at
FIG. 1365: PRO84414
FIG. 1366A-C: DNA328637, HSA7042, 209053_s_at
FIG. 1367: PRO81109
FIG. 1368: DNA326406, NP_005315.1, 209069_s_at
FIG. 1369: PRO11403
FIG. 1370: DNA227289, NP_006532.1, 209080_x_at
FIG. 1371: PRO37752
FIG. 1372: DNA274180, NP_009005.1, 209083_at
FIG. 1373: PRO62110
FIG. 1374: DNA327707, NP_000148.1, 209093_s_at
FIG. 1375: PRO83689
FIG. 1376: DNA226564, NP_000099.1, 209095_at
FIG. 1377: PRO37027
FIG. 1378: DNA325163, NP_001113.1, 209122_at
FIG. 1379: PRO81730
FIG. 1380: DNA328638, BC000576, 209123_at
FIG. 1381: PRO81129
FIG. 1382: DNA274723, AAB62222.1, 209129_at
FIG. 1383: PRO62502
FIG. 1384: DNA328639, HSM801840, 209132_s_at
FIG. 1385: PRO84415
FIG. 1386: DNA328640, ASPH, 209135_at
FIG. 1387: PRO84416
FIG. 1388: DNA327713, BC010653, 209146_at
FIG. 1389: PRO37975
FIG. 1390: DNA271937, NP_055419.1, 209154_at
FIG. 1391: PRO60213
FIG. 1392: DNA328641, NP_001840.2, 209156_s_at
FIG. 1393: PRO84417
FIG. 1394: DNA325285, AKR1C3, 209160_at
FIG. 1395: PRO81832
FIG. 1396A-B: DNA328642, AF073310,
209184_s_at
FIG. 1397: PRO84418
FIG. 1398A-B: DNA328643, HUMHK1A,
209186_at
FIG. 1399: PRO84419
FIG. 1400: DNA189700, NP_005243.1, 209189_at
FIG. 1401: PRO25619
FIG. 1402: DNA327715, NP_115914.1, 209191_at
FIG. 1403: PRO83694
FIG. 1404: DNA103520, NP_002639.1, 209193_at
FIG. 1405: PRO4847
FIG. 1406A-B: DNA269816, MEF2C, 209199_s_at
FIG. 1407: PRO58219
FIG. 1408: DNA328644, 349746.9, 209200_at
FIG. 1409: PRO84420
FIG. 1410: DNA326891, NP_001748.1, 209213_at
FIG. 1411: PRO83212
FIG. 1412: DNA328645, NP_009006.1, 209216_at
FIG. 1413: PRO84421
FIG. 1414: DNA227483, NP_003120.1, 209218_at
FIG. 1415: PRO37946
FIG. 1416: DNA328646, NP_036517.1, 209230_s_at
FIG. 1417: PRO84422
FIG. 1418A-C: DNA328647, AB017133, 209234_at
FIG. 1419: PRO84423
FIG. 1420A-B: DNA328648, D87075, 209236_at
FIG. 1421: DNA328649, NP_116093.1, 20925_x_at
FIG. 1422: PRO84424
FIG. 1423: DNA255255, NP_071437.1, 209267_s_at
FIG. 1424: PRO50332
FIG. 1425A-B: DNA226827, NP_001673.1,
209281_s_at
FIG. 1426: PRO37290
FIG. 1427: DNA328650, 200118.10, 209286_at
FIG. 1428: PRO84425
FIG. 1429: DNA274883, NP_000058.1, 209301_at
FIG. 1430: PRO62628
FIG. 1431: DNA328651, AF087853, 209305_s_at
FIG. 1432: PRO82889
FIG. 1433: DNA327718, CASP4, 209310_s_at
FIG. 1434: PRO83697
FIG. 1435: DNA328652, NP_077298.1, 209321_s_at
FIG. 1436: PRO84426
FIG. 1437: DNA328653, AF063020, 209337_at
FIG. 1438: PRO84427
FIG. 1439: DNA328654, UAP1, 209340_at
FIG. 1440: PRO84428
FIG. 1441: DNA328655, 346677.3, 209341_s_at
FIG. 1442: PRO84429
FIG. 1443: DNA269630, NP_003281.1, 209344_at
FIG. 1444: PRO58042
FIG. 1445A-B: DNA328656, HSA303098,
209345_s_at
FIG. 1446: PRO84430
FIG. 1447A-B: DNA328657, NP_060895.1,
209346_s_at
FIG. 1448: PRO84431
FIG. 1449A-B: DNA328658, AF055376,
209348_s_at
FIG. 1450: PRO84432
FIG. 1451: DNA327719, NP_003704.2, 209355_s_at
FIG. 1452: PRO83698
FIG. 1453: DNA328659, ECM1, 209365_s_at
FIG. 1454: PRO84433
FIG. 1455: DNA225952, NP_001267.1, 209395_at
FIG. 1456: PRO36415
FIG. 1457: DNA275366, BC001851, 209444_at
FIG. 1458: PRO63036
FIG. 1459: DNA328660, NP_003675.2, 209467_s_at
FIG. 1460: PRO84434
FIG. 1461A-B: DNA328661, NP_006304.1,
209475_at
FIG. 1462: PRO84435
FIG. 1463: DNA328662, OSBPL1A, 209485_s_at
FIG. 1464: PRO84436
FIG. 1465: DNA324899, NP_002938.1, 209507_at
FIG. 1466: PRO81503
FIG. 1467: DNA274027, HSU38654, 209515_s_at
FIG. 1468: PRO61971
FIG. 1469: DNA328663, NP_057157.1, 209524_at
FIG. 1470: PRO36183
FIG. 1471A-C: DNA328664, NP_009131.1,
209534_x_at
FIG. 1472: PRO84437
FIG. 1473A-B: DNA328665, RGL, 209568_s_at
FIG. 1474: PRO84438
FIG. 1475: DNA328666, AF084943, 209585_s_at
FIG. 1476: PRO1917
FIG. 1477: DNA328667, S69189, 209600_s_at
FIG. 1478: PRO84439
FIG. 1479: DNA328668, NP_003157.1, 209607_x_at
FIG. 1480: PRO84440
FIG. 1481: DNA328669, NP_005882.1, 209608_s_at
FIG. 1482: PRO84441
FIG. 1483A-B: DNA328670, BC001618,
209610_s_at
FIG. 1484: PRO70011
FIG. 1485: DNA256209, NP_002259.1, 209653_at
FIG. 1486: PRO51256
FIG. 1487A-B: DNA272671, HSU26710, 209682_at
FIG. 1488: PRO60796
FIG. 1489: DNA151564, DNA151564, 209683_at
FIG. 1490: PRO11886
FIG. 1491: DNA327727, NP_000308.1, 209694_at
FIG. 1492: PRO83705
FIG. 1493: DNA328671, NP_000498.2, 209696_at
FIG. 1494: PRO84442
FIG. 1495: DNA327728, BC004492, 209703_x_at
FIG. 1496: PRO4348
FIG. 1497: DNA328672, CAA68871.1, 209707_at
FIG. 1498: PRO84444
FIG. 1499A-B: DNA328673, HUMCSDF1,
209716_at
FIG. 1500: PRO84445
FIG. 1501A-B: DNA304800, BC002538, 209723_at
FIG. 1502: PRO69458
FIG. 1503A-B: DNA328674, NP_056011.1,
209760_at
FIG. 1504: PRO84446
FIG. 1505: DNA324250, NP_536349.1, 209761_s_at
FIG. 1506: PRO80934
FIG. 1507A-B: DNA328675, ADAM19, 209765_at
FIG. 1508: PRO84447
FIG. 1509: DNA327731, NP_003302.1, 209803_s_at
FIG. 1510: PRO83707
FIG. 1511: DNA328676, IL16, 209827_s_at
FIG. 1512: PRO84448
FIG. 1513A-B: DNA196499, AB002384, 209829_at
FIG. 1514: PRO24988
FIG. 1515: DNA328677, AF060511, 209836_x_at
FIG. 1516: PRO84449
FIG. 1517: DNA324805, NP_008978.1, 209846_s_at
FIG. 1518: PRO81419
FIG. 1519: DNA273915, NP_036215.1, 209864_at
FIG. 1520: PRO61867
FIG. 1521: DNA290585, NP_000573.1, 209875_s_at
FIG. 1522: PRO70536
FIG. 1523: DNA328678, NP_008843.1, 209882_at
FIG. 1524: PRO62586
FIG. 1525: DNA328679, 347423.1, 209892_at
FIG. 1526: PRO84450
FIG. 1527: DNA328258, HSM802616, 209900_s_at
FIG. 1528: PRO84151
FIG. 1529A-B: DNA328680, NP_062541.1,
209907_s_at
FIG. 1530: PRO84451
FIG. 1531: DNA299884, AB040875, 209921_at
FIG. 1532: PRO70858
FIG. 1533: DNA328681, NP_005089.1, 209928_s_at
FIG. 1534: PRO84452
FIG. 1535: DNA272326, NP_006154.1, 209930_s_at
FIG. 1536: PRO60583
FIG. 1537: DNA328682, AF225981, 209935_at
FIG. 1538: PRO84453
FIG. 1539: DNA327754, NP_150634.1, 209970_x_at
FIG. 1540: PRO4526
FIG. 1541: DNA328683, NP_000399.1, 210007_s_at
FIG. 1542: PRO84454
FIG. 1543: DNA227660, NP_001327.1, 210042_s_at
FIG. 1544: PRO38123
FIG. 1545: DNA327739, AF092535, 210058_at
FIG. 1546: PRO83714
FIG. 1547: DNA327740, NP_003944.1, 210087_s_at
FIG. 1548: PRO1787
FIG. 1549: DNA328684, BC001234, 210102_at
FIG. 1550: PRO84455
FIG. 1551A-B: DNA328685, NP_127497.1,
210113_s_at
FIG. 1552: PRO34751
FIG. 1553: DNA328686, NP_000566.1, 210118_s_at
FIG. 1554: PRO64
FIG. 1555: DNA227757, NP_000743.1, 210128_s_at
FIG. 1556: PRO38220
FIG. 1557: DNA227501, NP_000295.1, 210139_s_at
FIG. 1558: PRO37964
FIG. 1559: DNA328687, AF004231, 210146_x_at
FIG. 1560: PRO84456
FIG. 1561A-B: DNA328688, NP_006838.2,
210152_at
FIG. 1562: PRO84457
FIG. 1563: DNA328689, NP_003259.2, 210166_at
FIG. 1564: PRO7521
FIG. 1565: DNA270196, HUMZFM1B, 210172_at
FIG. 1566: PRO58584
FIG. 1567: DNA328690, NP_524145.1, 210240_s_at
FIG. 1568: PRO59660
FIG. 1569: DNA326963, HRIHFB2122, 210276_s_at
FIG. 1570: PRO83276
FIG. 1571: DNA328691, NP_065717.1, 210346_s_at
FIG. 1572: PRO84458
FIG. 1573: DNA227652, NP_002549.1, 210401_at
FIG. 1574: PRO38115
FIG. 1575: DNA225514, NP_003864.1, 210510_s_at
FIG. 1576: PRO35977
FIG. 1577: DNA216517, NP_005055.1, 210549_s_at
FIG. 1578: PRO34269
FIG. 1579: DNA327746, HUMGCBA, 210589_s_at
FIG. 1580: PRO83720
FIG. 1581: DNA328692, AF025529, 210660_at
FIG. 1582: PRO84459
FIG. 1583: DNA272127, NP_003928.1, 210663_s_at
FIG. 1584: PRO60397
FIG. 1585: DNA326525, NP_006330.1, 210719_s_at
FIG. 1586: PRO82894
FIG. 1587: DNA226183, NP_001453.1, 210773_s_at
FIG. 1588: PRO36646
FIG. 1589: DNA226078, NP_000296.1, 210830_s_at
FIG. 1590: PRO36541
FIG. 1591: DNA226152, NP_002650.1, 210845_s_at
FIG. 1592: PRO36615
FIG. 1593: DNA328693, HSU03891, 210873_x_at
FIG. 1594: PRO84460
FIG. 1595: DNA328694, BC007810, 210944_s_at
FIG. 1596: PRO84461
FIG. 1597: DNA213676, NP_004604.1, 211003_x_at
FIG. 1598: PRO35142
FIG. 1599: DNA328695, NP_002145.1, 211015_s_at
FIG. 1600: PRO61480
FIG. 1601: DNA328696, NP_009214.1, 211026_s_at
FIG. 1602: PRO62720
FIG. 1603: DNA328697, NP_116112.1, 211038_s_at
FIG. 1604: PRO84462
FIG. 1605: DNA328698, BC006403, 211063_s_at
FIG. 1606: PRO12168
FIG. 1607: DNA326712, NP_001285.1, 211136_s_at
FIG. 1608: PRO83054
FIG. 1609A-B: DNA328699, AF189723,
211137_s_at
FIG. 1610: PRO84463
FIG. 1611: DNA327752, HSDHACTYL,
211150_s_at
FIG. 1612A-B: DNA328700, SCD, 211162_x_at
FIG. 1613: PRO84464
FIG. 1614: DNA328701, PSEN2, 211373_s_at
FIG. 1615: PRO80745
FIG. 1616: DNA328702, NP_036519.1, 211413_s_at
FIG. 1617: PRO84465
FIG. 1618: DNA256637, NP_008849.1, 211423_s_at
FIG. 1619: PRO51621
FIG. 1620: DNA328703, NP_003956.1, 211434_s_at
FIG. 1621: PRO1873
FIG. 1622: DNA327755, NP_115957.1, 211458_s_at
FIG. 1623: PRO83725
FIG. 1624A-B: DNA328704, FGFR1, 211535_s_at
FIG. 1625: PRO34231
FIG. 1626: DNA324626, RIL, 211564_s_at
FIG. 1627: PRO81272
FIG. 1628: DNA328705, NP_001345.1, 211653_x_at
FIG. 1629: PRO62617
FIG. 1630: DNA328706, BC021909, 211714_x_at
FIG. 1631: PRO10347
FIG. 1632A-B: DNA328707, AF172264,
211828_s_at
FIG. 1633: PRO84466
FIG. 1634: DNA226582, NP_003863.1, 211844_s_at
FIG. 1635: PRO37045
FIG. 1636: DNA151912, BAA06683.1, 211935_at
FIG. 1637: PRO12756
FIG. 1638: DNA325941, NP_005339.1, 211968_s_at
FIG. 1639: PRO82388
FIG. 1640: DNA287433, NP_006810.1, 212009_s_at
FIG. 1641: PRO69690
FIG. 1642: DNA328708, NP_002678.1, 212036_s_at
FIG. 1643: PRO84467
FIG. 1644: DNA103380, NP_003365.1, 212038_s_at
FIG. 1645: PRO4710
FIG. 1646: DNA328709, BC004151, 212048_s_at
FIG. 1647: PRO37676
FIG. 1648A-B: DNA254751, AB018353, 212074_at
FIG. 1649: DNA328710, HUMLAMA, 212086_x_at
FIG. 1650A-B: DNA298616, NP_001839.1,
212091_s_at
FIG. 1651: PRO71027
FIG. 1652: DNA154139, DNA154139, 212099_at
FIG. 1653: DNA328711, AK023154, 212115_at
FIG. 1654: PRO84468
FIG. 1655: DNA328712, NP_006501.1, 212118_at
FIG. 1656: PRO84469
FIG. 1657: DNA328713, AF100737, 212130_x_at
FIG. 1658: PRO84470
FIG. 1659: DNA328714, HSM801966, 212146_at
FIG. 1660A-B: DNA151915, BAA09764.1,
212149_at
FIG. 1661: PRO12758
FIG. 1662: DNA88630, AAA52701.1, 212154_at
FIG. 1663: PRO2877
FIG. 1664: DNA328715, BC000950, 212160_at
FIG. 1665: DNA328716, HSM800707, 212179_at
FIG. 1666A-C: DNA255018, CAB61363.1,
212207_at
FIG. 1667: PRO50107
FIG. 1668A-B: DNA328717, CAB70761.1,
212232_at
FIG. 1669: PRO84473
FIG. 1670: DNA196116, DNA196116, 212246_at
FIG. 1671A-B: DNA254262, NP_055197.1,
212255_s_at
FIG. 1672: PRO49373
FIG. 1673: DNA327771, NP_109591.1, 212268_at
FIG. 1674: PRO83737
FIG. 1675A-B: DNA328718, AAC39776.1,
212285_s_at
FIG. 1676: PRO84474
FIG. 1677: DNA328719, BC012895, 212295_s_at
FIG. 1678: PRO84475
FIG. 1679: DNA271103, NP_005796.1, 212296_at
FIG. 1680: PRO59425
FIG. 1681A-B: DNA328720, HSA306929,
212297_at
FIG. 1682: PRO84476
FIG. 1683A-B: DNA328721, 1450005.12, 212298_at
FIG. 1684: PRO84477
FIG. 1685A-B: DNA150464, BAA34466.1,
212311_at
FIG. 1686: PRO12270
FIG. 1687: DNA326808, BC019307, 212312_at
FIG. 1688: PRO83141
FIG. 1689A-B: DNA124122, NP_005602.2,
212332_at
FIG. 1690: PRO6323
FIG. 1691: DNA287190, CAB43217.1, 212333_at
FIG. 1692: PRO69476
FIG. 1693A-B: DNA255527, HUMTI227HC,
212337_at
FIG. 1694: DNA328722, BC012469, 212341_at
FIG. 1695: PRO84478
FIG. 1696: DNA328723, S47833, 212360_at
FIG. 1697: PRO36682
FIG. 1698A-B: DNA328724, AB007856, 212367_at
FIG. 1699A-B: DNA327773, BAA25456.1,
212368_at
FIG. 1700: PRO83739
FIG. 1701A-C: DNA328725, AB007923, 212390_at
FIG. 1702A-B: DNA150950, BAA07645.1,
212396_s_at
FIG. 1703: PRO12554
FIG. 1704A-B: DNA328726, BAA25466.2,
212443_at
FIG. 1705: PRO84480
FIG. 1706: DNA328727, AB033105, 212453_at
FIG. 1707A-B: DNA328728, 481567.2, 212458_at
FIG. 1708: PRO84482
FIG. 1709: DNA151348, DNA151348, 212463_at
FIG. 1710: PRO11726
FIG. 1711A-: DNA328729, D80001, 212486_s_at
FIG. 1712: PRO38526
FIG. 1713A-B: DNA328730, BAA74899.2,
212492_s_at
FIG. 1714: PRO84483
FIG. 1715A-B: DNA328731, 234169.5, 212500_at
FIG. 1716: PRO84484
FIG. 1717: DNA328732, NP_116193.1, 212502_at
FIG. 1718: PRO84485
FIG. 1719: DNA0, AF038183, 212527_at
FIG. 1720: PRO
FIG. 1721: DNA328734, AAH01171.1, 212539_at
FIG. 1722: PRO84487
FIG. 1723: DNA328735, PHIP, 212542_s_at
FIG. 1724: PRO84488
FIG. 1725: DNA328736, BC009846, 212552_at
FIG. 1726: PRO84489
FIG. 1727A-D: DNA328737, 148650.1, 212560_at
FIG. 1728: PRO84490
FIG. 1729: DNA270260, HSPDCE2, 212568_s_at
FIG. 1730A-B: DNA328738, BAA31625.1,
212569_at
FIG. 1731: PRO84491
FIG. 1732A-B: DNA328739, PTPRC, 212587_s_at
FIG. 1733: PRO84492
FIG. 1734: DNA327776, 1379302.1, 212593_s_at
FIG. 1735: PRO83742
FIG. 1736: DNA151487, DNA151487, 212594_at
FIG. 1737: PRO11833
FIG. 1738A-B: DNA328740, BAA76781.1,
212611_at
FIG. 1739: PRO84493
FIG. 1740: DNA81753, DNA81753, 212613_at
FIG. 1741: PRO9216
FIG. 1742A-B: DNA253817, BAA20767.1,
212615_at
FIG. 1743: PRO49220
FIG. 1744A-B: DNA328741, 474863.12, 212622_at
FIG. 1745: PRO84494
FIG. 1746: DNA194679, BAA05062.1, 212623_at
FIG. 1747: PRO23989
FIG. 1748A-B: DNA328742, 244522.6, 212628_at
FIG. 1749: PRO59047
FIG. 1750: DNA270683, NP_006247.1, 212629_s_at
FIG. 1751: PRO59047
FIG. 1752A-D: DNA327777, HSIL1RECA,
212657_s_at
FIG. 1753A-B: DNA150762, BAA13197.1,
212658_at
FIG. 1754: PRO12455
FIG. 1755: DNA327838, NP_000568.1, 212659_s_at
FIG. 1756: PRO83789
FIG. 1757: DNA328743, 1234685.2, 212667_at
FIG. 1758: PRO84495
FIG. 1759: DNA328744, AF318364, 212680_x_at
FIG. 1760: PRO84496
FIG. 1761: DNA328745, 482138.6, 212687_at
FIG. 1762: PRO84497
FIG. 1763: DNA324378, NP_000523.1, 212694_s_at
FIG. 1764: PRO81047
FIG. 1765: DNA328746, CAB43213.1, 212698_s_at
FIG. 1766: PRO84498
FIG. 1767A-B: DNA328747, BAA83030.1,
212765_at
FIG. 1768: PRO84499
FIG. 1769A-B: DNA328748, HSJ001388, 212774_at
FIG. 1770: PRO59570
FIG. 1771: DNA328749, HSM802266, 212779_at
FIG. 1772: DNA328750, 7689361.1, 212812_at
FIG. 1773: PRO84500
FIG. 1774A-B: DNA328751, AF012086,
212842_x_at
FIG. 1775: DNA328752, CAA76270.1, 212864_at
FIG. 1776: PRO84501
FIG. 1777A-B: DNA328753, BAA13212.1,
212873_at
FIG. 1778: PRO84502
FIG. 1779: DNA271630, DNA271630, 212907_at
FIG. 1780: DNA328754, 1397726.9, 212912_at
FIG. 1781: PRO84503
FIG. 1782A-B: DNA328755, BAA25490.1,
212946_at
FIG. 1783: PRO84504
FIG. 1784A-B: DNA328756, BAA74893.2,
212975_at
FIG. 1785: PRO84505
FIG. 1786: DNA154982, DNA154982, 213034_at
FIG. 1787: DNA327785, BC017336, 213061_s_at
FIG. 1788: PRO83749
FIG. 1789A-C: DNA328757, 475076.9, 213069_at
FIG. 1790: PRO84506
FIG. 1791A-B: DNA328758, AB011123, 213109_at
FIG. 1792: DNA272600, NP_057259.1, 213112_s_at
FIG. 1793: PRO60737
FIG. 1794: DNA326217, NP_004474.1, 213129_s_at
FIG. 1795: PRO82630
FIG. 1796: DNA228053, DNA228053, 213158_at
FIG. 1797A-G: DNA103535, AF027153, 213164_at
FIG. 1798: PRO4862
FIG. 1799: DNA150875, CAB45717.1, 213246_at
FIG. 1800: PRO11589
FIG. 1801: DNA328759, HUMLPACI09, 213258_at
FIG. 1802: DNA328760, 1376674.1, 213274_s_at
FIG. 1803: PRO84508
FIG. 1804A-B: DNA328761, BAA82991.1,
213280_at
FIG. 1805: PRO84509
FIG. 1806: DNA260974, NP_006065.1, 213293_s_at
FIG. 1807: PRO54720
FIG. 1808: DNA328762, AAL30845.1, 213338_at
FIG. 1809: PRO84510
FIG. 1810: DNA327789, 1449824.5, 213348_at
FIG. 1811: PRO83753
FIG. 1812: DNA328763, NP_001219.2, 213373_s_at
FIG. 1813: PRO84511
FIG. 1814: DNA328764, NP_438169.1, 213375_s_at
FIG. 1815: PRO84512
FIG. 1816: DNA328765, 411350.1, 213391_at
FIG. 1817: PRO84513
FIG. 1818: DNA106195, DNA106195, 213454_at
FIG. 1819: DNA327795, BC014226, 213457_at
FIG. 1820: DNA328766, NP_006077.1, 213476_x_at
FIG. 1821: PRO84514
FIG. 1822: DNA328767, BC008767, 213501_at
FIG. 1823: PRO84515
FIG. 1824: DNA254264, HSM800224, 213546_at
FIG. 1825: PRO49375
FIG. 1826: DNA328768, 1194561.1, 213572_s_at
FIG. 1827: PRO84516
FIG. 1828: DNA327800, 1251176.10, 213593_s_at
FIG. 1829: PRO83763
FIG. 1830: DNA151422, DNA151422, 213605_s_at
FIG. 1831: PRO11792
FIG. 1832: DNA225974, NP_000864.1, 213620_s_at
FIG. 1833: PRO36437
FIG. 1834: DNA328769, CAA69330.1, 213624_at
FIG. 1835: PRO84517
FIG. 1836: DNA260173, DNA260173, 213638_at
FIG. 1837: PRO54102
FIG. 1838A-C: DNA273792, DNA273792,
213649_at
FIG. 1839: DNA151886, CAB43234.1, 213682_at
FIG. 1840: PRO12745
FIG. 1841: DNA227788, NP_002995.1, 213716_s_at
FIG. 1842: PRO38251
FIG. 1843: DNA328771, HSMYOSIE, 213733_at
FIG. 1844: DNA328772, AAC19149.1, 213761_at
FIG. 1845: PRO84519
FIG. 1846: DNA328773, BC001528, 213766_x_at
FIG. 1847: PRO84520
FIG. 1848: DNA328774, NP_004263.1, 213793_s_at
FIG. 1849: PRO60536
FIG. 1850A-B: DNA328775, NP_006540.2,
213812_s_at
FIG. 1851: PRO84521
FIG. 1852: DNA328776, 407661.4, 213817_at
FIG. 1853: PRO84522
FIG. 1854A-B: DNA328777, IDN3, 213918_s_at
FIG. 1855: PRO84523
FIG. 1856: DNA196110, DNA196110, 214016_s_at
FIG. 1857: PRO24635
FIG. 1858: DNA150990, NP_003632.1, 214022_s_at
FIG. 1859: PRO12570
FIG. 1860: DNA328778, 234498.37, 214093_s_at
FIG. 1861: PRO84524
FIG. 1862A-B: DNA272292, NP_055459.1,
214130_s_at
FIG. 1863: PRO60550
FIG. 1864: DNA82378, NP_002695.1, 214146_s_at
FIG. 1865: PRO1725
FIG. 1866A-B: DNA328779, 332730.12,
214155_s_at
FIG. 1867: PRO84525
FIG. 1868: DNA304659, NP_002023.1, 214211_at
FIG. 1869: PRO71086
FIG. 1870: DNA256662, NP_009112.1, 214219_x_at
FIG. 1871: PRO51628
FIG. 1872A-B: DNA328780, 480940.15, 214285_at
FIG. 1873: PRO84526
FIG. 1874: DNA328781, 1453703.13, 214349_at
FIG. 1875: PRO84527
FIG. 1876: DNA273174, NP_001951.1, 214394_x_at
FIG. 1877: PRO61211
FIG. 1878: DNA328782, 337794.1, 214405_at
FIG. 1879: PRO84528
FIG. 1880: DNA287630, NP_000160.1, 214430_at
FIG. 1881: PRO2154
FIG. 1882: DNA227376, NP_005393.1, 214435_x_at
FIG. 1883: PRO37839
FIG. 1884: DNA273138, NP_005495.1, 214452_at
FIG. 1885: PRO61182
FIG. 1886: DNA327812, NP_006408.2, 214453_s_at
FIG. 1887: PRO83773
FIG. 1888: DNA302598, NP_066361.1, 214487_s_at
FIG. 1889: PRO62511
FIG. 1890: DNA328783, NP_002021.2, 214560_at
FIG. 1891: PRO84529
FIG. 1892: DNA324728, BC017730, 214581_x_at
FIG. 1893: PRO868
FIG. 1894A-B: DNA328784, 331045.1, 214582_at
FIG. 1895: PRO84530
FIG. 1896: DNA328785, NP_004062.1, 214683_s_at
FIG. 1897: PRO84531
FIG. 1898: DNA328786, BC017407, 214686_at
FIG. 1899: PRO84532
FIG. 1900: DNA271990, DNA271990, 214722_at
FIG. 1901A-B: DNA274485, AB007863, 214735_at
FIG. 1902: DNA328787, 238292.8, 214746_s_at
FIG. 1903: PRO84533
FIG. 1904: DNA328788, AK023937, 214763_at
FIG. 1905: PRO29183
FIG. 1906A-B: DNA328789, 344240.3, 214770_at
FIG. 1907: PRO84534
FIG. 1908A-B: DNA328790, 481415.9, 214786_at
FIG. 1909: PRO84535
FIG. 1910: DNA328791, 1383762.1, 214790_at
FIG. 1911: PRO84536
FIG. 1912: DNA328792, 7692351.10, 214830_at
FIG. 1913: PRO84537
FIG. 1914: DNA328314, BC022780, 214841_at
FIG. 1915: PRO84182
FIG. 1916: DNA83102, DNA83102, 214866_at
FIG. 1917: PRO2591
FIG. 1918: DNA161326, DNA161326, 214934_at
FIG. 1919: DNA328794, 1099353.2, 214974_x_at
FIG. 1920: PRO84539
FIG. 1921: DNA328795, AF057354, 214975_s_at
FIG. 1922: DNA328796, HSM800535, 215078_at
FIG. 1923: DNA328797, 000092.6, 215087_at
FIG. 1924: PRO84540
FIG. 1925: DNA328798, NP_002088.1, 215091_s_at
FIG. 1926: PRO84541
FIG. 1927: DNA328799, BC008376, 215101_s_at
FIG. 1928: PRO1721
FIG. 1929: DNA270522, NP_006013.1, 215111_s_at
FIG. 1930: PRO58899
FIG. 1931: DNA328800, 194537.1, 215224_at
FIG. 1932: PRO84542
FIG. 1933A-B: DNA327827, HSM800826,
215235_at
FIG. 1934A-B: DNA226905, NP_055672.1,
215342_s_at
FIG. 1935: PRO37368
FIG. 1936: DNA327831, NP_076956.1, 215380_s_at
FIG. 1937: PRO83783
FIG. 1938: DNA328801, 407831.1, 215392_at
FIG. 1939: PRO84543
FIG. 1940A-B: DNA328802, C6orf5, 215411_s_at
FIG. 1941: PRO84544
FIG. 1942: DNA275385, NP_002085.1, 215438_x_at
FIG. 1943: PRO63048
FIG. 1944: DNA328803, BAA91443.1, 215440_s_at
FIG. 1945: PRO84545
FIG. 1946: DNA328804, 403621.1, 215767_at
FIG. 1947: PRO84546
FIG. 1948A-B: DNA328805, BAA86482.1,
215785_s_at
FIG. 1949: PRO84547
FIG. 1950: DNA328806, 208045.1, 216109_at
FIG. 1951: PRO84548
FIG. 1952: DNA269532, NP_004802.1, 216250_s_at
FIG. 1953: PRO57948
FIG. 1954: DNA328807, AAH10129.1, 216483_s_at
FIG. 1955: PRO84549
FIG. 1956: DNA188349, NP_002973.1, 216598_s_at
FIG. 1957: PRO21884
FIG. 1958: DNA328808, 1099517.2, 216607_s_at
FIG. 1959: PRO84550
FIG. 1960: DNA328809, PTPN12, 216915_s_at
FIG. 1961: PRO4803
FIG. 1962: DNA328810, NP_001770.1, 216942_s_at
FIG. 1963: PRO2557
FIG. 1964A-C: DNA328811, NP_002213.1,
216944_s_at
FIG. 1965: PRO84551
FIG. 1966: DNA328812, BAA86575.1, 216997_x_at
FIG. 1967: PRO84552
FIG. 1968A-B: DNA328813, BAA76774.1,
217118_s_at
FIG. 1969: PRO84553
FIG. 1970A-B: DNA328814, HUMMHHLAJC,
217436_x_at
FIG. 1971A-B: DNA328815, 331104.2, 217521_at
FIG. 1972: PRO84554
FIG. 1973: DNA328816, 1446567.1, 217526_at
FIG. 1974: PRO84555
FIG. 1975A-B: DNA255619, AF054589,
217599_s_at
FIG. 1976: PRO50682
FIG. 1977: DNA327848, NP_005998.1, 217649_at
FIG. 1978: PRO83793
FIG. 1979: DNA328817, 1498470.1, 217678_at
FIG. 1980: PRO84556
FIG. 1981: DNA328818, NP_071435.1, 217730_at
FIG. 1982: PRO38175
FIG. 1983: DNA327935, NP_079422.1, 217745_s_at
FIG. 1984: PRO83866
FIG. 1985A-B: DNA88040, NP_000005.1, 217757_at
FIG. 1986: PRO2632
FIG. 1987A-B: DNA88226, NP_000055.1, 217767_at
FIG. 1988: PRO2237
FIG. 1989: DNA325821, NP_057016.1, 217769_s_at
FIG. 1990: PRO82287
FIG. 1991: DNA227358, NP_057479.1, 217777_s_at
FIG. 1992: PRO37821
FIG. 1993: DNA328819, NP_057145.1, 217781_s_at
FIG. 1994: PRO84557
FIG. 1995: DNA327850, NP_006546.1, 217785_s_at
FIG. 1996: PRO60803
FIG. 1997: DNA328303, NP_056525.1, 217807_s_at
FIG. 1998: PRO84173
FIG. 1999: DNA328820, NP_077022.1, 217808_s_at
FIG. 2000: PRO84558
FIG. 2001: DNA328821, NP_006708.1, 217813_s_at
FIG. 2002: PRO84559
FIG. 2003: DNA328822, AK001511, 217830_s_at
FIG. 2004: PRO84560
FIG. 2005: DNA328823, NP_057421.1, 217838_s_at
FIG. 2006: PRO84561
FIG. 2007: DNA226759, NP_054775.1, 217845_x_at
FIG. 2008: PRO37222
FIG. 2009: DNA327939, NP_060654.1, 217852_s_at
FIG. 2010: PRO83869
FIG. 2011A-B: DNA324921, NP_073585.6,
217853_at
FIG. 2012: PRO81523
FIG. 2013: DNA328824, DREV1, 217868_s_at
FIG. 2014: PRO84562
FIG. 2015: DNA225604, NP_057226.1, 217869_at
FIG. 2016: PRO36067
FIG. 2017: DNA326937, NP_002406.1, 217871_s_at
FIG. 2018: PRO83255
FIG. 2019: DNA255145, NP_060917.1, 217882_at
FIG. 2020: PRO50225
FIG. 2021A-B: DNA328825, 1398762.11, 217886_at
FIG. 2022: PRO84563
FIG. 2023: DNA189504, NP_064539.1, 217898_at
FIG. 2024: PRO25402
FIG. 2025: DNA328826, NP_004272.2, 217911_s_at
FIG. 2026: PRO84564
FIG. 2027: DNA328827, NP_076869.1, 217949_s_at
FIG. 2028: PRO21784
FIG. 2029: DNA328828, NP_067027.1, 217956_s_at
FIG. 2030: PRO84565
FIG. 2031: DNA328829, NP_057230.1, 217959_s_at
FIG. 2032: PRO84566
FIG. 2033: DNA328830, NP_061118.1, 217962_at
FIG. 2034: PRO84567
FIG. 2035: DNA327855, NP_057387.1, 217975_at
FIG. 2036: PRO83367
FIG. 2037: DNA328831, NP_057329.1, 217989_at
FIG. 2038: PRO233
FIG. 2039: DNA328832, NP_067022.1, 217995_at
FIG. 2040: PRO84568
FIG. 2041: DNA328833, BC018929, 217996_at
FIG. 2042: PRO84569
FIG. 2043: DNA328834, AF220656, 217997_at
FIG. 2044: DNA326005, NP_057004.1, 218007_s_at
FIG. 2045: PRO82446
FIG. 2046: DNA328835, NP_068760.1, 218019_s_at
FIG. 2047: PRO84571
FIG. 2048: DNA328836, NP_054894.1, 218027_at
FIG. 2049: PRO84572
FIG. 2050: DNA328837, NP_057149.1, 218046_s_at
FIG. 2051: PRO81876
FIG. 2052: DNA328838, NP_054797.2, 218049_s_at
FIG. 2053: PRO70319
FIG. 2054: DNA328839, NP_057180.1, 218059_at
FIG. 2055: PRO84573
FIG. 2056: DNA328840, NP_060481.1, 218067_s_at
FIG. 2057: PRO84574
FIG. 2058: DNA328841, NP_060557.2, 218073_s_at
FIG. 2059: PRO84575
FIG. 2060A-C: DNA328842, 235943.8, 218098_at
FIG. 2061: PRO84576
FIG. 2062: DNA328843, NP_060939.1, 218099_at
FIG. 2063: PRO84577
FIG. 2064: DNA328844, NP_061156.1, 218111_s_at
FIG. 2065: PRO82111
FIG. 2066: DNA227498, NP_002125.3, 218120_s_at
FIG. 2067: PRO37961
FIG. 2068: DNA328845, NP_060615.1, 218126_at
FIG. 2069: PRO10274
FIG. 2070: DNA227264, LOC51312, 218136_s_at
FIG. 2071: PRO37727
FIG. 2072: DNA327857, NP_057386.1, 218142_s_at
FIG. 2073: PRO83799
FIG. 2074: DNA325852, NP_078813.1, 218153_at
FIG. 2075: PRO82314
FIG. 2076: DNA328846, NP_060522.2, 218169_at
FIG. 2077: PRO84578
FIG. 2078: DNA228094, NP_079416.1, 218175_at
FIG. 2079: PRO38557
FIG. 2080: DNA328847, NP_056338.1, 218194_at
FIG. 2081: PRO84579
FIG. 2082: DNA150593, NP_054747.1, 218196_at
FIG. 2083: PRO12353
FIG. 2084: DNA256555, NP_060042.1, 218205_s_at
FIG. 2085: PRO51586
FIG. 2086: DNA328848, NP_004522.1, 218212_s_at
FIG. 2087: PRO84580
FIG. 2088: DNA271622, NP_006020.3, 218224_at
FIG. 2089: PRO59909
FIG. 2090: DNA324353, NP_004538.2, 218226_s_at
FIG. 2091: PRO81026
FIG. 2092: DNA328849, NP_057075.1, 218232_at
FIG. 2093: PRO4382
FIG. 2094: DNA328850, NP_057187.1, 218254_s_at
FIG. 2095: PRO84581
FIG. 2096: DNA273230, NP_060914.1, 218273_s_at
FIG. 2097: PRO61257
FIG. 2098: DNA328851, NP_068590.1, 218276_s_at
FIG. 2099: PRO84582
FIG. 2100: DNA323953, NP_003507.1, 218280_x_at
FIG. 2101: PRO80685
FIG. 2102: DNA254824, AF267865, 218294_s_at
FIG. 2103: PRO49920
FIG. 2104A-B: DNA328852, NP_003609.2,
218311_at
FIG. 2105: PRO84583
FIG. 2106A-B: DNA328853, NP_065702.2,
218319_at
FIG. 2107: PRO84584
FIG. 2108: DNA328854, NP_056979.1, 218350_s_at
FIG. 2109: PRO84585
FIG. 2110: DNA328855, NP_076952.1, 218375_at
FIG. 2111: PRO9771
FIG. 2112: DNA328856, NP_068376.1, 218380_at
FIG. 2113: PRO84586
FIG. 2114: DNA328857, NP_037481.1, 218407_x_at
FIG. 2115: PRO84587
FIG. 2116: DNA324953, NP_057412.1, 218412_s_at
FIG. 2117: PRO81550
FIG. 2118A-B: DNA255062, NP_060704.1,
218424_s_at
FIG. 2119: PRO50149
FIG. 2120: DNA150661, NP_057162.1, 218446_s_at
FIG. 2121: PRO12398
FIG. 2122: DNA326218, NP_064573.1, 218447_at
FIG. 2123: PRO82631
FIG. 2124: DNA328858, HEBP1, 218450_at
FIG. 2125: PRO84588
FIG. 2126: DNA327942, NP_060596.1, 218465_at
FIG. 2127: PRO83870
FIG. 2128: DNA328859, AF154054, 218468_s_at
FIG. 2129: PRO1608
FIG. 2130A-B: DNA328860, NP_037504.1,
218469_at
FIG. 2131: PRO1608
FIG. 2132: DNA328861, NP_057030.2, 218472_s_at
FIG. 2133: PRO84589
FIG. 2134: DNA328862, NP_057626.2, 218499_at
FIG. 2135: PRO84590
FIG. 2136: DNA328863, NP_060264.1, 218503_at
FIG. 2137: PRO84591
FIG. 2138: DNA328864, NP_060726.2, 218512_at
FIG. 2139: PRO84592
FIG. 2140: DNA255432, NP_060283.1, 218516_s_at
FIG. 2141: PRO50499
FIG. 2142: DNA194326, NP_065713.1, 218538_s_at
FIG. 2143: PRO23708
FIG. 2144: DNA328865, NP_064587.1, 218557_at
FIG. 2145: PRO84593
FIG. 2146: DNA328866, NP_005691.1, 218567_x_at
FIG. 2147: PRO69644
FIG. 2148: DNA328867, NP_085053.1, 218600_at
FIG. 2149: PRO84594
FIG. 2150: DNA328868, NP_057629.1, 218611_at
FIG. 2151: PRO84595
FIG. 2152: DNA328869, NP_060892.1, 218613_at
FIG. 2153: PRO84596
FIG. 2154: DNA328870, NP_060639.1, 218614_at
FIG. 2155: PRO84597
FIG. 2156: DNA256870, NP_073600.1, 218618_s_at
FIG. 2157: PRO51800
FIG. 2158: DNA254898, NP_060840.1, 218627_at
FIG. 2159: PRO49988
FIG. 2160: DNA328871, NP_068378.1, 218631_at
FIG. 2161: PRO84598
FIG. 2162: DNA328872, NP_036528.1, 218634_at
FIG. 2163: PRO84599
FIG. 2164: DNA328873, NP_057041.1, 218698_at
FIG. 2165: PRO84600
FIG. 2166: DNA324621, NP_054754.1, 218705_s_at
FIG. 2167: PRO1285
FIG. 2168: DNA328874, NP_054778.1, 218723_s_at
FIG. 2169: PRO84601
FIG. 2170: DNA328875, NP_064554.2, 218729_at
FIG. 2171: PRO84602
FIG. 2172: DNA328876, NP_060582.1, 218772_x_at
FIG. 2173: PRO84603
FIG. 2174: DNA328877, BC020507, 218821_at
FIG. 2175: PRO84604
FIG. 2176: DNA328878, NP_060104.1, 218823_s_at
FIG. 2177: PRO84605
FIG. 2178: DNA328879, NP_064570.1, 218845_at
FIG. 2179: PRO84606
FIG. 2180: DNA227367, NP_062456.1, 218853_s_at
FIG. 2181: PRO37830
FIG. 2182: DNA327872, NP_057713.1, 218856_at
FIG. 2183: PRO83812
FIG. 2184: DNA328880, NP_060369.1, 218872_at
FIG. 2185: PRO84607
FIG. 2186: DNA328881, NP_057706.1, 218890_x_at
FIG. 2187: PRO49469
FIG. 2188: DNA287166, NP_055129.1, 218943_s_at
FIG. 2189: PRO69459
FIG. 2190: DNA328882, NP_109589.1, 218967_s_at
FIG. 2191: PRO61822
FIG. 2192: DNA327211, NP_075053.1, 218989_x_at
FIG. 2193: PRO71052
FIG. 2194: DNA255929, NP_060935.1, 218992_at
FIG. 2195: PRO50982
FIG. 2196: DNA328883, NP_037474.1, 218996_at
FIG. 2197: PRO84608
FIG. 2198: DNA227194, FLJ11000, 218999_at
FIG. 2199: PRO37657
FIG. 2200: DNA328884, NP_054884.1, 219006_at
FIG. 2201: PRO84609
FIG. 2202: DNA227187, NP_057703.1, 219014_at
FIG. 2203: PRO37650
FIG. 2204: DNA328885, NP_061108.2, 219017_at
FIG. 2205: PRO50294
FIG. 2206A-B: DNA255239, NP_004832.1,
219026_s_at
FIG. 2207: PRO50316
FIG. 2208: DNA328886, NP_078811.1, 219040_at
FIG. 2209: PRO84610
FIG. 2210: DNA328887, NP_061907.1, 219045_at
FIG. 2211: PRO84611
FIG. 2212: DNA328888, NP_060436.1, 219053_s_at
FIG. 2213: PRO84612
FIG. 2214: DNA328889, NP_006005.1, 219061_s_at
FIG. 2215: PRO84613
FIG. 2216: DNA328890, NP_060403.1, 219093_at
FIG. 2217: PRO84614
FIG. 2218: DNA327877, NP_065108.1, 219099_at
FIG. 2219: PRO83816
FIG. 2220: DNA328891, NP_060263.1, 219143_s_at
FIG. 2221: PRO84615
FIG. 2222: DNA210216, NP_006860.1, 219150_s_at
FIG. 2223: PRO33752
FIG. 2224: DNA328892, NP_067643.2, 219165_at
FIG. 2225: PRO84616
FIG. 2226A-B: DNA328893, NP_065699.1,
219201_s_at
FIG. 2227: PRO9914
FIG. 2228: DNA287235, NP_060598.1, 219204_s_at
FIG. 2229: PRO69514
FIG. 2230: DNA225594, NP_037404.1, 219229_at
FIG. 2231: PRO36057
FIG. 2232: DNA328894, NP_060796.1, 219243_at
FIG. 2233: PRO84617
FIG. 2234: DNA328895, NP_071762.2, 219259_at
FIG. 2235: PRO1317
FIG. 2236: DNA328896, NP_079037.1, 219265_at
FIG. 2237: PRO84618
FIG. 2238: DNA328897, TRPV2, 219282_s_at
FIG. 2239: PRO12382
FIG. 2240: DNA273489, NP_055210.1, 219290_x_at
FIG. 2241: PRO61472
FIG. 2242A-B: DNA328898, NP_060261.1,
219316_s_at
FIG. 2243: PRO84619
FIG. 2244: DNA328899, NP_061024.1, 219326_s_at
FIG. 2245: PRO84620
FIG. 2246A-B: DNA255889, NP_061764.1,
219340_s_at
FIG. 2247: PRO50942
FIG. 2248: DNA328900, NP_060814.1, 219344_at
FIG. 2249: PRO84621
FIG. 2250: DNA254518, NP_057354.1, 219371_s_at
FIG. 2251: PRO49625
FIG. 2252: DNA188342, NP_064510.1, 219385_at
FIG. 2253: PRO21718
FIG. 2254: DNA256417, NP_077271.1, 219402_s_at
FIG. 2255: PRO51457
FIG. 2256A-B: DNA327887, NP_006656.1,
219403_s_at
FIG. 2257: PRO83823
FIG. 2258: DNA327888, NP_071732.1, 219412_at
FIG. 2259: PRO83824
FIG. 2260: DNA328901, FLJ20533, 219449_s_at
FIG. 2261: PRO84622
FIG. 2262: DNA328902, NP_071750.1, 219452_at
FIG. 2263: PRO84623
FIG. 2264: DNA328903, NP_002805.1, 219485_s_at
FIG. 2265: PRO84624
FIG. 2266: DNA328904, NP_076941.1, 219491_at
FIG. 2267: PRO84625
FIG. 2268A-B: DNA328905, NP_075392.1,
219496_at
FIG. 2269: PRO84626
FIG. 2270: DNA328906, NP_078855.1, 219506_at
FIG. 2271: PRO84627
FIG. 2272: DNA328907, NP_000067.1, 219534_x_at
FIG. 2273: PRO84628
FIG. 2274: DNA328908, 7691567.2, 219540_at
FIG. 2275: PRO84629
FIG. 2276: DNA225636, NP_065696.1, 219557_s_at
FIG. 2277: PRO36099
FIG. 2278A-B: DNA328909, NP_078800.2,
219558_at
FIG. 2279: PRO84630
FIG. 2280: DNA328910, NP_057666.1, 219593_at
FIG. 2281: PRO38848
FIG. 2282: DNA328911, MS4A4A, 219607_s_at
FIG. 2283: PRO84631
FIG. 2284: DNA328912, NP_060287.1, 219622_at
FIG. 2285: PRO84632
FIG. 2286: DNA328913, NP_079213.1, 219631_at
FIG. 2287: PRO84633
FIG. 2288: DNA328914, NP_060883.1, 219634_at
FIG. 2289: PRO36664
FIG. 2290: DNA327892, NP_060470.1, 219648_at
FIG. 2291: PRO83828
FIG. 2292: DNA328915, NP_055056.2, 219654_at
FIG. 2293: PRO84634
FIG. 2294: DNA228002, NP_071744.1, 219666_at
FIG. 2295: PRO38465
FIG. 2296: DNA328916, NP_071932.1, 219678_x_at
FIG. 2297: PRO84635
FIG. 2298: DNA287206, NP_060124.1, 219691_at
FIG. 2299: PRO69488
FIG. 2300: DNA328917, NP_061838.1, 219725_at
FIG. 2301: PRO7306
FIG. 2302: DNA328918, NP_078935.1, 219770_at
FIG. 2303: PRO84636
FIG. 2304: DNA328919, NP_078987.1, 219777_at
FIG. 2305: PRO84637
FIG. 2306: DNA227152, NP_038467.1, 219788_at
FIG. 2307: PRO37615
FIG. 2308: DNA328920, NP_061129.1, 219837_s_at
FIG. 2309: PRO4425
FIG. 2310: DNA256033, NP_060164.1, 219858_s_at
FIG. 2311: PRO51081
FIG. 2312: DNA254838, NP_078904.1, 219874_at
FIG. 2313: PRO49933
FIG. 2314: DNA328921, NP_057079.1, 219878_s_at
FIG. 2315: PRO84638
FIG. 2316: DNA256325, NP_005470.1, 219889_at
FIG. 2317: PRO51367
FIG. 2318: DNA328922, NP_037384.1, 219890_at
FIG. 2319: PRO84639
FIG. 2320: DNA328923, NP_075379.1, 219892_at
FIG. 2321: PRO84640
FIG. 2322: DNA256608, NP_060408.1, 219895_at
FIG. 2323: PRO51611
FIG. 2324: DNA328924, NP_057150.2, 219933_at
FIG. 2325: PRO84641
FIG. 2326: DNA255456, NP_057268.1, 219947_at
FIG. 2327: PRO50523
FIG. 2328: DNA227804, NP_065394.1, 219952_s_at
FIG. 2329: PRO38267
FIG. 2330: DNA328925, NP_076403.1, 220005_at
FIG. 2331: PRO84642
FIG. 2332: DNA256467, NP_079054.1, 220009_at
FIG. 2333: PRO51504
FIG. 2334A-B: DNA292946, NP_061160.1,
220023_at
FIG. 2335: PRO70613
FIG. 2336: DNA171414, NP_009130.1, 220034_at
FIG. 2337: PRO20142
FIG. 2338: DNA328926, NP_064703.1, 220046_s_at
FIG. 2339: PRO84643
FIG. 2340A-B: DNA221079, NP_071445.1,
220066_at
FIG. 2341: PRO34753
FIG. 2342: DNA256091, NP_071385.1, 220094_s_at
FIG. 2343: PRO51141
FIG. 2344: DNA328927, NP_078993.2, 220122_at
FIG. 2345: PRO84644
FIG. 2346: DNA328928, NP_068377.1, 220178_at
FIG. 2347: PRO84645
FIG. 2348: DNA324716, NP_463459.1, 220189_s_at
FIG. 2349: PRO81347
FIG. 2350: DNA228059, NP_073742.1, 220199_s_at
FIG. 2351: PRO38522
FIG. 2352: DNA328929, NP_060375.1, 220240_s_at
FIG. 2353: PRO84646
FIG. 2354A-B: DNA328930, NP_038465.1,
220253_s_at
FIG. 2355: PRO23525
FIG. 2356: DNA328931, NP_004226.1, 220266_s_at
FIG. 2357: PRO84647
FIG. 2358: DNA328932, NP_079057.1, 220301_at
FIG. 2359: PRO84648
FIG. 2360: DNA328933, NP_057466.1, 220307_at
FIG. 2361: PRO9891
FIG. 2362: DNA256735, NP_060175.1, 220333_at
FIG. 2363: PRO51669
FIG. 2364A-B: DNA328934, EML4, 220386_s_at
FIG. 2365: PRO84649
FIG. 2366: DNA328935, NP_009002.1, 220387_s_at
FIG. 2367: PRO84650
FIG. 2368: DNA254861, MCOLN3, 220484_at
FIG. 2369: PRO49953
FIG. 2370: DNA328936, NP_066998.1, 220491_at
FIG. 2371: PRO1003
FIG. 2372: DNA328937, PHEMX, 220558_x_at
FIG. 2373: PRO12380
FIG. 2374: DNA328938, NP_060617.1, 220643_s_at
FIG. 2375: PRO84651
FIG. 2376: DNA323756, NP_057267.2, 220688_s_at
FIG. 2377: PRO80512
FIG. 2378: DNA328939, NP_008834.1, 220741_s_at
FIG. 2379: PRO84652
FIG. 2380: DNA288247, NP_478059.1, 220892_s_at
FIG. 2381: PRO70011
FIG. 2382: DNA328940, NP_078893.1, 220933_s_at
FIG. 2383: PRO84653
FIG. 2384: DNA328941, NP_055218.2, 220937_s_at
FIG. 2385: PRO84654
FIG. 2386: DNA327953, NP_055182.2, 220942_x_at
FIG. 2387: PRO83878
FIG. 2388A-B: DNA323882, NP_000692.2,
220948_s_at
FIG. 2389: PRO80625
FIG. 2390: DNA327917, NP_112240.1, 220966_x_at
FIG. 2391: PRO83852
FIG. 2392: DNA328942, NP_112216.2, 220985_s_at
FIG. 2393: PRO84655
FIG. 2394: DNA328943, NP_036566.1, 221041_s_at
FIG. 2395: PRO51680
FIG. 2396: DNA328944, NP_060554.1, 221078_s_at
FIG. 2397: PRO84656
FIG. 2398: DNA328945, NP_079177.2, 221081_s_at
FIG. 2399: PRO84657
FIG. 2400: DNA328946, NP_055164.1, 221087_s_at
FIG. 2401: PRO12343
FIG. 2402: DNA328947, NP_055245.1, 221188_s_at
FIG. 2403: PRO84658
FIG. 2404: DNA257293, NP_110396.1, 221210_s_at
FIG. 2405: PRO51888
FIG. 2406: DNA327920, NP_110431.1, 221245_s_at
FIG. 2407: PRO83855
FIG. 2408A-C: DNA328287, NP_072174.2,
221246_x_at
FIG. 2409: PRO84163
FIG. 2410: DNA328948, NP_110437.1, 221253_s_at
FIG. 2411: PRO84659
FIG. 2412: DNA256432, NP_110415.1, 221266_s_at
FIG. 2413: PRO51471
FIG. 2414: DNA328027, NP_112570.2, 221437_s_at
FIG. 2415: PRO83944
FIG. 2416A-B: DNA272014, AF084555,
221482_s_at
FIG. 2417: PRO60289
FIG. 2418: DNA328949, AF157510, 221487_s_at
FIG. 2419: PRO84660
FIG. 2420: DNA328950, NP_057025.1, 221504_s_at
FIG. 2421: PRO84661
FIG. 2422A-B: DNA328951, HSM802232,
221523_s_at
FIG. 2423: PRO84662
FIG. 2424: DNA328952, NP_067067.1, 221524_s_at
FIG. 2425: PRO84663
FIG. 2426A-B: DNA273901, NP_110389.1,
221530_s_at
FIG. 2427: PRO61855
FIG. 2428: DNA274676, DKFZp564A176Homo,
221538_s_at
FIG. 2429: DNA328953, NP_004086.1, 221539_at
FIG. 2430: PRO70296
FIG. 2431A-B: DNA328954, NP_113664.1,
221541_at
FIG. 2432: PRO9851
FIG. 2433A-B: DNA269992, HUMACYLCOA,
221561_at
FIG. 2434: PRO58388
FIG. 2435: DNA328955, NP_054887.1, 221570_s_at
FIG. 2436: PRO84664
FIG. 2437A-B: DNA328956, AF110908, 221571_at
FIG. 2438: DNA188321, NP_004855.1, 221577_x_at
FIG. 2439: PRO21896
FIG. 2440: DNA328957, WBSCR5, 221581_s_at
FIG. 2441: PRO23859
FIG. 2442: DNA328958, BC001663, 221593_s_at
FIG. 2443: PRO84665
FIG. 2444: DNA328959, NP_077027.1, 221620_s_at
FIG. 2445: PRO4302
FIG. 2446: DNA254777, NP_055140.1, 221676_s_at
FIG. 2447: PRO49875
FIG. 2448: DNA327526, NP_065727.2, 221679_s_at
FIG. 2449: PRO83574
FIG. 2450: DNA328960, NP_076426.1, 221692_s_at
FIG. 2451: PRO84666
FIG. 2452: DNA327929, AK001785, 221748_s_at
FIG. 2453: PRO83861
FIG. 2454: DNA328961, NP_443112.1, 221756_at
FIG. 2455: PRO84667
FIG. 2456: DNA328962, BC021574, 221759_at
FIG. 2457: PRO82746
FIG. 2458A-B: DNA328963, 328765.9, 221760_at
FIG. 2459: PRO84668
FIG. 2460A-B: DNA327930, 1455324.9, 221765_at
FIG. 2461: PRO83862
FIG. 2462: DNA328964, AK056028, 221770_at
FIG. 2463: PRO84669
FIG. 2464A-C: DNA328965, AB051505, 221778_at
FIG. 2465A-B: DNA328966, BAB14908.1,
221790_s_at
FIG. 2466: PRO84670
FIG. 2467: DNA328967, BC017905, 221815_at
FIG. 2468: PRO84671
FIG. 2469: DNA274058, NP_057203.1, 221816_s_at
FIG. 2470: PRO61999
FIG. 2471A-B: DNA328968, 1322249.6, 221830_at
FIG. 2472: PRO62511
FIG. 2473: DNA272419, AF105036, 221841_s_at
FIG. 2474: PRO60672
FIG. 2475: DNA299882, DNA299882, 221872_at
FIG. 2476: PRO70856
FIG. 2477: DNA328969, 334394.2, 221878_at
FIG. 2478: PRO84672
FIG. 2479: DNA327933, 1452741.11, 221899_at
FIG. 2480: PRO83865
FIG. 2481: DNA328970, NP_057696.1, 221920_s_at
FIG. 2482: PRO84673
FIG. 2483: DNA328971, AK000472, 221923_s_at
FIG. 2484: PRO84674
FIG. 2485: DNA254787, AK023140, 221935_s_at
FIG. 2486: PRO49885
FIG. 2487: DNA327114, NP_006004.1, 221989_at
FIG. 2488: PRO62466
FIG. 2489: DNA328972, BC009950, 222001_x_at
FIG. 2490: DNA328973, NP_115538.1, 222024_s_at
FIG. 2491: PRO82497
FIG. 2492: DNA119482, DNA119482, 222108_at
FIG. 2493: PRO9850
FIG. 2494: DNA328974, NP_061893.1, 222116_s_at
FIG. 2495: PRO84676
FIG. 2496: DNA287209, NP_056350.1, 222154_s_at
FIG. 2497: PRO69490
FIG. 2498: DNA328975, NP_078807.1, 222155_s_at
FIG. 2499: PRO47688
FIG. 2500: DNA328976, BC019091, 222206_s_at
FIG. 2501: PRO84677
FIG. 2502: DNA256784, NP_075069.1, 222209_s_at
FIG. 2503: PRO51716
FIG. 2504: DNA328977, NP_071344.1, 222216_s_at
FIG. 2505: PRO84678
FIG. 2506: DNA328978, NP_060373.1, 222244_s_at
FIG. 2507: PRO84679
FIG. 2508A-B: DNA328979, 006242.19, 222266_at
FIG. 2509: PRO84680
FIG. 2510: DNA328980, 7692031.1, 222273_at
FIG. 2511: PRO84681
FIG. 2512: DNA328981, AF443871, 222294_s_at
FIG. 2513: PRO24633
FIG. 2514: DNA328982, 154391.1, 222313_at
FIG. 2515: PRO84682
FIG. 2516: DNA328983, 206335.1, 222366_at
FIG. 2517: PRO84683

### DETAILED DESCRIPTION OF THE PREFERRED EMBODIMENTS

[0066] I. Definitions

[0067] The terms “PRO polypeptide” and “PRO” as used herein and when immediately followed by a numerical designation refer to various polypeptides, wherein the complete designation (i.e., PRO/number) refers to specific polypeptide sequences as described herein. The terms “PRO/number polypeptide” and “PRO/number” wherein the term “number” is provided as an actual numerical designation as used herein encompass native sequence polypeptides and polypeptide variants (which are further defined herein). The PRO polypeptides described herein may be isolated from a variety of sources, such as from human tissue types or from another source, or prepared by recombinant or synthetic methods. The term “PRO polypeptide” refers to each individual PRO/number polypeptide disclosed herein. All disclosures in this specification which refer to the “PRO polypeptide” refer to each of the polypeptides individually as well as jointly. For example, descriptions of the preparation of, purification of, derivation of, formation of antibodies to or against, administration of, compositions containing, treatment of a disease with, etc., pertain to each polypeptide of the invention individually. The term “PRO polypeptide” also includes variants of the PRO/number polypeptides disclosed herein.

[0068] A “native sequence PRO polypeptide” comprises a polypeptide having the same amino acid sequence as the corresponding PRO polypeptide derived from nature. Such native sequence PRO polypeptides can be isolated from nature or can be produced by recombinant or synthetic means. The term “native sequence PRO polypeptide” specifically encompasses naturally-occurring truncated or secreted forms of the specific PRO polypeptide (e.g., an extracellular domain sequence), naturally-occurring variant forms (e.g., alternatively spliced forms) and naturally-occurring allelic variants of the polypeptide. In various embodiments of the invention, the native sequence PRO polypeptides disclosed herein are mature or full-length native sequence polypeptides comprising the full-length amino acids sequences shown in the accompanying figures. Start and stop codons are shown in bold font and underlined in the figures. However, while the PRO polypeptide disclosed in the accompanying figures are shown to begin with methionine residues designated herein as amino acid position 1 in the figures, it is conceivable and possible that other methionine residues located either upstream or downstream from the amino acid position 1 in the figures may be employed as the starting amino acid residue for the PRO polypeptides.

[0069] The PRO polypeptide “extracellular domain” or “ECD” refers to a form of the PRO polypeptide which is essentially free of the transmembrane and cytoplasmic domains. Ordinarily, a PRO polypeptide ECD will have less than 1% of such transmembrane and/or cytoplasmic domains and preferably, will have less than 0.5% of such domains. It will be understood that any transmembrane domains identified for the PRO polypeptides of the present invention are identified pursuant to criteria routinely employed in the art for identifying that type of hydrophobic domain. The exact boundaries of a transmembrane domain may vary but most likely by no more than about 5 amino acids at either end of the domain as initially identified herein. Optionally, therefore, an extracellular domain of a PRO polypeptide may contain from about 5 or fewer amino acids on either side of the transmembrane domain/extracellular domain boundary as identified in the Examples or specification and such polypeptides, with or without the associated signal peptide, and nucleic acid encoding them, are contemplated by the present invention.

[0070] The approximate location of the “signal-peptides” of the various PRO polypeptides disclosed herein are shown in the present specification and/or the accompanying figures. It is noted, however, that the C-terminal boundary of a signal peptide may vary, but most likely by no more than about 5 amino acids on either side of the signal peptide C-terminal boundary as initially identified herein, wherein the C-terminal boundary of the signal peptide may be identified pursuant to criteria routinely employed in the art for identifying that type of amino acid sequence element (e.g., Nielsen et al., Prot. Eng. 10:1-6 (1997) and von Heinje et al., Nucl. Acids. Res. 14:4683-4690 (1986)). Moreover, it is also recognized that, in some cases, cleavage of a signal sequence from a secreted polypeptide is not entirely uniform, resulting in more than one secreted species. These mature polypeptides, where the signal peptide is cleaved within no more than about 5 amino acids on either side of the C-terminal boundary of the signal peptide as identified herein, and the polynucleotides encoding them, are contemplated by the present invention.

[0071] “PRO polypeptide variant” means an active PRO polypeptide as defined above or below having at least about 80% amino acid sequence identity with a full-length native sequence PRO polypeptide sequence as disclosed herein, a PRO polypeptide sequence lacking the signal peptide as disclosed herein, an extracellular domain of a PRO polypeptide, with or without the signal peptide, as disclosed herein or any other fragment of a full-length PRO polypeptide sequence as disclosed herein. Such PRO polypeptide variants include, for instance, PRO polypeptides wherein one or more amino acid residues are added, or deleted, at the N- or C-terminus of the full-length native amino acid sequence. Ordinarily, a PRO polypeptide variant will have at least about 80% amino acid sequence identity, alternatively at least about 81% amino acid sequence identity, alternatively at least about 82% amino acid sequence identity, alternatively at least about 83% amino acid sequence identity, alternatively at least about 84% amino acid sequence identity, alternatively at least about 85% amino acid sequence identity, alternatively at least about 86% amino acid sequence identity, alternatively at least about 87% amino acid sequence identity, alternatively at least about 88% amino acid sequence identity, alternatively at least about 89% amino acid sequence identity, alternatively at least about 90% amino acid sequence identity, alternatively at least about 91% amino acid sequence identity, alternatively at least about 92% amino acid sequence identity, alternatively at least about 93% amino acid sequence identity, alternatively at least about 94% amino acid sequence identity, alternatively at least about 95% amino acid sequence identity, alternatively at least about 96% amino acid sequence identity, alternatively at least about 97% amino acid sequence identity, alternatively at least about 98% amino acid sequence identity and alternatively at least about 99% amino acid sequence identity to a full-length native sequence PRO polypeptide sequence as disclosed herein, a PRO polypeptide sequence lacking the signal peptide as disclosed herein, an extracellular domain of a PRO polypeptide, with or without the signal peptide, as disclosed herein or any other specifically defined fragment of a full-length PRO polypeptide sequence as disclosed herein. Ordinarily, PRO variant polypeptides are at least about 10 amino acids in length, alternatively at least about 20 amino acids in length, alternatively at least about 30 amino acids in length, alternatively at least about 40 amino acids in length, alternatively at least about 50 amino acids in length, alternatively at least about 60 amino acids in length, alternatively at least about 70 amino acids in length, alternatively at least about 80 amino acids in length, alternatively at least about 90 amino acids in length, alternatively at least about 100 amino acids in length, alternatively at least about 150 amino acids in length, alternatively at least about 200 amino acids in length, alternatively at least about 300 amino acids in length, or more.

[0072] “Percent (%) amino acid sequence identity” with respect to the PRO polypeptide sequences identified herein is defined as the percentage of amino acid residues in a candidate sequence that are identical with the amino acid residues in the specific PRO polypeptide sequence, after aligning the sequences and introducing gaps, if necessary, to achieve the maximum percent sequence identity, and not considering any conservative substitutions as part of the sequence identity. Alignment for purposes of determining percent amino acid sequence identity can be achieved in various ways that are within the skill in the art, for instance, using publicly available computer software such as BLAST, BLAST-2, ALIGN or Megalign (DNASTAR) software. Those skilled in the art can determine appropriate parameters for measuring alignment, including any algorithms needed to achieve maximal alignment over the full length of the sequences being compared. For purposes herein, however, % amino acid sequence identity values are generated using the sequence comparison computer program ALIGN-2, wherein the complete source code for the ALIGN-2 program is provided in Table 1 below. The ALIGN-2 sequence comparison computer program was authored by Genentech, Inc. and the source code shown in Table 1 below has been filed with user documentation in the U.S. Copyright Office, Washington D.C., 20559, where it is registered under U.S. Copyright Registration No. TXU510087. The ALIGN-2 program is publicly available through Genentech, Inc., South San Francisco, Calif. or may be compiled from the source code provided in Table 1 below. The ALIGN-2 program should be compiled for use on a UNIX operating system, preferably digital UNIX V4.0D. All sequence comparison parameters are set by the ALIGN-2 program and do not vary.

[0073] In situations where ALIGN-2 is employed for amino acid sequence comparisons, the % amino acid sequence identity of a given amino acid sequence A to, with, or against a given amino acid sequence B (which can alternatively be phrased as a given amino acid sequence A that has or comprises a certain % amino acid sequence identity to, with, or against a given amino acid sequence B) is calculated as follows:
100 times the fraction X/Y
where X is the number of amino acid residues scored as identical matches by the sequence alignment program ALIGN-2 in that program's alignment of A and B, and where Y is the total number of amino acid residues in B. It will be appreciated that where the length of amino acid sequence A is not equal to the length of amino acid sequence B, the % amino acid sequence identity of A to B will not equal the % amino acid sequence identity of B to A. As examples of % amino acid sequence identity calculations using this method, Tables 2 and 3 demonstrate how to calculate the % amino acid sequence identity of the amino acid sequence designated “Comparison Protein” to the amino acid sequence designated “PRO”, wherein “PRO” represents the amino acid sequence of a hypothetical PRO polypeptide of interest, “Comparison Protein” represents the amino acid sequence of a polypeptide against which the “PRO” polypeptide of interest is being compared, and “X, “Y” and “Z” each represent different hypothetical amino acid residues.

[0074] Unless specifically stated otherwise, all % amino acid sequence identity values used herein are obtained as described in the immediately preceding paragraph using the ALIGN-2 computer program. However, % amino acid sequence identity values may also be obtained as described below by using the WU-BLAST-2 computer program (Altschul et. al., Methods in Enzymology 266:460-480 (1996)). Most of the WU-BLAST-2 search parameters are set to the default values. Those not set to default values, i.e., the adjustable parameters, are set with the following values: overlap span=1, overlap fraction=0.125, word threshold (T)=11, and scoring matrix=BLOSUM62. When WU-BLAST-2 is employed, a % amino acid sequence identity value is determined by dividing (a) the number of matching identical amino acid residues between the amino acid sequence of the PRO polypeptide of interest having a sequence derived from the native PRO polypeptide and the comparison amino acid sequence of interest (i.e., the sequence against which the PRO polypeptide of interest is being compared which may be a PRO variant polypeptide) as determined by WU-BLAST-2 by (b) the total number of amino acid residues of the PRO polypeptide of interest. For example, in the statement “a polypeptide comprising an the amino acid sequence A which has or having at least 80% amino acid sequence identity to the amino acid sequence B”, the amino acid sequence A is the comparison amino acid sequence of interest and the amino acid sequence B is the amino acid sequence of the PRO polypeptide of interest.

[0075] Percent amino acid sequence identity may also be determined using the sequence comparison program NCBI-BLAST2 (Altschul et al., Nucleic Acids Res. 25:3389-3402 (1997)). The NCBI-BLAST2 sequence comparison program may be downloaded from http://www.ncbi.nlm.nih.gov or otherwise obtained from the National Institute of Health, Bethesda, Md. NCBI-BLAST2 uses several search parameters, wherein all of those search parameters are set to default values including, for example, unmask=yes, strand=all, expected occurrences=10, minimum low complexity length=15/5, multi-pass e-value=0.01, constant for multi-pass=25, dropoff for final gapped alignment=25 and scoring matrix=BLOSUM62.

[0076] In situations where NCBI-BLAST2 is employed for amino acid sequence comparisons, the % amino acid sequence identity of a given amino acid sequence A to, with, or against a given amino acid sequence B (which can alternatively be phrased as a given amino acid sequence A that has or comprises a certain % amino acid sequence identity to, with, or against a given amino acid sequence B) is calculated as follows:
100 times the fraction X/Y
where X is the number of amino acid residues scored as identical matches by the sequence alignment program NCBI-BLAST2 in that program's alignment of A and B, and where Y is the total number of amino acid residues in B. It will be appreciated that where the length of amino acid sequence A is not equal to the length of amino acid sequence B, the % amino acid sequence identity of A to B will not equal the % amino acid sequence identity of B to A.

[0077] “PRO variant polynucleotide” or “PRO variant nucleic acid sequence” means a nucleic acid molecule which encodes an active PRO polypeptide as defined below and which has at least about 80% nucleic acid sequence identity with a nucleotide acid sequence encoding a full-length native sequence PRO polypeptide sequence as disclosed herein, a full-length native sequence PRO polypeptide sequence lacking the signal peptide as disclosed herein, an extracellular domain of a PRO polypeptide, with or without the signal peptide, as disclosed herein or any other fragment of a full-length PRO polypeptide sequence as disclosed herein. Ordinarily, a PRO variant polynucleotide will have at least about 80% nucleic acid sequence identity, alternatively at least about 81% nucleic acid sequence identity, alternatively at least about 82% nucleic acid sequence identity, alternatively at least about 83% nucleic acid sequence identity, alternatively at least about 84% nucleic acid sequence identity, alternatively at least about 85% nucleic acid sequence identity, alternatively at least about 86% nucleic acid sequence identity, alternatively at least about 87% nucleic acid sequence identity, alternatively at least about 88% nucleic acid sequence identity, alternatively at least about 89% nucleic acid sequence identity, alternatively at least about 90% nucleic acid sequence identity, alternatively at least about 91% nucleic acid sequence identity, alternatively at least about 92% nucleic acid sequence identity, alternatively at least about 93% nucleic acid sequence identity, alternatively at least about 94% nucleic acid sequence identity, alternatively at least about 95% nucleic acid sequence identity, alternatively at least about 96% nucleic acid sequence identity, alternatively at least about 97% nucleic acid sequence identity, alternatively at least about 98% nucleic acid sequence identity and alternatively at least about 99% nucleic acid sequence identity with a nucleic acid sequence encoding a full-length native sequence PRO polypeptide sequence as disclosed herein, a full-length native sequence PRO polypeptide sequence lacking the signal peptide as disclosed herein, an extracellular domain of a PRO polypeptide, with or without the signal sequence, as disclosed herein or any other fragment of a full-length PRO polypeptide sequence as disclosed herein. Variants do not encompass the native nucleotide sequence.

[0078] Ordinarily, PRO variant polynucleotides are at least about 30 nucleotides in length, alternatively at least about 60 nucleotides in length, alternatively at least about 90 nucleotides in length, alternatively at least about 120 nucleotides in length, alternatively at least about 150 nucleotides in length, alternatively at least about 180 nucleotides in length, alternatively at least about 210 nucleotides in length, alternatively at least about 240 nucleotides in length, alternatively at least about 270 nucleotides in length, alternatively at least about 300 nucleotides in length, alternatively at least about 450 nucleotides in length, alternatively at least about 600 nucleotides in length, alternatively at least about 900 nucleotides in length, or more.

[0079] “Percent (%) nucleic acid sequence identity” with respect to PRO-encoding nucleic acid sequences identified herein is defined as the percentage of nucleotides in a candidate sequence that are identical with the nucleotides in the PRO nucleic acid sequence of interest, after aligning the sequences and introducing gaps, if necessary, to achieve the maximum percent sequence identity. Alignment for purposes of determining percent nucleic acid sequence identity can be achieved in various ways that are within the skill in the ark for instance, using publicly available computer software such as BLAST, BLAST-2, ALIGN or Megalign (DNASTAR) software. For purposes herein, however, % nucleic acid sequence identity values are generated using the sequence comparison computer program ALIGN-2, wherein the complete source code for the ALIGN-2 program is provided in Table 1 below. The ALIGN-2 sequence comparison computer program was authored by Genentech, Inc. and the source code shown in Table 1 below has been filed with user documentation in the U.S. Copyright Office, Washington D.C., 20559, where it is registered under U.S. Copyright Registration No. TXU510087. The ALIGN-2 program is publicly available through Genentech, Inc., South San Francisco, Calif. or may be compiled from the source code provided in Table 1 below. The ALIGN-2 program should be compiled for use on a UNIX operating system, preferably digital UNIX V4.0D. All sequence comparison parameters are set by the ALIGN-2 program and do not vary.

[0080] In situations where ALIGN-2 is employed for nucleic acid sequence comparisons, the % nucleic acid sequence identity of a given nucleic acid sequence C to, with, or against a given nucleic acid sequence D (which can alternatively be phrased as a given nucleic acid sequence C that has or comprises a certain % nucleic acid sequence identity to, with, or against a given nucleic acid sequence D) is calculated as follows:
100 times the fraction W/Z
where W is the number of nucleotides scored as identical matches by the sequence alignment program ALIGN-2 in that program's alignment of C and D, and where Z is the total number of nucleotides in D. It will be appreciated that where the length of nucleic acid sequence C is not equal to the length of nucleic acid sequence D, the % nucleic acid sequence identity of C to D will not equal the % nucleic acid sequence identity of D to C. As examples of % nucleic acid sequence identity calculations, Tables 4 and 5, demonstrate how to calculate the % nucleic acid sequence identity of the nucleic acid sequence designated “Comparison DNA” to the nucleic acid sequence designated “PRO-DNA”, wherein “PRO-DNA” represents a hypothetical PRO-encoding nucleic acid sequence of interest, “Comparison DNA” represents the nucleotide sequence of a nucleic acid molecule against which the “PRO-DNA” nucleic acid molecule of interest is being compared, and “N”, “L” and “V” each represent different hypothetical nucleotides.

[0081] Unless specifically stated otherwise, all % nucleic acid sequence identity values used herein are obtained as described in the immediately preceding paragraph using the ALIGN-2 computer program. However, % nucleic acid sequence identity values may also be obtained as described below by using the WU-BLAST-2 computer program (Altschul et al., Methods in Enzymology 266:460-480 (1996)). Most of the WU-BLAST-2 search parameters are set to the default values. Those not set to default values, i.e., the adjustable parameters, are set with the following values: overlap span=1, overlap fraction=0.125, word threshold (T)=11, and scoring matrix=BLOSUM62. When WU-BLAST-2 is employed, a % nucleic acid sequence identity value is determined by dividing (a) the number of matching identical nucleotides between the nucleic acid sequence of the PRO polypeptide-encoding nucleic acid molecule of interest having a sequence derived from the native sequence PRO polypeptide-encoding nucleic acid and the comparison nucleic acid molecule of interest (i.e., the sequence against which the PRO polypeptide-encoding nucleic acid molecule of interest is being compared which may be a variant PRO polynucleotide) as determined by WU-BLAST-2 by (b) the total number of nucleotides of the PRO polypeptide-encoding nucleic acid molecule of interest. For example, in the statement “an isolated nucleic acid molecule comprising a nucleic acid sequence A which has or having at least 80% nucleic acid sequence identity to the nucleic acid sequence B”, the nucleic acid sequence A is the comparison nucleic acid molecule of interest and the nucleic acid sequence B is the nucleic acid sequence of the PRO polypeptide-encoding nucleic acid molecule of interest.

[0082] Percent nucleic acid sequence identity may also be determined using the sequence comparison program NCBI-BLAST2 (Altschul et al., Nucleic Acids Res. 25:3389-3402 (1997)). The NCBI-BLAST2 sequence comparison program may be downloaded from http://www.ncbi.nlm.nih.gov or otherwise obtained from the National Institute of Health, Bethesda, Md. NCBI-BLAST2 uses several search parameters, wherein all of those search parameters are set to default values including, for example, unmask=yes, strand=all, expected occurrences=10, minimum low complexity length=15/5, multi-pass e-value=0.01, constant for multi-pass=25, dropoff for final gapped alignment=25 and scoring matrix=BLOSUM62.

[0083] In situations where NCBI-BLAST2 is employed for sequence comparisons, the % nucleic acid sequence identity of a given nucleic acid sequence C to, with, or against a given nucleic acid sequence D (which can alternatively be phrased as a given nucleic acid sequence C that has or comprises a certain % nucleic acid sequence identity to, with, or against a given nucleic acid sequence D) is calculated as follows:
100 times the fraction W/Z
where W is the number of nucleotides scored as identical matches by the sequence alignment program NCBI-BLAST2 in that program's alignment of C and D, and where Z is the total number of nucleotides in D. It will be appreciated that where the length of nucleic acid sequence C is not equal to the length of nucleic acid sequence D, the % nucleic acid sequence identity of C to D will not equal the % nucleic acid sequence identity of D to C.

[0084] In other embodiments, PRO variant polynucleotides are nucleic acid molecules that encode an active PRO polypeptide and which are capable of hybridizing, preferably under stringent hybridization and wash conditions, to nucleotide sequences encoding a full-length PRO polypeptide as disclosed herein. PRO variant polypeptides may be those that are encoded by a PRO variant polynucleotide.

[0085] “Isolated,” when used to describe the various polypeptides disclosed herein, means polypeptide that has been identified and separated and/or recovered from a component of its natural environment. Contaminant components of its natural environment are materials that would typically interfere with diagnostic or therapeutic uses for the polypeptide, and may include enzymes, hormones, and other proteinaceous or non-proteinaceous solutes. In preferred embodiments, the polypeptide will be purified (1) to a degree sufficient to obtain at least 15 residues of N-terminal or internal amino acid sequence by use of a spinning cup sequenator, or (2) to homogeneity by SDS-PAGE under non-reducing or reducing conditions using Coomassie blue or, preferably, silver stain. Isolated polypeptide includes polypeptide in situ within recombinant cells, since at least one component of the PRO polypeptide natural environment will not be present. Ordinarily, however, isolated polypeptide will be prepared by at least one purification step.

[0086] An “isolated” PRO polypeptide-encoding nucleic acid or other polypeptide-encoding nucleic acid is a nucleic acid molecule that is identified and separated from at least one contaminant nucleic acid molecule with which it is ordinarily associated in the natural source of the polypeptide-encoding nucleic acid. An isolated polypeptide-encoding nucleic acid molecule is other than in the form or setting in which it is found in nature. Isolated polypeptide-encoding nucleic acid molecules therefore are distinguished from the specific polypeptide-encoding nucleic acid molecule as it exists in natural cells. However, an isolated polypeptide-encoding nucleic acid molecule includes polypeptide-encoding nucleic acid molecules contained in cells that ordinarily express the polypeptide where, for example, the nucleic acid molecule is in a chromosomal location different from that of natural cells.

[0087] The term “control sequences” refers to DNA sequences necessary for the expression of an operably linked coding sequence in a particular host organism. The control sequences that are suitable for prokaryotes, for example, include a promoter, optionally an operator sequence, and a ribosome binding site. Eukaryotic cells are known to utilize promoters, polyadenylation signals, and enhancers.

[0088] Nucleic acid is “operably linked” when it is placed into a functional relationship with another nucleic acid sequence. For example, DNA for a presequence or secretory leader is operably linked to DNA for a polypeptide if it is expressed as a preprotein that participates in the secretion of the polypeptide; a promoter or enhancer is operably linked to a coding sequence if it affects the transcription of the sequence; or a ribosome binding site is operably linked to a coding sequence if it is positioned so as to facilitate translation. Generally, “operably linked” means that the DNA sequences being linked are contiguous, and, in the case of a secretory leader, contiguous and in reading phase. However, enhancers do not have to be contiguous. Linking is accomplished by ligation at convenient restriction sites. If such sites do not exist, the synthetic oligonucleotide adaptors or linkers are used in accordance with conventional practice.

[0089] The term “antibody” is used in the broadest sense and specifically covers, for example, single anti-PRO monoclonal antibodies (including agonist, antagonist, and neutralizing antibodies), anti-PRO antibody compositions with polyepitopic specificity, single chain anti-PRO antibodies, and fragments of anti-PRO antibodies (see below). The term “monoclonal antibody” as used herein refers to an antibody obtained from a population of substantially homogeneous antibodies, i.e., the individual antibodies comprising the population are identical except for possible naturally-occurring mutations that may be present in minor amounts.

[0090] “Stringency” of hybridization reactions is readily determinable by one of ordinary skill in the art, and generally is an empirical calculation dependent upon probe length, washing temperature, and salt concentration. In general, longer probes require higher temperatures for proper annealing, while shorter probes need lower temperatures. Hybridization generally depends on the ability of denatured DNA to reanneal when complementary strands are present in an environment below their melting temperature. The higher the degree of desired homology between the probe and hybridizable sequence, the higher the relative temperature which can be used. As a result, it follows that higher relative temperatures would tend to make the reaction conditions more stringent, while lower temperatures less so. For additional details and explanation of stringency of hybridization reactions, see Ausubel et al., Current Protocols in Molecular Biology, Wiley Interscience Publishers, (1995).

[0091] “Stringent conditions” or “high stringency conditions”, as defined herein, may be identified by those that (1) employ low ionic strength and high temperature for washing, for example 0.015 M sodium chloride/0.0015 M sodium citrate/0.1% sodium dodecyl sulfate at 50° C.; (2) employ during hybridization a denaturing agent, such as formamide, for example, 50% (v/v) formamide with 0.1% bovine serum albumin/0.1% Ficoll/0.1% polyvinylpyrrolidone/50 mM sodium phosphate buffer at pH 6.5 with 750 mM sodium chloride, 75 mM sodium citrate at 42° C.; or (3) employ 50% formamide, 5×SSC (0.75 M NaCl, 0.075 M sodium citrate), 50 mM sodium phosphate (pH 6.8), 0.1% sodium pyrophosphate, 5× Denhardt's solution, sonicated salmon sperm DNA (50 μg/ml), 0.1% SDS, and 10% dextran sulfate at 42° C., with washes at 42° C. in 0.2×SSC (sodium chloride/sodium citrate) and 50% formamide at 55° C., followed by a high-stringency wash consisting of 0.1×SSC containing EDTA at 55° C.

[0092] “Moderately stringent conditions” may be identified as described by Sambrook et al., Molecular Cloning: A Laboratory Manual, New York: Cold Spring Harbor Press, 1989, and include the use of washing solution and hybridization conditions (e.g., temperature, ionic strength and % SDS) less stringent that those described above. An example of moderately stringent conditions is overnight incubation at 37° C. in a solution comprising: 20% formamide, 5×SSC (150 mM NaCl, 15 mM trisodium citrate), 50 mM sodium phosphate (pH 7.6), 5× Denhardt's solution, 10% dextran sulfate, and 20 mg/ml denatured sheared salmon sperm DNA, followed by washing the filters in 1×SSC at about 37-50° C. The skilled artisan will recognize how to adjust the temperature, ionic strength, etc. as necessary to accommodate factors such as probe length and the like.

[0093] The term “epitope tagged” when used herein refers to a chimeric polypeptide comprising a PRO polypeptide fused to a “tag polypeptide”. The tag polypeptide has enough residues to provide an epitope against which an antibody can be made, yet is short enough such that it does not interfere with activity of the polypeptide to which it is fused. The tag polypeptide preferably also is fairly unique so that the antibody does not substantially cross-react with other epitopes. Suitable tag polypeptides generally have at least six amino acid residues and usually between about 8 and 50 amino acid residues (preferably, between about 10 and 20 amino acid residues).

[0094] As used herein, the term “immunoadhesin” designates antibody-like molecules which combine the binding specificity of a heterologous protein (an “adhesin”) with the effector functions of immunoglobulin constant domains. Structurally, the immunoadhesins comprise a fusion of an amino acid sequence with the desired binding specificity which is other than the antigen recognition and binding site of an antibody (i.e., is “heterologous”), and an immunoglobulin constant domain sequence. The adhesin part of an immunoadhesin molecule typically is a contiguous amino acid sequence comprising at least the binding site of a receptor or a ligand. The immunoglobulin constant domain sequence in the immunoadhesin may be obtained from any immunoglobulin, such as IgG-1, IgG-2, IgG-3, or IgG-4 subtypes, IgA (including IgA-1 and IgA-2), IgE, IgD or IgM.

[0095] “Active” or “activity” for the purposes herein refers to form(s) of a PRO polypeptide which retain a biological and/or an immunological activity of native or naturally-occurring PRO, wherein “biological” activity refers to a biological function (either inhibitory or stimulatory) caused by a native or naturally-occurring PRO other than the ability to induce the production of an antibody against an antigenic epitope possessed by a native or naturally-occurring PRO and an “immunological” activity refers to the ability to induce the production of an antibody against an antigenic epitope possessed by a native or naturally-occurring PRO.

[0096] The term “antagonist” is used in the broadest sense, and includes any molecule that partially or fully blocks, inhibits, or neutralizes a biological activity of a native PRO polypeptide disclosed herein. In a similar manner, the term “agonist” is used in the broadest sense and includes any molecule that mimics a biological activity of a native PRO polypeptide disclosed herein. Suitable agonist or antagonist molecules specifically include agonist or antagonist antibodies or antibody fragments, fragments or amino acid sequence variants of native PRO polypeptides, peptides, antisense oligonucleotides, small organic molecules, etc. Methods for identifying agonists or antagonists of a PRO polypeptide may comprise contacting a PRO polypeptide with a candidate agonist or antagonist molecule and measuring a detectable change in one or more biological activities normally associated with the PRO polypeptide.

[0097] “Treatment” refers to both therapeutic treatment and prophylactic or preventative measures, wherein the object is to prevent or slow down (lessen) the targeted pathologic condition or disorder. Those in need of treatment include those already with the disorder as well as those prone to have the disorder or those in whom the disorder is to be prevented.

[0098] “Chronic” administration refers to administration of the agent(s) in a continuous mode as opposed to an acute mode, so as to maintain the initial therapeutic effect (activity) for an extended period of time. “Intermittent” administration is treatment that is not consecutively done without interruption, but rather is cyclic in nature.

[0099] “Mammal” for purposes of treatment refers to any animal classified as a mammal, including humans, domestic and farm animals, and zoo, sports, or pet animals, such as dogs, cats, cattle, horses, sheep, pigs, goats, rabbits, etc. Preferably, the mammal is human.

[0100] Administration “in combination with” one or more further therapeutic agents includes simultaneous (concurrent) and consecutive administration in any order.

[0101] “Carriers” as used herein include pharmaceutically acceptable carriers, excipients, or stabilizers which are nontoxic to the cell or mammal being exposed thereto at the dosages and concentrations employed. Often the physiologically acceptable carrier is an aqueous pH buffered solution. Examples of physiologically acceptable carriers include buffers such as phosphate, citrate, and other organic acids; antioxidants including ascorbic acid; low molecular weight (less than about 10 residues) polypeptide; proteins, such as serum albumin, gelatin, or immunoglobulins; hydrophilic polymers such as polyvinylpyrrolidone; amino acids such as glycine, glutamine, asparagine, arginine or lysine; monosaccharides, disaccharides, and other carbohydrates including glucose, mannose, or dextrins; chelating agents such as EDTA; sugar alcohols such as mannitol or sorbitol; salt-forming counterions such as sodium; and/or nonionic surfactants such as TWEEN™, polyethylene glycol (PEG), and PLURONICS™.

[0102] “Antibody fragments” comprise a portion of an intact antibody, preferably the antigen binding or variable region of the intact antibody. Examples of antibody fragments include Fab, Fab′, F(ab′)₂, and Fv fragments; diabodies; linear antibodies (Zapata et al., Protein Eng. 8(10): 1057-1062 [1995]); single-chain antibody molecules; and multispecific antibodies formed from antibody fragments.

[0103] Papain digestion of antibodies produces two identical antigen-binding fragments, called “Fab” fragments, each with a single antigen-binding site, and a residual “Fc” fragment, a designation reflecting the ability to crystallize readily. Pepsin treatment yields an F(ab′)₂ fragment that has two antigen-combining sites and is still capable of cross-linking antigen.

[0104] “Fv” is the minimum antibody fragment which contains a complete antigen-recognition and binding site. This region consists of a dimer of one heavy- and one light-chain variable domain in tight, non-covalent association. It is in this configuration that the three CDRs of each variable domain interact to define an antigen-binding site on the surface of the V_{H}-V_{L} dimer. Collectively, the six CDRs confer antigen-binding specificity to the antibody. However, even a single variable domain (or half of an Fv comprising only three CDRs specific for an antigen) has the ability to recognize and bind antigen, although at a lower affinity than the entire binding site.

[0105] The Fab fragment also contains the constant domain of the light chain and the first constant domain (CH1) of the heavy chain. Fab fragments differ from Fab′ fragments by the addition of a few residues at the carboxy terminus of the heavy chain CH1 domain including one or more cysteines from the antibody hinge region. Fab′-SH is the designation herein for Fab′ in which the cysteine residue(s) of the constant domains bear a free thiol group. F(ab′)₂ antibody fragments-originally were produced as pairs of Fab′ fragments which have hinge cysteines between them. Other chemical couplings of antibody fragments are also known.

[0106] The “light chains” of antibodies (immunoglobulins) from any vertebrate species can be assigned to one of two clearly distinct types, called kappa and lambda, based on the amino acid sequences of their constant domains.

[0107] Depending on the amino acid sequence of the constant domain of their heavy chains, immunoglobulins can be assigned to different classes. There are five major classes of immunoglobulins: IgA, IgD, IgE, IgG, and IgM, and several of these may be further divided into subclasses (isotypes), e.g., IgG1, IgG2, IgG3, IgG4, IgA, and IgA2.

[0108] “Single-chain Fv” or “sFv” antibody fragments comprise the V_{H} and V_{L} domains of antibody, wherein these domains are present in a single polypeptide chain. Preferably, the Fv polypeptide further comprises a polypeptide linker between the V_{H} and V_{L} domains which enables the sFv to form the desired structure for antigen binding. For a review of sFv, see Pluckthun in The Pharmacology of Monoclonal Antibodies. vol. 113, Rosenburg and Moore eds., Springer-Verlag, New York, pp. 269-315(1994).

[0109] The term “diabodies” refers to small antibody fragments with two antigen-binding sites, which fragments comprise a heavy-chain variable domain (V_{H}) connected to a light-chain variable domain (V_{L}) in the same polypeptide chain (V_{H}-V_{L}). By using a linker that is too short to allow pairing between the two domains on the same chain, the domains are forced to pair with the complementary domains of another chain and create two antigen-binding sites. Diabodies are described more fully in, for example, EP 404,097; WO 93/11161; and Hollinger et al., Proc. Natl. Acad. Sci. USA, 90:6444-6448 (1993).

[0110] An “isolated” antibody is one which has been identified and separated and/or recovered from a component of its natural environment. Contaminant components of its natural environment are materials which would interfere with diagnostic or therapeutic uses for the antibody, and may include enzymes, hormones, and other proteinaceous or nonproteinaceous solutes. In preferred embodiments, the antibody will be purified (1) to greater than 95% by weight of antibody as determined by the Lowry method, and most preferably more than 99% by weight, (2) to a degree sufficient to obtain at least 15 residues of N-terminal or internal amino acid sequence by use of a spinning cup sequenator, or (3) to homogeneity by SDS-PAGE under reducing or nonreducing conditions using Coomassie blue or, preferably, silver stain. Isolated antibody includes the antibody in situ within recombinant cells since at least one component of the antibody's natural environment will not be present Ordinarily, however, isolated antibody will be prepared by at least one purification step.

[0111] An antibody that “specifically binds to” or is “specific for” a particular polypeptide or an epitope on a particular polypeptide is one that binds to that particular polypeptide or epitope on a particular polypeptide without substantially binding to any other polypeptide or polypeptide epitope.

[0112] The word “label” when used herein refers to a detectable compound or composition which is conjugated directly or indirectly to the antibody so as to generate a “labeled” antibody. The label may be detectable by itself (e.g. radioisotope labels or fluorescent labels) or, in the case of an enzymatic label, may catalyze chemical alteration of a substrate compound or composition which is detectable.

[0113] By “solid phase” is meant a non-aqueous matrix to which the antibody of the present invention can adhere. Examples of solid phases encompassed herein include those formed partially or entirely of glass (e.g., controlled pore glass), polysaccharides (e.g., agarose), polyacrylamides, polystyrene, polyvinyl alcohol and silicones. In certain embodiments, depending on the context, the solid phase can comprise the well of an assay plate; in others it is a purification column (e.g., an affinity chromatography column). This term also includes a discontinuous solid phase of discrete particles, such as those described in U.S. Pat. No. 4,275,149.

[0114] A “liposome” is a small vesicle composed of various types of lipids, phospholipids and/or surfactant which is useful for delivery of a drug (such as a PRO polypeptide or antibody thereto) to a mammal. The components of the liposome are commonly arranged in a bilayer formation, similar to the lipid arrangement of biological membranes.

[0115] A “small molecule” is defined herein to have a molecular weight below about 500 Daltons.

[0116] The term “immune related disease” means a disease in which a component of the immune system of a mammal causes, mediates or otherwise contributes to a morbidity in the mammal. Also included are diseases in which stimulation or intervention of the immune response has an ameliorative effect on progression of the disease. Included within this term are immune-mediated inflammatory diseases, non-immune-mediated inflammatory diseases, infectious diseases, immunodeficiency diseases, neoplasia, etc.

[0117] The term “monocyte/macrophage mediated disease” means a disease in which monocytes/macrophages directly or indirectly mediate or otherwise contribute to a morbidity in a mammal. The monocyte/macrophage mediated disease may be associated with cell mediated effects, lymphokine mediated effects, etc, and even effects associated with other immune cells if the cells are stimulated, for example, by the lymphokines secreted by monocytes/macrophages.

[0118] Examples of immune-related and inflammatory diseases, some of which are immune mediated, which can be treated according to the invention include systemic lupus erythematosis, rheumatoid arthritis, juvenile chronic arthritis, spondyloarthropathies, systemic sclerosis (scleroderma), idiopathic inflammatory myopathies (dermatomyositis, polymyositis), Sjögren's syndrome, systemic vasculitis, sarcoidosis, autoimmune hemolytic anemia (immune pancytopenia, paroxysmal nocturnal hemoglobinuria), autoimmune thrombocytopenia (idiopathic thrombocytopenic purpura, immune-mediated thrombocytopenia), thyroiditis (Grave's disease, Hashimoto's thyroiditis, juvenile lymphocytic thyroiditis, atrophic thyroiditis), diabetes mellitus, immune-mediated renal disease (glomerulonephritis, tubulointerstitial nephritis), demyelinating diseases of the central and peripheral nervous systems such as multiple sclerosis, idiopathic demyelinating polyneuropathy or Guillain-Barré syndrome, and chronic inflammatory demyelinating polyneuropathy, hepatobiliary diseases such as infectious hepatitis (hepatitis A, B, C, D, E and other non-hepatotropic viruses), autoimmune chronic active hepatitis, primary biliary cirrhosis, granulomatous hepatitis, and sclerosing cholangitis, inflammatory bowel disease (ulcerative colitis: Crohn's disease), gluten-sensitive enteropathy, and Whipple's disease, autoimmune or immune-mediated skin diseases including bullous skin diseases, erythema multiforme and contact dermatitis, psoriasis, allergic diseases such as asthma, allergic rhinitis, atopic dermatitis, food hypersensitivity and urticaria, immunologic diseases of the lung such as eosinophilic pneumonias, idiopathic pulmonary fibrosis and hypersensitivity pneumonitis, transplantation associated diseases including graft rejection and graft-versus-host-disease. Infectious diseases including viral diseases such as AIDS (HIV infection), hepatitis A, B, C, D, and E, herpes, etc., bacterial infections, fungal infections, protozoal infections and parasitic infections.

[0119] The term “effective amount” is a concentration or amount of a PRO polypeptide and/or agonist/antagonist which results in achieving a particular stated purpose. An “effective amount” of a PRO polypeptide or agonist or antagonist thereof may be determined empirically. Furthermore, a “therapeutically effective amount” is a concentration or amount of a PRO polypeptide and/or agonist/antagonist which is effective for achieving a stated therapeutic effect. This amount may also be determined empirically.

[0120] The term “cytotoxic agent” as used herein refers to a substance that inhibits or prevents the function of cells and/or causes destruction of cells. The term is intended to include radioactive isotopes (e.g., I¹³¹, I¹²⁵, Y⁹⁰ and Re¹⁸⁶), chemotherapeutic agents, and toxins such as enzymatically active toxins of bacterial, fungal, plant or animal origin, or fragments thereof.

[0121] A “chemotherapeutic agent” is a chemical compound useful in the treatment of cancer. Examples of chemotherapeutic agents include adriamycin, doxorubicin, epirubicin, 5-fluorouracil, cytosine arabinoside (“Ara-C”), cyclophosphamide, thiotepa, busulfan, cytoxin, taxoids, e.g., paclitaxel (Taxol, Bristol-Myers Squibb Oncology, Princeton, N.J.), and doxetaxel (Taxotere, Rhône-Poulenc Rorer, Antony, France), toxotere, methotrexate, cisplatin, melphalan, vinblastine, bleomycin, etoposide, ifosfamide, mitomycin C, mitoxantrone, vincristine, vinorelbine, carboplatin, teniposide, daunomycin, carminomycin, aminopterin, dactinomycin, mitomycins, esperamicins (see U.S. Pat. No. 4,675,187), melphalan and other related nitrogen mustards. Also included in this definition are hormonal agents that act to regulate or inhibit hormone action on tumors such as tamoxifen and onapristone.

[0122] A “growth inhibitory agent” when used herein refers to a compound or composition which inhibits growth of a cell, especially cancer cell overexpressing any of the genes identified herein, either in vitro or in vivo. Thus, the growth inhibitory agent is one which significantly reduces the percentage of cells overexpressing such genes in S phase. Examples of growth inhibitory agents include agents that block cell cycle progression (at a place other than S phase), such as agents that induce G1 arrest and M-phase arrest Classical M-phase blockers include the vincas (vincristine and vinblastine), taxol, and topo II inhibitors such as doxorubicin, epirubicin, daunorubicin, etoposide, and bleomycin. Those agents that arrest G1 also spill over into S-phase arrest, for example, DNA alkylating agents such as tamoxifen, prednisone, dacarbazine, mechlorethamine, cisplatin, methotrexate, 5-fluorouracil, and ara-C. Further information can be found in The Molecular Basis of Cancer, Mendelsohn and Israel, eds., Chapter 1, entitled “Cell cycle regulation, oncogens, and antineoplastic drugs” by Murakami et al (WB Saunders: Philadelphia, 1995), especially p. 13.

[0123] The term “cytokine” is a generic term for proteins released by one cell population which act on another cell as intercellular mediators. Examples of such cytokines are lymphokines, monokines, and traditional polypeptide hormones. Included among the cytokines are growth hormone such as human growth hormone, N-methionyl human growth hormone, and bovine growth hormone; parathyroid hormone; thyroxine; insulin; proinsulin; relaxin; prorelaxin; glycoprotein hormones such as follicle stimulating hormone (FSH), thyroid stimulating hormone (TSH), and luteinizing hormone (LH); hepatic growth factor; fibroblast growth factor, prolactin; placental lactogen; tumor necrosis factor-α and -β; mullerian-inhibiting substance; mouse gonadotropin-associated peptide; inhibin; activin; vascular endothelial growth factor; integrin; thrombopoietin (TPO); nerve growth factors such as NGF-β; platelet-growth factor, transforming growth factors (TGFs) such as TGF-α and TGF-β; insulin-like growth factor-I and II; erythropoietin (EPO); osteoinductive factors, interferons such as interferon-α, -β, and -γ; colony stimulation factors (CSFs) such as macrophage-CSF (M-CSF); granulocyte-macrophage-CSF (GM-CSF); and granulocyte-CSF (G-CSF); interleukins (ILs) such as IL-1, IL-1α, IL-2, IL-3, IL-4, IL-5, IL-6, IL-7, IL-8, IL-9, IL-10, IL-11, IL-12; a tumor necrosis factor such as TNF-α or TNF-β; and other polypeptide factors including LIF and kit ligand (KL). As used herein, the term cytokine includes proteins from natural sources or from recombinant cell culture and biologically active equivalents of the native sequence cytokines.

[0124] As used herein, the term “immunoadhesin” designates antibody-like molecules which combine the binding specificity of a heterologous protein (an “adhesin”) with the effector functions of immunoglobulin constant domains. Structurally, the immunoadhesins comprise a fusion of an amino acid sequence with the desired binding specificity which is other than the antigen recognition and binding site of an antibody (i.e., is “heterologous”), and an immunoglobulin constant domain sequence. The adhesin part of an immunoadhesin molecule typically is a contiguous amino acid sequence comprising at least the binding site of a receptor or a ligand. The immunoglobulin constant domain sequence in the immunoadhesin may be obtained from any immunoglobulin, such as IgG-1, IgG-2, IgG-3, or IgG-4 subtypes, IgA (including IgA-1 and IgA-2), IgE, IgD or IgM.

TABLE 2

| | | |
|---|---|---|
| PRO | XXXXXXXXXXXXXXX | (Length = 15 amino acids) |
| Comparison | XXXXXYYYYYYY | (Length = 12 amino acids) |
| Protein | | |

% amino acid sequence identity = (the number of identically matching amino acid residues between the two polypeptide sequences as determined by ALIGN-2) divided by (the total number of amino acid residues of the PRO polypeptide) = 5 divided by 15 = 33.3%

[0125] TABLE 3

| | | |
|---|---|---|
| PRO | XXXXXXXXXX | (Length = 10 amino acids) |
| Comparison | XXXXXYYYYYYZZYZ | (Length = 15 amino acids) |
| Protein | | |

% amino acid sequence identity = (the number of identically matching amino acid residues between the two polypeptide sequences as determined by ALIGN-2) divided by (the total number of amino acid residues of the PRO polypeptide) = 5 divided by 10 = 50%

[0126] TABLE 4

| | | |
|---|---|---|
| PRO-DNA | NNNNNNNNNNNNNN | (Length = 14 nucleotides) |
| Comparison | NNNNNNLLLLLLLLLL | (Length = 16 nucleotides) |
| DNA | | |

% nucleic acid sequence identity = (the number of identically matching nucleotides between the two nucleic acid sequences as determined by ALIGN-2) divided by (the total number of nucleotides of the PRO-DNA nucleic acid sequence) = 6 divided by 14 = 42.9%

[0127] TABLE 5

| | | |
|---|---|---|
| PRO-DNA | NNNNNNNNNNNN | (Length = 12 nucleotides) |
| Comparison | NNNNLLLVV | (Length = 9 nucleotides) |
| DNA | | |

% nucleic acid sequence identity = (the number of identically matching nucleotides between the two nucleic acid sequences as determined by ALIGN-2) divided by (the total number of nucleotides of the PRO-DNA nucleic acid sequence) = 4 divided by 12 = 33.3%

[0128] II. Compositions and Methods of the Invention

[0129] A. Full-Length PRO Polypeptides

[0130] The present invention provides newly identified and isolated nucleotide sequences encoding polypeptides referred to in the present application as PRO polypeptides. In particular, cDNAs encoding various PRO polypeptides have been identified and isolated, as disclosed in further detail in the Examples below. However, for sake of simplicity, in the present specification the protein encoded by the full length native nucleic acid molecules disclosed herein as well as all further native homologues and variants included in the foregoing definition of PRO, will be referred to as “PRO/number”, regardless of their origin or mode of preparation.

[0131] As disclosed in the Examples below, various cDNA clones have been disclosed. The predicted amino acid sequence can be determined from the nucleotide sequence using routine skill. For the PRO polypeptides and encoding nucleic acids described herein, Applicants have identified what is believed to be the reading frame best identifiable with the sequence information available at the time.

[0132] B. PRO Polypeptide Variants

[0133] In addition to the full-length native sequence PRO polypeptides described herein, it is contemplated that PRO variants can be prepared. PRO variants can be prepared by introducing appropriate nucleotide changes into the PRO DNA, and/or by synthesis of the desired PRO polypeptide. Those skilled in the art will appreciate that amino acid changes may alter post-translational processes of the PRO, such as changing the number or position of glycosylation sites or altering the membrane anchoring characteristics.

[0134] Variations in the native full-length sequence PRO or in various domains of the PRO described herein, can be made, for example, using any of the techniques and guidelines for conservative and non-conservative mutations set forth, for instance, in U.S. Pat. No. 5,364,934. Variations may be a substitution, deletion or insertion of one or more codons encoding the PRO that results in a change in the amino acid sequence of the PRO as compared with the native sequence PRO. Optionally, the variation is by substitution of at least one amino acid with any other amino acid in one or more of the domains of the PRO. Guidance in determining which amino acid residue may be inserted, substituted or deleted without adversely affecting the desired activity may be found by comparing the sequence of the PRO with that of homologous known protein molecules and minimizing the number of amino acid sequence changes made in regions of high homology. Amino acid substitutions can be the result of replacing one amino acid with another amino acid having similar structural and/or chemical properties, such as the replacement of a leucine with a serine, i.e., conservative amino acid replacements. Insertions or deletions may optionally be in the range of about 1 to 5 amino acids. The variation allowed may be determined by systematically making insertions, deletions or substitutions of amino acids in the sequence and testing the resulting variants for activity exhibited by the full-length or mature native sequence.

[0135] PRO polypeptide fragments are provided herein. Such fragments may be truncated at the N-terminus or C-terminus, or may lack internal residues, for example, when compared with a full length native protein. Certain fragments lack amino acid residues that are not essential for a desired biological activity of the PRO polypeptide.

[0136] PRO fragments may be prepared by any of a number of conventional techniques. Desired peptide fragments may be chemically synthesized. An alternative approach involves generating PRO fragments by enzymatic digestion, e.g., by treating the protein with an enzyme known to cleave proteins at sites defined by particular amino acid residues, or by digesting the DNA with suitable restriction enzymes and isolating the desired fragment. Yet another suitable technique involves isolating and amplifying a DNA fragment encoding a desired polypeptide fragment, by polymerase chain reaction (PCR). Oligonucleotides that define the desired termini of the DNA fragment are employed at the 5′ and 3′ primers in the PCR. Preferably, PRO polypeptide fragments share at least one biological and/or immunological activity with the native PRO polypeptide disclosed herein.

[0137] In particular embodiments, conservative substitutions of interest are shown in Table 6 under the heading of preferred substitutions. If such substitutions result in a change in biological activity, then more substantial changes, denominated exemplary substitutions in Table 6, or as further described below in reference to amino acid classes, are introduced and the products screened.

TABLE 6

| Original | Exemplary | Preferred |
|---|---|---|
| Residue | Substitutions | Substitutions |
| Ala (A) | val; leu; ile | val |
| Arg (R) | lys; gln; asn | lys |
| Asn (N) | gln; his; lys; arg | gln |
| Asp (D) | glu | glu |
| Cys (C) | ser | ser |
| Gln (Q) | asn | asn |
| Glu (E) | asp | asp |
| Gly (G) | pro; ala | ala |
| His (H) | asn; gln; lys; arg | arg |
| Ile (I) | leu; val; met; ala; phe; | leu |
| | norleucine | |
| Leu (L) | norleucine; ile; val; | ile |
| | met; ala; phe | |
| Lys (K) | arg; gln; asn | arg |
| Met (M) | leu; phe; ile | leu |
| Phe (F) | leu; val; ile; ala; tyr | leu |
| Pro (P) | ala | ala |
| Ser (S) | thr | thr |
| Thr (T) | ser | ser |
| Trp (W) | tyr; phe | tyr |
| Tyr (Y) | trp; phe; thr; ser | phe |
| Val (V) | ile; leu; met; phe; | leu |
| | ala; norleucine | |

[0138] Substantial modifications in function or immunological identity of the PRO polypeptide are accomplished by selecting substitutions that differ significantly in their effect on maintaining (a) the structure of the polypeptide backbone in the area of the substitution, for example, as a sheet or helical conformation, (b) the charge or hydrophobicity of the molecule at the target site, or (c) the bulk of the side chain. Naturally occurring residues are divided into groups based on common side-chain properties:

(1) hydrophobic: norleucine, met, ala, val, leu, ile;

(2) neutral hydrophilic: cys, ser, thr;

(3) acidic: asp, glu;

(4) basic: asn, gln, his, lys, arg;

(5) residues that influence chain orientation: gly, pro; and

(6) aromatic: trp, tyr, phe.

[0139] Non-conservative substitutions will entail exchanging a member of one of these classes for another class. Such substituted residues also may be introduced into the conservative substitution sites or, more preferably, into the remaining (non-conserved) sites.

[0140] The variations can be made using methods known in the art such as oligonucleotide-mediated (site-directed) mutagenesis, alanine scanning, and PCR mutagenesis. Site-directed mutagenesis [Carter et al., Nucl. Acids Res. 13:4331 (1986); Zoller et al., Nucl. Acids Res. 10:6487 (1987)], cassette mutagenesis [Wells et al., Gene, 34:315 (1985)], restriction selection mutagenesis [Wells et al., Philos. Trans. R. Soc. London SerA, 317:415 (1986)]or other known techniques can be performed on the cloned DNA to produce the PRO variant DNA.

[0141] Scanning amino acid analysis can also be employed to identify one or more amino acids along a contiguous sequence. Among the preferred scanning amino acids are relatively small, neutral amino acids. Such amino acids include alanine, glycine, serine, and cysteine. Alanine is typically a preferred scanning amino acid among this group because it eliminates the side-chain beyond the beta-carbon and is less likely to alter the main-chain conformation of the variant [Cunningham and Wells, Science, 244: 1081-1085 (1989)]. Alanine is also typically preferred because it is the most common amino acid. Further, it is frequently found in both buried and exposed positions [Creighton, The Proteins. (W.H. Freeman & Co., N.Y.); Chothia, J. Mol. Biol. 150:1 (1976)]. If alanine substitution does not yield adequate amounts of variant, an isoteric amino acid can be used.

[0142] C. Modifications of PRO

[0143] Covalent modifications of PRO are included within the scope of this invention. One type of covalent modification includes reacting targeted amino acid residues of a PRO polypeptide with an organic derivatizing agent that is capable of reacting with selected side chains or the N- or C-terminal residues of the PRO. Derivatization with bifunctional agents is useful, for instance, for crosslinking PRO to a water-insoluble support matrix or surface for use in the method for purifying anti-PRO antibodies, and vice-versa. Commonly used crosslinking agents include, e.g., 1,1-bis(diazoacetyl)-2-phenylethane, glutaraldehyde, N-hydroxysuccinimide esters, for example, esters with 4-azidosalicylic acid, homobifunctional imidoesters, including disuccinimidyl esters such as 3,3′-dithiobis(succinimidylpropionate), bifunctional maleimides such as bis-N-maleimido-1,8-octane and agents such as methyl-3-[(p-azidophenyl)dithio]propioimidate.

[0144] Other modifications include deamidation of glutaminyl and asparaginyl residues to the corresponding glutamyl and aspartyl residues, respectively, hydroxylation of proline and lysine, phosphorylation of hydroxyl groups of seryl or threonyl residues, methylation of the α-amino groups of lysine, arginine, and histidine side chains [T. E. Creighton, Proteins: Structure and Molecular Properties, W.H. Freeman & Co., San Francisco, pp. 79-86 (1983)], acetylation of the N-terminal amine, and amidation of any C-terminal carboxyl group.

[0145] Another type of covalent modification of the PRO polypeptide included within the scope of this invention comprises altering the native glycosylation pattern of the polypeptide. “Altering the native glycosylation pattern” is intended for purposes herein to mean deleting one or more carbohydrate moieties found in native sequence PRO (either by removing the underlying glycosylation site or by deleting the glycosylation by chemical and/or enzymatic means), and/or adding one or more glycosylation sites that are not present in the native sequence PRO. In addition, the phrase includes qualitative changes in the glycosylation of the native proteins, involving a change in the nature and proportions of the various carbohydrate moieties present.

[0146] Addition of glycosylation sites to the PRO polypeptide may be accomplished by altering the amino acid sequence. The alteration may be made, for example, by the addition of, or substitution by, one or more serine or threonine residues to the native sequence PRO (for O-linked glycosylation sites). The PRO amino acid sequence may optionally be altered through changes at the DNA level, particularly by mutating the DNA encoding the PRO polypeptide at preselected bases such that codons are generated that will translate into the desired amino acids.

[0147] Another means of increasing the number of carbohydrate moieties on the PRO polypeptide is by chemical or enzymatic coupling of glycosides to the polypeptide. Such methods are described in the art, e.g., in WO 87/05330 published 11 Sep. 1987, and in Aplin and Wriston, CRC Crit. Rev. Biochem., pp. 259-306 (1981).

[0148] Removal of carbohydrate moieties present on the PRO polypeptide may be accomplished chemically or enzymatically or by mutational substitution of codons encoding for amino acid residues that serve as targets for glycosylation. Chemical deglycosylation techniques are known in the art and described, for instance, by Hakimuddin, et al., Arch. Biochem. Biophys., 259:52 (1987) and by Edge et al., Anal. Biochem. 118:131 (1981). Enzymatic cleavage of carbohydrate moieties on polypeptides can be achieved by the use of a variety of endo- and exo-glycosidases as described by Thotakura et al., Meth. Enzymol., 138:350 (1987).

[0149] Another type of covalent modification of PRO comprises linking the PRO polypeptide to one of a variety of nonproteinaceous polymers, e.g., polyethylene glycol (PEG), polypropylene glycol, or polyoxyalkylenes, in the manner set forth in U.S. Pat. No. 4,640,835; 4,496,689; 4,301,144; 4,670,417; 4,791,192 or 4,179,337.

[0150] The PRO of the present invention may also be modified in a way to form a chimeric molecule comprising PRO fused to another, heterologous polypeptide or amino acid sequence.

[0151] In one embodiment, such a chimeric molecule comprises a fusion of the PRO with a tag polypeptide which provides an epitope to which an anti-tag antibody can selectively bind. The epitope tag is generally placed at the amino- or carboxyl-terminus of the PRO. The presence of such epitope-tagged forms of the PRO can be detected using an antibody against the tag polypeptide. Also, provision of the epitope tag enables the PRO to be readily purified by affinity purification using an anti-tag antibody or another type of affinity matrix that binds to the epitope tag. Various tag polypeptides and their respective antibodies are well known in the art. Examples include poly-histidine (poly-his) or poly-histidine-glycine (poly-his-gly) tags; the flu HA tag polypeptide and its antibody 12CA5 [Field et al., Mol. Cell. Biol., 8:2159-2165 (1988)]; the c-myc tag and the 8F9, 3C7, 6B10, G4, B7 and 9E10 antibodies thereto [Evan et al., Molecular and Cellular Biology, 5:3610-3616 (1985)]; and the Herpes Simplex virus glycoprotein D (gD) tag and its antibody [Paborsky et al., Protein Engineering, 3(6):547-553 (1990)]. Other tag polypeptides include the Flag-peptide [Hopp et al., BioTechnology 6: 1204-1210 (1988)]; the KT3 epitope peptide [Martin et al., Science. 255:192-194 (1992)]; an alpha-tubulin epitope peptide [Skinner et al., J. Biol. Chem., 266:15163-15166 (1991)]; and the T7 gene 10 protein peptide tag [Lutz-Freyermuth et al., Proc. Natl. Acad. Sci. USA, 87:6393-6397 (1990)].

[0152] In an alternative embodiment, the chimeric molecule may comprise a fusion of the PRO with an immunoglobulin or a particular region of an immunoglobulin. For a bivalent form of the chimeric molecule (also referred to as an “immunoadhesin”), such a fusion could be to the Fc region of an IgG molecule. The Ig fusions preferably include the substitution of a soluble (transmembrane domain deleted or inactivated) form of a PRO polypeptide in place of at least one variable region within an Ig molecule. In a particularly preferred embodiment, the immunoglobulin fusion includes the hinge, CH2 and CH3, or the hinge, CH1, CH2 and CH3 regions of an IgG1 molecule. For the production of immunoglobulin fusions see also U.S. Pat. No. 5,428,130 issued Jun. 27, 1995.

[0153] D. Preparation of PRO

[0154] The description below relates primarily to production of PRO by culturing cells transformed or transfected with a vector containing PRO nucleic acid. It is, of course, contemplated that alternative methods, which are well known in the art, may be employed to prepare PRO. For instance, the PRO sequence, or portions thereof, may be produced by direct peptide synthesis using solid-phase techniques [see, e.g., Stewart et al., Solid-Phase Peptide Synthesis, W.H. Freeman Co., San Francisco, Calif. (1969); Merrifield, J. Am. Chem. Soc. 85:2149-2154 (1963)]. In vitro protein synthesis may be performed using manual techniques or by automation. Automated synthesis may be accomplished, for instance, using an Applied Biosystems Peptide Synthesizer (Foster City, Calif.) using manufacturer's instructions. Various portions of the PRO may be chemically synthesized separately and combined using chemical or enzymatic methods to produce the full-length PRO.

[0155] 1. Isolation of DNA Encoding PRO

[0156] DNA encoding PRO may be obtained from a cDNA library prepared from tissue believed to possess the PRO mRNA and to express it at a detectable level. Accordingly, human PRO DNA can be conveniently obtained from a cDNA library prepared from human tissue, such as described in the Examples. The PRO-encoding gene may also be obtained from a genomic library or by known synthetic procedures (e.g., automated nucleic acid synthesis).

[0157] Libraries can be screened with probes (such as antibodies to the PRO or oligonucleotides of at least about 20-80 bases) designed to identify the gene of interest or the protein encoded by it. Screening the cDNA or genomic library with the selected probe may be conducted using standard procedures, such as described in Sambrook et al., Molecular Cloning: A Laboratory Manual (New York: Cold Spring Harbor Laboratory Press, 1989). An alternative means to isolate the gene encoding PRO is to use PCR methodology [Sambrook et al., supra: Dieffenbach et al., PCR Primer: A Laboratory Manual (Cold Spring Harbor Laboratory Press, 1995)].

[0158] The Examples below describe techniques for screening a cDNA library. The oligonucleotide sequences selected as probes should be of sufficient length and sufficiently unambiguous that false positives are minimized. The oligonucleotide is preferably labeled such that it can be detected upon hybridization to DNA in the library being screened. Methods of labeling are well known in the art, and include the use of radiolabels like ³²P-labeled ATP, biotinylation or enzyme labeling. Hybridization conditions, including moderate stringency and high stringency, are provided in Sambrook et al., supra.

[0159] Sequences identified in such library screening methods can be compared and aligned to other known sequences deposited and available in public databases such as GenBank or other private sequence databases. Sequence identity (at either the amino acid or nucleotide level) within defined regions of the molecule or across the full-length sequence can be determined using methods known in the art and as described herein.

[0160] Nucleic acid having protein coding sequence may be obtained by screening selected cDNA or genomic libraries using the deduced amino acid sequence disclosed herein for the first time, and, if necessary, using conventional primer extension procedures as described in Sambrook et al., supra, to detect precursors and processing intermediates of mRNA that may not have been reverse-transcribed into cDNA.

[0161] 2. Selection and Transformation of Host Cells

[0162] Host cells are transfected or transformed with expression or cloning vectors described herein for PRO production and cultured in conventional nutrient media modified as appropriate for inducing promoters, selecting transformants, or amplifying the genes encoding the desired sequences. The culture conditions, such as media, temperature, pH and the like, can be selected by the skilled artisan without undue experimentation. In general, principles, protocols, and practical techniques for maximizing the productivity of cell cultures can be found in Mammalian Cell Biotechnology: a Practical Approach, M. Butler, ed. (IRL Press, 1991) and Sambrook et al., supra.

[0163] Methods of eukaryotic cell transfection and prokaryotic cell transformation are known to the ordinarily skilled artisan, for example, CaCl₂, CaPO₄, liposome-mediated and electroporation. Depending on the host cell used, transformation is performed using standard techniques appropriate to such cells. The calcium treatment employing calcium chloride, as described in Sambrook et al., supra, or electroporation is generally used for prokaryotes. Infection with Agrobacterium tumefaciens is used for transformation of certain plant cells, as described by Shaw et al., Gene, 23:315 (1983) and WO 89/05859 published 29 Jun. 1989. For mammalian cells without such cell walls, the calcium phosphate precipitation method of Graham and van der Eb, Virology 52:456-457 (1978) can be employed. General aspects of mammalian cell host system transfections have been described in U.S. Pat. No. 4,399,216. Transformations into yeast are typically carried out according to the method of Van Solingen et al., J. Bact., 130:946 (1977) and Hsiao et al., Proc. Natl. Acad. Sci. (USA), 76:3829 (1979). However, other methods for introducing DNA into cells, such as by nuclear microinjection, electroporation, bacterial protoplast fusion with intact cells, or polycations, e.g., polybrene, polyornithine, may also be used. For various techniques for transforming mammalian cells, see Keown et al., Methods in Enzymology. 185:527-537 (1990) and Mansour et al., Nature, 336:348-352 (1988).

[0164] Suitable host cells for cloning or expressing the DNA in the vectors herein include prokaryote, yeast, or higher eukaryote cells. Suitable prokaryotes include but are not limited to eubacteria, such as Gram-negative or Gram-positive organisms, for example, Enterobacteriaceae such as E. coli. Various E. coli strains are publicly available, such as E. coli K12 strain MM294 (ATCC 31,446); E. coli X1776 (ATCC 31,537); E. coli strain W3110 (ATCC 27,325) and K5 772 (ATCC 53,635). Other suitable prokaryotic host cells include Enterobacteriaceae such as Escherichia, e.g., E. coli, Enterobacter, Erwinia, Klebsiella, Proteus, Salmonella, e.g., Salmonella typhimurium, Serratia, e.g., Serratia marcescans, and Shigella, as well as Bacilli such as B. subtilis and B. licheniformis (e.g., B. licheniformis 41P disclosed in DD 266,710 published 12 Apr. 1989), Pseudomonas such as P. aeruginosa, and Streptomyces. These examples are illustrative rather than limiting. Strain W3110 is one particularly preferred host or parent host because it is a common host strain for recombinant DNA product fermentations. Preferably, the host cell secretes minimal amounts of proteolytic enzymes. For example, strain W3110 may be modified to effect a genetic mutation in the genes encoding proteins endogenous to the host, with examples of such hosts including E. coli W3110 strain 1A2, which has the complete genotype tonA; E. coli W3110 strain 9E4, which has the complete genotype tonA ptr3; E. coli W3110 strain 27C7 (ATCC 55,244), which has the complete genotype tonA ptr3 phoA E15 (argF-lac)169 degP ompT kan^{r} ; E. coli W3110 strain 37D6, which has the complete genotype tonA ptr3 phoA E15 (argF-lac)169 degP ompT rbs7 ilvG kan^{r}; E. coli W3110 strain 40B4, which is strain 37D6 with a non-kanamycin resistant degP deletion mutation; and an E. coli strain having mutant periplasmic protease disclosed in U.S. Pat. No. 4,946,783 issued 7 Aug. 1990. Alternatively, in vitro methods of cloning, e.g., PCR or other nucleic acid polymerase reactions, are suitable.

[0165] In addition to prokaryotes, eukaryotic microbes such as filamentous fungi or yeast are suitable cloning or expression hosts for PRO-encoding vectors. Saccharomyces cerevisiae is a commonly used lower eukaryotic host microorganism. Others include Schizosaccharomyces pombe (Beach and Nurse, Nature, 290: 140 [1981]; EP 139,383 published 2 May 1985); Kluyveromyces hosts (U.S. Pat. No. 4,943,529; Fleer et al., Bio/Technology 9:968-975 (1991)) such as, e.g., K. lactis (MW98-8C, CBS683, CBS4574; Louvencourt et al., J. Bacteriol., 154(2):737-742 [1983]), K. fragilis (ATCC 12,424), K. bulgaricus (ATCC 16,045), K. wickeramii (ATCC 24,178), K. waltii (ATCC 56,500), K. drosophilarum (ATCC 36,906; Van den Berg et al., Bio/Technology 8:135 (1990)), K. thermotolerans, and K. marxianus; yarrowia (EP 402,226); Pichia pastoris (EP 183,070; Sreekishna et al., J. Basic Microbiol., 28:265-278 [1988]); Candida; Trichoderma reesia (EP 244,234); Neurospora crassa (Case et al., Proc. Natl. Acad. Sci. USA, 76:5259-5263 [1979]); Schwanniomyces such as Schwanniomyces occidentalis (EP 394,538 published 31 Oct. 1990); and filamentous fungi such as, e.g., Neurospora, Penicillium, Tolypocladium (WO 91/00357 published 10 Jan. 1991), and Aspergillus hosts such as A. nidulans (Ballance et al., Biochem. Biphys. Res. Commun., 112:284-289 (1983); Tilburn et al., Gene. 26:205-221 [1983]; Yelton et al., Proc. Natl. Acad. Sci. USA, 81: 1470-1474 [1984]) and A. niger (Kelly and Hynes, EMBO J., 4:475-479 [1985]). Methylotropic yeasts are suitable herein and include, but are not limited to, yeast capable of growth on methanol selected from the genera consisting of Hansenula, Candida, Kloeckera, Pichia, Saccharomyces, Torulopsis, and Rhodotorula. A list of specific species that are exemplary of this class of yeasts may be found in C. Anthony, The Biochemistry of Methylotrophs 269 (1982).

[0166] Suitable host cells for the expression of glycosylated PRO are derived from multicellular organisms. Examples of invertebrate cells include insect cells such as Drosophila S2 and Spodoptera Sf9, as well as plant cells. Examples of useful mammalian host cell lines include Chinese hamster ovary (CHO) and COS cells. More specific examples include monkey kidney CV1 line transformed by SV40 (COS-7, ATCC CRL 1651); human embryonic kidney line (293 or 293 cells subcloned for growth in suspension culture, Graham et al., J. Gen Virol., 36:59 (1977)); Chinese hamster ovary cells/-DHFR (CHO, Urlaub and Chasin, Proc. Natl. Acad. Sci. USA, 77:4216 (1980)); mouse sertoli cells (TM4, Mather, Biol. Reprod., 23:243-251 (1980)); human lung cells (W138, ATCC CCL 75); human liver cells (Hep G2, HB 8065); and mouse mammary tumor (MMT 060562, ATCC CCL51). The selection of the appropriate host cell is deemed to be within the skill in the art.

[0167] 3. Selection and Use of a Replicable Vector

[0168] The nucleic acid (e.g., cDNA or genomic DNA) encoding PRO may be inserted into a replicable vector for cloning (amplification of the DNA) or for expression. Various vectors are publicly available. The vector may, for example, be in the form of a plasmid, cosmid, viral particle, or phage. The appropriate nucleic acid sequence may be inserted into the vector by a variety of procedures. In general, DNA is inserted into an appropriate restriction endonuclease site(s) using techniques known in the art. Vector components generally include, but are not limited to, one or more of a signal sequence, an origin of replication, one or more marker genes, an enhancer element, a promoter, and a transcription termination sequence. Construction of suitable vectors containing one or more of these components employs standard ligation techniques which are known to the skilled artisan.

[0169] The PRO may be produced recombinantly not only directly, but also as a fusion polypeptide with a heterologous polypeptide, which may be a signal sequence or other polypeptide having a specific cleavage site at the N-terminus of the mature protein or polypeptide. In general, the signal sequence may be a component of the vector, or it may be a part of the PRO-encoding DNA that is inserted into the vector. The signal sequence may be a prokaryotic signal sequence selected, for example, from the group of the alkaline phosphatase, penicillinase, lpp, or heat-stable enterotoxin II leaders. For yeast secretion the signal sequence may be, e.g., the yeast invertase leader, alpha factor leader (including Saccharomyces and Kluyveromyces α-factor leaders, the latter described in U.S. Pat. No. 5,010,182), or acid phosphatase leader, the C. albicans glucoamylase leader (EP 362,179 published 4 Apr. 1990), or the signal described in WO 90/13646 published 15 Nov. 1990. In mammalian cell expression, mammalian signal sequences may be used to direct secretion of the protein, such as signal sequences from secreted polypeptides of the same or related species, as well as viral secretory leaders.

[0170] Both expression and cloning vectors contain a nucleic acid sequence that enables the vector to replicate in one or more selected host cells. Such sequences are well known for a variety of bacteria, yeast, and viruses. The origin of replication from the plasmid pBR322 is suitable for most Gram-negative bacteria, the 2μ plasmid origin is suitable for yeast, and various viral origins (SV40, polyoma, adenovirus, VSV or BPV) are useful for cloning vectors in mammalian cells.

[0171] Expression and cloning vectors will typically contain a selection gene, also termed a selectable marker. Typical selection genes encode proteins that (a) confer resistance to antibiotics or other toxins, e.g., ampicillin, neomycin, methotrexate, or tetracycline, (b) complement auxotrophic deficiencies, or (c) supply critical nutrients not available from complex media, e.g., the gene-encoding D-alanine racemase for Bacilli.

[0172] An example of suitable selectable markers for mammalian cells are those that enable the identification of cells competent to take up the PRO-encoding nucleic acid, such as DHFR or thymidine kinase. An appropriate host cell when wild-type DHFR is employed is the CHO cell line deficient in DHFR activity, prepared and propagated as described by Urlaub et al., Proc. Natl. Acad. Sci. USA, 77:4216 (1980). A suitable selection gene for use in yeast is the trp1 gene present in the yeast plasmid YRp7 [Stinchcomb et al., Nature, 282:39 (1979); Kingsman et al., Gene. 7:141 (1979); Tschemper et al., Gene, 10:157 (1980)]. The trp1 gene provides a selection marker for a mutant strain of yeast lacking the ability to grow in tryptophan, for example, ATCC No. 44076 or PEP4-1 [Jones, Genetics 85:12 (1977)].

[0173] Expression and cloning vectors usually contain a promoter operably linked to the PRO-encoding nucleic acid sequence to direct mRNA synthesis. Promoters recognized by a variety of potential host cells are well known. Promoters suitable for use with prokaryotic hosts include the β-lactamase and lactose promoter systems [Chang et al., Nature, 275:615 (1978); Goeddel et al., Nature, 281:544 (1979)], alkaline phosphatase, a tryptophan (trp) promoter system [Goeddel, Nucleic Acids Res., 8:4057 (1980); EP 36,776], and hybrid promoters such as the tac promoter [deBoer et al., Proc. Natl. Acad. Sci. USA, 80:21-25 (1983)]. Promoters for use in bacterial systems also will contain a Shine-Dalgarno (S.D.) sequence operably linked to the DNA encoding PRO.

[0174] Examples of suitable promoting sequences for use with yeast hosts include the promoters for 3-phosphoglycerate kinase [Hitzeman et al., J. Biol. Chem., 255:2073 (1980)] or other glycolytic enzymes [Hess et al., J. Adv. Enzyme Reg., 7:149 (1968); Holland, Biochemistry, 17:4900 (1978)], such as enolase, glyceraldehyde-3-phosphate dehydrogenase, hexokinase, pyruvate decarboxylase, phosphofructokinase, glucose-6-phosphate isomerase, 3-phosphoglycerate mutase, pyruvate kinase, triosephosphate isomerase, phosphoglucose isomerase, and glucokinase.

[0175] Other yeast promoters, which are inducible promoters having the additional advantage of transcription controlled by growth conditions, are the promoter regions for alcohol dehydrogenase 2, isocytochrome C, acid phosphatase, degradative enzymes associated with nitrogen metabolism, metallothionein, glyceraldehyde-3-phosphate dehydrogenase, and enzymes responsible for maltose and galactose utilization. Suitable vectors and promoters for use in yeast expression are further described in EP 73,657.

[0176] PRO transcription from vectors in mammalian host cells is controlled, for example, by promoters obtained from the genomes of viruses such as polyoma virus, fowlpox virus (UK 2,211,504 published 5 Jul. 1989), adenovirus (such as Adenovirus 2), bovine papilloma virus, avian sarcoma virus, cytomegalovirus, a retrovirus, hepatitis-B virus and Simian Virus 40 (SV40), from heterologous mammalian promoters, e.g., the actin promoter or an immunoglobulin promoter, and from heat-shock promoters, provided such promoters are compatible with the host cell systems.

[0177] Transcription of a DNA encoding the PRO by higher eukaryotes may be increased by inserting an enhancer sequence into the vector. Enhancers are cis-acting elements of DNA, usually about from 10 to 300 bp, that act on a promoter to increase its transcription. Many sequences are now known from mammalian genes (globin, elastase, albumin, α-fetoprotein, and insulin). Typically, however, one will use an enhancer from a eukaryotic cell virus. Examples include the SV40 enhancer on the late side of the replication origin (bp 100-270), the cytomegalovirus early promoter enhancer, the polyoma enhancer on the late side of the replication origin, and adenovirus enhancers. The enhancer may be spliced into the vector at a position 5′ or 3′ to the PRO coding sequence, but is preferably located at a site 5′ from the promoter.

[0178] Expression vectors used in eukaryotic host cells (yeast, fungi, insect, plant, animal, human, or nucleated cells from other multicellular organisms) will also contain sequences necessary for the termination of transcription and for stabilizing the mRNA. Such sequences are commonly available from the 5′ and, occasionally 3′, untranslated regions of eukaryotic or viral DNAs or cDNAs. These regions contain nucleotide segments transcribed as polyadenylated fragments in the untranslated portion of the mRNA encoding PRO.

[0179] Still other methods, vectors, and host cells suitable for adaptation to the synthesis of PRO in recombinant vertebrate cell culture are described in Gething et al., Nature. 293:620-625 (1981); Mantei et al., Nature. 281:40-46 (1979); EP 117,060; and EP 117,058.

[0180] 4. Detecting Gene Amplification/Expression

[0181] Gene amplification and/or expression may be measured in a sample directly, for example, by conventional Southern blotting, Northern blotting to quantitate the transcription of mRNA [Thomas, Proc. Natl. Acad. Sci. USA. 77:5201-5205 (1980)], dot blotting (DNA analysis), or in situ hybridization, using an appropriately labeled probe, based on the sequences provided herein. Alternatively, antibodies may be employed that can recognize specific duplexes, including DNA duplexes, RNA duplexes, and DNA-RNA hybrid duplexes or DNA-protein duplexes. The antibodies in turn may be labeled and the assay may be carried out where the duplex is bound to a surface, so that upon the formation of duplex on the surface, the presence of antibody bound to the duplex can be detected.

[0182] Gene expression, alternatively, may be measured by immunological methods, such as immunohistochemical staining of cells or tissue sections and assay of cell culture or body fluids, to quantitate directly the expression of gene product. Antibodies useful for immunohistochemical staining and/or assay of sample fluids may be either monoclonal or polyclonal, and may be prepared in any mammal. Conveniently, the antibodies may be prepared against a native sequence PRO polypeptide or against a synthetic peptide based on the DNA sequences provided herein or against exogenous sequence fused to PRO DNA and encoding a specific antibody epitope.

[0183] 5. Purification of Polypeptide

[0184] Forms of PRO may be recovered from culture medium or from host cell lysates. If membrane-bound, it can be released from the membrane using a suitable detergent solution (e.g. Triton-X 100) or by enzymatic cleavage. Cells employed in expression of PRO can be disrupted by various physical or chemical means, such as freeze-thaw cycling, sonication, mechanical disruption, or cell lysing agents.

[0185] It may be desired toto purify PRO from recombinant cell proteins or polypeptides. The following procedures are exemplary of suitable purification procedures: by fractionation on an ion-exchange column; ethanol precipitation; reverse phase HPLC; chromatography on silica or on a cation-exchange resin such as DEAE; chromatofocusing; SDS-PAGE; ammonium sulfate precipitation; gel filtration using, for example, Sephadex G-75; protein A Sepharose columns to remove contaminants such as IgG; and metal chelating columns to bind epitope-tagged forms of the PRO. Various methods of protein purification may be employed and such methods are known in the art and described for example in Deutscher, Methods in Enzymology, 182 (1990); Scopes, Protein Purification: Principles and Practice, Springer-Verlag, New York (1982). The purification step(s) selected will depend, for example, on the nature of the production process used and the particular PRO produced.

[0186] E. Tissue Distribution

[0187] The location of tissues expressing the PRO can be identified by determining mRNA expression in various human tissues. The location of such genes provides information about which tissues are most likely to be affected by the stimulating and inhibiting activities of the PRO polypeptides. The location of a gene in a specific tissue also provides sample tissue for the activity blocking assays discussed below.

[0188] As noted before, gene expression in various tissues may be measured by conventional Southern blotting, Northern blotting to quantitate the transcription of mRNA (Thomas, Proc. Natl. Acad. Sci. USA, 77:5201-5205 [1980]), dot blotting (DNA analysis), or in situ hybridization, using an appropriately labeled probe, based on the sequences provided herein. Alternatively, antibodies may be employed that can recognize specific duplexes, including DNA duplexes, RNA duplexes, and DNA-RNA hybrid duplexes or DNA-protein duplexes.

[0189] Gene expression in various tissues, alternatively, may be measured by immunological methods, such as immunohistochemical staining of tissue sections and assay of cell culture or body fluids, to quantitate directly the expression of gene product. Antibodies useful for immunohistochemical staining and/or assay of sample fluids may be either monoclonal or polyclonal, and may be prepared in any mammal. Conveniently, the antibodies may be prepared against a native sequence of a PRO polypeptide or against a synthetic peptide based on the DNA sequences encoding the PRO polypeptide or against an exogenous sequence fused to a DNA encoding a PRO polypeptide and encoding a specific antibody epitope. General techniques for generating antibodies, and special protocols for Northern blotting and in situ hybridization are provided below.

[0190] F. Antibody Binding Studies

[0191] The activity of the PRO polypeptides can be further verified by antibody binding studies, in which the ability of anti-PRO antibodies to inhibit the effect of the PRO polypeptides, respectively, on tissue cells is tested. Exemplary antibodies include polyclonal, monoclonal, humanized, bispecific, and heteroconjugate antibodies, the preparation of which will be described hereinbelow.

[0192] Antibody binding studies may be carried out in any known assay method, such as competitive binding assays, direct and indirect sandwich assays, and immunoprecipitation assays. Zola, Monoclonal Antibodies: A Manual of Techniques, pp. 147-158 (CRC Press, Inc., 1987).

[0193] Competitive binding assays rely on the ability of a labeled standard to compete with the test sample analyte for binding with a limited amount of antibody. The amount of target protein in the test sample is inversely proportional to the amount of standard that becomes bound to the antibodies. To facilitate determining the amount of standard that becomes bound, the antibodies preferably are insolubilized before or after the competition, so that the standard and analyte that are bound to the antibodies may conveniently be separated from the standard and analyte which remain unbound.

[0194] Sandwich assays involve the use of two antibodies, each capable of binding to a different immunogenic portion, or epitope, of the protein to be detected. In a sandwich assay, the test sample analyte is bound by a first antibody which is immobilized on a solid support, and thereafter a second antibody binds to the analyte, thus forming an insoluble three-part complex. See, e.g., U.S. Pat. No. 4,376,110. The second antibody may itself be labeled with a detectable moiety (direct sandwich assays) or may be measured using an anti-immunoglobulin antibody that is labeled with a detectable moiety (indirect sandwich assay). For example, one type of sandwich assay is an ELISA assay, in which case the detectable moiety is an enzyme.

[0195] For immunohistochemistry, the tissue sample may be fresh or frozen or may be embedded in paraffin and fixed with a preservative such as formalin, for example.

[0196] G. Cell-Based Assays

[0197] Cell-based assays and animal models for immune related diseases can be used to further understand the relationship between the genes and polypeptides identified herein and the development and pathogenesis of immune related disease.

[0198] In a different approach, cells of a cell type known to be involved in a particular immune related disease are transfected with the cDNAs described herein, and the ability of these cDNAs to stimulate or inhibit immune function is analyzed. Suitable cells can be transfected with the desired gene, and monitored for immune function activity. Such transfected cell lines can then be used to test the ability of poly- or monoclonal antibodies or antibody compositions to inhibit or stimulate immune function, for example to modulate monocyte/macrophage proliferation or inflammatory cell infiltration. Cells transfected with the coding sequences of the genes identified herein can further be used to identify drug candidates for the treatment of immune related diseases.

[0199] In addition, primary cultures derived from transgenic animals (as described below) can be used in the cell-based assays herein, although stable cell lines are preferred. Techniques to derive continuous cell lines from transgenic animals are well known in the art (see, e.g., Small et al., Mol. Cell. Biol. 5: 642-648 [1985]).

[0200] The use of an agonist stimulating compound has also been validated experimentally. Activation of 4-1BB by treatment with an agonist anti-4-1BB antibody enhances eradication of tumors. Hellstrom, I. and Hellstrom, K. E., Crit. Rev. Immunol. (1998)18:1. Immunoadjuvant therapy for treatment of tumors, described in more detail below, is another example of the use of the stimulating compounds of the invention.

[0201] Alternatively, an immune stimulating or enhancing effect can also be achieved of a PRO which has vascular permeability enhancing properties. Enhanced vascular permeability would be beneficial to disorders which can be attenuated by local infiltration of immune cells (e.g., monocytes/macrophages, eosinophils, PMNs) and inflammation.

[0202] On the other hand, PRO polypeptides, as well as other compounds of the invention, which are direct inhibitors of monocyte/macrophage proliferation/activation, lymphokine secretion, and/or vascular permeability can be directly used to suppress the immune response. These compounds are useful to reduce the degree of the immune response and to treat immune related diseases characterized by a hyperactive, superoptimal, or autoimmune response. The use of compound which suppress vascular permeability would be expected to reduce inflammation. Such uses would be beneficial in treating conditions associated with excessive inflammation.

[0203] Alternatively, compounds, e.g., antibodies, which bind to stimulating PRO polypeptides and block the stimulating effect of these molecules produce a net inhibitory effect and can be used to suppress the monocyte/macrophage mediated immune response by inhibiting monocyte/macrophage proliferation/activation and/or lymphokine secretion. Blocking the stimulating effect of the polypeptides suppresses the immune response of the mammal.

[0204] H. Animal Models

[0205] The results of the cell based in vitro assays can be further verified using in vivo animal models and assays for monocyte/macrophage function. A variety of well known animal models can be used to further understand the role of the genes identified herein in the development and pathogenesis of immune related disease, and to test the efficacy of candidate therapeutic agents, including antibodies, and other antagonists of the native polypeptides, including small molecule antagonists. The in vivo nature of such models makes them predictive of responses in human patients. Animal models of immune related diseases include both non-recombinant and recombinant (transgenic) animals. Non-recombinant animal models include, for example, rodent, e.g., murine models. Such models can be generated by introducing cells into syngeneic mice using standard techniques, e.g., subcutaneous injection, tail vein injection, spleen implantation, intraperitoneal implantation, implantation under the renal capsule, etc.

[0206] Graft-versus-host disease occurs when immunocompetent cells are transplanted into immunosuppressed or tolerant patients. The donor cells recognize and respond to host antigens. The response can vary from life threatening severe inflammation to mild cases of diarrhea and weight loss. Graft-versus-host disease models provide a means of assessing monocyte/macrophage reactivity against MHC antigens and minor transplant antigens. A suitable procedure is described in detail in Current Protocols in Immunology, above, unit 4.3.

[0207] Animal models for delayed type hypersensitivity provides an assay of cell mediated immune function as well. In chronic Delayed type hypersensitivity (DTH) reactions, monocytes that have differentiated into macrophages lead to the destruction of host tissue which is replaced by fibrous tissue (fibrosis).

[0208] Contact hypersensitivity is a simple delayed type hypersensitivity in vivo assay of cell mediated immune function. In this procedure, cutaneous exposure to exogenous haptens which gives rise to a delayed type hypersensitivity reaction which is measured and quantitated. Contact sensitivity involves an initial sensitizing phase followed by an elicitation phase. The elicitation phase occurs when the T lymphocytes encounter an antigen to which they have had previous contact. Swelling and inflammation occur, making this an excellent model of human allergic contact dermatitis. At this point, monocytes leave the blood and differentiate in to macrophages. A suitable procedure is described in detail in Current Protocols in Immunology, Eds. J. E. Cologan, A. M. Kruisbeek, D. H. Margulies, E. M. Shevach and W. Strober, John Wiley & Sons, Inc., 1994, unit 4.2. See also Grabbe, S. and Schwarz, T, Immun. Today 19 (1): 37-44 (1998)

[0209] Recombinant (transgenic) animal models can be engineered by introducing the coding portion of the genes identified herein into the genome of animals of interest, using standard techniques for producing transgenic animals. Animals that can serve as a target for transgenic manipulation include, without limitation, mice, rats, rabbits, guinea pigs, sheep, goats, pigs, and non-human primates, e.g., baboons, chimpanzees and monkeys. Techniques known in the art to introduce a transgene into such animals include pronucleic microinjection (Hoppe and Wanger, U.S. Pat. No. 4,873,191); retrovirus-mediated gene transfer into germ lines (e.g., Van der Putten et al., Proc. Natl. Acad. Sci. USA 82, 6148-615 [1985]); gene targeting in embryonic stem cells (Thompson et al., Cell 56, 313-321 [1989]); electroporation of embryos (Lo, Mol. Cel. Biol. 3, 1803-1814 [1983]); sperm-mediated gene transfer (Lavitrano et al., Cell 57 717-73 [1989]). For review, see, for example, U.S. Pat. No. 4,736,866.

[0210] For the purpose of the present invention, transgenic animals include those that carry the transgene only in part of their cells (“mosaic animals”). The transgene can be integrated either as a single transgene, or in concatamers, e.g., head-to-head or head-to-tail tandems. Selective introduction of a transgene into a particular cell type is also possible by following, for example, the technique of Lasko et al., Proc. Natl. Acad. Sci. USA 89, 6232-636 (1992).

[0211] The expression of the transgene in transgenic animals can be monitored by standard techniques. For example, Southern blot analysis or PCR amplification can be used to verify the integration of the transgene. The level of mRNA expression can then be analyzed using techniques such as in situ hybridization, Northern blot analysis, PCR, or immunocytochemistry.

[0212] The animals may be further examined for signs of immune disease pathology, for example by histological examination to determine infiltration of immune cells into specific tissues. Blocking experiments can also be performed in which the transgenic animals are treated with the compounds of the invention to determine the extent of the monocytes/macrophage proliferation stimulation or inhibition of the compounds. In these experiments, blocking antibodies which bind to the PRO polypeptide, prepared as described above, are administered to the animal and the effect on immune function is determined.

[0213] Alternatively, “knock out” animals can be constructed which have a defective or altered gene encoding a polypeptide identified herein, as a result of homologous recombination between the endogenous gene encoding the polypeptide and altered genomic DNA encoding the same polypeptide introduced into an embryonic cell of the animal. For example, cDNA encoding a particular polypeptide can be used to clone genomic DNA encoding that polypeptide in accordance with established techniques. A portion of the genomic DNA encoding a particular polypeptide can be deleted or replaced with another gene, such as a gene encoding a selectable marker which can be used to monitor integration. Typically, several kilobases of unaltered flanking DNA (both at the 5′ and 3′ ends) are included in the vector [see e.g., Thomas and Capecchi, Cell, 51:503 (1987) for a description of homologous recombination vectors]. The vector is introduced into an embryonic stem cell line (e.g., by electroporation) and cells in which the introduced DNA has homologously recombined with the endogenous DNA are selected [see e.g., Li et al., Cell, 69:915 (1992)]. The selected cells are then injected into a blastocyst of an animal (e.g., a mouse or rat) to form aggregation chimeras [see e.g., Bradley, in Teratocarcinomas and Embryonic Stem Cells: A Practical Approach, E. J. Robertson, ed. (IRL, Oxford, 1987), pp. 113-152]. A chimeric embryo can then be implanted into a suitable pseudopregnant female foster animal and the embryo brought to term to create a “knock out” animal. Progeny harboring the homologously recombined DNA in their germ cells can be identified by standard techniques and used to breed animals in which all cells of the animal contain the homologously recombined DNA. Knockout animals can be characterized for instance, for their ability to defend against certain pathological conditions and for their development of pathological conditions due to absence of the polypeptide.

[0214] I. ImmunoAdjuvant Therapy

[0215] In one embodiment, the immunostimulating compounds of the invention can be used in immunoadjuvant therapy for the treatment of tumors (cancer). It is now well established that monocytes/macrophages recognize human tumor specific antigens. One group of tumor antigens, encoded by the MAGE, BAGE and GAGE families of genes, are silent in all adult normal tissues, but are expressed in significant amounts in tumors, such as melanomas, lung tumors, head and neck tumors, and bladder carcinomas. DeSmet, C. et al., (1996) Proc. Natl. Acad. Sci. USA, 93:7149. It has been shown that stimulation of immune cells induces tumor regression and an antitumor response both in vitro and in vivo. Melero, I. et al., Nature Medicine (1997) 3:682; Kwon, E. D. et al., Proc. Natl. Acad. Sci. USA (1997) 94: 8099; Lynch, D. H. et al, Nature Medicine (1997) 3:625; Finn, O. J. and Lotze, M. T., J. Immunol. (1998) 21:114. The stimulatory compounds of the invention can be administered as adjuvants, alone or together with a growth regulating agent, cytotoxic agent or chemotherapeutic agent, to stimulate monocyte/macrophage proliferation/activation and an antitumor response to tumor antigens. The growth regulating, cytotoxic, or chemotherapeutic agent may be administered in conventional amounts using known administration regimes. Immunostimulating activity by the compounds of the invention allows reduced amounts of the growth regulating, cytotoxic, or chemotherapeutic agents thereby potentially lowering the toxicity to the patient.

[0216] J. Screening Assays for Drug Candidates

[0217] Screening assays for drug candidates are designed to identify compounds that bind to or complex with the polypeptides encoded by the genes identified herein or a biologically active fragment thereof, or otherwise interfere with the interaction of the encoded polypeptides with other cellular proteins. Such screening assays will include assays amenable to high-throughput screening of chemical libraries, making them particularly suitable for identifying small molecule drug candidates. Small molecules contemplated include synthetic organic or inorganic compounds, including peptides, preferably soluble peptides, (poly)peptide-immunoglobulin fusions, and, in particular, antibodies including, without limitation, poly- and monoclonal antibodies and antibody fragments, single-chain antibodies, anti-idiotypic antibodies, and chimeric or humanized versions of such antibodies or fragments, as well as human antibodies and antibody fragments. The assays can be performed in a variety of formats, including protein-protein binding assays, biochemical screening assays, immunoassays and cell based assays, which are well characterized in the art. All assays are common in that they call for contacting the drug candidate with a polypeptide encoded by a nucleic acid identified herein under conditions and for a time sufficient to allow these two components to interact.

[0218] In binding assays, the interaction is binding and the complex formed can be isolated or detected in the reaction mixture. In a particular embodiment, the polypeptide encoded by the gene identified herein or the drug candidate is immobilized on a solid phase, e.g., on a microtiter plate, by covalent or non-covalent attachments. Non-covalent attachment generally is accomplished by coating the solid surface with a solution of the polypeptide and drying. Alternatively, an immobilized antibody, e.g., a monoclonal antibody, specific for the polypeptide to be immobilized can be used to anchor it to a solid surface. The assay is performed by adding the non-immobilized component, which may be labeled by a detectable label, to the immobilized component, e.g., the coated surface containing the anchored component. When the reaction is complete, the non-reacted components are removed, e.g., by washing, and complexes anchored on the solid surface are detected. When the originally non-immobilized component carries a detectable label, the detection of label immobilized on the surface indicates that complexing occurred. Where the originally non-immobilized component does not carry a label, complexing can be detected, for example, by using a labelled antibody specifically binding the immobilized complex.

[0219] If the candidate compound interacts with but does not bind to a particular protein encoded by a gene identified herein, its interaction with that protein can be assayed by methods well known for detecting protein-protein interactions. Such assays include traditional approaches, such as, cross-linking, co-immunoprecipitation, and co-purification through gradients or chromatographic columns. In addition, protein-protein interactions can be monitored by using a yeast-based genetic system described by Fields and co-workers [Fields and Song, Nature (London) 340, 245-246 (1989); Chien et al., Proc. Natl. Acad. Sci. USA 88, 9578-9582 (1991)] as disclosed by Chevray and Nathans, Proc. Natl. Acad. Sci. USA 89, 5789-5793 (1991). Many transcriptional activators, such as yeast GAL4, consist of two physically discrete modular domains, one acting as the DNA-binding domain, while the other one functioning as the transcription activation domain. The yeast expression system described in the foregoing publications (generally referred to as the “two-hybrid system”) takes advantage of this property, and employs two hybrid proteins, one in which the target protein is fused to the DNA-binding domain of GAL4, and another, in which candidate activating proteins are fused to the activation domain. The expression of a GAL1-lacZ reporter gene under control of a GAL4-activated promoter depends on reconstitution of GAL4 activity via protein protein-interaction. Colonies containing interacting polypeptides are detected with a chromogenic substrate for β-galactosidase. A complete kit (MATCHMAKER™) for identifying protein-protein interactions between two specific proteins using the two-hybrid technique is commercially available from Clontech. This system can also be extended to map protein domains involved in specific protein interactions as well as to pinpoint amino acid residues that are crucial for these interactions.

[0220] In order to find compounds that interfere with the interaction of a gene identified herein and other intra- or extracellular components can be tested, a reaction mixture is usually prepared containing the product of the gene and the intra- or extracellular component under conditions and for a time allowing for the interaction and binding of the two products. To test the ability of a test compound to inhibit binding, the reaction is run in the absence and in the presence of the test compound. In addition, a placebo may be added to a third reaction mixture, to serve as positive control. The binding (complex formation) between the test compound and the intra- or extracellular component present in the mixture is monitored as described above. The formation of a complex in the control reaction(s) but not in the reaction mixture containing the test compound indicates that the test compound interferes with the interaction of the test compound and its reaction partner.

[0221] K. Compositions and Methods for the Treatment of Immune Related Diseases

[0222] The compositions useful in the treatment of immune related diseases include, without limitation, proteins, antibodies, small organic molecules, peptides, phosphopeptides, antisense and ribozyme molecules, triple helix molecules, etc. that inhibit or stimulate immune function, for example, monocyte proliferation/activation, lymphokine release, or immune cell infiltration.

[0223] For example, antisense RNA and RNA molecules act to directly block the translation of mRNA by hybridizing to targeted mRNA and preventing protein translation. When antisense DNA is used, oligodeoxyribonucleotides derived from the translation initiation site, e.g., between about −10 and +10 positions of the target gene nucleotide sequence, are preferred.

[0224] Ribozymes are enzymatic RNA molecules capable of catalyzing the specific cleavage of RNA. Ribozymes act by sequence-specific hybridization to the complementary target RNA, followed by endonucleolytic cleavage. Specific ribozyme cleavage sites within a potential RNA target can be identified by known techniques. For further details see, e.g., Rossi, Current Biology 4,469-471 (1994), and PCT publication No. WO 97/33551 (published Sep. 18, 1997).

[0225] Nucleic acid molecules in triple helix formation used to inhibit transcription should be single-stranded and composed of deoxynucleotides. The base composition of these oligonucleotides is designed such that it promotes triple helix formation via Hoogsteen base pairing rules, which generally require sizeable stretches of purines or pyrimidines on one strand of a duplex. For further details see, e.g., PCT publication No. WO 97/33551, supra.

[0226] These molecules can be identified by any or any combination of the screening assays discussed above and/or by any other screening techniques well known for those skilled in the art.

[0227] L. Anti-PRO Antibodies

[0228] The present invention further provides anti-PRO antibodies. Exemplary antibodies include polyclonal, monoclonal, humanized, bispecific, and heteroconjugate antibodies.

[0229] 1. Polyclonal Antibodies

[0230] The anti-PRO antibodies may comprise polyclonal antibodies. Methods of preparing polyclonal antibodies are known to the skilled artisan. Polyclonal antibodies can be raised in a mammal, for example, by one or more injections of an immunizing agent and, if desired, an adjuvant. Typically, the immunizing agent and/or adjuvant will be injected in the mammal by multiple subcutaneous or intraperitoneal injections. The immunizing agent may include the PRO polypeptide or a fusion protein thereof. It may be useful to conjugate the immunizing agent to a protein known to be immunogenic in the mammal being immunized. Examples of such immunogenic proteins include but are not limited to keyhole limpet hemocyanin, serum albumin, bovine thyroglobulin, and soybean trypsin inhibitor. Examples of adjuvants which may be employed include Freund's complete adjuvant and MPL-TDM adjuvant (monophosphoryl Lipid A, synthetic trehalose dicorynomycolate). The immunization protocol may be selected by one skilled in the art without undue experimentation.

[0231] 2. Monoclonal Antibodies

[0232] The anti-PRO antibodies may, alternatively, be monoclonal antibodies. Monoclonal antibodies may be prepared using hybridoma methods, such as those described by Kohler and Milstein, Nature, 256:495 (1975). In a hybridoma method, a mouse, hamster, or other appropriate host animal, is typically immunized with an immunizing agent to elicit lymphocytes that produce or are capable of producing antibodies that will specifically bind to the immunizing agent. Alternatively, the lymphocytes may be immunized in vitro.

[0233] The immunizing agent will typically include the PRO polypeptide or a fusion protein thereof. Generally, either peripheral blood lymphocytes (“PBLs”) are used if cells of human origin are desired, or spleen cells or lymph node cells are used if non-human mammalian sources are desired. The lymphocytes are then fused with an immortalized cell line using a suitable fusing agent, such as polyethylene glycol, to form a hybridoma cell [Goding, Monoclonal Antibodies: Principles and Practice, Academic Press, (1986) pp. 59-103]. Immortalized cell lines are usually transformed mammalian cells, particularly myeloma cells of rodent, bovine and human origin. Usually, rat or mouse myeloma cell lines are employed. The hybridoma cells may be cultured in a suitable culture medium that preferably contains one or more substances that inhibit the growth or survival of the unfused, immortalized cells. For example, if the parental cells lack the enzyme hypoxanthine guanine phosphoribosyl transferase (HGPRT or HPRT), the culture medium for the hybridomas typically will include hypoxanthine, aminopterin, and thymidine (“HAT medium”), which substances prevent the growth of HGPRT-deficient cells.

[0234] Preferred immortalized cell lines are those that fuse efficiently, support stable high level expression of antibody by the selected antibody-producing cells, and are sensitive to a medium such as HAT medium. More preferred immortalized cell lines are murine myeloma lines, which can be obtained, for instance, from the Salk Institute Cell Distribution Center, San Diego, Calif. and the American Type Culture Collection, Manassas, Va. Human myeloma and mouse-human heteromyeloma cell lines also have been described for the production of human monoclonal antibodies [Kozbor, J. Immunol., 133:3001 (1984); Brodeur et al., Monoclonal Antibody Production Techniques and Applications, Marcel Dekker, Inc., New York, (1987) pp. 51-63].

[0235] The culture medium in which the hybridoma cells are cultured can then be assayed for the presence of monoclonal antibodies directed against PRO. Preferably, the binding specificity of monoclonal antibodies produced by the hybridoma cells is determined by immunoprecipitation or by an in vitro binding assay, such as radioimmunoassay (RIA) or enzyme-linked immunoabsorbent assay (ELISA). Such techniques and assays are known in the art. The binding affinity of the monoclonal antibody can, for example, be determined by the Scatchard analysis of Munson and Pollard, Anal. Biochem., 107:220 (1980).

[0236] After the desired hybridoma cells are identified, the clones may be subcloned by limiting dilution procedures and grown by standard methods [Goding, supra. Suitable culture media for this purpose include, for example, Dulbecco's Modified Eagle's Medium and RPMI-1640 medium. Alternatively, the hybridoma cells may be grown in vivo as ascites in a mammal.

[0237] The monoclonal antibodies secreted by the subclones may be isolated or purified from the culture medium or ascites fluid by conventional immunoglobulin purification procedures such as, for example, protein A-Sepharose, hydroxylapatite chromatography, gel electrophoresis, dialysis, or affinity chromatography.

[0238] The monoclonal antibodies may also be made by recombinant DNA methods, such as those described in U.S. Pat. No. 4,816,567. DNA encoding the monoclonal antibodies of the invention can be readily isolated and sequenced using conventional procedures (e.g., by using oligonucleotide probes that are capable of binding specifically to genes encoding the heavy and light chains of murine antibodies). The hybridoma cells of the invention serve as a preferred source of such DNA. Once isolated, the DNA may be placed into expression vectors, which are then transfected into host cells such as simian COS cells, Chinese hamster ovary (CHO) cells, or myeloma cells that do not otherwise produce immunoglobulin protein, to obtain the synthesis of monoclonal antibodies in the recombinant host cells. The DNA also may be modified, for example, by substituting the coding sequence for human heavy and light chain constant domains in place of the homologous murine sequences [U.S. Pat. No. 4,816,567; Morrison et al., supra] or by covalently joining to the immunoglobulin coding sequence all or part of the coding sequence for a non-immunoglobulin polypeptide. Such a non-immunoglobulin polypeptide can be substituted for the constant domains of an antibody of the invention, or can be substituted for the variable domains of one antigen-combining site of an antibody of the invention to create a chimeric bivalent antibody.

[0239] The antibodies may be monovalent antibodies. Methods for preparing monovalent antibodies are well known in the art. For example, one method involves recombinant expression of immunoglobulin light chain and modified heavy chain. The heavy chain is truncated generally at any point in the Fc region so as to prevent heavy chain crosslinking. Alternatively, the relevant cysteine residues are substituted with another amino acid residue or are deleted so as to prevent crosslinking.

[0240] In vitro methods are also suitable for preparing monovalent antibodies. Digestion of antibodies to produce fragments thereof, particularly, Fab fragments, can be accomplished using routine techniques known in the art.

[0241] 3. Human and Humanized Antibodies

[0242] The anti-PRO antibodies of the invention may further comprise humanized antibodies or human antibodies. Humanized forms of non-human (e.g., murine) antibodies are chimeric immunoglobulins, immunoglobulin chains or fragments thereof (such as Fv, Fab, Fab′, F(ab′)₂ or other antigen-binding subsequences of antibodies) which contain minimal sequence derived from non-human immunoglobulin. Humanized antibodies include human immunoglobulins (recipient antibody) in which residues from a complementary determining region (CDR) of the recipient are replaced by residues from a CDR of a non-human species (donor antibody) such as mouse, rat or rabbit having the desired specificity, affinity and capacity. In some instances, Fv framework residues of the human immunoglobulin are replaced by corresponding non-human residues. Humanized antibodies may also comprise residues which are found neither in the recipient antibody nor in the imported CDR or framework sequences. In general, the humanized antibody will comprise substantially all of at least one, and typically two, variable domains, in which all or substantially all of the CDR regions correspond to those of a non-human immunoglobulin and all or substantially all of the FR regions are those of a human immunoglobulin consensus sequence. The humanized antibody optimally also will comprise at least a portion of an immunoglobulin constant region (Fc), typically that of a human immunoglobulin [Jones et al., Nature. 321:522-525 (1986); Riechmann et al., Nature, 332:323-329 (1988); and Presta, Curr. Op. Struct. Biol., 2:593-596 (1992)].

[0243] Methods for humanizing non-human antibodies are well known in the art. Generally, a humanized antibody has one or more amino acid residues introduced into it from a source which is non-human. These non-human amino acid residues are often referred to as “import” residues, which are typically taken from an “import” variable domain. Humanization can be essentially performed following the method of Winter and co-workers [Jones et al., Nature, 321:522-525 (1986); Riechmann et al., Nature. 332:323-327 (1988); Verhoeyen et al., Science, 239:1534-1536 (1988)], by substituting rodent CDRs or CDR sequences for the corresponding sequences of a human antibody. Accordingly, such “humanized” antibodies are chimeric antibodies (U.S. Pat. No. 4,816,567), wherein substantially less than an intact human variable domain has been substituted by the corresponding sequence from a non-human species. In practice, humanized antibodies are typically human antibodies in which some CDR residues and possibly some FR residues are substituted by residues from analogous sites in rodent antibodies.

[0244] Human antibodies can also be produced using various techniques known in the art, including phage display libraries [Hoogenboom and Winter, J. Mol. Biol., 227:381 (1991); Marks et al., J. Mol. Biol., 222:581 (1991)]. The techniques of Cole et al. and Boerner et al. are also available for the preparation of human monoclonal antibodies (Cole et al., Monoclonal Antibodies and Cancer Therapy, Alan R. Liss, p. 77 (1985) and Boerner et al., J. Immunol., 147(1):86-95(1991)]. Similarly, human antibodies can be made by introducing of human immunoglobulin loci into transgenic animals, e.g., mice in which the endogenous immunoglobulin genes have been partially or completely inactivated. Upon challenge, human antibody production is observed, which closely resembles that seen in humans in all respects, including gene rearrangement, assembly, and antibody repertoire. This approach is described, for example, in U.S. Pat. Nos. 5,545,807; 5,545,806; 5,569,825; 5,625,126; 5,633,425; 5,661,016, and in the following scientific publications: Marks et al., Bio/Technology 10, 779-783 (1992); Lonberg et al., Nature 368 856-859 (1994); Morrison, Nature 368, 812-13 (1994); Fishwild et al., Nature Biotechnology 14, 845-51 (1996); Neuberger, Nature Biotechnology 14, 826 (1996); Lonberg and Huszar, Intern. Rev. Immunol. 13 65-93 (1995).

[0245] The antibodies may also be affinity matured using known selection and/or mutagenesis methods as described above. Preferred affinity matured antibodies have an affinity which is five times, more preferably 10 times, even more preferably 20 or 30 times greater than the starting antibody (generally murine, humanized or human) from which the matured antibody is prepared.

[0246] 4. Bispecific Antibodies

[0247] Bispecific antibodies are monoclonal, preferably human or humanized, antibodies that have binding specificities for at least two different antigens. In the present case, one of the binding specificities is for the PRO, the other one is for any other antigen, and preferably for a cell-surface protein or receptor or receptor subunit.

[0248] Methods for making bispecific antibodies are known in the art. Traditionally, the recombinant production of bispecific antibodies is based on the co-expression of two immunoglobulin heavy-chain/light-chain pairs, where the two heavy chains have different specificities [Milstein and Cuello, Nature. 305:537-539 (1983)]. Because of the random assortment of immunoglobulin heavy and light chains, these hybridomas (quadromas) produce a potential mixture of ten different antibody molecules, of which only one has the correct bispecific structure. The purification of the correct molecule is usually accomplished by affinity chromatography steps. Similar procedures are disclosed in WO 93/08829, published 13 May 1993, and in Traunecker et al., EMBO J., 10:3655-3659 (1991).

[0249] Antibody variable domains with the desired binding specificities (antibody-antigen combining sites) can be fused to immunoglobulin constant domain sequences. The fusion preferably is with an immunoglobulin heavy-chain constant domain, comprising at least part of the hinge, CH2, and CH3 regions. It is preferred to have the first heavy-chain constant region (CH1) containing the site necessary for light-chain binding present in at least one of the fusions. DNAs encoding the immunoglobulin heavy-chain fusions and, if desired, the immunoglobulin light chain, are inserted into separate expression vectors, and are co-transfected into a suitable host organism. For further details of generating bispecific antibodies see, for example, Suresh et al., Methods in Enzymology, 121:210 (1986).

[0250] According to another approach described in WO 96/27011, the interface between a pair of antibody molecules can be engineered to maximize the percentage of heterodimers which are recovered from recombinant cell culture. The preferred interface comprises at least a part of the CH3 region of an antibody constant domain. In this method, one or more small amino acid side chains from the interface of the first antibody molecule are replaced with larger side chains (e.g. tyrosine or tryptophan). Compensatory “cavities” of identical or similar size to the large side chain(s) are created on the interface of the second antibody molecule by replacing large amino acid side chains with smaller ones (e.g. alanine or threonine). This provides a mechanism for increasing the yield of the heterodimer over other unwanted end-products such as homodimers.

[0251] Bispecific antibodies can be prepared as full length antibodies or antibody fragments (e.g. F(ab′)₂ bispecific antibodies). Techniques for generating bispecific antibodies from antibody fragments have been described in the literature. For example, bispecific antibodies can be prepared can be prepared using chemical linkage. Brennan et al., Science 229:81 (1985) describe a procedure wherein intact antibodies are proteolytically cleaved to generate F(ab′)₂ fragments. These fragments are reduced in the presence of the dithiol complexing agent sodium arsenite to stabilize vicinal dithiols and prevent intermolecular disulfide formation. The Fab′ fragments generated are then converted to thionitrobenzoate (TNB) derivatives. One of the Fab′-TNB derivatives is then reconverted to the Fab′-thiol by reduction with mercaptoethylamine and is mixed with an equimolar amount of the other Fab′-TNB derivative to form the bispecific antibody. The bispecific antibodies produced can be used as agents for the selective immobilization of enzymes.

[0252] Fab′ fragments may be directly recovered from E. coli and chemically coupled to form bispecific antibodies. Shalaby et al., J. Exp. Med. 175:217-225 (1992) describe the production of a fully humanized bispecific antibody F(ab′)₂ molecule. Each Fab′ fragment was separately secreted from E. coli and subjected to directed chemical coupling in vitro to form the bispecific antibody. The bispecific antibody thus formed was able to bind to cells overexpressing the ErbB2 receptor and normal human T cells, as well as trigger the lytic activity of human cytotoxic lymphocytes against human breast rumor targets.

[0253] Various technique for making and isolating bispecific antibody fragments directly from recombinant cell culture have also been described. For example, bispecific antibodies have been produced using leucine zippers. Kostelny et al., J. Immunol. 148(5):1547-1553 (1992). The leucine zipper peptides from the Fos and Jun proteins were linked to the Fab′ portions of two different antibodies by gene fusion. The antibody homodimers were reduced at the hinge region to form monomers and then re-oxidized to form the antibody heterodimers. This method can also be utilized for the production of antibody homodimers. The “diabody” technology described by Hollinger et al., Proc. Natl. Acad. Sci. USA 90:6444-6448 (1993) has provided an alternative mechanism for making bispecific antibody fragments. The fragments comprise a heavy-chain variable domain (V_{H}) connected to a light-chain variable domain (V_{L}) by a linker which is too short to allow pairing between the two domains on the same chain. Accordingly, the V_{H} and V_{L} domains of one fragment are forced to pair with the complementary V_{L} and V_{H} domains of another fragment, thereby forming two antigen-binding sites. Another strategy for making bispecific antibody fragments by the use of single-chain Fv (sFv) dimers has also been reported. See, Gruber et al., J. Immunol. 152:5368 (1994).

[0254] Antibodies with more than two valencies are contemplated. For example, trispecific antibodies can be prepared. Tutt et al., J. Immunol. 147:60 (1991).

[0255] Exemplary bispecific antibodies may bind to two different epitopes on a given PRO polypeptide herein. Alternatively, an anti-PRO polypeptide arm may be combined with an arm which binds to a triggering molecule on a leukocyte such as a T-cell receptor molecule (e.g. CD2, CD3, CD28, or B7), or Fc receptors for IgG (FcγR), such as FcγRI (CD64), FcγRII (CD32) and FcγRIII (CD16) so as to focus cellular defense mechanisms to the cell expressing the particular PRO polypeptide. Bispecific antibodies may also be used to localize cytotoxic agents to cells which express a particular PRO polypeptide. These antibodies possess a PRO-binding arm and an arm which binds a cytotoxic agent or a radionuclide chelator, such as EOTUBE, DPTA, DOTA, or TETA. Another bispecific antibody of interest binds the PRO polypeptide and further binds tissue factor (TF).

[0256] 5. Heteroconjugate Antibodies

[0257] Heteroconjugate antibodies are also within the scope of the present invention. Heteroconjugate antibodies are composed of two covalently joined antibodies. Such antibodies have, for example, been proposed to target immune system cells to unwanted cells [U.S. Pat. No. 4,676,980], and for treatment of HIV infection [WO 91/00360; WO 92/200373; EP 03089]. It is contemplated that the antibodies may be prepared in vitro using known methods in synthetic protein chemistry, including those involving crosslinking agents. For example, immunotoxins may be constructed using a disulfide exchange reaction or by forming a thioether bond. Examples of suitable reagents for this purpose include iminothiolate and methyl-4-mercaptobutyrimidate and those disclosed, for example, in U.S. Pat. No. 4,676,980.

[0258] 6. Effector Function Engineering

[0259] It may be desirable to modify the antibody of the invention with respect to effector function, so as to enhance, e.g., the effectiveness of the antibody in treating cancer. For example, cysteine residue(s) may be introduced into the Fc region, thereby allowing interchain disulfide bond formation in this region. The homodimeric antibody thus generated may have improved internalization capability and/or increased complement-mediated cell killing and antibody-dependent cellular cytotoxicity (ADCC). See Caron et al., J. Exp Med., 176: 1191-1195 (1992) and Shopes, J. Immunol., 148: 2918-2922 (1992). Homodimeric antibodies with enhanced anti-tumor activity may also be prepared using heterobifunctional cross-linkers as described in Wolff et al. Cancer Research. 53: 2560-2565 (1993). Alternatively, an antibody can be engineered that has dual Fc regions and may thereby have enhanced complement lysis and ADCC capabilities. See Stevenson et al., Anti-Cancer Drug Design. 3: 219-230 (1989).

[0260] 7. Immunoconjugates

[0261] The invention also pertains to immunoconjugates comprising an antibody conjugated to a cytotoxic agent such as a chemotherapeutic agent, toxin (e.g., an enzymatically active toxin of bacterial, fungal, plant, or animal origin, or fragments thereof), or a radioactive isotope (i.e., a radioconjugate).

[0262] Chemotherapeutic agents useful in the generation of such immunoconjugates have been described above. Enzymatically active toxins and fragments thereof that can be used include diphtheria A chain, nonbinding active fragments of diptheria toxin, exotoxin A chain (from Pseudomonas aeruginosa) ricin A chain, abrin A chain, modeccin A chain, alpha-sarcin, Aleurites fordii proteins, dianthin proteins, Phytolaca americana proteins (PAPI, PAPII, and PAP-S), momordica charantia inhibitor, curcin, crotin, sapaonaria officinalis inhibitor, gelonin, mitogellin, restrictocin, phenomycin, enomycin, and the tricothecenes. A variety of radionuclides are available for the production of radioconjugated antibodies. Examples include ²¹²Bi, ¹³¹I, ¹³¹In, ⁹⁰Y, and ¹⁸⁶Re.

[0263] Conjugates of the antibody and cytotoxic agent are made using a variety of bifunctional protein-coupling agents such as N-succinimidyl-3-(2-pyridyldithiol) propionate (SPDP), iminothiolane (IT), bifunctional derivatives of imidoesters (such as dimethyl adipimidate HCL), active esters (such as disuccinimidyl suberate), aldehydes (such as glutareldehyde), bis-azido compounds (such as bis (p-azidobenzoyl) hexanediamine), bis-diazonium derivatives (such as bis(F-diazoniumbenzoyl)-ethylenediamine), diisocyanates (such as tolyene 2,6-diisocyanate), and bis-active fluorine compounds (such as 1,5-difluoro-2,4-dinitrobenzene). For example, a ricin immunotoxin can be prepared as described in Vitetta et al., Science, 238: 1098 (1987). Carbon-14-labeled 1-isothiocyanatobenzyl-3-methyldiethylene triaminepentaacetic acid (MX-DTPA) is an exemplary chelating agent for conjugation of radionucleotide to the antibody. See WO94/11026.

[0264] In another embodiment, the antibody may be conjugated to a “receptor” (such streptavidin) for utilization in tumor pretargeting wherein the antibody-receptor conjugate is administered to the patient, followed by removal of unbound conjugate from the circulation using a clearing agent and then administration of a ‘ligand’ (e.g., avidin) that is conjugated to a cytotoxic agent (e.g., a radionucleotide).

[0265] 8. Immunoliposomes

[0266] The antibodies disclosed herein may also be formulated as immunoliposomes. Liposomes containing the antibody are prepared by methods known in the art, such as described in Epstein et al., Proc. Natl. Acad. Sci. USA. 82: 3688 (1985); Hwang et al., Proc. Natl. Acad. Sci. USA, 77: 4030 (1980); and U.S. Pat. Nos. 4,485,045 and 4,544,545. Liposomes with enhanced circulation time are disclosed in U.S. Pat. No. 5,013,556.

[0267] Particularly useful liposomes can be generated by the reverse-phase evaporation method with a lipid composition comprising phosphatidylcholine, cholesterol, and PEG-derivatized phosphatidylemanolamine (PEG-PE). Liposomes are extruded through filters of defined pore size to yield liposomes with the desired diameter. Fab′ fragments of the antibody of the present invention can be conjugated to the liposomes as described in Martin et al., J. Biol. Chem., 257: 286-288 (1982) via a disulfide-interchange reaction. A chemotherapeutic agent (such as Doxorubicin) is optionally contained within the liposome. See Gabizon et al., J. National Cancer Inst., 81(19): 1484 (1989).

[0268] M. Pharmaceutical Compositions

[0269] The active PRO molecules of the invention (e.g., PRO polypeptides, anti-PRO antibodies, and/or variants of each) as well as other molecules identified by the screening assays disclosed above, can be administered for the treatment of immune related diseases, in the form of pharmaceutical compositions.

[0270] Therapeutic formulations of the active PRO molecule, preferably a polypeptide or antibody of the invention, are prepared for storage by mixing the active molecule having the desired degree of purity with optional pharmaceutically acceptable carriers, excipients or stabilizers (Remington's Pharmaceutical Sciences 16th edition, Osol, A. Ed. [1980]), in the form of lyophilized formulations or aqueous solutions. Acceptable carriers, excipients, or stabilizers are nontoxic to recipients at the dosages and concentrations employed, and include buffers such as phosphate, citrate, and other organic acids; antioxidants including ascorbic acid and methionine; preservatives (such as octadecyldimethylbenzyl ammonium chloride; hexamethonium chloride; benzalkonium chloride, benzethonium chloride; phenol, butyl or benzyl alcohol; alkyl parabens such as methyl or propyl paraben; catechol; resorcinol; cyclohexanol; 3-pentanol; and m-cresol); low molecular weight (less than about 10 residues) polypeptides; proteins, such as serum albumin, gelatin, or immunoglobulins; hydrophilic polymers such as polyvinylpyrrolidone; amino acids such as glycine, glutamine, asparagine, histidine, arginine, or lysine; monosaccharides, disaccharides, and other carbohydrates including glucose, mannose, or dextrins; chelating agents such as EDTA; sugars such as sucrose, mannitol, trehalose or sorbitol; salt-forming counter-ions such as sodium; metal complexes (e.g., Zn-protein complexes); and/or non-ionic surfactants such as TWEEN™, PLURONICS™ or polyethylene glycol (PEG).

[0271] Compounds identified by the screening assays disclosed herein can be formulated in an analogous manner, using standard techniques well known in the art.

[0272] Lipofections or liposomes can also be used to deliver the PRO molecule into cells. Where antibody fragments are used, the smallest inhibitory fragment which specifically binds to the binding domain of the target protein is preferred. For example, based upon the variable region sequences of an antibody, peptide molecules can be designed which retain the ability to bind the target protein sequence. Such peptides can be synthesized chemically and/or produced by recombinant DNA technology (see, e.g., Marasco et al., Proc. Natl. Acad. Sci. USA 90, 7889-7893 [1993]).

[0273] The formulation herein may also contain more than one active compound as necessary for the particular indication being treated, preferably those with complementary activities that do not adversely affect each other. Alternatively, or in addition, the composition may comprise a cytotoxic agent, cytokine or growth inhibitory agent. Such molecules are suitably present in combination in amounts that are effective for the purpose intended.

[0274] The active PRO molecules may also be entrapped in microcapsules prepared, for example, by coacervation techniques or by interfacial polymerization, for example, hydroxymethylcellulose or gelatin-microcapsules and poly-(methylmethacylate) microcapsules, respectively, in colloidal drug delivery systems (for example, liposomes, albumin microspheres, microemulsions, nano-particles and nanocapsules) or in macroemulsions. Such techniques are disclosed in Remington's Pharmaceutical Sciences 16th edition, Osol, A. Ed. (1980).

[0275] The formulations to be used for in vivo administration must be sterile. This is readily accomplished by filtration through sterile filtration membranes.

[0276] Sustained-release preparations or the PRO molecules may be prepared. Suitable examples of sustained-release preparations include semipermeable matrices of solid hydrophobic polymers containing the antibody, which matrices are in the form of shaped articles, e.g., films, or microcapsules. Examples of sustained-release matrices include polyesters, hydrogels (for example, poly(2-hydroxyethyl-methacrylate), or poly(vinylalcohol)), polylactides (U.S. Pat. No. 3,773,919), copolymers of L-glutamic acid and γ-ethyl-L-glutamate, non-degradable ethylene-vinyl acetate, degradable lactic acid-glycolic acid copolymers such as the LUPRON DEPOT™ (injectable microspheres composed of lactic acid-glycolic acid copolymer and leuprolide acetate), and poly-D-(−)-3-hydroxybutyric acid. While polymers such as ethylene-vinyl acetate and lactic acid-glycolic acid enable release of molecules for over 100 days, certain hydrogels release proteins for shorter time periods. When encapsulated antibodies remain in the body for a long time, they may denature or aggregate as a result of exposure to moisture at 37° C., resulting in a loss of biological activity and possible changes in immunogenicity. Rational strategies can be devised for stabilization depending on the mechanism involved. For example, if the aggregation mechanism is discovered to be intermolecular S—S bond formation through thio-disulfide interchange, stabilization may be achieved by modifying sulfhydryl residues, lyophilizing from acidic solutions, controlling moisture content, using appropriate additives, and developing specific polymer matrix compositions.

[0277] N. Methods of Treatment

[0278] It is contemplated that the polypeptides, antibodies and other active compounds of the present invention may be used to treat various immune related diseases and conditions, such as monocyte/macrophage diseases, including those characterized by infiltration of inflammatory cells into a tissue, stimulation of monocyte/macrophages, inhibition of monocytes/macrophages, increased or decreased vascular permeability or the inhibition thereof.

[0279] Exemplary conditions or disorders to be treated with the polypeptides, antibodies and other compounds of the invention, include, but are not limited to systemic lupus erythematosis, rheumatoid arthritis, juvenile chronic arthritis, osteoarthritis, spondyloarthropathies, systemic sclerosis (scleroderma), idiopathic inflammatory myopathies (dermatomyositis, polymyositis), Sjögren's syndrome, systemic vasculitis, sarcoidosis, autoimmune hemolytic anemia (immune pancytopenia, paroxysmal nocturnal hemoglobinuria), autoimmune thrombocytopenia (idiopathic thrombocytopenic purpura, immune-mediated thrombocytopenia), thyroiditis (Grave's disease, Hashimoto's thyroiditis, juvenile lymphocytic thyroiditis, atrophic thyroiditis), diabetes mellitus, immune-mediated renal disease (glomerulonephritis, tubulointerstitial nephritis), demyelinating diseases of the central and peripheral nervous systems such as multiple sclerosis, idiopathic demyelinating polyneuropathy or Guillain-Barré syndrome, and chronic inflammatory demyelinating polyneuropathy, hepatobiliary diseases such as infectious hepatitis (hepatitis A, B, C, D, E and other non-hepatotropic viruses), autoimmune chronic active hepatitis, primary biliary cirrhosis, granulomatous hepatitis, and sclerosing cholangitis, inflammatory bowel disease (ulcerative colitis: Crohn's disease), gluten-sensitive enteropathy, and Whipple's disease, autoimmune or immune-mediated skin diseases including bullous skin diseases, erythema multiforme and contact dermatitis, psoriasis, allergic diseases such as asthma, allergic rhinitis, atopic dermatitis, food hypersensitivity and urticaria, immunologic diseases of the lung such as eosinophilic pneumonias, idiopathic pulmonary fibrosis and hypersensitivity pneumonitis, transplantation associated diseases including graft rejection and graft-versus-host-disease.

[0280] Rheumatoid arthritis (RA) is a chronic systemic autoimmune inflammatory disease that mainly involves the synovial membrane of multiple joints with resultant injury to the articular cartilage. The pathogenesis is T lymphocyte dependent and is associated with the production of rheumatoid factors, auto-antibodies directed against self IgG, with the resultant formation of immune complexes that attain high levels in joint fluid and blood. These complexes in the joint may induce the marked infiltrate of lymphocytes and monocytes/macrophages into the synovium and subsequent marked synovial changes; the joint space/fluid if infiltrated by similar cells with the addition of numerous neutrophils. Tissues affected are primarily the joints, often in symmetrical pattern. However, extra-articular disease also occurs in two major forms. One form is the development of extra-articular lesions with ongoing progressive joint disease and typical lesions of pulmonary fibrosis, vasculitis, and cutaneous ulcers. The second form of extra-articular disease is the so called Felty's syndrome which occurs late in the RA disease course, sometimes after joint disease has become quiescent, and involves the presence of neutropenia, thrombocytopenia and splenomegaly. This can be accompanied by vasculitis in multiple organs with formations of infarcts, skin ulcers and gangrene. Patients often also develop rheumatoid nodules in the subcutis tissue overlying affected joints; the nodules late stage have necrotic centers surrounded by a mixed inflammatory cell infiltrate. Other manifestations which can occur in RA include: pericarditis, pleuritis, coronary arteritis, intestinal pneumonitis with pulmonary fibrosis, keratoconjunctivitis sicca, and rheumatoid nodules. The number and activation state of macrophages in the inflamed synovius correlates with the significance of RA (Kinne et al., 2000 Arthritis Res. 2: 189-202). As described above, macrophages are not believed to be involved in the early events of RA, but monocytes/macrophages have tissue destructive and tissue remodeling properties which may contribute to both acute and chronic RA.

[0281] Juvenile chronic arthritis is a chronic idiopathic inflammatory disease which begins often at less than 16 years of age. Its phenotype has some similarities to RA; some patients which are rhematoid factor positive are classified as juvenile rheumatoid arthritis. The disease is sub-classified into three major categories: pauciarticular, polyarticular, and systemic. The arthritis can be severe and is typically destructive and leads to joint ankylosis and retarded growth. Other manifestations can include chronic anterior uveitis and systemic amyloidosis.

[0282] Spondyloarthropathies are a group of disorders with some common clinical features and the common association with the expression of HLA-B27 gene product. The disorders include: ankylosing sponylitis, Reiter's syndrome (reactive arthritis), arthritis associated with inflammatory bowel disease, spondylitis associated with psoriasis, juvenile onset spondyloarthropathy and undifferentiated spondyloarthropathy. Distinguishing features include sacroileitis with or without spondylitis; inflammatory asymmetric arthritis; association with HLA-B27 (a serologically defined allele of the HLA-B locus of class I MHC); ocular inflammation, and absence of autoantibodies associated with other rheumatoid disease. It was shown that CD163+ macrophages were increased in the synovial lining and colonic mucosa in Spondyloarthropathy and correlates with the expression of HLA-DR and the production of TNF-alpha (Baeten et al., 2002 J Pathol 196(3):343-350).

[0283] Systemic sclerosis (scleroderma) has an unknown etiology. A hallmark of the disease is induration of the skin; likely this is induced by an active inflammatory process. Scleroderma can be localized or systemic; vascular lesions are common and endothelial cell injury in the microvasculature is an early and important event in the development of systemic sclerosis; the vascular injury may be immune mediated. An immunologic basis is implied by the presence of mononuclear cell infiltrates in the cutaneous lesions and the presence of anti-nuclear antibodies in many patients. ICAM-1 is often upregulated on the cell surface of fibroblasts in skin lesions suggesting that T cell interaction with these cells may have a role in the pathogenesis of the disease. As well as T cells, monocytes/macrophages are proposed to play a role in the progression of scleroderma by secreting fibrogenic cytokines (Yamamoto et al., 2001 J Dermatol Sci 26(2): 133-139). Other organs involved include: the gastrointestinal tract: smooth muscle atrophy and fibrosis resulting in abnormal peristalsis/motility; kidney: concentric subendothelial intimal proliferation affecting small arcuate and interlobular arteries with resultant reduced renal cortical blood flow, results in proteinuria, azotemia and hypertension; skeletal muscle: atrophy, interstitial fibrosis; inflammation; lung: interstitial pneumonitis and interstitial fibrosis; and heart: contraction band necrosis, scarring/fibrosis.

[0284] Idiopathic inflammatory myopathies including dermatomyositis, polymyositis and others are disorders of chronic muscle inflammation of unknown etiology resulting in muscle weakness. Muscle injury/inflammation is often symmetric and progressive. Autoantibodies are associated with most forms. These myositis-specific autoantibodies are directed against and inhibit the function of components, proteins and RNA's, involved in protein synthesis.

[0285] Sjögren's syndrome is due to immune-mediated inflammation and subsequent functional destruction of the tear glands and salivary glands. The disease can be associated with or accompanied by inflammatory connective tissue diseases. The disease is associated with autoantibody production against Ro and La antigens, both of which are small RNA-protein complexes. Lesions result in keratoconjunctivitis sicca, xerostomia, with other manifestations or associations including bilary cirrhosis, peripheral or sensory neuropathy, and palpable purpura.

[0286] Systemic vasculitis are diseases in which the primary lesion is inflammation and subsequent damage to blood vessels which results in ischemia/necrosis/degeneration to tissues supplied by the affected vessels and eventual end-organ dysfunction in some cases. Vasculitis can also occur as a secondary lesion or sequelae to other immune-inflammatory mediated diseases such as rheumatoid arthritis, systemic sclerosis, etc., particularly in diseases also associated with the formation of immune complexes. Diseases in the primary systemic vasculitis group include: systemic necrotizing vasculitis: polyarteritis nodosa, allergic angiitis and granulomatosis, polyangiitis; Wegener's granulomatosis; lymphomatoid granulomatosis; and giant cell arteritis. Miscellaneous vasculitides include: mucocutaneous lymph node syndrome (MLNS or Kawasaki's disease), isolated CNS vasculitis, Behet's disease, thromboangiitis obliterans (Buerger's disease) and cutaneous necrotizing venulitis. The pathogenic mechanism of most of the types of vasculitis listed is believed to be primarily due to the deposition of immunoglobulin complexes in the vessel wall and subsequent induction of an inflammatory response either via ADCC, complement activation, or both.

[0287] Sarcoidosis is a condition of unknown etiology which is characterized by the presence of epithelioid granulomas in nearly any tissue in the body; involvement of the lung is most common. The pathogenesis involves the persistence of activated macrophages and lymphoid cells at sites of the disease with subsequent chronic sequelae resultant from the release of locally and systemically active products released by these cell types.

[0288] Autoimmune hemolytic anemia including autoimmune hemolytic anemia, immune pancytopenia, and paroxysmal noctural hemoglobinuria is a result of production of antibodies that react with antigens expressed on the surface of red blood cells (and in some cases other blood cells including platelets as well) and is a reflection of the removal of those antibody coated cells via complement mediated lysis and/or ADCC/Fc-receptor-mediated mechanisms.

[0289] Thyroiditis including Grave's disease, Hashimoto's thyroiditis, juvenile lymphocytic thyroiditis, and atrophic thyroiditis, are the result of an autoimmune response against thyroid antigens with production of antibodies that react with proteins present in and often specific for the thyroid gland. Experimental models exist including spontaneous models: rats (BUF and BB rats) and chickens (obese chicken strain); inducible models: immunization of animals with either thyroglobulin, thyroid microsomal antigen (thyroid peroxidase).

[0290] Inflammatory and Fibrotic Lung Disease, including Eosinophilic Pneumonias; Idiopathic Pulmonary Fibrosis, and Hypersensitivity Pneumonitis may involve a disregulated immune-inflammatory response. Inhibition of that response would be of therapeutic benefit.

[0291] Psoriasis is a T lymphocyte-mediated inflammatory disease. Lesions contain infiltrates of T lymphocytes, macrophages and antigen processing cells, and some neutrophils.

[0292] Other diseases in which intervention of the immune and/or inflammatory response have benefit are infectious disease including but not limited to viral infection (including but not limited to AIDS, hepatitis A, B, C, D, E and herpes) bacterial infection, fungal infections, and protozoal and parasitic infections. Molecules (or derivatives/agonists) which stimulate the immune reaction can be utilized therapeutically to enhance the immune response to infectious agents), diseases of immunodeficiency (molecules/derivatives/agonists) which stimulate the immune reaction can be utilized therapeutically to enhance the immune response for conditions of inherited, acquired, infectious induced (as in HIV infection), or iatrogenic (i.e., as from chemotherapy) immunodeficiency, and neoplasia.

[0293] It has been demonstrated that some human cancer patients develop an antibody and/or monocyte/macrophage response to antigens on neoplastic cells. It has also been shown in animal models of neoplasia that enhancement of the immune response can result in rejection or regression of that particular neoplasm. Molecules that enhance the monocyte/macrophage response have utility in vivo in enhancing the immune response against neoplasia. Molecules which enhance the monocyte/macrophage proliferative response (or small molecule agonists or antibodies that affected the same receptor in an agonistic fashion) can be used therapeutically to treat cancer. Molecules that inhibit the monocyte/macrophage response also function in vivo during neoplasia to suppress the immune response to a neoplasm; such molecules can either be expressed by the neoplastic cells themselves or their expression can be induced by the neoplasm in other cells. Antagonism of such inhibitory molecules (either with antibody, small molecule antagonists or other means) enhances immune-mediated tumor rejection.

[0294] Additionally, inhibition of molecules with proinflammatory properties may have therapeutic benefit in reperfusion injury; stroke; myocardial infarction; atherosclerosis; acute lung injury; hemorrhagic shock; burn; sepsis/septic shock; acute tubular necrosis; endometriosis; degenerative joint disease and pancreatis.

[0295] The compounds of the present invention, e.g., polypeptides or antibodies, are administered to a mammal, preferably a human, in accord with known methods, such as intravenous administration as a bolus or by continuous infusion over a period of time, by intramuscular, intraperitoneal, intracerobrospinal, subcutaneous, intra-articular, intrasynovial, intrathecal, oral, topical, or inhalation (intranasal, intrapulmonary) routes. Intravenous or inhaled administration of polypeptides and antibodies is preferred.

[0296] In immunoadjuvant therapy, other therapeutic regimens, such administration of an anti-cancer agent, may be combined with the administration of the proteins, antibodies or compounds of the instant invention. For example, the patient to be treated with a the immunoadjuvant of the invention may also receive an anti-cancer agent (chemotherapeutic agent) or radiation therapy. Preparation and dosing schedules for such chemotherapeutic agents may be used according to manufacturers' instructions or as determined empirically by the skilled practitioner. Preparation and dosing schedules for such chemotherapy are also described in Chemotherapy Service Ed., M. C. Perry, Williams & Wilkins, Baltimore, Md. (1992). The chemotherapeutic agent may precede, or follow administration of the immunoadjuvant or may be given simultaneously therewith. Additionally, an anti-estrogen compound such as tamoxifen or an anti-progesterone such as onapristone (see, EP 616812) may be given in dosages known for such molecules.

[0297] It may be desirable to also administer antibodies against other immune disease associated or tumor associated antigens, such as antibodies which bind to CD20, CD11a, CD18, ErbB2, EGFR, ErbB3, ErbB4, or vascular endothelial factor (VEGF). Alternatively, or in addition, two or more antibodies binding the same or two or more different antigens disclosed herein may be coadministered to the patient. Sometimes, it may be beneficial to also administer one or more cytokines to the patient. In one embodiment, the PRO polypeptides are coadministered with a growth inhibitory agent. For example, the growth inhibitory agent may be administered first, followed by a PRO polypeptide. However, simultaneous administration or administration first is also contemplated. Suitable dosages for the growth inhibitory agent are those presently used and may be lowered due to the combined action (synergy) of the growth inhibitory agent and the PRO polypeptide.

[0298] For the treatment or reduction in the severity of immune related disease, the appropriate dosage of an a compound of the invention will depend on the type of disease to be treated, as defined above, the severity and course of the disease, whether the agent is administered for preventive or therapeutic purposes, previous therapy, the patient's clinical history and response to the compound, and the discretion of the attending physician. The compound is suitably administered to the patient at one time or over a series of treatments.

[0299] For example, depending on the type and severity of the disease, about 1 μg/kg to 15 mg/kg (e.g., 0.1-20 mg/kg) of polypeptide or antibody is an initial candidate dosage for administration to the patient, whether, for example, by one or more separate administrations, or by continuous infusion. A typical daily dosage might range from about 1 μg/kg to 100 mg/kg or more, depending on the factors mentioned above. For repeated administrations over several days or longer, depending on the condition, the treatment is sustained until a desired suppression of disease symptoms occurs. However, other dosage regimens may be useful. The progress of this therapy is easily monitored by conventional techniques and assays.

[0300] O. Articles of Manufacture

[0301] In another embodiment of the invention, an article of manufacture containing materials (e.g., comprising a PRO molecule) useful for the diagnosis or treatment of the disorders described above is provided. The article of manufacture comprises a container and an instruction. Suitable containers include, for example, bottles, vials, syringes, and test tubes. The containers may be formed from a variety of materials such as glass or plastic. The container holds a composition which is effective for diagnosing or treating the condition and may have a sterile access port (for example the container may be an intravenous solution bag or a vial having a stopper pierceable by a hypodermic injection needle). The active agent in the composition is usually a polypeptide or an antibody of the invention. An instruction or label on, or associated with, the container indicates that the composition is used for diagnosing or treating the condition of choice. The article of manufacture may further comprise a second container comprising a pharmaceutically-acceptable buffer, such as phosphate-buffered saline, Ringer's solution and dextrose solution. It may further include other materials desirable from a commercial and user standpoint, including other buffers, diluents, filters, needles, syringes, and package inserts with instructions for use.

[0302] P. Diagnosis and Prognosis of Immune Related Disease

[0303] Cell surface proteins, such as proteins which are overexpressed in certain immune related diseases, are excellent targets for drug candidates or disease treatment. The same proteins along with secreted proteins encoded by the genes amplified in immune related disease states find additional use in the diagnosis and prognosis of these diseases. For example, antibodies directed against the protein products of genes amplified in multiple sclerosis, rheumatoid arthritis, or another immune related disease, can be used as diagnostics or prognostics.

[0304] For example, antibodies, including antibody fragments, can be used to qualitatively or quantitatively detect the expression of proteins encoded by amplified or overexpressed genes (“marker gene products”). The antibody preferably is equipped with a detectable, e.g., fluorescent label, and binding can be monitored by light microscopy, flow cytometry, fluorimetry, or other techniques known in the art. These techniques are particularly suitable, if the overexpressed gene encodes a cell surface protein Such binding assays are performed essentially as described above.

[0305] In situ detection of antibody binding to the marker gene products can be performed, for example, by immunofluorescence or immunoelectron microscopy. For this purpose, a histological specimen is removed from the patient, and a labeled antibody is applied to it, preferably by overlaying the antibody on a biological sample. This procedure also allows for determining the distribution of the marker gene product in the tissue examined. It will be apparent for those skilled in the art that a wide variety of histological methods are readily available for in situ detection.

[0306] The following examples are offered for illustrative purposes only, and are not intended to limit the scope of the present invention in any way.

[0307] All patent and literature references cited in the present specification are hereby incorporated by reference in their entirety.

### EXAMPLES

[0308] Commercially available reagents referred to in the examples were used according to manufacturer's instructions unless otherwise indicated. The source of those cells identified in the following examples, and throughout the specification, by ATCC accession numbers is the American Type Culture Collection, Manassas, Va.

### Example 1

### Microarray Analysis of Monocyte/Macrophages

[0309] Nucleic acid microarrays, often containing thousands of gene sequences, are useful for identifying differentially expressed genes in diseased tissues as compared to their normal counterparts. Using nucleic acid microarrays, test and control mRNA samples from test and control tissue samples are reverse transcribed and labeled to generate cDNA probes. The cDNA probes are then hybridized to an array of nucleic acids immobilized on a solid support. The array is configured such that the sequence and position of each member of the array is known. For example, a selection of genes known to be expressed in certain disease states may be arrayed on a solid support. Hybridization of a labeled probe with a particular array member indicates that the sample from which the probe was derived expresses that gene. If the hybridization signal of a probe from a test (in this instance, differentiated macrophages) sample is greater than hybridization signal of a probe from a control (in this instance, non-differentiated monocytes) sample, the gene or genes expressed in the test tissue are identified. The implication of this result is that an overexpressed protein in a test tissue is useful not only as a diagnostic marker for the presence of the disease condition, but also as a therapeutic target for treatment of the disease condition.

[0310] The methodology of hybridization of nucleic acids and microarray technology is well known in the art. In one example, the specific preparation of nucleic acids for hybridization and probes, slides, and hybridization conditions are all detailed in PCT Patent Application Serial No. PCT/US01/10482, filed on Mar. 30, 2001 and which is herein incorporated by reference.

[0311] In this experiment, CD14+ monocytes are selected by positive selection according to Miltenyi MACS™ protocol. Lymphocytes in 100 ml heparinized blood are separated using Ficoll Paque™. Cells are washed twice in PBS/0.5% BSA/2 mM EDTA. In final wash, all gradients are pooled and volume is brought to approximately 10 ml. The cells are centrifuged, the supernatant is removed and the cell pellet is resuspended in buffer in a total volume of 10e7 cells per 80 μl buffer. Add 20 μl CD14 microbeds per 10e7 total cells, mix and incubate 15 minutes at 6-12 C. Wash the cells by adding 20× labeling volume of buffer, spin pellet and resuspend in 500 ul buffer per 10e8 cells. Separate cells with MACS™ depletion column type D and check purity of cells by labeling with anti-CD45 and anti-CD14 antibodies (cell purity at this point is >95%). Lyse cells in RNA lysis buffer to obtain a timepoint of Day 0 monocytes, then plate remaining cells in 6 well plates in macrophage differentiation medium: DMEM 4.5 ug/ml glucose, Pen-Strep, L-glutamine, 20% FBS and 10% Human AB serum (Gemini, Cat # 100-512). Seed cells at 1.5×10e6 per well (6 well Costar cell culture plates) and grow at 37 C, 7% CO2. After 24 hours in culture, the cells were harvested and lysed in RNA lysis buffer to obtain mRNA for the Day 1 timepoint. The remaining cells were kept in culture and until Day 7. After 7 days in culture, the cells were lysed in RNA lysis buffer to obtain Day 7 timepoint at which time the cells displayed gross macrophage morphology.

[0312] The mRNA was isolated by Qiagen miniprep and analysis run on Affimax™ (Affymetrix Inc. Santa Clara, Calif.) microarray chips and proprietary Genentech microarrays. The cells harvested at Day 0 timepoint, the Day 1 timepoint, and the Day 7 timepoint were subjected to the same analysis. Genes were compared whose expression was upregulated at Day 7 as compared to Day 0 and Day 1.

[0313] Below are the results of these experiments, demonstrating that various PRO polypeptides of the present invention are differentially expressed in differentiated macrophages at Day 7 as compared to non-differentiated monocytes at Day 0 and at Day 1. As described above, these data demonstrate that the PRO polypeptides of the present invention are useful not only as diagnostic markers for the presence of one or more immune disorders, but also serve as therapeutic targets for the treatment of those immune disorders. Specifically, the cDNAs shown FIG. 592, FIG. 708, FIG. 724, FIG. 888, FIG. 1095, FIG. 1109, FIG. 1456 and FIG. 2331 are significantly overexpressed in differentiated macrophages as compared to non-differentiated monocytes at Day 0 and Day 1.

[0314] The FIGS. 1-2517 show the nucleic acids of the invention and their encoded PRO polypeptides that are differentially expressed in differentiated macrophages at Day 7 as compared to non-differentiated monocytes at Day 0 and at Day 1.

### Example 2

### Use of PRO as a Hybridization Probe

[0315] The following method describes use of a nucleotide sequence encoding PRO as a hybridization probe.

[0316] DNA comprising the coding sequence of full-length or mature PRO as disclosed herein is employed as a probe to screen for homologous DNAs (such as those encoding naturally-occurring variants of PRO) in human tissue cDNA libraries or human tissue genomic libraries.

[0317] Hybridization and washing of filters containing either library DNAs is performed under the following high stringency conditions. Hybridization of radiolabeled PRO-derived probe to the filters is performed in a solution of 50% formamide, 5×SSC, 0.1% SDS, 0.1% sodium pyrophosphate, 50 mM sodium phosphate, pH 6.8, 2× Denhardt's solution, and 10% dextran sulfate at 42° C. for 20 hours. Washing of the filters is performed in an aqueous solution of 0. 1×SSC and 0.1% SDS at 42° C.

[0318] DNAs having a desired sequence identity with the DNA encoding full-length native sequence PRO can then be identified using standard techniques known in the art.

### Example 3

### Expression of PRO in E. coli

[0319] This example illustrates preparation of an unglycosylated form of PRO by recombinant expression in E. coli.

[0320] The DNA sequence encoding PRO is initially amplified using selected PCR primers. The primers should contain restriction enzyme sites which correspond to the restriction enzyme sites on the selected expression vector. A variety of expression vectors may be employed. An example of a suitable vector is pBR322 (derived from E. coli; see Bolivar et al.,. Gene, 2:95 (1977)) which contains genes for ampicillin and tetracycline resistance. The vector is digested with restriction enzyme and dephosphorylated. The PCR amplified sequences are then ligated into the vector. The vector will preferably include sequences which encode for an antibiotic resistance gene, a trp promoter, a polyhis leader (including the first six STII codons, polyhis sequence, and enterokinase cleavage site), the PRO coding region, lambda transcriptional terminator, and an argU gene.

[0321] The ligation mixture is then used to transform a selected E. coli strain using the methods described in Sambrook et al., supra. Transformants are identified by their ability to grow on LB plates and antibiotic resistant colonies are then selected. Plasmid DNA can be isolated and confirmed by restriction analysis and DNA sequencing.

[0322] Selected clones can be grown overnight in liquid culture medium such as LB broth supplemented with antibiotics. The overnight culture may subsequently be used to inoculate a larger scale culture. The cells are then grown to a desired optical density, during which the expression promoter is turned on.

[0323] After culturing the cells for several more hours, the cells can be harvested by centrifugation. The cell pellet obtained by the centrifugation can be solubilized using various agents known in the art, and the solubilized PRO protein can then be purified using a metal chelating column under conditions that allow tight binding of the protein.

[0324] PRO may be expressed in E. coli in a poly-His tagged form, using the following procedure. The DNA encoding PRO is initially amplified using selected PCR primers. The primers will contain restriction enzyme sites which correspond to the restriction enzyme sites on the selected expression vector, and other useful sequences providing for efficient and reliable translation initiation, rapid purification on a metal chelation column, and proteolytic removal with enterokinase. The PCR-amplified, poly-His tagged sequences are then ligated into an expression vector, which is used to transform an E. coli host based on strain 52 (W3110 fuhA(tonA) Ion galE rpoHts(htpRts) clpP(lacIq). Transformants are first grown in LB containing 50 mg/ml carbenicillin at 30° C. with shaking until an O.D.600 of 3-5 is reached. Cultures are then diluted 50-100 fold into CRAP media (prepared by mixing 3.57 g (NH₄)₂SO₄, 0.71 g sodium citrate.2H2O, 1.07 g KCl, 5.36 g Difco yeast extract, 5.36 g Sheffield hycase SP in 500 mL water, as well as 110 mM MPOS, pH 7.3, 0.55% (w/v) glucose and 7 mM MgSO₄) and grown for approximately 20-30 hours at 30° C. with shaking. Samples are removed to verify expression by SDS-PAGE analysis, and the bulk culture is centrifuged to pellet the cells. Cell pellets are frozen until purification and refolding.

[0325] E. coli paste from 0.5 to 1 L fermentations (6-10 g pellets) is resuspended in 10 volumes (w/v) in 7 M guanidine, 20 mM Tris, pH 8 buffer. Solid sodium sulfite and sodium tetrathionate is added to make final concentrations of 0.1M and 0.02 M, respectively, and the solution is stirred overnight at 4° C. This step results in a denatured protein with all cysteine residues blocked by sulfitolization. The solution is centrifuged at 40,000 rpm in a Beckman Ultracentifuge for 30 min. The supernatant is diluted with 3-5 volumes of metal chelate column buffer (6 M guanidine, 20 mM Tris, pH 7.4) and filtered through 0.22 micron filters to clarify. The clarified extract is loaded onto a 5 ml Qiagen Ni-NTA metal chelate column equilibrated in the metal chelate column buffer. The column is washed with additional buffer containing 50 mM imidazole (Calbiochem, Utrol grade), pH 7.4. The protein is eluted with buffer containing 250 mM imidazole. Fractions containing the desired protein are pooled and stored at 4° C. Protein concentration is estimated by its absorbance at 280 nm using the calculated extinction coefficient based on its amino acid sequence.

[0326] The proteins are refolded by diluting the sample slowly into freshly prepared refolding buffer consisting of: 20 mM Tris, pH 8.6, 0.3 M NaCl, 2.5 M urea, 5 mM cysteine, 20 mM glycine and 1 mM EDTA. Refolding volumes are chosen so that the final protein concentration is between 50 to 100 micrograms/ml. The refolding solution is stirred gently at 4° C. for 12-36 hours. The refolding reaction is quenched by the addition of TFA to a final concentration of 0.4% (pH of approximately 3). Before further purification of the protein, the solution is filtered through a 0.22 micron filter and acetonitrile is added to 2-10% final concentration. The refolded protein is chromatographed on a Poros R1/H reversed phase column using a mobile buffer of 0.1% TFA with elution with a gradient of acetonitrile from 10 to 80%. Aliquots of fractions with A280 absorbance are analyzed on SDS polyacrylamide gels and fractions containing homogeneous refolded protein are pooled. Generally, the properly refolded species of most proteins are eluted at the lowest concentrations of acetonitrile since those species are the most compact with their hydrophobic interiors shielded from interaction with the reversed phase resin. Aggregated species are usually eluted at higher acetonitrile concentrations. In addition to resolving misfolded forms of proteins from the desired form, the reversed phase step also removes endotoxin from the samples.

[0327] Fractions containing the desired folded PRO polypeptide are pooled and the acetonitrile removed using a gentle stream of nitrogen directed at the solution. Proteins are formulated into 20 mM Hepes, pH 6.8 with 0.14 M sodium chloride and 4% mannitol by dialysis or by gel filtration using G25 Superfine (Pharmacia) resins equilibrated in the formulation buffer and sterile filtered.

[0328] Many of the PRO polypeptides disclosed herein were successfully expressed as described above.

### Example 4

### Expression of PRO in Mammalian Cells

[0329] This example illustrates preparation of a potentially glycosylated form of PRO by recombinant expression in mammalian cells.

[0330] The vector, pRK5 (see EP 307,247, published Mar. 15, 1989), is employed as the expression vector. Optionally, the PRO DNA is ligated into pRK5 with selected restriction enzymes to allow insertion of the PRO DNA using ligation methods such as described in Sambrook et al., supra. The resulting vector is called pRK5-PRO.

[0331] In one embodiment, the selected host cells may be 293 cells. Human 293 cells (ATCC CCL 1573) are grown to confluence in tissue culture plates in medium such as DMEM supplemented with fetal calf serum and optionally, nutrient components and/or antibiotics. About 10 μg pRK5-PRO DNA is mixed with about 1 μg DNA encoding the VA RNA gene [Thimmappaya et al., Cell, 31:543 (1982)] and dissolved in 500 μL of 1 mM Tris-HCl, 0.1 mM EDTA, 0.227 M CaCl₂. To this mixture is added, dropwise, 500 μl of 50 mM HEPES (pH 7.35), 280 mM NaCl, 1.5 mM NaPO₄, and a precipitate is allowed to form for 10 minutes at 25° C. The precipitate is suspended and added to the 293 cells and allowed to settle for about four hours at 37° C. The culture medium is aspirated off and 2 ml of 20% glycerol in PBS is added for 30 seconds. The 293 cells are then washed with serum free medium, fresh medium is added and the cells are incubated for about 5 days.

[0332] Approximately 24 hours after the transfections, the culture medium is removed and replaced with culture medium (alone) or culture medium containing 200 μCi/ml ³⁵S-cysteine and 200 μCi/mil ³⁵S-methionine. After a 12 hour incubation, the conditioned medium is collected, concentrated on a spin filter, and loaded onto a 15% SDS gel. The processed gel may be dried and exposed to film for a selected period of time to reveal the presence of PRO polypeptide. The cultures containing transfected cells may undergo further incubation (in serum free medium) and the medium is tested in selected bioassays.

[0333] In an alternative technique, PRO may be introduced into 293 cells transiently using the dextran sulfate method described by Somparyrac et al., Proc. Natl. Acad. Sci., 12:7575 (1981). 293 cells are grown to maximal density in a spinner flask and 700 μg pRK5-PRO DNA is added. The cells are first concentrated from the spinner flask by centrifugation and washed with PBS. The DNA-dextran precipitate is incubated on the cell pellet for four hours. The cells are treated with 20% glycerol for 90 seconds, washed with tissue culture medium, and re-introduced into the spinner flask containing tissue culture medium, 5 μg/ml bovine insulin and 0.1 μg/ml bovine transferrin. After about four days, the conditioned media is centrifuged and filtered to remove cells and debris. The sample containing expressed PRO can then be concentrated and purified by any selected method, such as dialysis and/or column chromatography.

[0334] In another embodiment, PRO can be expressed in CHO cells. The pRK5-PRO can be transfected into CHO cells using known reagents such as CaPO₄ or DEAE-dextran. As described above, the cell cultures can be incubated, and the medium replaced with culture medium (alone) or medium containing a radiolabel such as ³⁵S-methionine. After determining the presence of PRO polypeptide, the culture medium may be replaced with serum free medium. Preferably, the cultures are incubated for about 6 days, and then the conditioned medium is harvested. The medium containing the expressed PRO can then be concentrated and purified by any selected method.

[0335] Epitope-tagged PRO may also be expressed in host CHO cells. The PRO may be subcloned out of the pRK5 vector. The subclone insert can undergo PCR to fuse in frame with a selected-epitope tag such as a poly-his tag into a Baculovirus expression vector. The poly-his tagged PRO insert can then be subcloned into a SV40 promoter/enhancer containing vector containing a selection marker such as DHFR for selection of stable clones. Finally, the CHO cells can be transfected (as described above) with the SV40 promoter/enhancer containing vector. Labeling may be performed, as described above, to verify expression. The culture medium containing the expressed poly-His tagged PRO can then be concentrated and purified by any selected method, such as by Ni²⁺-chelate affinity chromatography.

[0336] PRO may also be expressed in CHO and/or COS cells by a transient expression procedure or in CHO cells by another stable expression procedure.

[0337] Stable expression in CHO cells is performed using the following procedure. The proteins are expressed as an IgG construct (immunoadhesin), in which the coding sequences for the soluble forms (e.g. extracellular domains) of the respective proteins are fused to an IgG1 constant region sequence containing the hinge, CH2 and CH2 domains and/or is a poly-His tagged form.

[0338] Following PCR amplification, the respective DNAs are subcloned in a CHO expression vector using standard techniques as described in Ausubel et al., Current Protocols of Molecular Biology, Unit 3.16, John Wiley and Sons (1997). CHO expression vectors are constructed to have compatible restriction sites 5′ and 3′ of the DNA of interest to allow the convenient shuttling of cDNA's. The vector used expression in CHO cells is as described in Lucas et al., Nucl. Acids Res. 24:9 (1774-1779 (1996), and uses the SV40 early promoter/enhancer to drive expression of the cDNA of interest and dihydrofolate reductase (DHFR). DHFR expression permits selection for stable maintenance of the plasmid following transfection.

[0339] Twelve micrograms of the desired plasmid DNA is introduced into approximately 10 million CHO cells using commercially available transfection reagents Superfect® (Quiagen), Dosper® or Fugene® (Boehringer Mannheim). The cells are grown as described in Lucas et al., supra. Approximately 3×10⁻⁷ cells are frozen in an ampule for further growth and production as described below.

[0340] The ampules containing the plasmid DNA are thawed by placement into water bath and mixed by vortexing. The contents are pipetted into a centrifuge tube containing 10 mL of media and centrifuged at 1000 rpm for 5 minutes. The supernatant is aspirated and the cells are resuspended in 10 mL of selective media (0.2 μm filtered PS20 with 5% 0.2 μm diafiltered fetal bovine serum). The cells are then aliquoted into a 100 mL spinner containing 90 mL of selective media. After 1-2 days, the cells are transferred into a 250 mL spinner filled with 150 mL selective growth medium and incubated at 37° C. After another 2-3 days, 250 mL, 500 mL and 2000 mL spinners are seeded with 3×10⁵ cells/mL. The cell media is exchanged with fresh media by centrifugation and resuspension in production medium. Although any suitable CHO media may be employed, a production medium described in U.S. Pat. No. 5,122,469, issued Jun. 16, 1992 may actually be used. A 3L production spinner is seeded at 1.2×10⁶ cells/mL. On day 0, pH is determined. On day 1, the spinner is sampled and sparging with filtered air is commenced. On day 2, the spinner is sampled, the temperature shifted to 33° C., and 30 mL of 500 g/L glucose and 0.6 mL of 10% antifoam (e.g., 35% polydimethylsiloxane emulsion, Dow Corning 365 Medical Grade Emulsion) taken. Throughout the production, the pH is adjusted as necessary to keep it at around 7.2. After 10 days, or until the viability dropped below 70%, the cell culture is harvested by centrifugation and filtering through a 0.22 μm filter. The filtrate was either stored at 4° C. or immediately loaded onto columns for purification.

[0341] For the poly-His tagged constructs, the proteins are purified using a Ni-NTA column (Qiagen). Before purification, imidazole is added to the conditioned media to a concentration of 5 mM. The conditioned media is pumped onto a 6 ml Ni-NTA column equilibrated in 20 mM Hepes, pH 7.4, buffer containing 0.3 M NaCl and 5 mM imidazole at a flow rate of 4-5 ml/min. at 4° C. After loading, the column is washed with additional equilibration buffer and the protein eluted with equilibration buffer containing 0.25 M imidazole. The highly purified protein is subsequently desalted into a storage buffer containing 10 mM Hepes, 0.14 M NaCl and 4% mannitol, pH 6.8, with a 25 ml G25 Superfine (Pharmacia) column and stored at −80° C.

[0342] Immunoadhesin (Fc-containing) constructs are purified from the conditioned media as follows. The conditioned medium is pumped onto a 5 ml Protein A column (Pharmacia) which had been equilibrated in 20 mM Na phosphate buffer, pH 6.8. After loading, the column is washed extensively with equilibration buffer before elution with 100 mM citric acid, pH 3.5. The eluted protein is immediately neutralized by collecting 1 ml fractions into tubes containing 275 μl of 1 M Tris buffer, pH 9. The highly purified protein is subsequently desalted into storage buffer as described above for the poly-His tagged proteins. The homogeneity is assessed by SDS polyacrylamide gels and by N-terminal amino acid sequencing by Edman degradation.

[0343] Many of the PRO polypeptides disclosed herein were successfully expressed as described above.

### Example 5

### Expression of PRO in Yeast

[0344] The following method describes recombinant expression of PRO in yeast.

[0345] First, yeast expression vectors are constructed for intracellular production or secretion of PRO from the ADH2/GAPDH promoter. DNA encoding PRO and the promoter is inserted into suitable restriction enzyme sites in the selected plasmid to direct intracellular expression of PRO. For secretion, DNA encoding PRO can be cloned into the selected plasmid, together with DNA encoding the ADH2/GAPDH promoter, a native PRO signal peptide or other mammalian signal peptide, or, for example, a yeast alpha-factor or invertase secretory signal/leader sequence, and linker sequences (if needed) for expression of PRO.

[0346] Yeast cells, such as yeast strain AB110, can then be transformed with the expression plasmids described above and cultured in selected fermentation media. The transformed yeast supernatants can be analyzed by precipitation with 10% trichloroacetic acid and separation by SDS-PAGE, followed by staining of the gels with Coomassie Blue stain.

[0347] Recombinant PRO can subsequently be isolated and purified by removing the yeast cells from the fermentation medium by centrifugation and then concentrating the medium using selected cartridge filters. The concentrate containing PRO may further be purified using selected column chromatography resins.

[0348] Many of the PRO polypeptides disclosed herein were successfully expressed as described above.

### Example 6

### Expression of PRO in Baculovirus-Infected Insect Cells

[0349] The following method describes recombinant expression of PRO in Baculovirus-infected insect cells.

[0350] The sequence coding for PRO is fused upstream of an epitope tag contained within a baculovirus expression vector. Such epitope tags include poly-his tags and immunoglobulin tags (like Fc regions of IgG). A variety of plasmids may be employed, including plasmids derived from commercially available plasmids such as pVL1393 (Novagen). Briefly, the sequence encoding PRO or the desired portion of the coding sequence of PRO such as the sequence encoding the extracellular domain of a transmembrane protein or the sequence encoding the mature protein if the protein is extracellular is amplified by PCR with primers complementary to the 5′ and 3′ regions. The 5′ primer may incorporate flanking (selected) restriction enzyme sites. The product is then digested with those selected restriction enzymes and subcloned into the expression vector.

[0351] Recombinant baculovirus is generated by co-transfecting the above plasmid and BaculoGold™ virus DNA (Pharmingen) into Spodoptera frugiperda (“Sf9”) cells (ATCC CRL 1711) using lipofectin (commercially available from GIBCO-BRL). After 4-5 days of incubation at 28° C., the released viruses are harvested and used for further amplifications. Viral infection and protein expression are performed as described by O'Reilley et al., Baculovirus expression vectors: A Laboratory Manual, Oxford: Oxford University Press (1994).

[0352] Expressed poly-his tagged PRO can then be purified, for example, by Ni²⁺-chelate affinity chromatography as follows. Extracts are prepared from recombinant virus-infected Sf9 cells as described by Rupert et al., Nature 362:175-179 (1993). Briefly, Sf9 cells are washed, resuspended in sonication buffer (25 mL Hepes, pH 7.9; 12.5 mM MgCl₂; 0.1 mM EDTA; 10% glycerol; 0.1% NP-40; 0.4 M KCl), and sonicated twice for 20 seconds on ice. The sonicates are cleared by centrifugation, and the supernatant is diluted 50-fold in loading buffer (50 mM phosphate, 300 mM NaCl, 10% glycerol, pH 7.8) and filtered through a 0.45 μm filter. A Ni²⁺-NTA agarose column (commercially available from Qiagen) is prepared with a bed volume of 5 mL, washed with 25 mL of water and equilibrated with 25 mL of loading buffer. The filtered cell extract is loaded onto the column at 0.5 mL per minute. The column is washed to baseline A₂₈₀ with loading buffer, at which point fraction collection is started. Next, the column is washed with a secondary wash buffer (50 mM phosphate; 300 mM NaCl, 10% glycerol, pH 6.0), which elutes nonspecifically bound protein. After reaching A₂₈₀ baseline again, the column is developed with a 0 to 500 mM Imidazole gradient in the secondary wash buffer. One mL fractions are collected and analyzed by SDS-PAGE and silver staining or Western blot with Ni²⁺-NTA-conjugated to alkaline phosphatase (Qiagen). Fractions containing the eluted His₁₀-tagged PRO are pooled and dialyzed against loading buffer.

[0353] Alternatively, purification of the IgG tagged (or Fc tagged) PRO can be performed using known chromatography techniques, including for instance, Protein A or protein G column chromatography.

[0354] Many of the PRO polypeptides disclosed herein were successfully expressed as described above.

### Example 7

### Preparation of Antibodies that Bind PRO

[0355] This example illustrates preparation of monoclonal antibodies which can specifically bind PRO.

[0356] Techniques for producing the monoclonal antibodies are known in the art and are described, for instance, in Goding, supra. Immunogens that may be employed include purified PRO, fusion proteins containing PRO, and cells expressing recombinant PRO on the cell surface. Selection of the immunogen can be made by the skilled artisan without undue experimentation.

[0357] Mice, such as Balb/c, are immunized with the PRO immunogen emulsified in complete Freund's adjuvant and injected subcutaneously or intraperitoneally in an amount from 1-100 micrograms. Alternatively, the immunogen is emulsified in MPL-TDM adjuvant (Ribi Immunochemical Research, Hamilton, Mont.) and injected into the animal's hind foot pads. The immunized mice are then boosted 10 to 12 days later with additional immunogen emulsified in the selected adjuvant. Thereafter, for several weeks, the mice may also be boosted with additional immunization injections. Serum samples may be periodically obtained from the mice by retro-orbital bleeding for testing in ELISA assays to detect anti-PRO antibodies.

[0358] After a suitable antibody titer has been detected, the animals “positive” for antibodies can be injected with a final intravenous injection of PRO. Three to four days later, the mice are sacrificed and the spleen cells are harvested. The spleen cells are then fused (using 35% polyethylene glycol) to a selected murine myeloma cell line such as P3X63AgU.1, available from ATCC, No. CRL 1597. The fusions generate hybridoma cells which can then be plated in 96 well tissue culture plates containing HAT (hypoxanthine, aminopterin, and thymidine) medium to inhibit proliferation of non-fused cells, myeloma hybrids, and spleen cell hybrids.

[0359] The hybridoma cells will be screened in an ELISA for reactivity against PRO. Determination of “positive” hybridoma cells secreting the desired monoclonal antibodies against PRO is within the skill in the art.

[0360] The positive hybridoma cells can be injected intraperitoneally into syngeneic Balb/c mice to produce ascites containing the anti-PRO monoclonal antibodies. Alternatively, the hybridoma cells can be grown in tissue culture flasks or roller bottles. Purification of the monoclonal antibodies produced in the ascites can be accomplished using ammonium sulfate precipitation, followed by gel exclusion chromatography. Alternatively, affinity chromatography based upon binding of antibody to protein A or protein G can be employed.

### Example 8

### Purification of PRO Polypeptides Using Specific Antibodies

[0361] Native or recombinant PRO polypeptides may be purified by a variety of standard techniques in the art of protein purification. For example, pro-PRO polypeptide, mature PRO polypeptide, or pre-PRO polypeptide is purified by immunoaffinity chromatography using antibodies specific for the PRO polypeptide of interest. In general, an immunoaffinity column is constructed by covalently coupling the anti-PRO polypeptide antibody to an activated chromatographic resin.

[0362] Polyclonal immunoglobulins are prepared from immune sera either by precipitation with ammonium sulfate or by purification on immobilized Protein A (Pharmacia LKB Biotechnology, Piscataway, N.J.). Likewise, monoclonal antibodies are prepared from mouse ascites fluid by ammonium sulfate precipitation or chromatography on immobilized Protein A. Partially purified immunoglobulin is covalently attached to a chromatographic resin such as CnBr-activated SEPHAROSE (Pharmacia LKB Biotechnology). The antibody is coupled to the resin, the resin is blocked, and the derivative resin is washed according to the manufacturer's instructions.

[0363] Such an immunoaffinity column is utilized in the purification of PRO polypeptide by preparing a fraction from cells containing PRO polypeptide in a soluble form. This preparation is derived by solubilization of the whole cell or of a subcellular fraction obtained via differential centrifugation by the addition of detergent or by other methods well known in the art. Alternatively, soluble PRO polypeptide containing a signal sequence may be secreted in useful quantity into the medium in which the cells are grown.

[0364] A soluble PRO polypeptide-containing preparation is passed over the immunoaffinity column, and the column is washed under conditions that allow the preferential absorbance of PRO polypeptide (e.g., high ionic strength buffers in the presence of detergent). Then, the column is eluted under conditions that disrupt antibody/PRO polypeptide binding (e.g., a low pH buffer such as approximately pH 2-3, or a high concentration of a chaotrope such as urea or thiocyanate ion), and PRO polypeptide is collected.

### Example 9

### Drug Screening

[0365] This invention is particularly useful for screening compounds by using PRO polypeptides or binding fragment thereof in any of a variety of drug screening techniques. The PRO polypeptide or fragment employed in such a test may either be free in solution, affixed to a solid support, borne on a cell surface, or located intracellularly. One method of drug screening utilizes eukaryotic or prokaryotic host cells which are stably transformed with recombinant nucleic acids expressing the PRO polypeptide or fragment. Drugs are screened against such transformed cells in competitive binding assays. Such cells, either in viable or fixed form, can be used for standard binding assays. One may measure, for example, the formation of complexes between PRO polypeptide or a fragment and the agent being tested. Alternatively, one can examine the diminution in complex formation between the PRO polypeptide and its target cell or target receptors caused by the agent being tested.

[0366] Thus, the present invention provides methods of screening for drugs or any other agents which can affect a PRO polypeptide-associated disease or disorder. These methods comprise contacting such an agent with an PRO polypeptide or fragment thereof and assaying (I) for the presence of a complex between the agent and the PRO polypeptide or fragment, or (ii) for the presence of a complex between the PRO polypeptide or fragment and the cell, by methods well known in the art. In such competitive binding assays, the PRO polypeptide or fragment is typically labeled. After suitable incubation, free PRO polypeptide or fragment is separated from that present in bound form, and the amount of free or uncomplexed label is a measure of the ability of the particular agent to bind to PRO polypeptide or to interfere with the PRO polypeptide/cell complex.

[0367] Another technique for drug screening provides high throughput screening for compounds having suitable binding affinity to a polypeptide and is described in detail in WO 84/03564, published on Sep. 13, 1984. Briefly stated, large numbers of different small peptide test compounds are synthesized on a solid substrate, such as plastic pins or some other surface. As applied to a PRO polypeptide, the peptide test compounds are reacted with PRO polypeptide and washed. Bound PRO polypeptide is detected by methods well known in the art. Purified PRO polypeptide can also be coated directly onto plates for use in the aforementioned drug screening techniques. In addition, non-neutralizing antibodies can be used to capture the peptide and immobilize it on the solid support.

[0368] This invention also contemplates the use of competitive drug screening assays in which neutralizing antibodies capable of binding PRO polypeptide specifically compete with a test compound for binding to PRO polypeptide or fragments thereof. In this manner, the antibodies can be used to detect the presence of any peptide which shares one or more antigenic determinants with PRO polypeptide.

### Example 10

### Rational Drug Design

[0369] The goal of rational drug design is to produce structural analogs of biologically active polypeptide of interest (i.e., a PRO polypeptide) or of small molecules with which they interact, e.g., agonists, antagonists, or inhibitors. Any of these examples can be used to fashion drugs which are more active or stable forms of the PRO polypeptide or which enhance or interfere with the function of the PRO polypeptide in vivo (c.f., Hodgson, Bio/Technology. 9: 19-21 (1991)).

[0370] In one approach, the three-dimensional structure of the PRO polypeptide, or of a PRO polypeptide-inhibitor complex, is determined by x-ray crystallography, by computer modeling or, most typically, by a combination of the two approaches. Both the shape and charges of the PRO polypeptide must be ascertained to elucidate the structure and to determine active site(s) of the molecule. Less often, useful information regarding the structure of the PRO polypeptide may be gained by modeling based on the structure of homologous proteins. In both cases, relevant structural information is used to design analogous PRO polypeptide-like molecules or to identify efficient inhibitors. Useful examples of rational drug design may include molecules which have improved activity or stability as shown by Braxton and Wells, Biochemistry. 31:7796-7801 (1992) or which act as inhibitors, agonists, or antagonists of native peptides as shown by Athauda et al., J. Biochem. 113:742-746 (1993).

[0371] It is also possible to isolate a target-specific antibody, selected by functional assay, as described above, and then to solve its crystal structure. This approach, in principle, yields a pharmacore upon which subsequent drug design can be based. It is possible to bypass protein crystallography altogether by generating anti-idiotypic antibodies (anti-ids) to a functional, pharmacologically active antibody. As a mirror image of a mirror image, the binding site of the anti-ids would be expected to be an analog of the original receptor. The anti-id could then be used to identify and isolate peptides from banks of chemically or biologically produced peptides. The isolated peptides would then act as the pharmacore.

[0372] By virtue of the present invention, sufficient amounts of the PRO polypeptide may be made available to perform such analytical studies as X-ray crystallography. In addition, knowledge of the PRO polypeptide amino acid sequence provided herein will provide guidance to those employing computer modeling techniques in place of or in addition to x-ray crystallography.

[0373] The foregoing written specification is considered to be sufficient to enable one skilled in the art to practice the invention. The present invention is not to be limited in scope by the construct deposited, since the deposited embodiment is intended as a single illustration of certain aspects of the invention and any constructs that are functionally equivalent are within the scope of this invention. The deposit of material herein does not constitute an admission that the written description herein contained is inadequate to enable the practice of any aspect of the invention, including the best mode thereof, nor is it to be construed as limiting the scope of the claims to the specific illustrations that it represents. Indeed, various modifications of the invention in addition to those shown and described herein will become apparent to those skilled in the art from the foregoing description and fall within the scope of the appended claims.

The application's sequence listing, which the Patent Office published only in electronic form, follows.

SEQUENCE LISTING (2517 sequences)

SEQ ID NO: 1 - DNA, 699 bp, Homo sapien
catccggtgtggtcgacgggtcctccaagagtttggggcgcggaccggagtaccttgcgtgcagttatgtcggcgtcggtagtgtctgtcatttcgcggttcttagaagagtacttgagctccactccgcagcgtctgaagttgctggacgcgtacctgctgtatatactgctgaccggggcgctgcagttcggttactgtctcctcgtggggaccttccccttcaactcttttctctcgggcttcatctcttgtgtggggagtttcatcctagcggtttgcctgagaatacagatcaacccacagaacaaagcggatttccaaggcatctccccagagcgagcctttgctgattttctctttgccagcaccatcctgcaccttgttgtcatgaactttgttggctgaatcattctcatttacttaattgaggagtaggagactaaaagaatgttcactctttgaatttcctggataagagttctggagatggcagcttattggacacatggattttcttcagatttgacacttactgctagctctgctttttatgacaggagaaaagcccagagttcactgtgtgtcagaacaactttctaacaaacatttattaatccagcctctgcctttcattaaatgtaaccttttgctttccaaattaaagaactccatgccactcctcaaaaaaaaaaaaaa

SEQ ID NO: 2 - protein, 113 aa, Homo sapien
MSASVVSVISRFLEEYLSSTPQRLKLLDAYLLYILLTGALQFGYCLLVGTFPFNSFLSGFISCVGSFILAVCLRIQINPQNKADFQGISPERAFADFLFASTILHLVVMNFVG

SEQ ID NO: 3 - DNA, 2567 bp, Homo sapien
ctccggcgcagtgttgggactgtctgggtatcggaaagcaagcctacgttgctcactattacgtataatccttttcttttcaagatgcctgaggaagtgcaccatggagaggaggaggtggagacttttgcctttcaggcagaaattgcccaactcatgtccctcatcatcaataccttctattccaacaaggagattttccttcgggagttgatctctaatgcttctgatgccttggacaagattcgctatgagagcctgacagacccttcgaagttggacagtggtaaagagctgaaaattgacatcatccccaaccctcaggaacgtaccctgactttggtagacacaggcattggcatgaccaaagctgatctcataaataatttgggaaccattgccaagtctggtactaaagcattcatggaggctcttcaggctggtgcagacatctccatgattgggcagtttggtgttggcttttattctgcctacttggtggcagagaaagtggttgtgatcacaaagcacaacgatgatgaacagtatgcttgggagtcttctgctggaggttccttcactgtgcgtgctgaccatggtgagcccattggcaggggtaccaaagtgatcctccatcttaaagaagatcagacagagtacctagaagagaggcgggtcaaagaagtagtgaagaagcattctcagttcataggctatcccatcaccctttatttggagaaggaacgagagaaggaaattagtgatgatgaggcagaggaagagaaaggtgagaaagaagaggaagataaagatgatgaagaaaaacccaagatcgaagatgtgggttcagatgaggaggatgacagcggtaaggataagaagaagaaaactaagaagatcaaagagaaatacattgatcaggaagaactaaacaagaccaagcctatttggaccagaaaccctgatgacatcacccaagaggagtatggagaattctacaagagcctcactaatgactgggaagaccacttggcagtcaagcacttttctgtagaaggtcagttggaattcagggcattgctatttattcctcgtcgggctccctttgacctttttgagaacaagaagaaaaagaacaacatcaaactctatgtccgccgtgtgttcatcatggacagctgtgatgagttgataccagagtatctcaattttatccgtggtgtggttgactctgaggatctgcccctgaacatctcccgagaaatgctccagcagagcaaaatcttgaaagtcattcgcaaaaacattgttaagaagtgccttgagctcttctctgagctggcagaagacaaggagaattacaagaaattctatgaggcattctctaaaaatctcaagcttggaatccacgaagactccactaaccgccgccgcctgtctgagctgctgcgctatcatacctcccagtctggagatgagatgacatctctgtcagagtatgtttctcgcatgaaggagacacagaagtccatctattacatcactggtgagagcaaagagcaggtggccaactcagcttttgtggagcgagtgcggaaacggggcttcgaggtggtatatatgaccgagcccattgacgagtactgtgtgcagcagctcaaggaatttgatgggaagagcctggtctcagttaccaaggagggtctggagctgcctgaggatgaggaggagaagaagaagatggaagagagcaaggcaaagtttgagaacctctgcaagctcatgaaagaaatcttagataagaaggttgagaaggtgacaatctccaatagacttgtgtcttcaccttgctgcattgtgaccagcacctacggctggacagccaatatggagcggatcatgaaagcccaggcacttcgggacaactccaccatgggctatatgatggccaaaaagcacctggagatcaaccctgaccaccccattgtggagacgctgcggcagaaggctgaggccgacaagaatgataaggcagttaaggacctggtggtgctgctgtttgaaaccgccctgctatcttctggcttttcccttgaggatccccagacccactccaaccgcatctatcgcatgatcaagctaggtctaggtattgatgaagatgaagtggcagcagaggaacccaatgctgcagttcctgatgagatcccccctctcgagggcgatgaggatgcgtctcgcatggaagaagtcgattaggttaggagttcatagttggaaaacttgtgcccttgtatagtgtccccatgggctcccactgcagcctcgagtgcccctgtcccacctggctccccctgctggtgtctagtgtttttttccctctcctgtccttgtgttgaaggcagtaaactaagggtgtcaagccccattccctctctactcttgacagcaggattggatgttgtgtattgtggtttattttattttcttcattttgttctgaaattaaagtatgcaaaataaagaatatgccgttttaaaaaaaaaaaaaaaaaaaaaaaaaaaaa

SEQ ID NO: 4 - protein, 724 aa, Homo sapien
MPEEVHHGEEEVETFAFQAEIAQLMSLIINTFYSNKEIFLRELISNASDALDKIRYESLTDPSKLDSGKELKIDIIPNPQERTLTLVDTGIGMTKADLINNLGTIAKSGTKAFMEALQAGADISMIGQFGVGFYSAYLVAEKVVVITKHNDDEQYAWESSAGGSFTVRADHGEPIGRGTKVILHLKEDQTEYLEERRVKEVVKKHSQFIGYPITLYLEKEREKEISDDEAEEEKGEKEEEDKDDEEKPKIEDVGSDEEDDSGKDKKKKTKKIKEKYIDQEELNKTKPIWTRNPDDITQEEYGEFYKSLTNDWEDHLAVKHFSVEGQLEFRALLFIPRRAPFDLFENKKKKNNIKLYVRRVFIMDSCDELIPEYLNFIRGVVDSEDLPLNISREMLQQSKILKVIRKNIVKKCLELFSELAEDKENYKKFYEAFSKNLKLGIHEDSTNRRRLSELLRYHTSQSGDEMTSLSEYVSRMKETQKSIYYITGESKEQVANSAFVERVRKRGFEVVYMTEPIDEYCVQQLKEFDGKSLVSVTKEGLELPEDEEEKKKMEESKAKFENLCKLMKEILDKKVEKVTISNRLVSSPCCIVTSTYGWTANMERIMKAQALRDNSTMGYMMAKKHLEINPDHPIVETLRQKAEADKNDKAVKDLVVLLFETALLSSGFSLEDPQTHSNRIYRMIKLGLGIDEDEVAAEEPNAAVPDEIPPLEGDEDASRMEEVD

SEQ ID NO: 5 - DNA, 1932 bp, Homo sapien
atgcaggccccacgggagctcgcggtgggcatcgacctgggcaccacctactcgtgcgtgggcgtgtttcagcagggccgcgtggagatcctggccaacgaccagggcaaccgcaccacgcccagctacgtggccttcaccgacaccgagcggctggtcggggacgcggccaagagccaggcggccctgaacccccacaacaccgtgttcgatgccaagcggctgatcgggcgcaagttcgcggacaccacggtgcagtcggacatgaagcactggcccttccgggtggtgagcgagggcggcaagcccaaggtgccggtatcgtaccgcggggaggacaagacgttctaccccgaggagatctcgtccatggtgctgagcaagatgaaggagacggccgaggcgtacctgggccagcccgtgaagcacgcagtgatcaccgtgcccgcctatttcaatgactcgcagcgccaggccaccaaggacgcgggggccatcgcggggctcaacgtgttgcggatcatcaatgagcccacggcagctgccatcgcctatgggctggaccggcggggcgcgggagagcgcaacgtgctcatttttgacctgggtgggggcaccttcgatgtgtcggttctctccattgacgctggtgtctttgaggtgaaagccactgctggagatacccacctgggaggagaggacttcgacaaccggctcgtgaaccacttcatggaagaattccggcggaagcatgggaaggacctgagcgggaacaagcgtgccctcggcaggctgcgcacagcctgtgagcgcgccaagcgcaccctgtcctccagcacccaggccaccctggagatagactccctgttcgagggcgtggacttctacacgtccatcactcgtgcccgctttgaggaactgtgctcagacctcttccgcagcaccctggagccggtggagaaggccctgcgggatgccaagctggacaaggcccagattcatgacgtcgtcctggtggggggctccactcgcatccccaaggtgcagaagttgctgcaggacttcttcaacggcaaggagctgaacaagagcatcaaccctgatgaggctgtggcctatggggctgctgtgcaggcggccgtgttgatgggggacaaatgtgagaaagtgcaggatctcctgctgctggatgtggctcccctgtctctggggctggagacagcaggtggggtgatgaccacgctgatccagaggaacgccactatccccaccaagcagacccagactttcaccacctactcggacaaccagcctggggtcttcatccaggtgtatgagggtgagagggccatgaccaaggacaacaacctgctggggcgttttgaactcagtggcatccctcctgccccacgtggagtcccccagatagaggtgacctttgacattgatgctaatggcatcctgagcgtgacagccactgacaggagcacaggtaaggctaacaagatcaccatcaccaatgacaagggccggctgagcaaggaggaggtggagaggatggttcatgaagccgagcagtacaaggctgaggatgaggcccagagggacagagtggctgccaaaaactcgctggaggcccatgtcttccatgtgaaaggttctttgcaagaggaaagccttagggacaagattcccgaagaggacaggcgcaaaatgcaagacaagtgtcgggaagtccttgcctggctggagcacaaccagctggcagagaaggaggagtatgagcatcagaagagggagctggagcaaatctgtcgccccatcttctccaggctctatggggggcctggtgtccctgggggcagcagttgtggcactcaagcccgccagggggaccccagcaccggccccatcattgaggaggttgattga

SEQ ID NO: 6 - protein, 643 aa, Homo sapien
MQAPRELAVGIDLGTTYSCVGVFQQGRVEILANDQGNRTTPSYVAFTDTERLVGDAAKSQAALNPHNTVFDAKRLIGRKFADTTVQSDMKHWPFRVVSEGGKPKVPVSYRGEDKTFYPEEISSMVLSKMKETAEAYLGQPVKHAVITVPAYFNDSQRQATKDAGAIAGLNVLRIINEPTAAAIAYGLDRRGAGERNVLIFDLGGGTFDVSVLSIDAGVFEVKATAGDTHLGGEDFDNRLVNHFMEEFRRKHGKDLSGNKRALGRLRTACERAKRTLSSSTQATLEIDSLFEGVDFYTSITRARFEELCSDLFRSTLEPVEKALRDAKLDKAQIHDVVLVGGSTRIPKVQKLLQDFFNGKELNKSINPDEAVAYGAAVQAAVLMGDKCEKVQDLLLLDVAPLSLGLETAGGVMTTLIQRNATIPTKQTQTFTTYSDNQPGVFIQVYEGERAMTKDNNLLGRFELSGIPPAPRGVPQIEVTFDIDANGILSVTATDRSTGKANKITITNDKGRLSKEEVERMVHEAEQYKAEDEAQRDRVAAKNSLEAHVFHVKGSLQEESLRDKIPEEDRRKMQDKCREVLAWLEHNQLAEKEEYEHQKRELEQICRPIFSRLYGGPGVPGGSSCGTQARQGDPSTGPIIEEVD

SEQ ID NO: 7 - DNA, 4779 bp, Homo sapien
tgcgaccgcctccctgcgccccgcccctccggctagctcgctggctcccggctcctcccgacgtctcctacctcctcacggctcttcccggcgctctcctggctcccttctgccccagctccgtctcggcggcggcgggcagttgcagtggtgcagaatggctgacctcagtcttgcagatgcattaacagaaccatctccagacattgagggagagataaagcgggacttcattgccacactagaggcagaggcctttgatgatgttgtgggagaaactgttggaaaaacagactatattcctctcctggatgttgatgagaaaaccgggaactcagagtcaaagaagaaaccgtgctcagaaactagccagattgaagatactccatcttctaaaccaacactcctagccaatggtggtcatggagtagaagggagcgatactacagggtctccaactgaattccttgaagagaaaatggcctaccaggaatacccaaatagccagaactggccagaagataccaacttttgtttccaacctgagcaagtggtcgatcctatccagactgatccctttaagatgtaccatgatgatgacctggcagatttggtctttccctccagtgcgacagctgatacttcaatatttgcaggacaaaatgatcccttgaaagacagttacggtatgtctccctgcaacacagctgttgtacctcaggggtggtctgtggaagccttaaactctccacactcagagtcctttgtttccccagaggctgttgcagaacctcctcagccaacggcagttcccttagagctagccaaggagatagaaatggcatcagaagagaggccaccagcacaagcattggaaataatgatgggactgaagactactgacatggcaccatctaaagaaacagagatggccctcgccaaggacatggcactagctacaaaaaccgaggtggcattggctaaagatatggaatcacccaccaaattagatgtgacactggccaaggacatgcagccatccatggaatcagatatggccctagtcaaggacatggaactacccacagaaaaagaagtggccctggttaaggatgtcagatggcccacagaaacagatgtatcttcagccaagaatgtggtactgcccacagaaacagaggtagccccagccaaggatgtgacactgttgaaagaaacagagagggcatctcctataaaaatggacttagccccttccaaggacatgggaccacccaaagaaaacaagaaagaaacagagagggcatctcctataaaaatggacttggctccttccaaggacatgggaccacccaaagaaaacaagatagtcccagccaaggatttggtattactctcagaaatagaggtggcacaggctaatgacattatatcatccacagaaatatcctctgctgagaaggtggctttgtcctcagaaacagaggtagccctggccagggacatgacactgcccccggaaaccaacgtgatcttgaccaaggataaagcactacctttagaagcagaggtggccccagtcaaggacatggctcaactcccagaaacagaaatagccccggccaaggatgtggctccgtccacagtaaaagaagtgggcttgttgaaggacatgtctccactatcagaaacagaaatggctctgggcaaggatgtgactccacctccagaaacagaagtagttctcatcaagaacgtatgtctgcctccagaaatggaggtggccctgactgaggatcaggtcccagccctcaaaacagaagcacccctggctaaggatggggttctgaccctggccaacaatgtgactccagccaaagatgttccaccactctcagaaacagaggcaacaccagttccaattaaagacatggaaattgcacaaacacaaaaaggaataagtgaggattcccatttagaatctctgcaggatgtggggcagtcagctgcacctactttcatgatttcaccagaaaccatcacaggaacggggaaaaagtgcagcttgccggccgaggaggattctgtgttagaaaaactaggggaaaggaaaccatgcaacagtcaaccttctgagctttcttcagagacctcaggaatagccaggccagaagaaggaaggcctgtggtgagtgggacaggaaatgacatcaccaccccaccgaacaaggagctcccaccaagcccagagaagaaaacaaagcctttggccaccactcaacctgcaaagacttcaacatcgaaagccaaaacacagcccacttctctccctaagcagccagctcccaccaccattggtgggttgaataaaaaacccatgagccttgcttcaggcttagtgccagctgccccacccaaacgccctgccgtcgcctctgccaggccttccatcttaccttcaaaagacgtgaagccaaagcccattgcagatgcaaaggctcctgagaagcgggcctcaccatccaagccagcttctgccccagcctccagatctgggtccaagagcactcagactgttgcaaaaaccacaacagctgctgctgttgcctcaactggcccaagcagtaggagcccctccacgctcctgcccaagaagcccactgccattaagactgagggaaaacctgcagaagtcaagaagatgactgcaaagtctgtaccagctgacttgagtcgcccaaagagcacctccaccagttccatgaagaaaaccaccactctcagtgggacagcccccgctgcaggggtggttcccagccgagtcaaggccacacccatgccctcccggccctccacaactcctttcatagacaagaagcccacctcggccaaacccagctccaccaccccccggctcagccgcctggccaccaatacttctgctcctgatctgaagaatgtccgctccaaggttggctccacggaaaacatcaagcatcagcctggaggaggccgggccaaagtagagaaaaaaacagaggcagctgctacaacccgaaagcctgaatctaatgcagtcactaaaacagccggcccaattgcaagtgcacagaaacaacctgcggggaaagtccagatagtctccaaaaaagtgagctacagccatattcagtccaagtgtggttccaaggacaatattaagcatgtccctggaggtggtaatgttcagattcagaacaagaaagtggacatctctaaggtctcctccaagtgtgggtctaaggctaacatcaagcacaagcctggtggaggagatgtcaagattgaaagtcagaagttgaacttcaaggagaaggcccaggccaaggtgggatccctcgataatgtgggccacctacctgcaggaggtgctgtgaagactgagggcggtggcagcgaggctcctctgtgtccgggtccccctgctggggaggagccggccatctctgaggcagcgcctgaagctggcgcccccacttcagccagtggcctcaatggccaccccaccctgtcagggggtggtgaccaaagggaggcccagaccttggacagccagatccaggagacaagcatctaatgatgacattctggtctcgtcttccgtctcccccgtgttcccctcttgtctcccctgttcccctctcccttccctcctcccatgtcactgcagattgagacctacaggctgacgttccgggcaaatgccagggcccgcaccgaccacggggccgacattgtctcccgccccccacacttccctggcggccccaactcgggctcccgggtccttggccccctttcccgggctgtccactagaccagtgagcgcttgggcgccgtgctgggcagcccgctaggctcgccttccctcctgctttgcgtgcccggggcagcagcagccctgccccacacctcctctcactccccagcctgggcccatctccctgctttggtcttgccccatcactgcgccactgctccgtggaggaggttgggagggggttggggtggttgaggctaagttgggatctaggagaggagaaccagattctatcctcatctttttttggttctttggtccaaacccaaaagaaactgacatgccctcccttctccctggatctacctggagggaagagtggaggtggattccgagtggtgacaggacgctgaccgtggagcttaagccactgcctctccctctggtcccacaaatgggcgcccccccctccccatgcaggtggtgtcgggcccttcttgctgccctgccccaagttgggggtcagtgctgcctgtccccatgcttaacatacccgcctagctgctgtcacatttttcttgttttgtccttttatttttttctaataacctaaaaactggcaaaatagttctgcaggttgaagccatgtctacatgaaagtcctcagtaagtgttagagggaacagggcggagatatccttatgccacccccgctggaggatgtgggcagcttagggccctggaggcggtgcggcagggaagaggggtgcagaggctgtggctggtgagccggtcaggcacacaaggggcccttggagcgtggactggttggttttgccattttgttgtgtgtatgctgcttttcttttctaaccaagaggctggttttggcatctctgtcccattccctgggatctggtggtcagccctaggataaaaagccagggctggagaacaagaaagggccaggagatgaattc

SEQ ID NO: 8 - protein, 1152 aa, Homo sapien
MADLSLADALTEPSPDIEGEIKRDFIATLEAEAFDDVVGETVGKTDYIPLLDVDEKTGNSESKKKPCSETSQIEDTPSSKPTLLANGGHGVEGSDTTGSPTEFLEEKMAYQEYPNSQNWPEDTNFCFQPEQVVDPIQTDPFKMYHDDDLADLVFPSSATADTSIFAGQNDPLKDSYGMSPCNTAVVPQGWSVEALNSPHSESFVSPEAVAEPPQPTAVPLELAKEIEMASEERPPAQALEIMMGLKTTDMAPSKETEMALAKDMALATKTEVALAKDMESPTKLDVTLAKDMQPSMESDMALVKDMELPTEKEVALVKDVRWPTETDVSSAKNVVLPTETEVAPAKDVTLLKETERASPIKMDLAPSKDMGPPKENKKETERASPIKMDLAPSKDMGPPKENKIVPAKDLVLLSEIEVAQANDIISSTEISSAEKVALSSETEVALARDMTLPPETNVILTKDKALPLEAEVAPVKDMAQLPETEIAPAKDVAPSTVKEVGLLKDMSPLSETEMALGKDVTPPPETEVVLIKNVCLPPEMEVALTEDQVPALKTEAPLAKDGVLTLANNVTPAKDVPPLSETEATPVPIKDMEIAQTQKGISEDSHLESLQDVGQSAAPTFMISPETITGTGKKCSLPAEEDSVLEKLGERKPCNSQPSELSSETSGIARPEEGRPVVSGTGNDITTPPNKELPPSPEKKTKPLATTQPAKTSTSKAKTQPTSLPKQPAPTTIGGLNKKPMSLASGLVPAAPPKRPAVASARPSILPSKDVKPKPIADAKAPEKRASPSKPASAPASRSGSKSTQTVAKTTTAAAVASTGPSSRSPSTLLPKKPTAIKTEGKPAEVKKMTAKSVPADLSRPKSTSTSSMKKTTTLSGTAPAAGVVPSRVKATPMPSRPSTTPFIDKKPTSAKPSSTTPRLSRLATNTSAPDLKNVRSKVGSTENIKHQPGGGRAKVEKKTEAAATTRKPESNAVTKTAGPIASAQKQPAGKVQIVSKKVSYSHIQSKCGSKDNIKHVPGGGNVQIQNKKVDISKVSSKCGSKANIKHKPGGGDVKIESQKLNFKEKAQAKVGSLDNVGHLPAGGAVKTEGGGSEAPLCPGPPAGEEPAISEAAPEAGAPTSASGLNGHPTLSGGGDQREAQTLDSQIQETSI

SEQ ID NO: 9 - DNA, 803 bp, Homo sapien
ccggcacgagaggagttgtgagtttccaagccccagctcactctgaccacttctctgcctgcccagcatcatgaagggccttgcagctgccctccttgtcctcgtctgcaccatggccctctgctcctgtgcacaagttggtaccaacaaagagctctgctgcctcgtctatacctcctggcagattccacaaaagttcatagttgactattctgaaaccagcccccagtgccccaagccaggtgtcatcctcctaaccaagagaggccggcagatctgtgctgaccccaataagaagtgggtccagaaatacatcagcgacctgaagctgaatgcctgaggggcctggaagctgcgagggcccagtgaacttggtgggcccaggagggaacaggagcctgagccagggcaatggccctgccaccctggaggccacctcttctaagagtcccatctgctatgcccagccacattaactaactttaatcttagtttatgcatcatatttcattttgaaattgatttctattgttgagctgcattatgaaattagtattttctctgacatctcatgacattgtctttatcatcctttcccctttcccttcaactcttcgtacattcaatgcatggatcaatcagtgtgattagctttctcagcagacattgtgccatatgtatcaaatgacaaatctttattgaatggttttgctcagcaccaccttttaatatattggcagtacttattatataaaaggtaaaccagcattctcactgtgaaaaaaaaaaaaaaaaaaaaaaaa

SEQ ID NO: 10 - protein, 89 aa, Homo sapien
MKGLAAALLVLVCTMALCSCAQVGTNKELCCLVYTSWQIPQKFIVDYSETSPQCPKPGVILLTKRGRQICADPNKKWVQKYISDLKLNA

SEQ ID NO: 11 - DNA, 2124 bp, Homo sapien
attccgctcttgctttccggcaggtgatggcgccccccgcggcctagaggtccagcgcccgccgcgagcagcggacagtcctcctgttgtgtccgaccgagagtcctggtgactttgaacatgctggtgccgctagccaagctgtcctgcctggcatatcagtgctttcatgccttaaaaattaagaaaaattatctacctctatgtgctataagatggtcttcaacttctactgtgcctcgaattactacccattatactatttatccccgggataaggacaagagatgggaaggagtgaacatggaaaggtttgcagaagaagcagatgttgtaatagttggtgcaggccctgcagggctctctgcagctgttcgtctaaaacagttggctgtggcacatgaaaaggacatccgtgtgtgtctagtggagaaagctgcccagataggagctcatactctctcaggggcttgccttgatccaggtgcttttaaagaactcttcccagactggaaagagaagggggctccacttaacactcctgtaacagaagacagatttggaattttaacagagaaatacagaattcctgtgccaattcttccagggcttccaatgaataatcatggcaattacattgtacgcttgggacatttagtgagctggatgggcgaacaagcagaagcccttggtgttgaagtataccctggttatgcagctgctgaggtcctttttcatgatgatggtagtgtaaaaggaattgccactaacgatgtagggatacaaaaggatggtgcaccaaaggcaacatttgagagaggactggaactacatgctaaagtcacaatttttgcagaaggttgccatggacatctagccaagcaactatataagaagtttgatttgagagcaaattgtgaacctcaaacctacgggattggactgaaggagttatgggttattgatgaaaagaactggaaacctgggagagtagatcacactgttggttggcccttggacagacatacctatggaggatctttcctctatcatttgaatgaaggtgaacccctagtagctcttggtcttgtggttggtctagactatcagaatccatacctgagtccatttagagagttccaaaggtggaaacaccatcctagcattcggccaaccttggaaggtggaaaaaggattgcatacggagccagagctctcaatgaaggtggctttcagtctataccaaaactcacctttcctggtggtttactaattggttgtagtcctggttttatgaatgttcccaagatcaaaggtactcacacagcaatgaaaagtggaattttagcagcagaatctatttttaatcaactaactagtgaaaatctccaatcaaagacaataggactccatgtaactgaatatgaggacaatttgaagaactcatgggtatggaaagagctatattctgttagaaatataagaccgtcctgccacggagtactgggtgtatatggagggatgatttacactggaatcttttactggatattgagaggaatggagccgtggactctgaaacataaaggttctgactttgaacggctcaagccagccaaggattgcacacctattgagtatccaaaacccgatggacagatcagttttgacctcttgtcatctgtggctctgagtggtactaatcatgaacatgaccagccggcacacttaaccttaagggatgacagtatacctgtaaatagaaatctgtcgatatatgatgggcccgagcagcgattctgtcctgcaggagtttatgaatttgtacctgtggaacaaggtgatggatttcggttacagataaatgctcagaactgtgtacattgtaaaacatgtgatattaaagatccaagtcagaatattaactgggtggtacctgaaggtggaggaggacctgcttacaatggaatgtaaactgcagctagccagtttctttcaagtatggcaagctaacgttaaaatgtttagagattaacagatttcagaatgtctttctgcatattactgaacagaatagtcacaaaatgattatcaaataaaaattttatactataaaaaaaaaaa

SEQ ID NO: 12 - protein, 617 aa, Homo sapien
MLVPLAKLSCLAYQCFHALKIKKNYLPLCAIRWSSTSTVPRITTHYTIYPRDKDKRWEGVNMERFAEEADVVIVGAGPAGLSAAVRLKQLAVAHEKDIRVCLVEKAAQIGAHTLSGACLDPGAFKELFPDWKEKGAPLNTPVTEDRFGILTEKYRIPVPILPGLPMNNHGNYIVRLGHLVSWMGEQAEALGVEVYPGYAAAEVLFHDDGSVKGIATNDVGIQKDGAPKATFERGLELHAKVTIFAEGCHGHLAKQLYKKFDLRANCEPQTYGIGLKELWVIDEKNWKPGRVDHTVGWPLDRHTYGGSFLYHLNEGEPLVALGLVVGLDYQNPYLSPFREFQRWKHHPSIRPTLEGGKRIAYGARALNEGGFQSIPKLTFPGGLLIGCSPGFMNVPKIKGTHTAMKSGILAAESIFNQLTSENLQSKTIGLHVTEYEDNLKNSWVWKELYSVRNIRPSCHGVLGVYGGMIYTGIFYWILRGMEPWTLKHKGSDFERLKPAKDCTPIEYPKPDGQISFDLLSSVALSGTNHEHDQPAHLTLRDDSIPVNRNLSIYDGPEQRFCPAGVYEFVPVEQGDGFRLQINAQNCVHCKTCDIKDPSQNINWVVPEGGGGPAYNGM

SEQ ID NO: 13 - DNA, 2478 bp, Homo sapien
ctcagcttctttgcgtaaccaatactggaaggcatttaaaggacctctgccgcctcagaccttgcagttaactccgccctgacccacccttcccgatgcagtccctgatgcaggctcccctcctgatcgccctgggcttgcttctcgcgacccctgcgcaagcccacctgaaaaagccatcccagctcagtagcttttcctgggataactgtgatgaagggaaggaccctgcggtgatcagaagcctgactctggagcctgaccccatcgtcgttcctggaaatgtgaccctcagtgtcgtgggcagcaccagtgtccccctgagttctcctctgaaggtggatttagttttggagaaggaggtggctggcctctggatcaagatcccatgcacagactacattggcagctgtacctttgaacacttctgtgatgtgcttgacatgttaattcctactggggagccctgcccagagcccctgcgtacctatgggcttccttgccactgtcccttcaaagaaggaacctactcactgcccaagagcgaattcgttgtgcctgacctggagctgcccagttggctcaccaccgggaactaccgcatagagagcgtcctgagcagcagtgggaagcgtctgggctgcatcaagatcgctgcctctctaaagggcatatagcatggcatctgccacagcagaatggagcggtgtgaggaaggtcccttttcctctgttttgtgtttgccaaggccaaactcccactctctgcccccctttaatcccctttctacagtgagtccactaccctcactgaaaatcattttgtaccacttacattttaggctggggcaagcagccctgacctaagggagaatgagttggacagttcttgatagcccagggcatctgctgggctgaccacgttactcatccccgttaacattctctctaaagagcctcgttcatttccaaagcagttaaggaatgggaacagagtgttttaggacctgaagaatctttatgactctctctctttctctctttttttttttgtcactaagttaaaagcgaagtgagagtattaacgtttttgttctcctccggccccctgttacaatgaaggggcaaaagtatttgctcttagtctattcctcccttaacttctgtgactaatttttatttcctttctagatttgcccaattaatactagggtgcagtgtatcctggagaggtagggtgtgtgggggaggaatcccttgggggagatattaggagtgctctgttgtttacaaactcaggtacccgcagggcctagcaagagacttaaatgactgataagaaccgtgagaaacatgttgcttccaggcttgatttcgatttttcgctttttttttttgggacggagtctcgctttgtcaccaggctggagtgcagtggtgcaatctcacctcactgcaacctccgcctcctgggttcaagcaattctcctgcctcagcctcccaagtagcttggactacaggccctgccaccacgcccggctaatttgtgtatttttagtagagatggggtttcaccatgttggccaggatggtctcgatctcttgacctcgtgatccgtccaccttggccttgcaaagcgctggattacaggcatgagccactacacccagccgatttttcctttttgattaaagatgctattacaatgtaaatatttcttacacagaaagtcacagcacatgtgcccattgatacaaggctgctgaggcctggtctccagttggaaatataattaagggtggcagggactggagtcagttggagagtgcatagccagtctgtgaagacaactgccagatactggcaatactccagcctggtgacagagtgagactctgtctcaaaaaaaaagtttcaatgtttactcctagagaagccaaaaatccagatttgtatatgaaatcttaccattttaaaagattggcagctaattatttttttaaaaagctgtgcagtgtgatgtgtcccaaacggactggctcatgggtggccacgtcacaacctctgatctcagaccgtgcatgccttgtcctcttaagacaactcctgtggcaccgtttctccctccacagggccaaagccatagtgtccggtcccaaggacaaggctcttccagtgctaggagaggtatgagcagcctctcacctgtgagctgtggggatcacaaggctgcctgcctcagtcttggagtcctgttgggtgaatgaggcagatgggaaagagcctcaccagcagctgcttttggagcaggggtccaaggaagagagggtggcctcgacatcaaactgcctggatttttctaccaccctgttacatcataacaacttctgaaacacacaccagccctgagttctgggctcatttgaagcctggaatagcaataaatctttttaacttgcaaaaaaaaaaaaaaaaaa

SEQ ID NO: 14 - protein, 193 aa, Homo sapien
MQSLMQAPLLIALGLLLATPAQAHLKKPSQLSSFSWDNCDEGKDPAVIRSLTLEPDPIVVPGNVTLSVVGSTSVPLSSPLKVDLVLEKEVAGLWIKIPCTDYIGSCTFEHFCDVLDMLIPTGEPCPEPLRTYGLPCHCPFKEGTYSLPKSEFVVPDLELPSWLTTGNYRIESVLSSSGKRLGCIKIAASLKGI

SEQ ID NO: 15 - DNA, 1908 bp, Homo sapien
gaaagatggcgtcctcggagcaggcagagcagccgagccagccaagctctactccaggaagtgaaaatgtgctgcctcgagagccgctgattgccacggcagtgaagtttctacagaattcccgggtccgccagagcccacttgcaaccaggagagcatttctaaagaagaaagggctgacagatgaagagattgatatggccttccagcagtcgggcactgctgccgatgagccttcgtccttgggcccagccacacaggtggttcctgtccagccccctcacctcatatctcagccatacagtcccgcaggctcccgatggcgagattacggcgccctggccatcatcatggcaggcattgcatttggctttcaccagctctacaagaaatacctgctccccctcatcctgggcggccgagaggacagaaagcagctggagaggatggaggccggtctctctgagctgagtggcagcgtggcccagacagtgactcagttacagacgaccctcgcctccgtccaggagctgctgattcagcagcagcagaagatccaggagcttgcccacgagctggccgctgccaaggccaccacatccaccaactggatcctggagtcccagaatatcaacgaactcaagtccgaaattaactccttgaaagggcttcttttaaatcggaggcagttccctccatccccatcagccccgaagatcccctcctggcagatcccagtcaagtcaccgtcaccctccagccctgcggccgtgaaccaccacagcagcagcgacatctcacctgtcagcaacgagtccacgtcgtcctcgcctgggaaggagggccacagccccgagggctccacggtcacctaccacttgctgggcccccaggaggaaggcgagggggtggtggacgtcaagggccaggtgcggatggaggtgcaaggcgaggaggagaagagggaggacaaggaggacgaggaggatgaggaggatgatgatgtgagccatgtggacgaggaggactgcctgggggtgcagagggaggaccgccggggcggggatgggcagatcaacgagcaggtggagaagctgcggcggcccgagggcgccagcaacgagagtgagcgggactagggctgcgcctgctgcctccagccctgaggatggcatctagtgtgcccgtgcgtggccataccctgcctccctctctggccctgggagggcagcttggagcccaggtagggggcagagctgtcctcagctgcactgcggcctggtggcagtgtggggagtcacacttctgtccacctggcctcctctcgcctggccgccagccccagccccagccccagccccaggcccagctgcctttggctttgatctcaagtcaggctgaaggcagcgaagcctcggggcccaagcccctccccagccccctctcccggacagacgccttgcccagggtgtgtttgctgagtgtcttgactaccgtgacaccacgcatggccagagctagcgtccctactgcctcccgactcctcagtggaggaggagctgcggtccctctggtgtctgccatccccctccctccctgggcccggccctggacccgtcaggtgcctgtccccagccccaaccccactcatgccccgtcgtcctcccagacaaatgaaaccacgctgcgcttccgatgcccccgcttgccgtgtaatggttcagctaatcccatggcgagatgggggctcattccggaggaggagccaggcagcagggccttcctgaccaacagccagttttgtccttccccccaggaaaaaaatgttcatttgtgtgatcatgtatagacctcagaacggaagataggactgtatataattgtaataaataccagttgccactattt

SEQ ID NO: 16 - protein, 377 aa, Homo sapien
MASSEQAEQPSQPSSTPGSENVLPREPLIATAVKFLQNSRVRQSPLATRRAFLKKKGLTDEEIDMAFQQSGTAADEPSSLGPATQVVPVQPPHLISQPYSPAGSRWRDYGALAIIMAGIAFGFHQLYKKYLLPLILGGREDRKQLERMEAGLSELSGSVAQTVTQLQTTLASVQELLIQQQQKIQELAHELAAAKATTSTNWILESQNINELKSEINSLKGLLLNRRQFPPSPSAPKIPSWQIPVKSPSPSSPAAVNHHSSSDISPVSNESTSSSPGKEGHSPEGSTVTYHLLGPQEEGEGVVDVKGQVRMEVQGEEEKREDKEDEEDEEDDDVSHVDEEDCLGVQREDRRGGDGQINEQVEKLRRPEGASNESERD

SEQ ID NO: 17 - DNA, 4210 bp, Homo sapien
gctgttttgacaacatggcggcgcccatggtccgtggcccggcagtgctcgcctaaaggtggagaacgaggagtagaggaggccgcagccagagcctgtgagcagatccagacctacagataaaaaacattatttaatctatctgggatttactccggcttatgatttgagggccttctcaccttctgaagaatggcttctgtttggcagagattgggtttttatgcctctcttctgaaaagacagctaaatggtgggccagatgtcatcaagtgggaaaggagagtaattcccggatgtaccagaagcatctacagtgccacgggaaagtggacaaaagagtatacattgcagacaagaaaggatgttgagaaatggtggcatcaacgaataaaagaacaggcctccaaaatttcagaagctgataaatcgaagccaaaattttacgtgctttccatgttcccttatccttctggtaagctgcacatgggccatgtgcgtgtctacaccatcagcgacaccatagcacggttccagaagatgagagggatgcaggtcatcaaccccatgggatgggatgcttttggattgcctgctgaaaatgccgcagtcgagaggaatctacatccacaaagttggacacaaagtaatattaaacacatgaggaaacagcttgatcgtctgggcctgtgtttcagctgggatagggaaataactacgtgtttgccagattactacaagtggactcagtatctctttattaaactgtatgaggctgggctggcctatcaaaaggaggccctggttaactgggacccagtggatcaaacagtgcttgccaatgagcaggtggatgaacatggctgttcatggcgttctggagcaaaggtggaacagaagtacctcagacaatggtttattaagacaaccgcttatgcaaaggccatgcaggacgcgttggcagaccttccagaatggtatggaataaaaggcatgcaagcccactggattggggactgtgtgggctgccacctggacttcacattaaaggttcatgggcaagccacgggcgaaaagctgactgcctatacggccacccctgaagccatttatggcacctcccacgtggccatctcgcccagccacagactcctacatgggcacagctctctgaaggaagccttgaggatggcccttgtccctggcaaagattgcctcacgcctgtaatggctgtgaacatgcttacccagcaggaggtccctgtcgttattttggccaaagctgacttggaaggctctctggattcaaaaataggaattcccagtactagctcagaggacaccatcttagcccaaaccctgggcctggcctactctgaagtcattgaaactttgccagatggcacagagagactgagcagctctgctgagttcacaggtatgacccggcaggatgcttttctagccctgactcagaaagcccgggggaagagagtgggtggagacgtgacaagtgataaactgaaagactggctgatttcacggcagcggtactggggcacaccaatccccattgtccactgcccagtctgtggccccacacctgtgcccctggaggacttgcctgtgaccctgcccaacatcgcgtctttcactggcaagggaggccccccactggccatggcttcagagtgggtgaactgctcctgcccaaggtgcaagggagcagccaagagagagacagacacgatggatacctttgttgattctgcttggtactacttcagatacactgaccctcataatccacacagcccttttaacacagcagtggccgattactggatgcctgtggatttgtacattggagggaaagaacatgccgtcatgcacttgttctatgcaagattctttagtcatttttgccatgatcaaaaaatggttaaacatagggagccttttcataagctgctggcccaaggccttatcaaggggcagacattccgcctaccatctggacagtatctacagagagaggaagtggatctcacaggttccgttcctgttcatgcaaaaacgaaagagaagttagaggtgacgtgggagaagatgagtaagtccaaacacaacggggtggacccagaggaagttgtggagcagtatgggatcgacacgattcggctctacatcctttttgctgcccctcctgagaaggatatcttgtgggatgtgaaaactgatgctctccctggggtgctgagatggcaacaacgactgtggaccttgacaactcggtttattgaggccagggcttctgggaagtctccccagcctcagctgctgagtaacaaggagaaagctgaggccaggaagctctgggagtacaagaactccgtcatctctcaggtgaccacccatttcacagaggacttctcactgaattctgcaatttctcagctgatgggactcagcaatgccctctcgcaagcctctcagagcgtcattctccacagccccgagtttgaggatgctttgtgtgccctgatggtaatggctgctccactggcccctcatgtaacctcagagatctgggcaggcctggcgctggtgccgaggaagctctgtgcccactacacttgggatgccagtgtgctgctccaggcatggcctgctgtggacccggagttcctgcagcagcctgaggttgtccagatggcagttctgatcaacaataaagcttgtggcaaaattcctgtgccccaacaagttgcccgggaccaggacaaagtccacgaatttgttcttcaaagcgagctgggtgtcaggcttttgcaaggacgaagcatcaagaagtccttcctttccccgagaactgccctcatcaacttcctggtgcaagattgacagccaggaggctgcagctaccacgagggcctctgaggaacctccttccaggcctgggatgagggggcgatgtctgctggcccaggggaagggaaaagacaaatgtcttgactgttgacctcggtcctgtggcagactgcagtcaacagtgtgcctctgtagtgtggcctggtgctggggtgaaggtgagctgggcaaaggagaaatatgagctactgaggagggggttggacatcctgcccctcaccccccacccacactgcaggtagaggaggccatctgatcccatgggaagccatcagagacactgctggtgggagcaggaaggagcagtgcccctcgagcagccaggaagcctgcggatctgggaaatggctctgccttaggcacttctcgggaatttgaggccagcctgaggaactgcaggactcaggtgcaatgtgccagccacttggaactgctaactgagcctccagatggtagtgaatggtctctttgccttcaggctggatgaggaagtcatttaggaaatgttcaaataaccaatatgtggaaatggacacagggatcttctgaagttgctttgaatcaaaaggcaggcagtgctggttcctctgcctgtgtccccaccactccccagctctgtcatgcaggcctgtcctccccaaccccagctggatgtgcctcccaggcctgctgtggttctgacacacaggatcccaggcaaggcaccacttcctcacatgaatgaggagcagcaagtcataaccactcccttgggtatacaatttgctgtgtagtgaagtggaaccaggctcaggctgctggtcccaacctcagagccccaccgcagcccagtagggatgcagcacgccccagagggctcatgtgggccccagatggcaatgccaccattgttgatgtgactccagagccagttattaggaagagcaagctcaccacagaggagtggaactgaggccccccagatgttgcctccggtgtccaagccacagcggtctggctgttgggaagatggccaggaatggactcataccattggcacattaggctaatcctggttttatgtgaagtcagcaattaagtgttcccactagaactgacctaagccactgattaatatttaatgagggaaggtaggggagaatctagccattttataatgccagaaatctatatatgttatctgatgccatttttctgaagtagcctcacatgtggtccccctgcagttcagcagttaacagatgacttttttagtgtaataaaatgtttatcatctatg

SEQ ID NO: 18 - protein, 903 aa, Homo sapien
MASVWQRLGFYASLLKRQLNGGPDVIKWERRVIPGCTRSIYSATGKWTKEYTLQTRKDVEKWWHQRIKEQASKISEADKSKPKFYVLSMFPYPSGKLHMGHVRVYTISDTIARFQKMRGMQVINPMGWDAFGLPAENAAVERNLHPQSWTQSNIKHMRKQLDRLGLCFSWDREITTCLPDYYKWTQYLFIKLYEAGLAYQKEALVNWDPVDQTVLANEQVDEHGCSWRSGAKVEQKYLRQWFIKTTAYAKAMQDALADLPEWYGIKGMQAHWIGDCVGCHLDFTLKVHGQATGEKLTAYTATPEAIYGTSHVAISPSHRLLHGHSSLKEALRMALVPGKDCLTPVMAVNMLTQQEVPVVILAKADLEGSLDSKIGIPSTSSEDTILAQTLGLAYSEVIETLPDGTERLSSSAEFTGMTRQDAFLALTQKARGKRVGGDVTSDKLKDWLISRQRYWGTPIPIVHCPVCGPTPVPLEDLPVTLPNIASFTGKGGPPLAMASEWVNCSCPRCKGAAKRETDTMDTFVDSAWYYFRYTDPHNPHSPFNTAVADYWMPVDLYIGGKEHAVMHLFYARFFSHFCHDQKMVKHREPFHKLLAQGLIKGQTFRLPSGQYLQREEVDLTGSVPVHAKTKEKLEVTWEKMSKSKHNGVDPEEVVEQYGIDTIRLYILFAAPPEKDILWDVKTDALPGVLRWQQRLWTLTTRFIEARASGKSPQPQLLSNKEKAEARKLWEYKNSVISQVTTHFTEDFSLNSAISQLMGLSNALSQASQSVILHSPEFEDALCALMVMAAPLAPHVTSEIWAGLALVPRKLCAHYTWDASVLLQAWPAVDPEFLQQPEVVQMAVLINNKACGKIPVPQQVARDQDKVHEFVLQSELGVRLLQGRSIKKSFLSPRTALINFLVQD

SEQ ID NO: 19 - DNA, 2417 bp, Homo sapien
tatattggcagttattgagggtaaagcaatatattgtaacagaatgtataaatatttttgataaaacagtctatattttattaaaaaatgaattataacccattttcagttttgcctgcatcataagagtgagcactccattgctttctttcctggccacactgctacaatccagcactaactatccatgtccagggtaaggatcgagatcgagaagcccacactgccagtgaaaaagctacgtctttactgcataaattagaggaagcaatttcggaacaacggaaccttcaaactataaatactgaattatcgaacacttgccaggcacttcagcagaagacaaggaaactgaagaagctttttagatgaggaatttcctcactatgattccctgtcctgcgcagatgcaattcaacaacctcttcaagaaaaattgaagcagtgttgccacaaactatatggtggtcaagaagcaagaatacatcagacacccctgaccttgaaacatacgtgctggtacacacctctgctggatgccttatctctggatagttttacagcagttccaaccctggaatcaacacctttctcaggtgtagccaaccaaatccacactctgtgtgaaaggcccacatatggagaagtaaaggatggtgctttggatgtaaaaagacaacacaagtgcccaggccccacaagtggccccagcccaggaacgaatctctcaggctgcatcaggatgaatgatgacccaagtatggaagagaatggtgttgaacgcgtgtgtcctgagagcctgctgcagtccaggggatattcctcactaccattacccagacacacttcatcgacagacggtactataacttcaagtgatcctggattagaaattctgaatatggcttcttgtgaccttgacagaaactcgctctgtaagaaagaggaggatacaagatcagcttctcccacgatagaggcccaaggcacaagtccagctcatgataatattgcattccaagactctacgagtaaggataaaaccatattaaatctggaagccaaagaggaaccagaaacaatagaagaacataaaaaagaacatgcttcaggagactctgtggtttcccctcttcctgtaaccactgtgaaatcggttaacgttagacaaagtgagaacacttctgctaatgagaaggaggtggaggcagaatttctcagattatctttgggatttaagtgtgactggtttaccttggagaagagagtgaagcttgaagagaggtcccgtgactgggcagaagaaaatttgaagaaagaaatcactaactctttaaaactattagagtctttaacacctctgtgtgaagatgacaaccaggcacaggaaatcattaagaagctggagaagagtataaagtttcttagccagtgtgcagcacgagtggccagtagggctgagatgttgggagccatcaatcaggaaagccgggttagtaaagcagttgaagtgatgattcagcacgtagaaaacttgaagaggatgtatgccaaagagcacgctgaattagaagaactgaaacaggttcttctgcagaatgaaaggtctttcaatcctcttgaagatgatgatgactgccaaattaaaaaacgttcagcttctctaaactccaagccatcttctctacgaagagtgactattgcctctttacccagaaatattggaaatgcaggaatggtggctgggatggaaaataatgatcgattcagtagaaggtcaagcagttggcgtattttggggtcaaagcagagtgaacaccgtccctcattacctcgatttattagcacctattcctgggcagatgctgaagaagaaaaatgtgaactaaaaactaaagatgactcagagccatctggagaagaaacagtagaaaggacaaggaagccaagtctttctgaaaagaaaaataatccatcaaagtgggatgtctcttcagtttatgacacaatagcttcctgggcaacaaatctcaagtcctccatcagaaaggctaataaggccctctggctctctattgcattcattgtactgtttgcagctttgatgagcttcctcacaggccaattattccagaagtctgtggatgccgctcccacacagcaagaggactcatggacgtctctagaacatatcttgtggccatttaccagactccgacacaatgggccaccaccagtgtgacagcaggacatcctaatatatggatcttgatttttaagtttcagtatctgaacttcgtaaattagtaacttttagctgggaaagtatagcatgaaaccagaggttctcagaatgaccgtaagatagcttacatttcctctttttgcctttatctccccaactaaaatacaatggg

SEQ ID NO: 20 - protein, 555 aa, Homo sapien
MESTPFSGVANQIHTLCERPTYGEVKDGALDVKRQHKCPGPTSGPSPGTNLSGCIRMNDDPSMEENGVERVCPESLLQSRGYSSLPLPRHTSSTDGTITSSDPGLEILNMASCDLDRNSLCKKEEDTRSASPTIEAQGTSPAHDNIAFQDSTSKDKTILNLEAKEEPETIEEHKKEHASGDSVVSPLPVTTVKSVNVRQSENTSANEKEVEAEFLRLSLGFKCDWFTLEKRVKLEERSRDWAEENLKKEITNSLKLLESLTPLCEDDNQAQEIIKKLEKSIKFLSQCAARVASRAEMLGAINQESRVSKAVEVMIQHVENLKRMYAKEHAELEELKQVLLQNERSFNPLEDDDDCQIKKRSASLNSKPSSLRRVTIASLPRNIGNAGMVAGMENNDRFSRRSSSWRILGSKQSEHRPSLPRFISTYSWADAEEEKCELKTKDDSEPSGEETVERTRKPSLSEKKNNPSKWDVSSVYDTIASWATNLKSSIRKANKALWLSIAFIVLFAALMSFLTGQLFQKSVDAAPTQQEDSWTSLEHILWPFTRLRHNGPPPV

SEQ ID NO: 21 - DNA, 1890 bp, Homo sapien
atggtgctgtgcccggtgattgggaagctgctgcacaagcgcgtggtgctggccagcgcctccccacgccgtcaggagatcctcagcaacgcgggtctcaggtttgaggtggtcccctccaagtttaaagagaagctggacaaagcctccttcgctactccgtatgggtacgccatggagaccgccaagcagaaggccctggaggtggccaaccggctataccagaaagacctgcgggcccccgacgtggtcattggagcggacacgatcgtgacggtcggggggctgattctggagaagccggtggacaagcaggacgcctacaggatgctgtcccggttgagtgggagagaacacagcgtgttcacaggtgtcgcgatcgtccactgctccagcaaagaccatcagctggacaccagggtctcggaattctacgaggaaacgaaggtgaagttctcggagctgtccgaggagctgctctgggaatacgtccacagcggggagcccatggacaaagctggcggctacggtatccaggccctgggcggcatgctggtggagtccgtacacggggactttctgaacgtggtgggattcccgctgaaccacttctgcaagcagctggtgaagctctactacccgccccgtccggaggacctgcggcggagtgtcaagcacgactccatcccggccgcggacaccttcgaagacctcagtgacgtggaggggggcggctcggagcccactcagagggacgcgggcagccgcgatgagaaggccgaggcgggagaggcgggacaggccacggcagaggctgagtgtcacaggactcgggagaccctgcctccgttcccgacacgcctcctggagctgattgagggctttatgctatccaagggcctgctcaccgcttgcaaactgaaggtgttcgatttattaaaagatgaagcaccccagaaggctgcggatattgccagcaaagtggacgcctctgcgtgtggaatggagaggcttctggacatctgtgctgccatggggctcctggagaagacagagcaaggttacagtaacacagagacagcgaacgtctacctggcatcggatggcgaatactctctgcacggcttcatcatgcacaataatgacctcacatggaacctctttacatacctggagtttgccatccgagagggaacaaaccagcaccacagggcgttggggaagaaggcggaagatctgttccaggatgcgtactaccagagcccggagacgcggctgaggttcatgcgggccatgcacggcatgacgaagctgactgcgtgccaggtggccacggccttcaatctgtcccgcttctcctccgcctgcgacgtgggaggctgcacgggtgcactggcccgagagctggcccgtgagtaccctcgtatgcaggtgactgtgtttgacctcccagacattatcgagctggccgcccacttccaaccccccggaccgcaggcagtgcagatccacttcgcagcaggtgactttttcagggaccccctccccagcgctgagctgtacgtcctgtgccggatcctgcatgactggccagacgacaaagtccacaagttactcagcaaggtcgccgagagctgcaagccaggggccggcctgctgctggtggagacgctcctggatgaggagaagagggtggcgcagcgcgccctgatgcagtcactgaacatgctggtgcagactgaaggcaaggagcggagcctgggcgagtatcagtgcttgctggagctgcacggcttccaccaggtgcaggtggtgcacttggggggtgtcctggatgccatcttgccaccaaagtggccccctgaagcccaggcagcatgttcattatag

SEQ ID NO: 22 - protein, 629 aa, Homo sapien
MVLCPVIGKLLHKRVVLASASPRRQEILSNAGLRFEVVPSKFKEKLDKASFATPYGYAMETAKQKALEVANRLYQKDLRAPDVVIGADTIVTVGGLILEKPVDKQDAYRMLSRLSGREHSVFTGVAIVHCSSKDHQLDTRVSEFYEETKVKFSELSEELLWEYVHSGEPMDKAGGYGIQALGGMLVESVHGDFLNVVGFPLNHFCKQLVKLYYPPRPEDLRRSVKHDSIPAADTFEDLSDVEGGGSEPTQRDAGSRDEKAEAGEAGQATAEAECHRTRETLPPFPTRLLELIEGFMLSKGLLTACKLKVFDLLKDEAPQKAADIASKVDASACGMERLLDICAAMGLLEKTEQGYSNTETANVYLASDGEYSLHGFIMHNNDLTWNLFTYLEFAIREGTNQHHRALGKKAEDLFQDAYYQSPETRLRFMRAMHGMTKLTACQVATAFNLSRFSSACDVGGCTGALARELAREYPRMQVTVFDLPDIIELAAHFQPPGPQAVQIHFAAGDFFRDPLPSAELYVLCRILHDWPDDKVHKLLSKVAESCKPGAGLLLVETLLDEEKRVAQRALMQSLNMLVQTEGKERSLGEYQCLLELHGFHQVQVVHLGGVLDAILPPKWPPEAQAACSL

SEQ ID NO: 23 - DNA, 2611 bp, Homo sapien
cgcctctcccaaagtctagccgggcaggggaacgcggtgcattcctgaccggcacctggcgaggctcatgcgtcccgtgagggcggttcctcgagcctgggggcgctcagattgctttggagacgctgagagaacctttgcgagagcgccggttgacgtgcggagtgcggggctccgggggactgagcagcacgagaccccatcctcccctccgggttttcacactgggcgaagggaggactcctgagctctgcctcttccagtaacattgaggattactgtgttttgtgagagctcgctaggcgccctaagcaacagagttctgagaaatcgagaaacatgataaggaattggctgactatttttatcctttttcccctgaagctcgtagagaaatgtgagtcaagcgtcagcctcactgttcctcctgtcgtaaagctggagaacggcagctcgaccaacgtcagcctcaccctgcggccaccattaaatgcaaccctggtgatcacttttgaaatcacatttcgttccaaaaatattactatccttgagctccccgatgaagttgtggtgcctcctggagtgacaaactcctcttttcaagtgacatctcaaaatgttggacaacttactgtttatctacatggaaatcactccaatcagaccggcccgaggatacgctttcttgtgatccgcagcagcgccattagcatcataaaccaggtgattggctggatctactttgtggcctggtccatctccttctaccctcaggtgatcatgaattggaggcggaaaagtgtcattggtctgagcttcgacttcgtggctctgaacctgacaggcttcgtggcctacagtgtattcaacatcggcctcctctgggtgccctacatcaaggagcagtttctcctcaaataccccaacggagtgaaccccgtgaacagcaacgacgtcttcttcagcctgcacgcggttgtcctcacgctgatcatcatcgtgcagtgctgcctgtatgagcgcggtggccagcgcgtgtcctggcctgccatcggcttcctggtgctcgcgtggctcttcgcatttgtcaccatgatcgtggctgcagtgggagtgatcacgtggctgcagtttctcttctgcttctcctacatcaagctcgcagtcacgctggtcaagtattttccacaggcctacatgaacttttactacaaaagcactgagggctggagcattggcaacgtgctcctggacttcaccgggggcagcttcagcctcctgcagatgttcctccagtcctacaacaacgaccagtggacgctgatcttcggagacccaaccaagtttggactcggggtcttctccatcgtcttcgacgtcgtcttcttcatccagcacttctgtttgtacagaaagagaccggggtatgaccagctgaactagcacccagggacccagtgtacccagcctctggcctcgtgccctgctggggaaggcctcacccagcgaaggccggagaagcggttgggccctggcacacagggctggctcagtgtgcggacagaggagaccactctgctcctggggccagaggccattcaatagcctgccttcgtccgggcccctcctgggcctccccggccaggcacgtggcaccgtcgccttgacaccgccatctcttttctttaaggcttcaggcagcgcgcacaggctctggcagccgtctcaggcaggactgggcaccaagcttgcagccgaaggccttgccccaaactaccagcgtttctgcaagcagcttgaagggctgaccttgcagccgggtgagccaagggcactttgctgccaccgctgcattcccagagatcaagcagcccggtgccgtggccagtgaactcagaggtgctggtggacgggctaggactttggggttaggccatggggctctttctctgaaggccactttcctgacgtactctctgtacataactcagcgtccgtgactgcagtaacagccagccctacccagagtatttctgagccatgaggggcccaccagattggttctgaattggattcatgcccagcgcattagcatagtaactcctttcagattttttggagggacgtttggaagtggcttactctcttctgccctctctcctacctccaccttctcagatgagccccatctgagcacatccagctgctccttacccagcatctggagtacaggacatagctctctcctgctaccagtctgtgccttagaggtcgttaggcctgccaaacggcgaccagctcccctggagcgagggcaggccccttccctctctttccccagacacctacttgagactcaccaatttctggcctgttcaggagcctcagataagtatttgtacttgagaccacctcacacaatctgtatgggcccaaccctgatctcaaacctccttccctctgcccaaagctgtccttcctatggcaggaggggtgggggtcccaggacgtgcctcatacatgacttgagcttgtcagtccactgagtttccttctacgagatcaacgcgaggggcctgtatcttgaattaaagcctactcgcttcctttc

SEQ ID NO: 24 - protein, 367 aa, Homo sapien
MIRNWLTIFILFPLKLVEKCESSVSLTVPPVVKLENGSSTNVSLTLRPPLNATLVITFEITFRSKNITILELPDEVVVPPGVTNSSFQVTSQNVGQLTVYLHGNHSNQTGPRIRFLVIRSSAISIINQVIGWIYFVAWSISFYPQVIMNWRRKSVIGLSFDFVALNLTGFVAYSVFNIGLLWVPYIKEQFLLKYPNGVNPVNSNDVFFSLHAVVLTLIIIVQCCLYERGGQRVSWPAIGFLVLAWLFAFVTMIVAAVGVITWLQFLFCFSYIKLAVTLVKYFPQAYMNFYYKSTEGWSIGNVLLDFTGGSFSLLQMFLQSYNNDQWTLIFGDPTKFGLGVFSIVFDVVFFIQHFCLYRKRPGYDQLN

SEQ ID NO: 25 - DNA, 2357 bp, Homo sapien
cttacaactccgcgcggcctcggccccctgcgccgcccgccccacaacaaaactcagcgcagcgctcccgggcgcccggttcagagcgacctgcggctcagagcggaggggagactgaccggagcgcggatcgggacagcggccgggacagcggcgagacgcgcgtgtgtgagcgcgccggaccaagcgggcccagaagcgggtctgcagcccagagggcaccttctgcaaacatgtctgtggatcccctatccagcaaagctctaaagatcaagcgagagctgagcgagaacacgccgcacctgtcggacgaggcgctgatggggctgtcggtgcgcgagctgaaccggcatctgcgcgggctctccgccgaggaggtgacacggctcaagcagcggcgccgcacactcaaaaaccgtggctacgccgccagctgccgcgtgaagcgcgtgtgccagaaggaggagctgcagaagcagaagtcggagctggagcgcgaggtggacaagctggcgcgcgagaacgccgccatgcgcctggagctcgacgcgctgcgcggcaagtgcgaggcgctgcagggcttcgcgcgctccgtggccgccgcccgcgggcccgccacgctcgtggcgccggccagcgtcatcaccatcgtcaagtccaccccgggctcggggtctggccccgcccacggcccggaccccgcccacggcccggcctcctgctcctagtgcccgcccccgccatgcctcagccacgcccctccggcctcagctccctccccaaagtgcctgagcgccgcctctgtgcccaggtcccatttctctgcagcactggccccttggtgcacacacattcccttcgtgggccctgtcttcctcttgcagccccccaaactgggaccgaatgaccctgggaaggggaagttgggtaggttggggatggggcagaggtctggatctgggatcgcccttggctgaaagtttagcctttttagattgagagatacagagccggcttagagaacagctgttgggggagaagagggcacccctcatcttggaaactgctcttattgtgccaatatgccctccaaaccctcccaggattcaaagctaggtttggctgtctgtgacttacgggaccgtcctgctgagaaattgcactgaagagatgcccccacctctggttgggcctgggggtgcctggccttccgaaactaaaagagtgggtgggaagactagtgaaacccagttcacggatggggaaacaggcctgaggtcacatttcacttagtggttgtgttgggaccaaaacctgggtgtcctcactgctgagtccagccatggttttcagggggacagtggacagggactcagaaatgtggtgggagggcctccctggcttgggagaccgctctctgcaagggagggggagagaagcagagggagagagaaggtgacacggatggaagagtgggaaggagctggcctggctcagccctaggctgtccctgcagccagggtgtccgggggctggccagtcagagaaagggggccatggactgctgtggcaaatagggagacaaggagacagaccctgcagtcctactacagtctggagtggggtcctaagaagaagggtcccacctcaacccctgtcagtgtccactgtggggtgggggctgacccctgcctttgattgtcattctcctgggaagcccagtctcagtccctcccccaacactgtccacactgcccctccccactgtttatttattgcacggatctaagttattctccccagccagagcccgagctcctgctccctgggaaaagtggcgtatggccctgagctgggctttatattatatatctgcaaataaatcacattttatcttatatttagggaaagccggagagcaacaacaaaaaatgtttaagccgggcgcggtggctcacatctgtaatcccagcactttgggagtccaaggagggggatcgcttgagtccaggagtttgagaccagcctggacaacatggtgaaaccccgtctctacaaaaaatacaaaaattagccatgcatggtggctcatgcctgtagtcccagctacttgggaggctgaggcaggaggatcacttaagcccagaaggcagaggttgtagtgagctgagatcgcaccactgcactccagcctgggcaacatagcaaaatcctgtctcaaaaaaaaagttaaaaaatattgcccggctcctagaatttatttatttcctgacttacagcaagcgagttatcgtcttctgtattttgtagactttctaaataaagtcaaattctttctttttccacagaaaaaaaaa

SEQ ID NO: 26 - protein, 164 aa, Homo sapien
MSVDPLSSKALKIKRELSENTPHLSDEALMGLSVRELNRHLRGLSAEEVTRLKQRRRTLKNRGYAASCRVKRVCQKEELQKQKSELEREVDKLARENAAMRLELDALRGKCEALQGFARSVAAARGPATLVAPASVITIVKSTPGSGSGPAHGPDPAHGPASCS

SEQ ID NO: 27 - DNA, 2392 bp, Homo sapien
gcggagcgcgcgctcccagcgaaagcagcagggcagggatctgcgttggaggaagggactgctctggtgctagaatgctgtgcgtcggaaggctgggcggcttgggagccagagcagcagctctgccgccccgccgggcgggccggggaagcctcgaagccgggatccgggcccgaagggtcagcaccagctggtctcccgtgggcgccgccttcaatgtcaagccccagggcagccgcttggacctgttcggcgagcgggcgcgtctttttggagttcctgagctgagtgccccagaaggatttcatattgcacaagaaaaagccttgagaaagacagaattgcttgtggaccgtgcatgttccaccccacctgggccccagaccgtgctgatcttcgatgagctctcggattccttatgcagagtggccgacttggctgattttgtgaaaatcgctcaccctgagccagcattcagagaagctgcggaagaagcttgtagaagtattggcaccatggtagagaagttgaacacaaatgtggatttatatcaaagtttgcaaaaattactagctgataaaaaacttgtggattcccttgatccagaaacaaggcgagtggctgaactgtttatgtttgattttgaaattagtggaatccatctagacaaacaaaagcgtaaaagagcagtggacctcaatgttaaaatcttggatttgagtagtacatttcttatgggaaccaattttcccaacaagattgagaagcatctcttaccagaacacattcgtcgtaactttacatctgctggggatcatatcataattgatggtctccacgcagaatcaccagatgacttggtgcgagaagctgcttataaaatttttctttatcccaatgctggtcaattgaaatgtttagaagaattgctcagcagcagagatcttctggcaaagttggtggggtattccacgttttctcacagggctctccaaggaacgatagctaaaaatccagagactgtcatgcagttccttgaaaaactatctgacaaactttctgaaagaactctgaaagattttgagatgatacgagggatgaaaatgaaactgaatgctcaaaattccgaagtaatgccctgggaccccccttactacagtggtgtgattcgtgcagaaaggtataatattgagcccagcctatattgcccgtttttctctcttggagcatgcatggaaggcctgaatattttgcttaacagactgttggggatttcattatatgcagagcagcctgcaaaaggagaggtgtggagcgaagatgtccgaaaactggctgttgttcatgaatctgaaggattgttggggtacatttactgtgatttttttcagcgagcagacaaaccacatcaggattgccatttcactatccgtggaggcagactaaaggaagatggagactatcaactcccacttgtagttcttatgctgaatcttccccgttcctcaaggagttctccaactttgctaactcctggcatgatggaaaatcttttccatgaaatgggacatgccatgcattcaatgctaggacgtactcgttaccaacacgtcactgggaccaggtgccctactgattttgctgaggttccttctattctgatggagtactttgcaaatgattatcgagtagttaaccaatttgccagacattatcagactggacagccactgccaaaaaatatggtgtctcgtctttgtgaatctaaaaaggtttgtgctgcagctgatatgcaacttcaggtcttttatgccactctggatcaaatctaccatgggaagcatcccctgaggaattcaaccacagacattctcaaggaaacacaagagaaattctatggcctaccatatgttccaaatactgcctggcagctgcgattcagccacctcgtggggtatggtgctagatattactcttacctcatgtccagagcggtcgcctccatggtttggaaggagtgttttctacaggatcctttcaacagggctgccggggagcgctatcgcagggagatgctggcccacggtggaggcagggagcccatgctcatggttgaaggtatgcttcagaagtgtccttctgttgatgacttcgtaagtgccctcgtttccgacttggatctggacttcgaaactttcctcatggattctgaataaaagaaacactctacacctctaatcaaggtcatgtagtaatgactttgttataaatgctacagctgtgagagcttgtttctgattgtttcattgttcgcttctgtaattctgaaaaactttaaactggtagaacttggaataaataatttgttttaattaaaaaaaaaaaaaaaaaa

SEQ ID NO: 28 - protein, 713 aa, Homo sapien
MLCVGRLGGLGARAAALPPRRAGRGSLEAGIRARRVSTSWSPVGAAFNVKPQGSRLDLFGERARLFGVPELSAPEGFHIAQEKALRKTELLVDRACSTPPGPQTVLIFDELSDSLCRVADLADFVKIAHPEPAFREAAEEACRSIGTMVEKLNTNVDLYQSLQKLLADKKLVDSLDPETRRVAELFMFDFEISGIHLDKQKRKRAVDLNVKILDLSSTFLMGTNFPNKIEKHLLPEHIRRNFTSAGDHIIIDGLHAESPDDLVREAAYKIFLYPNAGQLKCLEELLSSRDLLAKLVGYSTFSHRALQGTIAKNPETVMQFLEKLSDKLSERTLKDFEMIRGMKMKLNAQNSEVMPWDPPYYSGVIRAERYNIEPSLYCPFFSLGACMEGLNILLNRLLGISLYAEQPAKGEVWSEDVRKLAVVHESEGLLGYIYCDFFQRADKPHQDCHFTIRGGRLKEDGDYQLPLVVLMLNLPRSSRSSPTLLTPGMMENLFHEMGHAMHSMLGRTRYQHVTGTRCPTDFAEVPSILMEYFANDYRVVNQFARHYQTGQPLPKNMVSRLCESKKVCAAADMQLQVFYATLDQIYHGKHPLRNSTTDILKETQEKFYGLPYVPNTAWQLRFSHLVGYGARYYSYLMSRAVASMVWKECFLQDPFNRAAGERYRREMLAHGGGREPMLMVEGMLQKCPSVDDFVSALVSDLDLDFETFLMDSE

SEQ ID NO: 29 - DNA, 1005 bp, Homo sapien
tttgcaaatagtaacgacaaagatgatcaagttttaaattgccatttggcagtgaaggtgctatccccggaagatggaaaagcagatattgtgagagccgctcaggacttttgccagttagtagcccagaagcaaaggagacccaaagatttggatgtagatatgttagtttactcagttcaaatggttgtcctgatcctgatttagtactgaagttcggtcctgtggacagcacacgaggctttcttacctggcacatcagattgactgagactgtctctttgccttcccatctaaacatcagttatgaggactttttctctgcccttcgtcattatgcagcctgtgaacagcgtctgggaaagtcgtggtcattggttgcataattccatttgagcttatggaggaaaggaccaagtgactctgattttagaaagcacctatgaaaccctgtacacacctatgaaaccctgtacacacctagttcataatcttcataatttatcaacaaacacaaaaaagtgtcttacttgagagtgagtgtgtgcgtgtgtgcgtgcacacatgtgcacgtttgtatgtgtggaaataaacataaatggggacgtgttggagaaggaaatacatagacctacaactttgagcatatagcagtgatgttttaggaactgaaatgtcacacttaataaagtcttcagcccagctacttccctgttttcgtggggagaagagggcctgattagaactgttctggttgtgtttggcgggaggggaataaattttgttcagtccttcttagtgaccaaactttaatttttaagaataatatattgacttactgaactgaagcattctgagttgaaaggagctccagaggaaaggagttctgtgttgctcacatgttaaagcttgctcaccttcagagcagaggaatacctatctacagatatccgcccattttcatctctcttcattatagtcaaacagtgtgacttgagagtgttg

SEQ ID NO: 30 - protein, 68 aa, Homo sapien
FANSNDKDDQVLNCHLAVKVLSPEDGKADIVRAAQDFCQLVAQKQRRPKDLDVDMLVYSVQMVVLILI

SEQ ID NO: 31 - DNA, 3301 bp, Homo sapien
  Unsure 2966-2972: Unknown base
gaattctgcggagcctgcgggacggcggcgggttggcccgtaggcagccgggacagtgttgtacagtgttttgggcatgcacgtgatactcacacagtggcttctgctcaccaacagatgaagacagatgcaccaacgagggtctggaatggtctggagtggtctggaaagcagggtcagatacccctggaaaactgaagcccgtggagcaatgatctctacaggactgcttcaaggctgatgggaaccaccctgtagaggtccatctgcgttcagacccagacgatgccagagctatgactgggcctgcaggtgtggcgccgaggggagatcagccatggagcagccacaggaggaagcccctgaggtccgggaagaggaggagaaagaggaagtggcagaggcagaaggagccccagagctcaatgggggaccacagcatgcacttccttccagcagctacacagacctctcccggagctcctcgccaccctcactgctggaccaactgcagatgggctgtgacggggcctcatgcggcagcctcaacatggagtgccgggtgtgcggggacaaggcatcgggcttccactacggtgttcatgcatgtgaggggtgcaagggcttcttccgtcgtacgatccgcatgaagctggagtacgagaagtgtgagcgcagctgcaagattcagaagaagaaccgcaacaagtgccagtactgccgcttccagaagtgcctggcactgggcatgtcacacaacgctatccgttttggtcggatgccggaggctgagaagaggaagctggtggcagggctgactgcaaacgaggggagccagtacaacccacaggtggccgacctgaaggccttctccaagcacatctacaatgcctacctgaaaaacttcaacatgaccaaaaagaaggcccgcagcatcctcaccggcaaagccagccacacggcgccctttgtgatccacgacatcgagacattgtggcaggcagagaaggggctggtgtggaagcagttggtgaatggcctgcctccctacaaggagatcagcgtgcacgtcttctaccgctgccagtgcaccacagtggagaccgtgcgggagctcactgagttcgccaagagcatccccagcttcagcagcctcttcctcaacgaccaggttacccttctcaagtatggcgtgcacgaggccatcttcgccatgctggcctctatcgtcaacaaggacgggctgctggtagccaacggcagtggctttgtcacccgtgagttcctgcgcagcctccgcaaacccttcagtgatatcattgagcctaagtttgaatttgctgtcaagttcaacgccctggaacttgatgacagtgacctggccctattcattgcggccatcattctgtgtggagaccggccaggcctcatgaacgttccacgggtggaggctatccaggacaccatcctgcgtgccctcgaattccacctgcaggccaaccaccctgatgcccagtacctcttccccaagctgctgcagaagatggctgacctgcggcaactggtcaccgagcacgcccagatgatgcagcggatcaagaagaccgaaaccgagacctcgctgcaccctctgctccaggagatctacaaggacatgtactaacggcggcacccaggcctccctgcagactccaatggggccagcactggaggggcccacccacatgacttttccattgaccagctctcttcctgtctttgttgtctccctctttctcagttcctctttcttttctaattcctgttgctctgtttcttcctttctgtaggtttctctcttcccttctcccttctcccttgccctccctttctctctcctatccccacgtctgtcctcctttcttattctgtgagatgttttgtattatttcaccagcagcatagaacaggacctctgcttttgcacaccttttccccaggagcagaagagagtgggcctgccctctgccccatcattgcacctgcaggcttaggtcctcacttctgtctcctgtcttcagagcaaaagacttgagccatccaaagaaacactaagctctctgggcctgggttccagggaaggctaagcatggcctggactgactgcagccccctatagtcatggggtccctgctgcaaaggacagtggcagaccccggcagtagagccgagatgcctccccaagactgtcattgcccctccgatcgtgaggccacccactgacccaatgatcctctccagcagcacacctcagccccactgacacccagtgtccttccatcttcacactggtttgccaggccaatgttgctgatggcccctccagcacacacacataagcactgaaatcactttacctgcaggcaccatgcacctcccttccctccctgaggcaggtgagaacccagagagaggggcctgcaggtgagcaggcagggctgggccaggtctccggggaggcaggggtcctgcaggtcctggtgggtcagcccagcacctcgcccagtgggagcttcccgggataaactgagcctgttcattctgatgtccatttgtcccaatagctctactgccctccccttcccctttactcagcccagctggccacctagaagtctccctgcacagcctctagtgtccggggaccttgtgggaccagtcccacaccgctggtccctgccctcccctgctcccaggttgaggtgcgctcacctcagagcagggccaaagcacagctgggcatgccatgtctgagcggcgcagagccctccaggcctgcaggggcaaggggctggctggagtctcagagcacagaggtaggagaactggggttcaagcccaggcttcctgggtcctgcctggtcctccctcccaaggagccattctatgtgactctgggtggaagtgcccagcccctgcctgacggnnnnnnngatcactctctgctggcaggattcttcccgctccccacctacccagctgatgggggttggggtgcttctttcagccaaggctatgaagggacagctgctgggacccacctccccccttccccggccacatgccgcgtccctgcccccacccgggtctggtgctgaggatacagctcttctcagtgtctgaacaatctccaaaattgaaatgtatatttttgctaggagccccagcttcctgtgtttttaatataaatagtgtacacagactgacgaaactttaaataaatgggaattaaatatttaaaaaaaaaagcggccgcgaattc

SEQ ID NO: 32 - protein, 441 aa, Homo sapien
MEQPQEEAPEVREEEEKEEVAEAEGAPELNGGPQHALPSSSYTDLSRSSSPPSLLDQLQMGCDGASCGSLNMECRVCGDKASGFHYGVHACEGCKGFFRRTIRMKLEYEKCERSCKIQKKNRNKCQYCRFQKCLALGMSHNAIRFGRMPEAEKRKLVAGLTANEGSQYNPQVADLKAFSKHIYNAYLKNFNMTKKKARSILTGKASHTAPFVIHDIETLWQAEKGLVWKQLVNGLPPYKEISVHVFYRCQCTTVETVRELTEFAKSIPSFSSLFLNDQVTLLKYGVHEAIFAMLASIVNKDGLLVANGSGFVTREFLRSLRKPFSDIIEPKFEFAVKFNALELDDSDLALFIAAIILCGDRPGLMNVPRVEAIQDTILRALEFHLQANHPDAQYLFPKLLQKMADLRQLVTEHAQMMQRIKKTETETSLHPLLQEIYKDMY

SEQ ID NO: 33 - DNA, 5134 bp, Homo sapien
ggacacggagccgcgaggagacagctgaggcccgcggagaccagggggtgaagcctggagaccctcttgccctggcctagctgcaggcccccgggatgctttgggcatgtcctctggagccccacagaagagcagcccaatggccagtggagctgaggagaccccaggcttcctggacacgctcctgcaagacttcccagccctgctgaacccagaggaccctctgccatggaaggccccagggacggtgctcagccaggaggaggtggagggcgagctggctgagctggccatgggctttctgggcagcaggaaggccccgccaccacttgctgctgctctggcccacgaagcagtttcacagctgctacagacagacctttccgaattcaggaagttgcccagggaggaagaagaagaggaggaggacgatgacgaggaggaaaaggcccctgtgaccttgctggatgcccaaagcctggcacagagtttctttaaccgcctttgggaagtcgccggccagtggcagaagcaggtgccattggctgcccgggcctcacagcggcagtggctggtctccatccacgccatccggaacactcgccgcaagatggaggaccggcacgtgtccctcccttccttcaaccagctcttcggcttgtctgaccctgtgaaccgcgcctactttgctgtgtttgatggtcacggaggcgtggatgctgcgaggtacgccgctgtccacgtgcacaccaacgctgcccgccagccagagctgcccacagaccctgagggagccctcagagaagccttccggcgcaccgaccagatgtttctcaggaaagccaagcgagagcggctgcagagcggcaccacaggtgtgtgtgcgctcattgcaggagcgaccctgcacgtcgcctggctcggggattcccaggtcattttggtacagcagggacaggtggtgaagctgatggagccacacagaccagaacggcaggatgagaaggcgcgcattgaagcattgggtggctttgtgtctcacatggactgctggagagtcaacgggaccctggccgtctccagagccatcggggatgtcttccagaagccctacgtgtctggggaggccgatgcagcttcccgggcgctgacgggctccgaggactacctgctgcttgcctgtgatggcttctttgacgtcgtaccccaccaggaagttgttggcctggtccagagccacctgaccaggcagcagggcagcgggctccgtgtcgccgaggagctggtggctgcggcccgggagcggggctcccacgacaacatcacggtcatggtggtcttcctcagggacccccaagagctgctggagggcgggaaccagggagaaggggacccccaggcagaagggaggaggcaggacttgccctccagccttccagaacctgagacccaggctccaccaagaagctaggtggtttccaggcccctgccctccccttcctcccatccttgtccttctctccctcagaagcctcaggacccaacaggtggcaggcagtggacagggtgcccgccccacagtgctttccccagcaccccagagccagtcgggacaccccccgcagcccgtcctggtggctgtggaactgcactgggtggcgggcagatggtggaaggcagcttaggagacctcaccaaagagaagatggaccggctcttgctcccagctcctattaggcccggggtgggaccagaggtcataggtgcccaacggcagccaaaccaaagacactggtgtgcatggggcagcatggttgtgcacgtgggaccctggggcggacccaggagccaaactcttgaagcaccccctgggtcaggcccagcagcggagtggccagccccagtttcccattgctcctctctgcggccagggccaggtgggttcatatttacagatatgcccagccagtcctggtcggccacaccagtgtcccaaagaggagagcgcagcagagccaggggtctgttctgtagcagccacccccctgcccccactccagggcagccatgatgtgcttggcccaccagggccttccgggctgctctcttccctgagcccggaaccggcgacgcacatgtgtcttttgttggtgtgtttgtttttttccagggaggtctaattccgaagcagtattccaggttttctctttgttttatcagtgccaagatgacctgttgtgtcatataatttaagcagagcttagcatttattttattctttagaaaacttaagtatttacttttttaaagctatttttcaaggaacctttttttgcagtattattgaatttattttctaaatcaggattgaaacaggaacttttccaggtggtgttaataagccattcaagtgccttacacagctttgaagaaactaggactgcagtgggctcggataggcccattgaggtttttagaaaagcaggatttgttttgttagggaggcatgattttggtgagatctttctggaagagttttccgcctctttgtgatgctgaacacccccaaggttctcccctccccccgctgcccaggtgactggcaggagctgcgactgccacgtagtgttgcctgggcccgacagcggggctctgggcatcccgggtgaccttggcccatctgcctgcattcccacccccttgggcctggctggatcccaggcagagggaccttgctgctgtgtgattggaacattcccaaatatcttgtgaatttgtaatcaaattggtctcattgggaaagactcttaattaagaggctcaggcaagcacagaggcagcccgtgggtctctgtctcagtctggaggcagcagggatgctgctgggagtccatggcacaggccacagcccctcaccttgccgcggtggctggcagcacgcctgccttgctctgccccatgccctgaacaggcatgagagctccacgtcccctagtgcaccctgagagggggctcacaagtgaccgatcctgggtgcctcagggagctcactgagggcgtgcaaagttgaaagtggcaaggctgggggagggtgtcgggtagagggaagagggcagggggctaggggaggactcagaggccatctgcagggccaagccacaggaagggctgagctggaggtgggcagggctgctccaggcaggtcagagcagtgcagggggaggagaggagaaagggaggaagctgggctgtgtggtccccatgaaggcattcagagtccacctgcagacagcgagagccccaggaaggtttgcacagctgtgccccaagcaccttggcctcctctcagctcgccgaggaggcacgctagagccgccttcccggtgggagccctctgtcccacagggagcggggagccagctttgctggggccctacctgcatgcccagccttacccctcattctcacagcacagatgaggttgagaccatgcagtcaatgcattgcttaaggtctcttatttacaaaaaaaaaccttaaacatagtcgctgtcattcagacattcagagaatggttggccacaaacaatgaccaagtattgcttggcttaacttgaaggcctgctgtctccttctgggggtcagggacgcagctccaccctcaccactagcccaccctgcccgtgggcataaccttgacgaagagagagaatgattggcatctgcttttctcttttctttgctaataattctgttcctggctgccgagagtgaagtttcaccatgtggaggtttggctcctatcacctggtggtctgattcataccctagcctgaggctccactggaagatctcgcagcctcagtgtatgggaaaccctttccccaggcttgtcccagcactgccgctccccacccctgagccaggaccccagaggatggccatgccccgtgcctggcagaggtctggtgccagcactgggagctgctccgcccttgccttggggccgagggagccctcgtccacccctgcacagcagctgggcacagaggagcgctcttccatcttgaccaggactgcaccaagaagcaccaggtgtcttcagcctccaacctccggggcgaccttctcttccagccacagtcccatgagggcccctagccagggacactggtctgtaaattgtaatcctttctccagcccagctctccacttgttccttgtgtgagctgagcaggcagtgcacctctgagtgtcccttttgtaaggcccaggggttgcactgagtctgcagaggccgcgacctcctagaacgctgtgggtgcaagtgagccggcgtgtcctggggagatgctgccagcacacaggggccctcctgctgccagcaggttggggtggttaagtcttattagtgtctattcttaaaattaagtgggctggagaagaatggagctccacatgccagcaccgtatatggaatacaaaagctggggaagcagggcctgccttacaggtgtggctgactctgagcccaggcctgcaggggtggagggcagtccctcagaatcccagaggcagtcccagcctcagaacccaggataggaaatgggtgtgtttagtggggaaagggacggggtgcagacggcagggccagtatggggccccctccctctcctctcctctcctatggtgagcccagcgtgggcaccgggccgtctcagccgtgttcccagggctgggaggacagctctggcccttcttaggcctagcctcgtcccaagctaaatgtaagccagttgggctgtgttaaaggaagcagtgtttttggtttgattctgcctctgtagctcaaggggggcagcccccagagtcctgtgcattctgccaaggctccatagctttgccaaatgcacggagctctgccattccggtgcagtgcaggccttgcgaagggtttatctgcgttcgtctcggtgggcttctcctgcatgggagttgtgttcctgtgcaagggggagctttgctcaggacaggatgactgtcttccctattcttagggacaagtcccaagatgccagaaaggcagtctcccaaggacccaccatgcagaagtgtcaataaaccacaagttctg

SEQ ID NO: 34 - protein, 454 aa, Homo sapien
MSSGAPQKSSPMASGAEETPGFLDTLLQDFPALLNPEDPLPWKAPGTVLSQEEVEGELAELAMGFLGSRKAPPPLAAALAHEAVSQLLQTDLSEFRKLPREEEEEEEDDDEEEKAPVTLLDAQSLAQSFFNRLWEVAGQWQKQVPLAARASQRQWLVSIHAIRNTRRKMEDRHVSLPSFNQLFGLSDPVNRAYFAVFDGHGGVDAARYAAVHVHTNAARQPELPTDPEGALREAFRRTDQMFLRKAKRERLQSGTTGVCALIAGATLHVAWLGDSQVILVQQGQVVKLMEPHRPERQDEKARIEALGGFVSHMDCWRVNGTLAVSRAIGDVFQKPYVSGEADAASRALTGSEDYLLLACDGFFDVVPHQEVVGLVQSHLTRQQGSGLRVAEELVAAARERGSHDNITVMVVFLRDPQELLEGGNQGEGDPQAEGRRQDLPSSLPEPETQAPPRS

SEQ ID NO: 35 - DNA, 2836 bp, Homo sapien
atggcggcggccgtagcggctccactcgccgccgggggtgaggaggcggcagccacgacctccgtgcccgggtctccaggtctgccggggagacgcagtgcagagcgggccctagaggacgccgtggccaccgggaccctgaacctgtctaaccggcgcttgaagcacttcccccggggcgcggcccgtagctacgacctgtcagacatcacccaggctgacctgtcccggaaccggtttcccgaggtgcccgaggcggcgtgccagctggtgtccctggagggcctgagcctctaccacaattgcctgagatgcctgaacccagccttggggaatctcacagccctcacctacctcaacctcagccgaaaccagctgtcgctgctgccaccctacatctgccagctgcccctgagggtcctcatcgtcagcaacaacaagctgggagccctgccccctgacatcggcaccctgggaagcctgcgacagcttgacgtgagcagcaacgagctccaatccctgccctcggaactgtgtggcctctcttccctgcgggacctcaatgtccggaggaaccagctcagtacgctgcccgaagagctgggggacctccctctggtccgcctggatttctcctgtaaccgcgtctcccgaatcccagtctccttctgccgcctgaggcacctgcaggtcattctgctggacagcaaccctctgcagagtccacctgcccaggtctgcctgaaggggaaacttcacatcttcaagtatttgtccacagaggccgggcagcgtgggtcggccctgggggacctggccccttctcggcccccgagtttcagtccctgccctgcagaggatctatttccgggacatcggtacgatggtgggctggactcaggcttccacagcgttgatagtggcagcaagaggtggtctggaaatgagtcaacagatgaattttcagagctgtcattccggatctcagagctggcccgggagccccgggggcccagagaacgcaaggaggatggctcagcggacggagaccctgtgcagattgacttcatcgacagccatgtccccggggaggatgaagagcgaggcactgtggaggagcagcgaccacccgaattaagccctggggcaggggacagggagagggcaccaaacagcaggcgggaggagccggcaggggaggagcggcggcgcccggacaccttgcagctgtggcaggagcgggaacggcggcagcagcagcagagcggggcgtggggggccccgaggaaggatagcctcttgaagccagggctcagggctgttgtgggaggggccgccgccgtgtccactcaagccatgcacaacggctcgcctaagtccagtgcctcccaagcagggggctgcagcggggcagggagccccgcccctgcccctgcctcccaagagccccttcccatagctggaccagcgacagcacctgctccacggccacttggctccattcagagaccaaacagcttcctcttccgttcctcctctcagagtggctcaggcccttcctcaccagactctgtcctgagacctcggcggtacccccaggttccagatgagaaggacttaatgactcagctgcgccaggtccttgagtcccggctgcagcggcccctgcctgaggacctggccgaggctctggccagtggggtcatcctgtgccagctggccaaccagctacggccgcgctccgtgcccttcatccatgtgccctcccctgctgtgccaaaactcagtgccctcaaggctcggaagaatgtggagagttttctagaagcctgtcgaaaaatgggggtgcctgaggctgacctgtgctcgccctcggatctcctccagggcactgcccgggggctgcggaccgcgctggaggccgtgaagcgggtggggggcaaggccctaccgcccctctggcccccctctggtctgggcggcttcgtcgtcttctacgtggtcctcatgctgctgctctatgtcacctacactcggctcctggatccccgttccccccaggtggcctgggaggtggccccctcgaggatgactccactagcgccctgggaccccaagtatgaagccaaagcaggacctcggccggtgtgggtgagttgggggcaaacctgtgggactggctggggtgctcagggagctgtgcggtggcctgaggctccagtgctctgtcctcctcaccctagggggccaactgtagctcaggagcctcgttctcaggccggacgctgtgtcacccctcattctggccgctgtatgaagcagcctcgggcaggggtctcaggcccgtggcccctgccacagggcactggaatggacagcaggcgcccccagatgcagggttcccggtggtgtgctgtgaagatgtcttcctctcggaccctctgctgccccgggggcagcgtgttcccctgtacctgtccaaggccccccagcagatgatgggctccctgaaactgctgccgccgccccccatcatgtctgccagggtgctcccccgcccatcaccctcccggggcccctccactgcctggctcagcgggccggagctgatcgctctcactggcctgctgcagatgagccagggggagcctaggcccagctcctccgcggttggccccccagaccatacctctgacccacccagcccctgtggtagccccagcagttctcagggtgctgacctctctctcccacagaccccagacacccattgtccatagccttctcagggcagagtgggctggttgtgttgacaataaaacagtgttggtttgca

SEQ ID NO: 36 - protein, 832 aa, Homo sapien [sequence omitted]

SEQ ID NO: 37 - DNA, 1670 bp, Homo sapien
gcgcggcccatgtcctccgcgccgcgctcgcccaccccgcggccccgcaggatgaagaaggacgagtcgttcctgggcaagctgggcggcaccctggccaggaagcggagggcgcgcgaggtgagtgacctgcaggaagaaggcaagaatgccatcaactcaccgatgtcccccgccctggtggatgttcaccctgaagacacccagcttgaggagaacgaggagcgcacgatgattgaccccacttccaaggaagaccccaagttcaaggaactggtcaaggtcctcctcgactggattaatgacgtgctggtggaggagaggatcattgtgaagcagctggaggaagacctgtatgacggccaggtgctgcagaagctcttggaaaaactggcagggtgcaagctgaatgtggctgaggtgacacagtccgaaatagggcagaaacagaagctgcagacggtgctggaagcagtacatgacctgctgcggccccgaggctgggcgctccggtggagcgtggactcaattcacgggaagaacctggtggccatcctccacctgctggtctctctggccatgcacttcagggcccccatccgccttcctgagcatgtaacggtgcaggtggtggtcgtgcggaaacgggaaggcctgctgcattccagccacatctcggaggagctgaccacaactacagagatgatgatgggccggttcgagcgggatgccttcgacacgctgttcgaccacgccccggataagctcagcgtggtgaagaagtctctcatcacttttgtgaacaagcacctgaacaagctgaatttggaggtgacggaactggagacccagtttgcagatggcgtgtacctggttctgctcatgggccttctggaagactactttgttcctctccaccacttctacctgactccggaaagcttcgatcagaaggtccacaatgtgtccttcgcctttgagctgatgctggacggaggcctcaagaaacccaaggctcgtcctgaagacgtggttaacttggacctcaaatccaccctgagggttctttacaacctgttcaccaagtacaagaacgtggagtgacgggggagctgtggatggtggcaggagtgtcccagcaagaaaggcggcatccgtctgtgccctgtgcctttccagggagccaggcgccatgggcttctggtccaagctgtgttgactgtcatccccaccccacccctacctcacgcctgccccaccccctgcctcttttggttgttgttcttaatctcctctccatgtagttcccagtgggcaagagcctttgaaaatgcaggattctaaacactcgtgcttgcgtttgaagcctcgcgtcactcagtcgcgtgggatgatgagtccgttgttgtctgccttggccgaaagatgaaaaaaagcctgaaccccaacccccagctggttgagagcaccctgcattctgcctcatggtgcagttagcgatcacaggccttcagaagtacaacatcagctcagcaggaacgccggctccccgaggacccaggcttgacgattcaccggggatctcctgggctgggctctccttggaagtgaggccttttattaaaaataaaagggttttgcagtttgaaaaaaaaaaaaaaaaaaaaaaa

SEQ ID NO: 38 - protein, 364 aa, Homo sapien
MSSAPRSPTPRPRRMKKDESFLGKLGGTLARKRRAREVSDLQEEGKNAINSPMSPALVDVHPEDTQLEENEERTMIDPTSKEDPKFKELVKVLLDWINDVLVEERIIVKQLEEDLYDGQVLQKLLEKLAGCKLNVAEVTQSEIGQKQKLQTVLEAVHDLLRPRGWALRWSVDSIHGKNLVAILHLLVSLAMHFRAPIRLPEHVTVQVVVVRKREGLLHSSHISEELTTTTEMMMGRFERDAFDTLFDHAPDKLSVVKKSLITFVNKHLNKLNLEVTELETQFADGVYLVLLMGLLEDYFVPLHHFYLTPESFDQKVHNVSFAFELMLDGGLKKPKARPEDVVNLDLKSTLRVLYNLFTKYKNVE

SEQ ID NO: 39 - DNA, 2360 bp, Homo sapien
gctacgcgggccacgctgctggctggcctgacctaggcgcgcggggtcgggcggccgcgcgggcgggctgagtgagcaagacaagacactcaagaagagcgagctgcgcctgggtcccggccaggcttgcacgcagaggcgggcggcagacggtgcccggcggaatctcctgagctccgccgcccagctctggtgccagcgcccagtggccgccgcttcgaaagtgactggtgcctcgccgcctcctctcggtgcgggaccatgaagctgctgccgtcggtggtgctgaagctctttctggctgcagttctctcggcactggtgactggcgagagcctggagcggcttcggagagggctagctgctggaaccagcaacccggaccctcccactgtatccacggaccagctgctacccctaggaggcggccgggaccggaaagtccgtgacttgcaagaggcagatctggaccttttgagagtcactttatcctccaagccacaagcactggccacaccaaacaaggaggagcacgggaaaagaaagaagaaaggcaaggggctagggaagaagagggacccatgtcttcggaaatacaaggacttctgcatccatggagaatgcaaatatgtgaaggagctccgggctccctcctgcatctgccacccgggttaccatggagagaggtgtcatgggctgagcctcccagtggaaaatcgcttatatacctatgaccacacaaccatcctggccgtggtggctgtggtgctgtcatctgtctgtctgctggtcatcgtggggcttctcatgtttaggtaccataggagaggaggttatgatgtggaaaatgaagagaaagtgaagttgggcatgactaattcccactgagagagacttgtgctcaaggaatcggctggggactgctacctctgagaagacacaaggtgatttcagactgcagaggggaaagacttccatctagtcacaaagactccttcgtccccagttgccgtctaggattgggcctcccataattgctttgccaaaataccagagccttcaagtgccaaacagagtatgtccgatggtatctgggtaagaagaaagcaaaagcaagggaccttcatgcccttctgattcccctccaccaaaccccacttcccctcataagtttgtttaaacacttatcttctggattagaatgccggttaaattccatatgctccaggatctttgactgaaaaaaaaaaagaagaagaagaaggagagcaagaaggaaagatttgtgaactggaagaaagcaacaaagattgagaagccatgtactcaagtaccaccaagggatctgccattgggaccctccagtgctggatttgatgagttaactgtgaaataccacaagcctgagaactgaattttgggacttctacccagatggaaaaataacaactatttttgttgttgttgtttgtaaatgcctcttaaattatatatttattttattctatgtatgttaatttatttagtttttaacaatctaacaataatatttcaagtgcctagactgttactttggcaatttcctggccctccactcctcatccccacaatctggcttagtgccacccacctttgccacaaagctaggatggttctgtgacccatctgtagtaatttattgtctgtctacatttctgcagatcttccgtggtcagagtgccactgcgggagctctgtatggtcaggatgtaggggttaacttggtcagagccactctatgagttggacttcagtcttgcctaggcgattttgtctaccatttgtgttttgaaagcccaaggtgctgatgtcaaagtgtaacagatatcagtgtctccccgtgtcctctccctgccaagtctcagaagaggttgggcttccatgcctgtagctttcctggtccctcacccccatggccccaggccacagcgtgggaactcactttcccttgtgtcaagacatttctctaactcctgccattcttctggtgctactccatgcaggggtcagtgcagcagaggacagtctggagaaggtattagcaaagcaaaaggctgagaaggaacagggaacattggagctgactgttcttggtaactgattacctgccaattgctaccgagaaggttggaggtggggaaggctttgtataatcccacccacctcaccaaaacgatgaaggtatgctgtcatggtcctttctggaagtttctggtgccatttctgaactgttacaacttgtatttccaaacctggttcatatttatactttgcaatccaaataaagataacccttattccataaaaaaaaaaaaaaaaaa

SEQ ID NO: 40 - protein, 208 aa, Homo sapien
MKLLPSVVLKLFLAAVLSALVTGESLERLRRGLAAGTSNPDPPTVSTDQLLPLGGGRDRKVRDLQEADLDLLRVTLSSKPQALATPNKEEHGKRKKKGKGLGKKRDPCLRKYKDFCIHGECKYVKELRAPSCICHPGYHGERCHGLSLPVENRLYTYDHTTILAVVAVVLSSVCLLVIVGLLMFRYHRRGGYDVENEEKVKLGMTNSH

SEQ ID NO: 41 - DNA, 2937 bp, Homo sapien
acgcgtccgcttcggaatgagagactcaaccataatagaaagaatggagaactattaaccaccattcttcagtgggctgtgattttcagaggggaatactaagaaatggttttccatactggaacccaaaggtaaagacactcaaggacagacatttttggcagagcatagatgaaaatggcaagttccctggctttccttctgctcaactttcatgtctccctcttcttggtccagctgctcactccttgctcagctcagttttctgtgcttggaccctctgggcccatcctggccatggtgggtgaagacgctgatctgccctgtcacctgttcccgaccatgagtgcagagaccatggagctgaggtgggtgagttccagcctaaggcaggtggtgaacgtgtatgcagatggaaaggaagtggaagacaggcagagtgcaccatatcgagggagaacttcgattctgcgggatggcatcactgcagggaaggctgctctccgaatacacaacgtcacagcctctgacagtggaaagtacttgtgttatttccaagatggtgacttctacgaaaaagccctggtggagctgaaggttgcagcattgggttctgatcttcacattgaagtgaagggttatgaggatggagggatccatctggagtgcaggtccactggctggtacccccaaccccaaataaagtggagcgacaccaagggagagaacatcccggctgtggaagcacctgtggttgcagatggagtgggcctgtatgcagtagcagcatctgtgatcatgagaggcagctctggtgggggtgtatcctgcatcatcagaaattccctcctcggcctggaaaagacagccagcatatccatcgcagaccccttcttcaggagcgcccagccctggatcgcggccctggcagggaccctgcctatctcgttgctgcttctcgcaggagccagttacttcttgtggagacaacagaaggaaaaaattgctctgtccagggagacagaaagagagcgagagatgaaagaaatgggatacgctgcaacagagcaagaaataagcctaagagagaagctccaggaggaactcaagtggaggaaaatccagtacatggctcgtggagagaagtctttggcctatcatgaatggaaaatggccctcttcaaacctgcggatgtgattctggatccagacacggcaaacgccatcctccttgtttctgaggaccagaggagtgtgcagcgtgctgaagagccgcgggatctgccagacaaccctgagagatttgaatggcgttactgtgtccttggctgtgaaaacttcacatcagggagacattactgggaggtggaagtgggggacagaaaagagtggcatattggggtatgtagtaagaacgtggagaggaaaaaaggttgggtcaaaatgacaccggagaacggatactggactatgggcctgactgatgggaataagtatcgggctctcactgagcccagaaccaacctgaaacttcctgagcctcctaggaaagtggggatcttcctggactatgagactggagagatctcgttctataatgccacagatggatctcatatctacacctttccgcacgcctctttctctgagcctctatatcctgttttcagaattttgaccttggagcccactgccctgaccatttgcccaataccaaaagaagtagagagttcccccgatcctgacctagtgcctgatcattccctggagacaccactgaccccgggcttagctaatgaaagtggggagcctcaggctgaagtaacatctctgcttctccctgcccaccctggagctgaggtctccccttctgcaacaaccaatcagaaccataagctacaggcacgcactgaagcactttactgatattcattccattattccatatgacagttgttttgagtttcgtaccaccttattgtccccttatacagataaggaaactggggtgcagaaaggtgaattaactttacaaagtagacatgacaagtgaacagcagagctgggatctaaacagcaataactaacattaacagagaatttaaaatgttcttagtgctgtgttataagctttggtggatgtcactcctttaatcctcacaacaccctgtcgggtagtcatattttgcaagtatggaagctgaggcagggcaacatgaagtaacttacataattcatacagtaatttgtgcagttgggagatgttcagccttagtccctggctaattgcctgttcttttccagcctgattttttttcccacaggaagagcccacatgtagccctgaggtttccttcccaggacagctgcagggtagagatcattttaagtgcttgtggagttgacatccctattgactctttcccagctgatatcagagacttagacccagcactccttggattagctctgcagagtgtcttggttgagagaataacctcatagtaccaacatgacatgtgacttggaaagagactagaggccacacttgataaatcatggggcacagatatgttcccacccaacaaatgtgataagtgattgtgcagccagagccagccttccttcaatcaaggtttccaggcagagcaaataccctagagattctctgtgatataggaaatttggatcaaggaagctaaaagaattacagggatgtttttaatcccactatggactcagtctcctggaaataggtctgtccactcctggtcattggtggatgttaaacccatattcctttcaactgctgcctgctagggaaaactgctcctcattatcatcactattattgctcaccactgtatcccctctacttggcaagtggttgtcaagttctagttgttcaataaatgtgttaataatgaaaaaaaaaaa

SEQ ID NO: 42 - protein, 584 aa, Homo sapien
MKMASSLAFLLLNFHVSLFLVQLLTPCSAQFSVLGPSGPILAMVGEDADLPCHLFPTMSAETMELRWVSSSLRQVVNVYADGKEVEDRQSAPYRGRTSILRDGITAGKAALRIHNVTASDSGKYLCYFQDGDFYEKALVELKVAALGSDLHIEVKGYEDGGIHLECRSTGWYPQPQIKWSDTKGENIPAVEAPVVADGVGLYAVAASVIMRGSSGGGVSCIIRNSLLGLEKTASISIADPFFRSAQPWIAALAGTLPISLLLLAGASYFLWRQQKEKIALSRETEREREMKEMGYAATEQEISLREKLQEELKWRKIQYMARGEKSLAYHEWKMALFKPADVILDPDTANAILLVSEDQRSVQRAEEPRDLPDNPERFEWRYCVLGCENFTSGRHYWEVEVGDRKEWHIGVCSKNVERKKGWVKMTPENGYWTMGLTDGNKYRALTEPRTNLKLPEPPRKVGIFLDYETGEISFYNATDGSHIYTFPHASFSEPLYPVFRILTLEPTALTICPIPKEVESSPDPDLVPDHSLETPLTPGLANESGEPQAEVTSLLLPAHPGAEVSPSATTNQNHKLQARTEALY

SEQ ID NO: 43 - DNA, 2402 bp, Homo sapien
ggcacgagggtagtgagcggtgtttcaggatgtgagggcccgcaggagccgagtcaggctctctccactgcctgcccgccaccgtgcaagctctggccggcgctgcccacagtccccatggtgggcagcccccgcggcggggacccctgatcggcagcggcatgccagggaagcccaagcacctgggcgtccccaacgggcgcatggttctggctgtgtcagatggagagctgagcagcacgacggggccccagggccagggcgagggccgcggcagctctctcagcatccacagcctccccagtggtcccagcagccccttcccaaccgaggagcagcctgtggccagctgggccctgtccttcgagcggctgttgcaggacccgctgggcctggcttacttcactgagttcctgaagaaggagttcagcgcggaaaacgtgactttctggaaggcctgcgagcgcttccagcagatcccggccagcgatacccagcagctagctcaggaggcccgcaacatctaccaggagttcctgtccagccaggcgctgagcccagtgaacatcgaccgtcaggcctggcttggcgaggaggtgctggccgagccccggccggacatgtttcgggcacagcagcttcagatcttcaacttgatgaagttcgacagctatgcgcgcttcgtcaagtccccgctgtaccgcgagtgcctgctagccgaagccgagggacgccctctgcgggaacctggctcctcgcgcctcggcagccctgacgccacgaggaagaagccgaagctgaagcccgggaagtcgctgccgctgggtgtggaggagttggggcagctgccacccgttgagggtcctgggggccgccctctccgcaagtccttccgccgggagctgggcgggactgcaaacgccgccttgcgccgagagtctcagggctccctcaactcctccgccagcctggaccttggcttcctagccttcgtcagcagcaaatctgagagccaccggaagagccttgggagcacggagggtgaaagtgaaagccggccagggaagtactgctgtgtgtacctgcccgatggcacagcctccttggccctggccagacctggcctcaccatccgagacatgctggcagggatctgtgagaaacgaggcctctctctacctgacatcaaggtctacctggtgggcaatgaacaggccctggtcctggatcaggactgcaccgtgctggcggatcaggaagtgcggctggaaaacaggatcaccttcgagctggagctgacggcgctggagcgcgtggtacgaatctcagccaagcccaccaagcggctgcaggaggcgctgcagcccattctggagaagcacggcttgagcccgctagaggtggtgctgcaccggccaggcgagaaacagcctctggatctggggaagctagtgagctcggtggcggcccagagactggttttggacactcttccaggtgtgaagatctccaaagcccgtgacaaatctccctgccgcagccagggctgcccacctagaactcaggataaggccacccatccccctccagcgtcccccagttctctggtgaaggtgcccagtagtgccactggaaagcggcagacctgtgacatcgaaggcctggtggagctgctgaaccgggtgcagagcagcggggcccacgaccagaggggccttctgaggaaagaggacctggtacttccagaatttctgcagctgcccgcccaagggcccagctccgaggagaccccaccacagaccaaatcagcagcccagcccatcgggggatccttgaactccaccaccgactcagccctctgacagctacccaacagtccaggacagctgcatggcacccggcgggccgagcatgccatgggtccgctctgcatgccctgtctgtgccatgagtgtccctggccccttcctgccatgggcaggcccgcaggaagagccggtaggggtggaaaggggactcagatgagacacaccccacagctgccaccgccttgtccctcaacaagctcacccccaatcccttgcagccaggccacaatgggggaggtgagtccagccccttggaacaggcttgcccaacatggagggatggcgttggcagtgccagcctccccagcctgtgccaagcttcaacaggggcaagaggaggggccggcccctcctcaggaagctggtatgagtaaggccttgagggtgcaggcaggcagccctgtaccccacccacatagactatactgtacatacagattttgcagtaggcttggggcagctgggtttgtccttgatgtatgatactgttattataataattattattattctgcaaaaaaaaaaaaaaaaaaa

SEQ ID NO: 44 - protein, 566 aa, Homo sapien
MPGKPKHLGVPNGRMVLAVSDGELSSTTGPQGQGEGRGSSLSIHSLPSGPSSPFPTEEQPVASWALSFERLLQDPLGLAYFTEFLKKEFSAENVTFWKACERFQQIPASDTQQLAQEARNIYQEFLSSQALSPVNIDRQAWLGEEVLAEPRPDMFRAQQLQIFNLMKFDSYARFVKSPLYRECLLAEAEGRPLREPGSSRLGSPDATRKKPKLKPGKSLPLGVEELGQLPPVEGPGGRPLRKSFRRELGGTANAALRRESQGSLNSSASLDLGFLAFVSSKSESHRKSLGSTEGESESRPGKYCCVYLPDGTASLALARPGLTIRDMLAGICEKRGLSLPDIKVYLVGNEQALVLDQDCTVLADQEVRLENRITFELELTALERVVRISAKPTKRLQEALQPILEKHGLSPLEVVLHRPGEKQPLDLGKLVSSVAAQRLVLDTLPGVKISKARDKSPCRSQGCPPRTQDKATHPPPASPSSLVKVPSSATGKRQTCDIEGLVELLNRVQSSGAHDQRGLLRKEDLVLPEFLQLPAQGPSSEETPPQTKSAAQPIGGSLNSTTDSAL

SEQ ID NO: 45 - DNA, 1810 bp, Homo sapien
cccctgcccgcccgacagcgccgccgcctgccccgccatgggtcgacagaaggagctggtgtcccgctgcggggagatgctccacatccgctaccggctgctccgacaggcgctggccgagtgcctggggaccctcatcctggtgatgtttggctgtggctccgtggcccaggttgtgctcagccggggcacccacggtggtttcctcaccatcaacctggcctttggctttgctgtcactctgggcatcctcatcgctggccaggtctctggggcccacctgaaccctgccgtgacctttgccatgtgcttcctggctcgtgagccctggatcaagctgcccatctacaccctggcacagacgctgggagccttcttgggtgctggaatagtttttgggctgtattatgatgcaatctggcacttcgccgacaaccagctttttgtttcgggccccaatggcacagccggcatctttgctacctacccctctggacacttggatatgatcaatggcttctttgaccagttcataggcacagcctcccttatcgtgtgtgtgctggccattgttgacccctacaacaaccccgtcccccgaggcctggaggccttcaccgtgggcctggtggtcctggtcattggcacctccatgggcttcaactccggctatgccgtcaaccctgcccgggactttggcccccgcctttttacagcccttgcgggctggggctctgcagtcttcacgaccggccagcattggtggtgggtgcccatcgtgtccccactcctgggctccattgcgggtgtcttcgtgtaccagctgatgatcggctgccacctggagcagcccccaccctccaacgaggaagagaatgtgaagctggcccatgtgaagcacaaggagcagatctgagtgggcaggggccatctccccactccgctgccctggccttgagcatccactgactgtccaagggccactcccaagaagcccccttcacgatccaccctttcaggctaaggagctccctatctaccctcaccccacgagacagccccttcaggatttccactggaccttgcccaaatagcaccttaggccactgcccctaagctggggtggaaccggaatttgggtcaatacatccttttgtctcccaagggaagagaatgggcagcaggtatgtgtgtgtgtgcatgtgtgtgcatgtgtgtgcatgtgtgtgcaggggtgtgtgtgtgtggggggggttcccagatattcagggcaagggaccagtcggaagggattctggctattgggggagcccagagacaggggaaggcagcctgtccatctgtgcataaggagaggaaagttccagggtgtgtatgtttcaggggcttcacatggaggagctgcagatagatatgtgtttctgtgtatgtgtatgtctgcctttttttctaagtgggggcttctacaggcttttgggaagtagggtggatgtgggtagggctgggaggagggggccacagcttaggtttggagctctggatgtacatacataagtaggagcagtgggacgtgtttctgtcataatgcaggcatgaagggtggagtgaagtcaggtcataagtttcatgtttgcttttgttttgttttgtttttaatgtatgtagcagatgttacagtcttagggatccgggatgggagaccccactttagaaagggtcgtcactcctttaatcctctactcaacaatgtactcttttacttttatattaaaaaaaataaaataaatatgtgcctaaaaaaaaaaaaaaa

SEQ ID NO: 46 - protein, 292 aa, Homo sapien
MGRQKELVSRCGEMLHIRYRLLRQALAECLGTLILVMFGCGSVAQVVLSRGTHGGFLTINLAFGFAVTLGILIAGQVSGAHLNPAVTFAMCFLAREPWIKLPIYTLAQTLGAFLGAGIVFGLYYDAIWHFADNQLFVSGPNGTAGIFATYPSGHLDMINGFFDQFIGTASLIVCVLAIVDPYNNPVPRGLEAFTVGLVVLVIGTSMGFNSGYAVNPARDFGPRLFTALAGWGSAVFTTGQHWWWVPIVSPLLGSIAGVFVYQLMIGCHLEQPPPSNEEENVKLAHVKHKEQI

SEQ ID NO: 47 - DNA, 3351 bp, Homo sapien
  Unsure 713: Unknown base
  Unsure 716: Unknown base
tttaggtaaaaccggatttaacccttgggaaaaaaaaaaaaaaaggagagagaagacagttcctttcctgtagaaattaaaacaaaatacaaattgaggaagctctgctacccaggctgtcatggtagagaacttgaagaagacctgtttggatggacacctggtttcaaaagtcaggtgtggagactgttaaatgggagggcctcatccataaatgatttctggcaacgtcttcttcaggtggagcttgacgtctttttaatgttacttggggagggagtgctcattaagggatgccagggccagctctggtggttcctggggaggctgcgtccttccctgcttctgcatgtcatgaggcagcaggaaggtttcccctgcacctgtctgtcctggctccctctgggtagccccctactgttctgtgcttcagcacagcctggtttgtcaagaggcacatagttggggctgggctgcatggcacaggggcttatgtgcctgctggttatttaattttcagccttaagttttctttaatattttcctgttggctatttaaaggttttggttatcttttattccttatctacaatcaagatgacaatgtaattgaattatcttatttataacacggttcgtgattcatgattcatgattacaagtagaaaatatgtcatgttcctcacctccaaataaatatgtgtgtgtctgtntgngtgtctatatgtatgtgcggagagggagagagtggggaaggagagcagtgttatcatacatagagaggctaaatgtgtcccatccctcactgtcagctttataaaggagtttgactccatccacagaagaatgttttataagactaggaaaacacgttgaaaactaggataaacagcaacaaaaatcaactaaatatgttgttactgttgctaaggattttctccttagaataatttaggatttttaaaaatttctgtttgccaaatgctgtagataaatggccagattcttcctatccctaggattcctttattattttttttcacagattttgagaacaagggggagagatagtatggaagattaagattccattaatcttatagaactgtgttgtcacccaaattcctgcttgtttgaacatggcatcttcatagattcaggattcactaccctctatagctggatcttgaaaattatctggccagataattttgcatctgcttggatgattgtagactgagatgtgagtggaggataaagtattagacttttgctgagtaactgccaaccaagaagtatttatcggacacttactaggtgcctaggattgtatcagagggaatatgaaatgtgtccctgccctacctagttttaacgacagaatatctattaaaggctacttagctgaagggtaagggtgacaggtctaggggaagctttgggaggtggtgtgctgtgacagaaaaagtggcagagtagggacgagagacctgcattctagccctgtttctgtcacttgctctgtacacttagacaacagcttgacctcttgagctttagtttcctcctctgcataatgagagggttagactactgaattgtatgggaaaaaaatacaaattcctgggtcctaggccatgcctgctgaatccgactgttcaggaagaggcctaggaaatctgtgagggaatccccaggggaatctcgtgaccagccaggtgtgaaatctgctaactggaagatctcaaagcttccttcactttttgtgattttgtggtcatgtaacgttactgtattattctacgtaaatgtgggtacttggatgtttatcatactgtttctctgtgtttacatactaatttgtgtaagaaatgcattttagtctgtgtacctcaacctgctgtttgtttcctagaggtgttagtagtctttaaatacaagtaagacttaagaggatatttgatgttatttacctggatattttcttccccttttatttatttagaggaaattgagattctaggagccaaaaaaatgaaaacaaaattctaaggcaaagttaaagaaaaaaattacattatttcttaccatttgctactttataatgaaaatttaaaaattatatgggaagatttttctctgggataacaaatccttgtcataaagtaagaggtctttttaaagtaggtaggctataaggcctgtaatttaaaataatactcctttctctagggtttggtgcaattctccattaatgaagataacatttgaattccccaaagcaggtgaggagtcggggaggagaaagcgatgttaaaatgaaaactcactgcaaaagaggaggcagaggaagaaggaatgtaaaccccttaaagcagatgtgtgtggggccttatgaagaccaggattctgcgggtgtcaggggattgcccctcttgacagagactagggttttagactgaggcttcctgcagggtgttcgcattgcccttctccgttccccttcagacctttctggggagaagaggtgggaggaggggagaaagactgttcatcttattctgaatcctggagcagctgaaggttttctcttgagtcaggatgcagtggtaatgcattaaccagcaagtgtggccaaggataatgaaaaagtgggaaaggaaggtcctcctcctccctgattgtagcatccagcagtctctgtagccaggttactcaagaaccacatttgatttcctggccctttgccttggcagtgatggcatttttatttcactgtgttttaaagtcttcatttatttttataacatgggttagggagaagggccacaaatggagggattgtcctttcaagcaccacagcttcagataaaattagtactttcaaatattgtccactttaacttaaaaaattctagagggattatattggagactcaactgcccttggttttagtttataaaatggcctagtactgtggaattttaattttagaaagtcttagcatcagatcataaacattcattaaaagaactcacatcccatctgaaacttcccaggggagttgggattcttagtagattggtagaaaggggctcattttctactgcatttcccatttttggtatcttgttcagcatgttttatttttatttcttgtctgcagaacatcctatatttatgagaacattctttaagaagaccaccacatagaataccccttcctatcagctcgctctgatttagccttaattttgttaaattttttagagatgaatgaagtgctgctgtggaaagaaatgtacatatactatttctgtatcattaaaattacatttttatggttcaag

SEQ ID NO: 48 - protein, 23 aa, Homo sapien [sequence omitted]

SEQ ID NO: 49 - DNA, 4221 bp, Homo sapien
cagcccgagcccgagcccgagcccgagccggcgccaccgcgcccccggccatggcttttgccaatttccgccgcatcctgcgcctgtctaccttcgagaagagaaagtcccgcgaatatgagcacgtccgccgcgacctggaccccaacgaggtgtgggagatcgtgggcgagctgggcgacggcgccttcggcaaggtttacaaggccaagaataaggagacgggtgctttggctgcggccaaagtcattgaaaccaagagtgaggaggagctggaggactacatcgtggagattgagatcctggccacctgcgaccacccctacattgtgaagctcctgggagcctactatcacgacgggaagctgtggatcatgattgagttctgtccagggggagccgtggacgccatcatgctggagctggacagaggcctcacggagccccagatacaggtggtttgccgccagatgctagaagccctcaacttcctgcacagcaagaggatcatccaccgagatctgaaagctggcaacgtgctgatgaccctcgagggagacatcaggctggctgactttggtgtgtctgccaagaatctgaagactctacagaaacgagattccttcatcggcacgccttactggatggcccccgaggtggtcatgtgtgagaccatgaaagacacgccctacgactacaaagccgacatctggtccctgggcatcacgctgattgagatggcccagatcgagccgccacaccacgagctcaaccccatgcgggtcctgctaaagatcgccaagtcagaccctcccacgctgctcacgccctccaagtggtctgtagagttccgtgacttcctgaagatagccctggataagaacccagaaacccgacccagtgccgcgcagctgctggagcatcccttcgtcagcagcatcaccagtaacaaggctctgcgggagctggtggctgaggccaaggccgaggtgatggaagagatcgaagacggccgggatgagggggaagaggaggacgccgtggatgccgcctccaccctggagaaccatactcagaactcctctgaggtgagtccgccaagcctcaatgctgacaagcctctcgaggagtcaccttccaccccgctggcacccagccagtctcaggacagtgtgaatgagccctgcagccagccctctggggacagatccctccaaaccaccagtcccccagtcgtggcccctggaaatgagaacggcctggcagtgcctgtgcccctgcggaagtcccgacccgtgtcaatggatgccagaattcaggtagcccaggagaagcaagttgctgagcagggtggggacctcagcccagcagccaacagatctcaaaaggccagccagagccggcccaacagcagcgccctggagaccttgggtggggagaagctggccaatggcagcctggagccacctgcccaggcagctccagggccttccaagagggactcggactgcagcagcctctgcacctctgagagcatggactatggtaccaatctctccactgacctgtcgctgaacaaagagatgggctctctgtccatcaaggacccgaaactgtacaaaaaaaccctcaagcggacacgcaaatttgtggtggatggtgtggaggtgagcatcaccacctccaagatcatcagcgaagatgagaagaaggatgaggagatgagatttctcaggcgccaggaactccgagagcttcggctgctccagaaagaagagcatcggaaccagacccagctgagtaacaagcatgagctgcagctggagcaaatgcataaacgttttgaacaggaaatcaacgccaagaagaagttctttgacacggaattagagaacctggagcgtcagcaaaagcagcaagtggagaagatggagcaagaccatgccgtgcgccgccgggaggaggccaggcggatccgcctggagcaggatcgggactacaccaggttccaagagcagctcaaactgatgaagaaagaggtgaagaacgaggtggagaagctcccccgacagcagcggaaggaaagcatgaagcagaagatggaggagcacacgcagaaaaagcagcttcttgaccgggactttgtagccaagcagaaggaggacctggagctggccatgaagaggctcaccaccgacaacaggcgggagatctgtgacaaggagcgcgagtgcctcatgaagaagcaggagctccttcgagaccgggaagcagccctgtgggagatggaagagcaccagctgcaggagaggcaccagctggtgaagcagcagctcaaagaccagtacttcctccagcggcacgagctgctgcgcaagcatgagaaggagcgggagcagatgcagcgctacaaccagcgcatgatagagcagctgaaggtgcggcagcaacaggaaaaggcgcggctgcccaagatccagaggagtgagggcaagacgcgcatggccatgtacaagaagagcctccacatcaacggcgggggcagcgcagctgagcagcgtgagaagatcaagcagttctcccagcaggaggagaagaggcagaagtcggagcggctgcagcaacagcagaaacacgagaaccagatgcgggacatgctggcgcagtgtgagagcaacatgagcgagctgcagcagctgcagaatgaaaagtgccacctcctggtagagcacgaaacccagaaactgaaggccctggatgagagccataaccagaacctgaaggaatggcgggacaagcttcggccgcgcaagaaggctctggaagaggatctgaaccagaagaagcgggagcaggagatgttcttcaagctgagcgaggaggcggagtgcccaaacccctccaccccaagcaaggccgccaagttcttcccctacagttctgcggatgcttcttaacaaccgcccggggctgtggctggcagcttggtgggccccagggccttctccttcattctctgtgaacatgtaactcaggaccccttttccctcttgcgtctgtgccagctcaaatccagcccctcgccctgtgccaccccaactgtgcctgatagacctgccccagcgttcctgacttcttgctggcctgtggagggtgaggtgtaattatttgtcacctgaacctaatgtatattctccttgagccccagatcccttcaagctggaagggatggggctgttggtggggtcagggtccaagaggaatgggtgttctgtggcctcgagtcctctcctgtttgcgaaaataccagttttgctctctgtgggacaaagcactgctgatgaagtccccgtgggctcatccgggctggaattcttggtttttcagccattccctgcagagtcactcaatcatcaagtccctcacagccatttctgttcccagaggagccaggcctgcagctggctgctcaggagatggcctcattcctcctgttctcccagtttgctttccacttaagacaaagccttgtctatgtggggggcggggaccggggaaagagggaggctgaaatgtttattctgcttctcccgtgtttcatgccatctcgcgtcccccttcctgcacatgggtgtgaatgcacacacatacgcgtacacacaggacttggtctgctggcctggcctcttctgcccaggtgggttggaacacgtttgctgcctgagcctgtgccactgagcatgttaggtggagcagttggtgtggcacgtgcggggtgttggcaccggaggcatggaaaagcacaggctgtactgccaggctgcgatgcgtgctggcccccgcacaggctcctgtgtgcagggactgattcctcagcacacgaggcttccacaacccagtctgctccatagcactctggcccaccctgtctgcaggtgaaacaggagggctgtttgcctctgccccatccccccgactgtgttcaggagtcccaccttgcatttcagacctgggctggcagtctgttggacttctcttcaggaagaaaaagcatcagggggaaatggaatgcccctgccccaggaacatggcagaagcacaggttctgtacctcagatggactcctgctgggccttcggggtctcagttggcttcccccagattctgattctacagctgcagaatgtatataacacaataaaagcaaatgtttgaaccagt

SEQ ID NO: 50 - protein, 968 aa, Homo sapien
MAFANFRRILRLSTFEKRKSREYEHVRRDLDPNEVWEIVGELGDGAFGKVYKAKNKETGALAAAKVIETKSEEELEDYIVEIEILATCDHPYIVKLLGAYYHDGKLWIMIEFCPGGAVDAIMLELDRGLTEPQIQVVCRQMLEALNFLHSKRIIHRDLKAGNVLMTLEGDIRLADFGVSAKNLKTLQKRDSFIGTPYWMAPEVVMCETMKDTPYDYKADIWSLGITLIEMAQIEPPHHELNPMRVLLKIAKSDPPTLLTPSKWSVEFRDFLKIALDKNPETRPSAAQLLEHPFVSSITSNKALRELVAEAKAEVMEEIEDGRDEGEEEDAVDAASTLENHTQNSSEVSPPSLNADKPLEESPSTPLAPSQSQDSVNEPCSQPSGDRSLQTTSPPVVAPGNENGLAVPVPLRKSRPVSMDARIQVAQEKQVAEQGGDLSPAANRSQKASQSRPNSSALETLGGEKLANGSLEPPAQAAPGPSKRDSDCSSLCTSESMDYGTNLSTDLSLNKEMGSLSIKDPKLYKKTLKRTRKFVVDGVEVSITTSKIISEDEKKDEEMRFLRRQELRELRLLQKEEHRNQTQLSNKHELQLEQMHKRFEQEINAKKKFFDTELENLERQQKQQVEKMEQDHAVRRREEARRIRLEQDRDYTRFQEQLKLMKKEVKNEVEKLPRQQRKESMKQKMEEHTQKKQLLDRDFVAKQKEDLELAMKRLTTDNRREICDKERECLMKKQELLRDREAALWEMEEHQLQERHQLVKQQLKDQYFLQRHELLRKHEKEREQMQRYNQRMIEQLKVRQQQEKARLPKIQRSEGKTRMAMYKKSLHINGGGSAAEQREKIKQFSQQEEKRQKSERLQQQQKHENQMRDMLAQCESNMSELQQLQNEKCHLLVEHETQKLKALDESHNQNLKEWRDKLRPRKKALEEDLNQKKREQEMFFKLSEEAECPNPSTPSKAAKFFPYSSADAS

SEQ ID NO: 51 - DNA, 6698 bp, Homo sapien
catgttgccctggggggaacctgccagccccgtagcactgcccaccccacccactgtggtctgttgtaccccactgctggggtggtggttccaatgagacagggcacaccaaactccatctggctgttactgaggcggagacacgggtgatgattggctttctggggagagaggaagtcctgtgattggccagatctctggagcttgccgacgcggtgtgaggacgctcccacggaggccggaattggctgtgaaaggactgaggcagccatctgggggtagcgggcactcttatcagagcggctggagccggaccatcgtcccagagagctggggcagggggccgtgcccaatctccagggctcctggggccactgctgacctggctggatgcatcgggcagtggatcctccaggggcccgcgctgcacgggaagcctttgcccttgggggcctgagctgtgctggggcctggagctcctgcccgcctcatccccctcctcgtagcgcatggctgcctggaggcagatgctcagccagcattgggcagcccccgcttcctgctcccctacccccttcacatggcagtagttctgggcaccccagcaaaccatattatgctccaggggcgcccactccaagacccctccatgggaagctggaatccctgcatggctgtgtgcaggcattgctccgggagccagcccagccagggctttgggaacagcttgggcaactgtacgagtcagagcacgatagtgaggaggccacacgctgctaccacagcgcccttcgatacggaggaagcttcgctgagctggggccccgcattggccgactgcagcaggcccagctctggaactttcatactggctcctgccagcaccgagccaaggtcctgcccccactggagcaagtgtggaacttgctacaccttgagcacaaacggaactatggagccaagcggggaggtcccccggtgaagcgagctgctgaacccccagtggtgcagcctgtgcctcctgcagcactctcaggcccctcaggggaggagggcctcagccctggaggcaagcgaaggagaggctgcaactctgaacagactggccttcccccagggctgccactgcctccaccaccattaccaccaccaccaccaccaccaccaccacccctgcctggcctggctaccagccccccatttcagctaaccaagccagggctgtggagtaccctgcatggagatgcctggggcccagagcgcaagggttcagcacccccagagcgccaggagcagcggcactcgctgcctcacccatatccatacccagctccagcgtacaccgcgcacccccctggccaccggctggtcccggctgctcccccaggcccaggcccccgccccccaggagcagagagccatggctgcctgcctgccacccgtccccccggaagtgaccttagagagagcagagttcagaggtcgcggatggactccagcgtttcaccagcagcaaccaccgcctgcgtgccttacgccccttcccggccccctggcctccccggcaccaccaccagcagcagcagtagcagcagcagcaacactggtctccggggcgtggagccgaacccaggcattcccggcgctgaccattaccaaactcccgcgctggaggtctctcaccatggccgcctggggccctcggcacacagcagtcggaaaccgttcttgggggctcccgctgccactccccacctatccctgccacctggaccttcctcaccccctccacccccctgtccccgcctcttacgccccccaccaccccctgcctggttgaagggtccggcctgccgggcagcccgagaggatggagagatcttagaagagctcttctttgggactgagggacccccccgccctgccccaccacccctcccccatcgcgagggcttcttggggcctccggcctcccgcttttctgtgggcactcaggattctcacacccctcccactcccccaaccccaaccaccagcagtagcaacagcaacagtggcagccacagcagcagccctgctgggcctgtgtcctttcccccaccaccctatctggccagaagtatagacccccttccccggcctcccagcccagcacagaacccccaggacccacctcttgtacccctgactcttgccctgcctccagcccctccttcctcctgccaccaaaatacctcaggaagcttcaggcgcccggagagcccccggcccagggtctccttcccaaagacccccgaggtggggccggggccacccccaggccccctgagtaaagccccccagcctgtgccgcccggggttggggagctgcctgcccgaggccctcgactctttgattttccccccactccgctggaggaccagtttgaggagccagccgaattcaagatcctacctgatgggctggccaacatcatgaagatgctggacgaatccattcgcaaggaagaggaacagcaacaacacgaagcaggcgtggccccccaacccccgctgaaggagccctttgcatctctgcagtctcctttccccaccgacacagcccccaccactactgctcctgctgtcgccgtcaccaccaccaccaccaccaccaccaccaccacggccacccaggaagaggagaagaagccaccaccagccctaccaccaccaccgcctctagccaagttccctccaccctctcagccacagccaccaccacccccaccccccagcccggccagcctgctcaaatccttggcctccgtgctggagggacaaaagtactgttatcgggggactggagcagctgtttccacccggcctgggcccttgcccaccactcagtattcccctggccccccatcaggtgctaccgccctgccgcccacctcagcggcccctagcgcccagggctccccacagccctctgcttcctcgtcatctcagttctctacctcaggcgggccctgggcccgggagcgcagggcgggcgaagagccagtcccgggccccatgacccccacccaaccgcccccacccctatctctgccccctgctcgctctgagtctgaggtgctagaagagatcagccgggcttgcgagacccttgtggagcgggtgggccggagtgccactgacccagccgacccagtggacacagcagagccagcggacagtgggactgagcgactgctgccccccgcacaggccaaggaggaggctggcggggtggcggcagtgtcaggcagctgtaagcggcgacagaaggagcatcagaaggagcatcggcggcacaggcgggcctgtaaggacagtgtgggtcgtcggccccgtgagggcagggcaaaggccaaggccaaggtccccaaagaaaagagccgccgggtgctggggaacctggacctgcagagcgaggagatccagggtcgtgagaagtcccggcccgatcttggcggggcctccaaggccaagccacccacagctccagcccctccatcagctcctgcaccttctgcccagcccacacccccgtcagcctctgtccctggaaagaaggctcgggaggaagccccagggccaccgggtgtcagccgggccgacatgctgaagctgcgctcacttagtgaggggccccccaaggagctgaagatccggctcatcaaggtagagagtggtgacaaggagacctttatcgcctctgaggtggaagagcggcggctgcgcatggcagacctcaccatcagccactgtgctgctgacgtcgtgcgcgccagcaggaatgccaaggtgaaagggaagtttcgagagtcctacctttcccctgcccagtctgtgaaaccgaagatcaacactgaggagaagctgccccgggaaaaactcaacccccctacacccagcatctatctggagagcaaacgggatgccttctcacctgtcctgctgcagttctgtacagaccctcgaaatcccatcacagtgatccggggcctggcgggctccctgcggctcaacttgggcctcttctccaccaagaccctggtggaagcgagtggcgaacacaccgtggaagttcgcacccaggtgcagcagccctcagatgagaactgggatctgacaggcactcggcagatctggccttgtgagagctcccgttcccacaccaccattgccaagtacgcacagtaccaggcctcatccttccaggagtctctgcaggaggagaaggagagtgaggatgaggagtcagaggagccagacagcaccactggaacccctcctagcagcgcaccagacccgaagaaccatcacatcatcaagtttggcaccaacatcgacttgtctgatgctaagcggtggaagccccagctgcaggagctgctaaagctgcccgccttcatgcgggtaacatccacgggcaacatgctgagccacgtgggccacaccatcctgggcatgaacacggtgcagctgtacatgaaggtgcccggcagccgaacgccaggccaccaggagaataacaacttctgctccgtcaacatcaacattggcccaggcgactgcgagtggttcgcggtgcacgagcactactgggagaccatcagcgctttctgtgatcggcacggcgtggactacttgacgggttcctggtggccaatcctggatgatctctatgcatccaatattcctgtgtaccgcttcgtgcagcgacccggagacctcgtgtggattaatgcggggactgtgcactgggtgcaggccaccggctggtgcaacaacattgcctggaacgtggggcccctcaccgcctatcagtaccagctggccctggaacgatacgagtggaatgaggtgaagaacgtcaaatccatcgtgcccatgattcacgtgtcatggaacgtggctcgcacggtcaaaatcagcgaccccgacttgttcaagatgatcaagttctgcctgctgcagtccatgaagcactgccaggtgcaacgcgagagcctggtgcgggcagggaagaaaatcgcttaccagggccgtgtcaaggacgagccagcctactactgcaacgagtgcgatgtggaggtgtttaacatcctgttcgtgacaagtgagaatggcagccgcaacacgtacctggtacactgcgagggctgtgcccggcgccgcagcgcaggcctgcagggcgtggtggtgctggagcagtaccgcactgaggagctggctcaggcctacgacgccttcacgctggtgagggcccggcgggcgcgcgggcagcggaggagggcactggggcaggctgcagggacgggcttcgggagcccggccgcgcctttccctgagcccccgccggctttctccccccaggccccagccagcacgtcgcgatgaggccggacgccccgcccgcctgcctgcccgcgcaaggcgccgcggggccaccagcacatgcctgggctggacctaggtcccgcctgtggccgagaagggggtcgggcccagcccttccaccccattggcagctcccctcacttaatttattaagaaaaactttttttttttttttagcaaatatgaggaaaaaaggaaaaaaaatgggagacgggggagggggctggcagcccctcgcccaccagcgcctcccctcaccgactttggcctttttagcaacagacacaaggaccaggctccggcggcggcgggggtcacatacgggttccctcaccctgccagccgcccgcccgcccggcgcagatgcacgcggctcgtgtatgtacatagacgttacggcagccgaggtttttaatgagattctttctatgggctttacccctcccccggaacctccttttttacttccaatgctagctgtgacccctgtacatgtctctttattcacttggttatgatttgtattttttgttcttttcttgtttttttgtttttaatttataacagtcccactcacctctatttattcatttttgggaaaacccgacctcccacacccccaagccatcctgcccgcccctccagggaccgcccgtcgccgggctctccccgcgccccagtgtgtgtccgggcccggcccgaccgtctccacccgtccgcccgcggctccagccgggttctcatggtgctcaaacccgctcccctcccctacgtcctgcactttctcggaccagtccccccactcccgacccgaccccagccccacctgagggtgagcaactcctgtactgtaggggaagaagtgggaactgaaatggtattttgtaaaaaaaaataaataaaataaaaaaattaaaggttttaaagaaagaactatgaggaaaaggaaccccgtccttcccagccccggccaactttaaaaaacacagaccttcacccccacccccttttctttttaagtgtgaaacaacccagggccagggcctcactggggcagggacaccccggggtgagtttctctggggctttattttcgttttgttggttgttttttctccacgctggggctgcggaggggtggggggtttacagtcccgcaccctcgcactgcactgtctctctgccccaggggcagaggggtcttcccaaccctacccctattttcggtgatttttgtgtgagaatattaatattaaaaataaacggag

SEQ ID NO: 52 - protein, 1616 aa, Homo sapien
GHPSKPYYAPGAPTPRPLHGKLESLHGCVQALLREPAQPGLWEQLGQLYESEHDSEEATRCYHSALRYGGSFAELGPRIGRLQQAQLWNFHTGSCQHRAKVLPPLEQVWNLLHLEHKRNYGAKRGGPPVKRAAEPPVVQPVPPAALSGPSGEEGLSPGGKRRRGCNSEQTGLPPGLPLPPPPLPPPPPPPPPPPPPPPLPGLATSPPFQLTKPGLWSTLHGDAWGPERKGSAPPERQEQRHSLPHPYPYPAPAYTAHPPGHRLVPAAPPGPGPRPPGAESHGCLPATRPPGSDLRESRVQRSRMDSSVSPAATTACVPYAPSRPPGLPGTTTSSSSSSSSNTGLRGVEPNPGIPGADHYQTPALEVSHHGRLGPSAHSSRKPFLGAPAATPHLSLPPGPSSPPPPPCPRLLRPPPPPAWLKGPACRAAREDGEILEELFFGTEGPPRPAPPPLPHREGFLGPPASRFSVGTQDSHTPPTPPTPTTSSSNSNSGSHSSSSAGPVSFPPPPYLARSIDPLPRPPSPAQNPQDPPLVPLTLALPPAPPSSCHQNTSGSFRRPESPRPRVSFPKTPEVGPGPPPGPLSKAPQPVPPGVGELPARGPRLFDFPPTPLEDQFEEPAEFKILPDGLANIMKMLDESIRKEEEQQQHEAGVAPQPPLKEPFASLQSPFPTDTAPTTTAPAVAVTTTTTTTTTTTATQEEEKKPPPALPPPPPLAKFPPPSQPQPPPPPPPSPASLLKSLASVLEGQKYCYRGTGAAVSTRPGPLPTTQYSPGPPSGATALPPTSAAPSAQGSPQPSASSSSQFSTSGGPWARERRAGEEPVPGPMTPTQPPPPLSLPPARSESEVLEEISRACETLVERVGRSATDPADPVDTAEPADSGTERLLPPAQAKEEAGGVAAVSGSCKRRQKEHQKEHRRHRRACKDSVGRRPREGRAKAKAKVPKEKSRRVLGNLDLQSEEIQGREKSRPDLGGASKAKPPTAPAPPSAPAPSAQPTPPSASVPGKKAREEAPGPPGVSRADMLKLRSLSEGPPKELKIRLIKVESGDKETFIASEVEERRLRMADLTISHCAADVVRASRNAKVKGKFRESYLSPAQSVKPKINTEEKLPREKLNPPTPSIYLESKRDAFSPVLLQFCTDPRNPITVIRGLAGSLRLNLGLFSTKTLVEASGEHTVEVRTQVQQPSDENWDLTGTRQIWPCESSRSHTTIAKYAQYQASSFQESLQEEKESEDEESEEPDSTTGTPPSSAPDPKNHHIIKFGTNIDLSDAKRWKPQLQELLKLPAFMRVTSTGNMLSHVGHTILGMNTVQLYMKVPGSRTPGHQENNNFCSVNINIGPGDCEWFAVHEHYWETISAFCDRHGVDYLTGSWWPILDDLYASNIPVYRFVQRPGDLVWINAGTVHWVQATGWCNNIAWNVGPLTAYQYQLALERYEWNEVKNVKSIVPMIHVSWNVARTVKISDPDLFKMIKFCLLQSMKHCQVQRESLVRAGKKIAYQGRVKDEPAYYCNECDVEVFNILFVTSENGSRNTYLVHCEGCARRRSAGLQGVVVLEQYRTEELAQAYDAFTLVRARRARGQRRRALGQAAGTGFGSPAAPFPEPPPAFSPQAPASTSR

SEQ ID NO: 53 - DNA, 11389 bp, Homo sapien
atggcgccgccgccgccgcccgtgctgcccgtgctgctgctcctggccgccgccgccgccctgccggcgatggggctgcgagcggccgcctgggagccgcgcgtacccggcgggacccgcgccttcgccctccggcccggctgtacctacgcggtgggcgccgcttgcacgccccgggcgccgcgggagctgctggacgtgggccgcgatgggcggctggcaggacgtcggcgcgtctcgggcgcggggcgcccgctgccgctgcaagtccgcttggtggcccgcagtgccccgacggcgctgagccgccgcctgcgggcgcgcacgcaccttcccggctgcggagcccgtgcccggctctgcggaaccggtgcccggctctgcggggcgctctgcttccccgtccccggcggctgcgcggccgcgcagcattcggcgctcgcagctccgaccaccttacccgcctgccgctgcccgccgcgccccaggccccgctgtcccggccgtcccatctgcctgccgccgggcggctcggtccgcctgcgtctgctgtgcgccctgcggcgcgcggctggcgccgtccgggtgggactggcgctggaggccgccaccgcggggacgccctccgcgtcgccatccccatcgccgcccctgccgccgaacttgcccgaagcccgggcggggccggcgcgacgggcccggcggggcacgagcggcagagggagcctgaagtttccgatgcccaactaccaggtggcgttgtttgagaacgaaccggcgggcaccctcatcctccagctgcacgcgcactacaccatcgagggcgaggaggagcgcgtgagctattacatggaggggctgttcgacgagcgctcccggggctacttccgaatcgactctgccacgggcgccgtgagcacggacagcgtactggaccgcgagaccaaggagacgcacgtcctcagggtgaaagccgtggactacagtacgccgccgcgctcggccaccacctacatcactgtcttggtcaaagacaccaacgaccacagcccggtcttcgagcagtcggagtaccgcgagcgcgtgcgggagaacctggaggtgggctacgaggtgctgaccatccgcgccagcgaccgcgactcgcccatcaacgccaacttgcgttaccgcgtgttggggggcgcgtgggacgtcttccagctcaacgagagctctggcgtggtgagcacacgggcggtgctggaccgggaggaggcggccgagtaccagctcctggtggaggccaacgaccaggggcgcaatccgggcccgctcagtgccacggccaccgtgtacatcgaggtggaggacgagaacgacaactacccccagttcagcgagcagaactacgtggtccaggtgcccgaggacgtggggctcaacacggctgtgctgcgagtgcaggccacggaccgggaccagggccagaacgcggccattcactacagcatcctcagcgggaacgtggccggccagttctacctgcactcgctgagcgggatcctggatgtgatcaaccccttggatttcgaggatgtccagaaatactcgctgagcattaaggcccaggatgggggccggcccccgctcatcaattcttcaggggtggtgtctgtgcaggtgctggatgtcaacgacaacgagcctatctttgtgagcagccccttccaggccacggtgctggagaatgtgcccctgggctaccccgtggtgcacattcaggcggtggacgcggactctggagagaacgcccggctgcactatcgcctggtggacacggcctccacctttctggggggcggcagcgctgggcctaagaatcctgcccccacccctgacttccccttccagatccacaacagctccggttggatcacagtgtgtgccgagctggaccgcgaggaggtggagcactacagcttcggggtggaggcggtggaccacggctcgccccccatgagctcctccaccagcgtgtccatcacggtgctggacgtgaatgacaacgacccggtgttcacgcagcccacctacgagcttcgtctgaatgaggatgcggccgtggggagcagcgtgctgaccctgcaggcccgcgaccgtgacgccaacagtgtgattacctaccagctcacaggcggcaacacccggaaccgctttgcactcagcagccagagagggggcggcctcatcaccctggcgctacctctggactacaagcaggagcagcagtacgtgctggcggtgacagcatccgacggcacacggtcgcacactgcgcatgtcctaatcaacgtcactgatgccaacacccacaggcctgtctttcagagctcccattacacagtgagtgtcagtgaggacaggcctgtgggcacctccattgctaccctcagtgccaacgatgaggacacaggagagaatgcccgcatcacctacgtgattcaggaccccgtgccgcagttccgcattgaccccgacagtggcaccatgtacaccatgatggagctggactatgagaaccaggtcgcctacacgctgaccatcatggcccaggacaacggcatcccgcagaaatcagacaccaccaccctagagatcctcatcctcgatgccaatgacaatgcaccccagttcctgtgggatttctaccagggttccatctttgaggatgctccaccctcgaccagcatcctccaggtctctgccacggaccgggactcaggtcccaatgggcgtctgctgtacaccttccagggtggggacgacggcgatggggacttctacatcgagcccacgtccggtgtgattcgcacccagcgccggctggaccgggagaatgtggccgtgtacaacctttgggctctggctgtggatcggggcagtcccactccccttagcgcctcggtagaaatccaggtgaccatcttggacattaatgacaatgcccccatgtttgagaaggacgaactggagctgtttgttgaggagaacaacccagtggggtcggtggtggcaaagattcgtgctaacgaccctgatgaaggccctaatgcccagatcatgtatcagattgtggaaggggacatgcggcatttcttccagctggacctgctcaacggggacctgcgtgccatggtggagctggactttgaggtccggcgggagtatgtgctggtggtgcaggccacgtcggctccgctggtgagccgagccacggtgcacatccttctcgtggaccagaatgacaacccgcctgtgctgcccgacttccagatcctcttcaacaactatgtcaccaacaagtccaacagtttccccaccggcgtgatcggctgcatcccggcccatgaccccgacgtgtcagacagcctcaactacaccttcgtgcagggcaacgagctgcgcctgttgctgctggaccccgccacgggcgaactgcagctcagccgcgacctggacaacaaccggccgctggaggcgctcatggaggtgtctgtgtctgatggcatccacagcgtcacggccttctgcaccctgcgtgtcaccatcatcacggacgacatgctgaccaacagcatcactgtccgcctggagaacatgtcccaggagaagttcctgtccccgctgctggccctcttcgtggagggggtggccgccgtgctgtccaccaccaaggacgacgtcttcgtcttcaacgtccagaacgacaccgacgtcagctccaacatcctgaacgtgaccttctcggcgctgctgcctggcggcgtccgcggccagttcttcccgtcggaggacctgcaggagcagatctacctgaatcggacgctgctgaccaccatctccacgcagcgcgtgctgcccttcgacgacaacatctgcctgcgcgagccctgcgagaactacatgaagtgcgtgtccgttctgcgattcgacagctccgcgcccttcctcagctccaccaccgtgctcttccggcccatccaccccatcaacggcctgcgctgccgctgcccgcccggcttcaccggcgactactgcgagacggagatcgacctctgctactccgacccgtgcggcgccaacggccgctgccgcagccgcgagggcggctacacctgcgagtgcttcgaggacttcactggagagcactgtgaggtggatgcccgctcaggccgctgtgccaacggggtgtgcaagaacgggggcacctgcgtgaacctgctcatcggcggcttccactgcgtgtgtcctcctggcgagtatgagaggccctactgtgaggtgaccaccaggagcttcccgccccagtccttcgtcaccttccggggcctgagacagcgcttccacttcaccatctccctcacgtttgccactcaggaaaggaacggcttgcttctctacaacggccgcttcaatgagaagcacgacttcatcgccctggagatcgtggacgagcaggtgcagctcaccttctctgcaggcgagacaacaacgaccgtggcaccgaaggttcccagtggtgtgagtgacgggcggtggcactctgtgcaggtgcagtactacaacaagcccaatattggccacctgggcctgccccatgggccgtccggggaaaagatggccgtggtgacagtggatgattgtgacacaaccatggctgtgcgctttggaaaggacatcgggaactacagctgcgctgcccagggcactcagaccggctccaagaagtccctggatctgaccggccctctactcctggggggtgtccccaacctgccagaagacttcccagtgcacaaccggcagttcgtgggctgcatgcggaacctgtcagtcgacggcaaaaatgtggacatggccggattcatcgccaacaatggcacccgggaaggctgcgctgctcggaggaacttctgcgatgggaggcggtgtcagaatggaggcacctgtgtcaacaggtggaatatgtatctgtgtgagtgtccactccgattcggcgggaagaactgtgagcaagccatgcctcacccccagctcttcagcggtgagagcgtcgtgtcctggagtgacctgaacatcatcatctctgtgccctggtacctggggctcatgttccggacccggaaggaggacagcgttctgatggaggccaccagtggtgggcccaccagctttcgcctccagatcctgaacaactacctccagtttgaggtgtcccacggcccctccgatgtggagtccgtgatgctgtccgggttgcgggtgaccgacggggagtggcaccacctgctgatcgagctgaagaatgttaaggaggacagtgagatgaagcacctggtcaccatgaccttggactatgggatggaccagaacaaggcagatatcgggggcatgcttcccgggctgacggtaaggagcgtggtggtcggaggcgcctctgaagacaaggtctccgtgcgccgtggattccgaggctgcatgcagggagtgaggatgggggggacgcccaccaacgtcgccaccctgaacatgaacaacgcactcaaggtcagggtgaaggacggctgtgatgtggacgacccctgtacctcgagcccctgtccccccaatagccgctgccacgacgcctgggaggactacagctgcgtctgtgacaaagggtaccttggaataaactgtgtggatgcctgtcacctgaacccctgcgagaacatgggggcctgcgtgcgctcccccggctccccgcagggctacgtgtgcgagtgtgggcccagtcactacgggccgtactgtgagaacaaactcgaccttccgtgccccagaggctggtgggggaaccccgtctgtggaccctgccactgtgccgtcagcaaaggctttgatcccgactgtaataagaccaacggccagtgccaatgcaaggagaattactacaagctcctagcccaggacacctgtctgccctgcgactgcttcccccatggctcccacagccgcacttgcgacatggccaccgggcagtgtgcctgcaagcccggcgtcatcggccgccagtgcaaccgctgcgacaacccgtttgccgaggtcaccacgctcggctgtgaagtgatctacaatggctgtcccaaagcatttgaggccggcatctggtggccacagaccaagttcgggcagccggctgcggtgccatgccctaagggatccgttggaaatgcggtccgacactgcagcggggagaagggctggctgcccccagagctctttaactgtaccaccatctccttcgtggacctcagggccatgaatgagaagctgagccgcaatgagacgcaggtggacggcgccagggccctgcagctggtgagggcgctgcgcagtgctacacagcacacgggcacgctctttggcaatgacgtgcgcacggcctaccagctgctgggccacgtccttcagcacgagagctggcagcagggcttcgacctggcagccacgcaggacgccgactttcacgaggacgtcatccactcgggcagcgccctcctggccccagccaccagggcggcgtgggagcagatccagcggagcgagggcggcacggcacagctgctccggcgcctcgagggctacttcagcaacgtggcacgcaacgtgcggcggacgtacctgcggcccttcgtcatcgtcaccgccaacatgattcttgctgtcgacatctttgacaagttcaactttacgggagccagggtcccgcgattcgacaccatccatgaagagttccccagggagctggagtcctccgtctccttcccagccgacttcttcagaccacctgaagaaaaagaaggccccctgctgaggccggctggccggaggaccaccccgcagaccacgcgcccggggcctggcaccgagagggaggccccgatcagcaggcggaggcgacaccctgatgacgctggccagttcgccgtcgctctggtcatcatttaccgcaccctggggcagctcctgcccgagcgctacgaccccgaccgtcgcagcctccggttgcctcaccggcccatcattaataccccgatggtgagcacgctggtgtacagcgagggggctccgctcccgagacccctggagaggcccgtcctggtggagttcgccctgctggaggtggaggagcgaaccaagcctgtctgcgtgttctggaaccactccctggccgttggtgggacgggagggtggtctgcccggggctgcgagctcctgtccaggaaccggacacatgtcgcctgccagtgcagccacacagccagctttgcggtgctcatggatatctccaggcgtgagaacggggaggtcctgcctctgaagattgtcacctatgccgctgtgtccttgtcactggcagccctgctggtggccttcgtcctcctgagcctggtccgcatgctgcgctccaacctgcacagcattcacaagcacctcgccgtggcgctcttcctctctcagctggtgttcgtgattgggatcaaccagacggaaaacccgtttctgtgcacagtggttgccatcctcctccactacatctacatgagcacctttgcctggaccctcgtggagagcctgcatgtctaccgcatgctgaccgaggtgcgcaacatcgacacggggcccatgcggttctactacgtcgtgggctggggcatcccggccattgtcacaggactggcggtcggcctggacccccagggctacgggaaccccgacttctgctggctgtcgcttcaagacaccctgatttggagctttgcggggcccatcggagctgttataatcatcaacacagtcacttctgtcctatctgcaaaggtttcctgccaaagaaagcaccattattatgggaaaaaagggatcgtctccctgctgaggaccgcattcctcctgctgctgctcatcagcgccacctggctgctggggctgctggctgtgaaccgcgatgcactgagctttcactacctcttcgccatcttcagcggcttacagggccccttcgtcctccttttccactgcgtgctcaaccaggaggtccggaagcacctgaagggcgtgctcggcgggaggaagctgcacctggaggactccgccaccaccagggccaccctgctgacgcgctccctcaactgcaacaccaccttcggtgacgggcctgacatgctgcgcacagacttgggcgagtccaccgcctcgctggacagcatcgtcagggatgaagggatccagaagctcggcgtgtcctctgggctggtgaggggcagccacggagagccagacgcgtccctcatgcccaggagctgcaaggatccccctggccacgattccgactcagatagcgagctgtccctggatgagcagagcagctcttacgcctcctcacactcgtcagacagcgaggacgatggggtgggagctgaggaaaaatgggacccggccaggggcgccgtccacagcacccccaaaggggacgctgtggccaaccacgttccggccggctggcccgaccagagcctggctgagagtgacagtgaggaccccagcggcaagccccgcctgaaggtggagaccaaggtcagcgtggagctgcaccgcgaggagcagggcagtcaccgtggagagtaccccccggaccaggagagcgggggcgcagccaggcttgctagcagccagcccccagagcagaggaaaggcatcttgaaaaataaagtcacctacccgccgccgctgacgctgacggagcagacgctgaagggccggctccgggagaagctggccgactgtgagcagagccccacatcctcgcgcacgtcttccctgggctctggcggccccgactgcgccatcacagtcaagagccctgggagggagccggggcgtgaccacctcaacggggtggccatgaatgtgcgcactgggagcgcccaggccgatggctccgactctgagaaaccgtgaggcaagcccgtcaccccacacaggctgcggcatcaccctcagaccttggagcccaaggggccactgcccttgaagtggagtgggcccagagtgtggcggtccccatggtggcagccccccgactgatcatccagacacaaaggtcttggttctcccaggagctcagggcctgtcagacctggtgacaagtgccaaaggccacaggcatgagggaggcgtggaccactgggccagcaccgctgagtcctaagactgcagtcaaagccagaactgagaggggaccccagactgggcccagaggctggccagagttcaggaacgccgggcacagaccaaagaccgcggtccagccccgcccaggcgggcatctcatggcagtgcggacccgtggctggcagcccgggcagtcctttgcaaaggcaccccttgtcttaaaatcacttcgctatgtgggaaaggtggagatacttttatatatttgtatgggactctgaggaggtgcaacctgtatatatattgcattcgtgctgactttgttatcccgagagatccatgcaatgatctcttgctgtcttctctgtcaagattgcacagttgtacttgaatctggcatgtgttgacgaaactggtgccccagcagatcaaaggtgggaaatacgtcagcagtggggctaaaaccaagcggctagaagccctacagctgccttcggccaggaagtgaggatggtgtgggccctccccgccggccccctgggtccccagtgttcgctgtgtgtgcgtttgtcctctgctgccatctgccccggctgtgtgaattcaagacagggcagtgcagcactaggcaggtgtgaggagccctgctgaggtcactgtggggcacggttgccacacggctgtcatttttcacctggtcattctgtgaccaccaccccctcccctcaccgcctcccaggtggcccgggagctgcaggtggggatggctttgtcctttgctcctgctccccgtgggacctgggaccttaaagcgttgcaggttcctgatttggacagaggtgtggggccttccaggccgttacatacctcctgccaattctctaactctctgagactgcgaggatctccaggcagggttctcccctctggagtctgaccaattacttcattttgcttcaaatggccaattgtgcagagggacaaagccacagccacactcttcaacggttaccaaactgtttttggaaattcacaccaaggtcgggcccactgcaggcagctggcacagcgtggcccgaggggctgtggaacgggtcccggaactgtcagacatgtttgattttagcgtttcctttgttcttcaaatcaggtgcccaaataagtgatcagcacagctgcttccaaataggagaaaccataaaataggatgaaaatcaagtaaaatgcaaagatgtccacactgttttaaacttgaccctgatgaaaatgtgagcactgttagcagatgcctatgggagaggaaaagcgtatctgaaaatggtccaggacaggaggatgaaatgagatcccagagtcctcacacctgaatgaattatacatgtgccttaccaggtgagtggtctttcgaagataaaaaactctagtccctttaaacgtttgcccctggcgtttcctaagtacgaaaaggtttttaagtcttcgaacagtctcctttcatgactttaacaggattctgccccctgaggtgtaatttttttgttctatttttttccacgtactccacagccaacatcacgaggtgtaatttttaatttgatcagaactgttaccaaaaaacaactgtcagttttattgagatgggaaaaatgtaaacctatttttattacttaagactttatgggagagattagacactggaggtttttaacagaacgtgtatttattaatgttcaaaacactggaattacaaatgagaagagtctacaataaattaagatttttgaatttgtacttctgcggtgctggtttttctccacaaacacccccgcccctccccatgcccagggtggccgtggaagggacggtttacggacgtgcagctgagctgtccgtgtcccatgctccctcagccagtggaacgtgccggaactttttgtccattccctagtaggcctgccacagcctagatgggcagtttttgtctttcaccaaatttgaggactttttttttttgccattatttcttcagttttcttttcttgcactgatctttctcctctccttctgtgactccagtgactcagacgttagacctcttgatgttttcccactggtccctgaggctctgttc

SEQ ID NO: 54 - protein, 2000 aa, Homo sapien
MAPPPPPVLPVLLLLAAAAALPAMGLRAAAWEPRVPGGTRAFALRPGCTYAVGAACTPRAPRELLDVGRDGRLAGRRRVSGAGRPLPLQVRLVARSAPTALSRRLRARTHLPGCGARARLCGTGARLCGALCFPVPGGCAAAQHSALAAPTTLPACRCPPRPRPRCPGRPICLPPGGSVRLRLLCALRRAAGAVRVGLALEAATAGTPSASPSPSPPLPPNLPEARAGPARRARRGTSGRGSLKFPMPNYQVALFENEPAGTLILQLHAHYTIEGEEERVSYYMEGLFDERSRGYFRIDSATGAVSTDSVLDRETKETHVLRVKAVDYSTPPRSATTYITVLVKDTNDHSPVFEQSEYRERVRENLEVGYEVLTIRASDRDSPINANLRYRVLGGAWDVFQLNESSGVVSTRAVLDREEAAEYQLLVEANDQGRNPGPLSATATVYIEVEDENDNYPQFSEQNYVVQVPEDVGLNTAVLRVQATDRDQGQNAAIHYSILSGNVAGQFYLHSLSGILDVINPLDFEDVQKYSLSIKAQDGGRPPLINSSGVVSVQVLDVNDNEPIFVSSPFQATVLENVPLGYPVVHIQAVDADSGENARLHYRLVDTASTFLGGGSAGPKNPAPTPDFPFQIHNSSGWITVCAELDREEVEHYSFGVEAVDHGSPPMSSSTSVSITVLDVNDNDPVFTQPTYELRLNEDAAVGSSVLTLQARDRDANSVITYQLTGGNTRNRFALSSQRGGGLITLALPLDYKQEQQYVLAVTASDGTRSHTAHVLINVTDANTHRPVFQSSHYTVSVSEDRPVGTSIATLSANDEDTGENARITYVIQDPVPQFRIDPDSGTMYTMMELDYENQVAYTLTIMAQDNGIPQKSDTTTLEILILDANDNAPQFLWDFYQGSIFEDAPPSTSILQVSATDRDSGPNGRLLYTFQGGDDGDGDFYIEPTSGVIRTQRRLDRENVAVYNLWALAVDRGSPTPLSASVEIQVTILDINDNAPMFEKDELELFVEENNPVGSVVAKIRANDPDEGPNAQIMYQIVEGDMRHFFQLDLLNGDLRAMVELDFEVRREYVLVVQATSAPLVSRATVHILLVDQNDNPPVLPDFQILFNNYVTNKSNSFPTGVIGCIPAHDPDVSDSLNYTFVQGNELRLLLLDPATGELQLSRDLDNNRPLEALMEVSVSDGIHSVTAFCTLRVTIITDDMLTNSITVRLENMSQEKFLSPLLALFVEGVAAVLSTTKDDVFVFNVQNDTDVSSNILNVTFSALLPGGVRGQFFPSEDLQEQIYLNRTLLTTISTQRVLPFDDNICLREPCENYMKCVSVLRFDSSAPFLSSTTVLFRPIHPINGLRCRCPPGFTGDYCETEIDLCYSDPCGANGRCRSREGGYTCECFEDFTGEHCEVDARSGRCANGVCKNGGTCVNLLIGGFHCVCPPGEYERPYCEVTTRSFPPQSFVTFRGLRQRFHFTISLTFATQERNGLLLYNGRFNEKHDFIALEIVDEQVQLTFSAGETTTTVAPKVPSGVSDGRWHSVQVQYYNKPNIGHLGLPHGPSGEKMAVVTVDDCDTTMAVRFGKDIGNYSCAAQGTQTGSKKSLDLTGPLLLGGVPNLPEDFPVHNRQFVGCMRNLSVDGKNVDMAGFIANNGTREGCAARRNFCDGRRCQNGGTCVNRWNMYLCECPLRFGGKNCEQAMPHPQLFSGESVVSWSDLNIIISVPWYLGLMFRTRKEDSVLMEATSGGPTSFRLQILNNYLQFEVSHGPSDVESVMLSGLRVTDGEWHHLLIELKNVKEDSEMKHLVTMTLDYGMDQNKADIGGMLPGLTVRSVVVGGASEDKVSVRRGFRGCMQGVRMGGTPTNVATLNMNNALKVRVKDGCDVDDPCTSSPCPPNSRCHDAWEDYSCVCDKGYLGINCVDACHLNPCENMGACVRSPGSPQGYVCECGPSHYGPYCENKLDLPCPRGWWGNPVCGPCHCAVSKGFDPDCNKTNGQCQCKENYYKLLAQDTC

SEQ ID NO: 55 - DNA, 2121 bp, Homo sapien
ggcacgagggcccggcggcaggtcccagcccggggctagagaccgagggccggggtccgggcccggcggcgggacccaggcggttgaggctggtcaggagtcagccagcctgaaagagcaggatggatcttgatgtggttaacatgtttgtgattgcgggcggcacgctggccatcccaatcctggcatttgtggcttcatttcttctgtggccttcagcactgataagaatctattattggtactggcggaggacattgggcatgcaagtccgctatgttcaccatgaagactatcagttctgttattccttccggggcaggcctgggcacaaaccctccatcctcatgctccacggattctctgcccacaaggatatgtggctcagtgtggtcaagttccttccaaagaacctgcacttggtctgcgtggacatgccaggacatgagggcaccacccgctcctccctggatgacctgtccatagatgggcaagttaagaggatacaccagtttgtagaatgcctgaagctgaacaaaaaacctttccacctggtaggcacctccatgggtggccaggtggctggggtgtatgctgcttactacccatcggatgtctccagcctgtgtctcgtgtgtcctgctggcctgcagtactcaactgacaatcaatttgtacaacggctcaaagaactgcagggctctgccgccgtggagaagattcccttgatcccgtctaccccagaagagatgagtgaaatgcttcagctctgctcctatgtccgcttcaaggtgccccagcagatcctgcaaggccttgtcgatgtccgcatccctcataacaacttctaccgaaagttgtttttggaaatcgtcagtgagaagtccagatactctctccatcagaacatggacaagatcaaggttccgacgcagatcatctgggggaaacaagaccaggtgctggatgtgtctggggcagacatgttggccaagtcaattgccaactgccaggtggagcttctggaaaactgtgggcactcagtagtgatggaaagacccaggaagacagccaagctcataatcgactttttagcttctgtgcacaacacagacaacaacaagaagctggactgaggccccgactgcagcctgcattctgcacacagcatctgctcccatcccccaagtctgacgcagccaccactctcagggatcctgccccaaatgcggtcggagcgccagtgaccctgaggaagcccgtcccttatccctggtatccacggttccccagagctttggggaccacgcgaaaacctccaagatatttttcacaaaatagaaactcatatggaacaaaataagaaaccccagccatgaaatctaccatgaagtcttcaagttcatgtcactgagaagcttgtgcaaagcagccaccttggaccataattaaatcaaggacattttctttgagacattccttatagttggagactcaagatatttttgttgcatcaggtgtattcccttgcatgggcagtggcttttataggagcattagtcctcattcgctgaaccctgttgtttaggtctaatttaagttttacatagagacccatgtatgactgcagcccattggctgcaagaccagggaggaaagtggcaagctgtagaaaatgtttacacgcatggaggggcattgctctagccctcagagcgtccggagcagcagggtacatgggtgggaggttcattcagcacccaccagtcaggtatgttctgagtgaacccacagcagtcgcagaatgagcacctggcagggtgggtttcctaggaataatttattatttttaaaaataggcctaataaagcaataatgttctagacatctgtctaagtaatcagactcaggttccacacacaagcaacaactcgtgggcctcttttctatttcaatgtgctactaagaacccttggatgtaacatactagttagttaatgaattctgtgaattctgtgaagagtaatgtgattgaaaataagtctaaacagctgtaaaagtgaccacaatgacatgaaataaatttaataagtctagatcagcaaaaaaaaaaaaaaaaaa

SEQ ID NO: 56 - protein, 337 aa, Homo sapien
MDLDVVNMFVIAGGTLAIPILAFVASFLLWPSALIRIYYWYWRRTLGMQVRYVHHEDYQFCYSFRGRPGHKPSILMLHGFSAHKDMWLSVVKFLPKNLHLVCVDMPGHEGTTRSSLDDLSIDGQVKRIHQFVECLKLNKKPFHLVGTSMGGQVAGVYAAYYPSDVSSLCLVCPAGLQYSTDNQFVQRLKELQGSAAVEKIPLIPSTPEEMSEMLQLCSYVRFKVPQQILQGLVDVRIPHNNFYRKLFLEIVSEKSRYSLHQNMDKIKVPTQIIWGKQDQVLDVSGADMLAKSIANCQVELLENCGHSVVMERPRKTAKLIIDFLASVHNTDNNKKLD

SEQ ID NO: 57 - DNA, 5788 bp, Homo sapien
ggaacacaaaactgcggcccttgtctgcaaacagtggtatcgacttatcaaaggtgtagcccatcagtgttatcatggtttcatgaaggctgtccaggaaggaaacattcagtgggagagccgtacctatccttatcctggaaccccaatcactcagcgcttctcgcacagtgcatgctattatgatgctaatcagtctatgtatgtgtttggaggctgtacccagagcagctgcaatgctgctttcaatgacctctggagacttgacctaaacagcaaagagtggatccgacctttggcttcagggtcctatccttcccccaaagctggagcaactctggtcgtgtacaaggacttgctagtgctgtttggtggctggacgcggccaagcccttatcccctacaccagccagagagattctttgatgaaatacacacttactcaccctctaaaaattggtggaactgcattgtgacaacccatgggccacctcccatggctggccactcctcctgtgtgatagatgataaaatgattgtctttggtggctctttaggatcccggcaaatgagcaatgatgtctgggtccttgaccttgagcagtgggcgtggtccaagccgaacatctctggccccagtcctcatcctcgaggtggccaatctcagattgtcatagatgatgcaactatcttaatcctcggagggtgtggcggtcccaatgctctattcaaggatgcttggttgttgcacatgcattctggtccttgggcctggcagccactcaaggtagaaaatgaagagcatggggccccagaactgtggtgccatccagcttgccgggtgggacagtgtgtggtggtcttcagccaggctcctagtgggagagccccactcagccccagtttgaactctcgcccatcacctatcagtgccactcctccagctctcgttcctgaaacccgagagtaccgctctcagtctccagtaagaagcatggatgaagctccttgtgttaacggccgctggggaacactgagacccagggctcaaaggcagactccttcaggttcccgggaagggagcctttccccagccagaggagacggctctcctatcctcaatggtgggagtttgtctccaggaacggcagctgtgggtggctcttctttggacagtcctgtacaggccatatctccaagtactccatctgctcctgaaggatacgacctgaaaataggactttctttggccccccgacgaggatcactaccagatcagaaagatctgagattaggatccatagatctgaattgggatctgaaacccgcttccagtagtaatcccatggatggcatggacaataggacagttgggggaagtatgagacaccctcctgaacagacaaatggtgtgcataccccacctcacgtggccagtgcccttgcaggggccgtctccccaggtgccctgcgtcggagtctggaagccatcaaagcgatgtcctccaaaggcccctcggcctctgcagcactaagtcctcctcttgggtcttctccaggctctcctgggagccagagtttgagcagtggagaaacagtgcccatccctcgcccagggcctgcccaaggagatggacattccttacctcccattgctcgccgcctgggccaccaccctccacagtccctaaatgttggcaaacccctataccagagtatgaactgcaagcccatgcagatgtacgtgctggacattaaagacaccaaggagaaggggcgggtcaaatggaaagtatttaatagcagttctgtggttggacctcctgaaaccagcctgcataccgtggtacaaggcaggggtgaactcatcatatttggaggactcatggacaagaaacagaatgtgaagtactatccaaaaacaaacgccttgtactttgtacgagcaaagagataatgtgttctaaacccctttccttttctgtggcttttaatttggaattttccagtgtgtaagcatttggactgagaattgggaaaacaaaattactcccagaagccaaaactctttaattcccaaccgaagtcactccaggctgggatcaaatctccattaagaaaaaaaattatatataaatatatatatatatattatatagccaactctgttgacaaaaaaagggagagatttccatcctggttcagataaagttgttgctgtgttttaacaggggctgggctgcctttttctaccttgctggtaactagaccaagaagttagagaatagactaacatcagtaacttcccaaaagaaactgaagagccccctgtaaatctttatgtggccttcttggagttaaaaaatgaaagggcatatgtaagttgcaaaggtggagggttttagactctcatgcttcaggtgctgtcggggtaaaagtaactgtttttccccttctcttaaaaccacagaggacctgtgacagctctgcagaaatgccagtgcctggccccctcttgccttttatggctgaggaaagttacccaacaaaggattttattccacatttgtgtgccgggtcattgtgaaataatgtttatgcagccaacatctgaccgcctagtagtgtccattggtctttggagtgcttcttgtgtgtctcagaaaacattttgtgtctgattgtggaaatttctgacaatcaatcatatttggtggcaagttgccaaaaaacatatttattctcctctttcttcccttagaacatggtacttggaaactgccttttccattcacttacaggctgcttttttcttctaccttttttcttttcttttttttttttcatatgtggtgaagtcctaaaacctgtctgactttctgtttcttttacaaagctcaggtgcctacagaaatcagaagctgcttagaaatacttgtggaaccctttccctggtgtcactagggggccagtagggaattctaagatgccaatattgtgagaaatctttgaagcaagcatcaaaagatactgttttttccctatgggcttctttttacttccaaagcacattgagcacactcatcccatatttgtagaatgtggaaattgattctggaagggaattccaataacagttctttttagaaatgtttttttccttgtggtgacatatattcctcttcctggctattggcaggtgatggagttgagaatcatgtacttgacttcttgacgcatggctgacctcagaaacagctccatcctttgcacttgtcttcttcatgtgtcacccaaatagggcttgggtttttactttcacttcatttctgagattaaggtgtaaccaagtagagcatttctttgcttgatacagaaagttactagtctcaaccatggcctgggcataggagatgtcaaaataagtttatttcaaatggcaccatttaaatagggatttttggtgatttctcatcagtggaaagaggatttttgttttgcctttgttttgttttgaaatttaaatcctaatttcaaaacatcaccttgccaccctgacactcctctttttattattagcgtttctcaggcacaaagcctgctgcagctggccctgggtcctggctttcagccagcatctggcagcctaagtgtactgataagtgtgttttctcctgttacatcatgctgaatcctttcccttagccattagcttttatgatgtggtcttcgtaggaaagccaccctggtgccaagcctagcttgtggggaggggtatgtgttccagaaactgctctttgtgttcccttcaatgaggaaacaacatgtgtctacttatgtggcatccaactgcttggagctccacacttccctttcgcgactcaggctctggtgctgttgccaatccttgcttggcaaagactgttcgatcatgtggggtccttatttacaagggaaagctgggccagaaggctagcaattcaggtgttaccgctattgctgtaccttgtgttaggacattgtgtttgtgcatggactgtgcctccaaactcagtagttcctatctaaatataaagtatattagaaacctgaaagtacagaatctcaaccttacagtctttcccttagtcctgtggccttcctaagccagctgttaacgtgttgattccttccacttcccccaagtaggcaggcaacagatatgttgattgtcttagaaagtaatctggttcctctgaactccattgaattccagtttgacgcatactgcctggaaccagactgtttgcttacagctttttaagaaaaatctgccttgtctgcccccattatggttggtcttggtagctcctgggcactgtgggcgtgtaccatgggaaagtgattcaacacagtgaaggtgattgtctcctcaggcctcctgaagccacctgtgcggtgggacttcacgtgtctcggccaaggcgagcatttccacaatgccgtggatgctgcagtcaggccagattgaaccatgaccccatttttcacatgataccaattttgtcttaaaattcactgagaaaaatgagactaaattttttttaaccctcaggagcacctgaagcaaatatttatccgtatttattgaaaattcattttgtttctacttgaagctttaaccccttccattcctgcaagtgtgccttttgagagctcccatggcctagtgacttcactggtcaccttgtccatcttacttaagaattttagtctctccctaccctcttggacagagcttcctgttctcttatttcacaggttatacagcagagcgggttttgtgttttcattcctatttccacccttcatttggttggtggactccacaacctcaccctaccctacactttgggagcacaaatttggtgttgaaacaagcttaaatttcattttagggcatactgggcttactctcctcccagctgtctgtggattgatttgattttaatgttcgagttttacagcaacagctgaaaaccatgaactattctaggaactgtgttggaactctttaaaataaagaaaagaggaggaggaggaggaagaaagaaaaccaacttaagaagccttgactttggaggacagaaagccaccagccaatggagaacaaagagatgtttccctttcctttctttcaccttgtcattctgggtttccttctgcttcactctttccttcccccttaaaagtggtattcctggttggtctgtctgtctgtccttgtccttgtggtgatcctggcatggtgatatgctccactttgcattatccatggtctcttaccagcgcacaagtcagtggggaggatctaaccacgcctggtggtgaggaagctgaatttccaggcctgcgtcccatgtagcctctccatgaactgcagaaggcatgttctgcatggttaccagtaagtggctccctctcaccgtgttcattgtcaaatgagagcaaactttaggtgttggctccattgtacactctacttgctctgctcccctccctccaaccagggttcatgtcagtgcacaccccatgtgccctggcgaagctggtgctgtgagtgatgtttcccatacaactcagggatgccaggtggcttaccctgagatagtcattttgggcacataacagtgtaggaatgaaacatggatttcattgatatttaaatctgtcaatttcattttttgttaatgttttcccctgatgactttttagcaatttaacaaataaaatggacaattgtcttaac

SEQ ID NO: 58 - protein, 651 aa, Homo sapien
EHKTAALVCKQWYRLIKGVAHQCYHGFMKAVQEGNIQWESRTYPYPGTPITQRFSHSACYYDANQSMYVFGGCTQSSCNAAFNDLWRLDLNSKEWIRPLASGSYPSPKAGATLVVYKDLLVLFGGWTRPSPYPLHQPERFFDEIHTYSPSKNWWNCIVTTHGPPPMAGHSSCVIDDKMIVFGGSLGSRQMSNDVWVLDLEQWAWSKPNISGPSPHPRGGQSQIVIDDATILILGGCGGPNALFKDAWLLHMHSGPWAWQPLKVENEEHGAPELWCHPACRVGQCVVVFSQAPSGRAPLSPSLNSRPSPISATPPALVPETREYRSQSPVRSMDEAPCVNGRWGTLRPRAQRQTPSGSREGSLSPARGDGSPILNGGSLSPGTAAVGGSSLDSPVQAISPSTPSAPEGYDLKIGLSLAPRRGSLPDQKDLRLGSIDLNWDLKPASSSNPMDGMDNRTVGGSMRHPPEQTNGVHTPPHVASALAGAVSPGALRRSLEAIKAMSSKGPSASAALSPPLGSSPGSPGSQSLSSGETVPIPRPGPAQGDGHSLPPIARRLGHHPPQSLNVGKPLYQSMNCKPMQMYVLDIKDTKEKGRVKWKVFNSSSVVGPPETSLHTVVQGRGELIIFGGLMDKKQNVKYYPKTNALYFVRAKR

SEQ ID NO: 59 - DNA, 1950 bp, Homo sapien
gctctggcggctcccgcggctccggctggcggcttcgggccctgcacctgtgactctcggccgcgctcgccctcggcccgcccggcgccgcagccccatggccccgtccaggctgcagctcggcctccgcgccgcctactccggcatcagctccgtggccggcttctccatcttcctcgtctggacggtggtctaccgacagccggggaccgcggccatgggagggctcgcaggggtgctggcactgtgggtcctggtgacgcacgtgatgtacatgcaagattattggaggacctggctcaaggggctgcgcggcttcttcttcgtgggggtcctcttctcggccgtctccatcgctgccttctgcaccttcctcgtgctggccatcacccggcatcagagcctcacagaccccaccagctactacctctccagcgtctggagcttcatttccttcaagtgggccttcctgctcagcctctatgcccaccgctaccgggctgactttgctgacatcagcatcctcagcgatttctgacccagggggtgaggtctctgcaccctgggggggccttaggacctggactcagcctctgagatgttgggagaggctactcccaccccctggtgaccccagaactgtggcagaaaatacacagcaggacgagtgtggtctcccaggaagctgtcctgcccgtcccctttcgaggaaacctgagtgtggtagagaggggatcctgccatgttgctcctcatcagcctggccagagggcagctttagaccttttcaaatgaatctgttttcttttctttcttttttttttcttttttttttttttttgagatggagtcttactctgtcacccaggctggagtgcagtagtgcgatctcagctcactgcaacctccgcctcccaggttcaagcaattctcctgccttggcctctcaagtagctgggattacaggcatctgccaccatgcccggcaaatttttgtgtttttagtagagacagggttttgccatgttggccaggctggtctcgaactcctgatctcaggtgattcacccgcctcagccttccaaagtgctgggattataggtgtgagccaccgtgcccggcctggatctgttttcttagcacgcagtgaggaatctttgtacttaaggccagggcaacaaagtcaagaggtcaaggtgtagggccatgaggcctggacctatgctgcaggcaagggtttccatccccgctgccctaggcactctcttcccaaggccaggttgggcacctggggaggtcagttcagaaatatctagcagagacctcttaaacccccatcccagcaccccatcctgttgttcccagagctggtctcccatgagtgtgctagagccagatagccgtggccccccacccatctcactcacacacacaggcatccatacaccccagaagacttcccaaatgaggccagactcagggtcacggggaatgtgcttctgcccctgtaagggctttggggaagggggcaacatagtagaggctggaaagagcccccaaacctgtgcccatgcccctccagccctgcgtttccattctgccttctcagagtgcccttgctgcacccagaccaccggccaggagagaccttctctcccactccagcccctctcactgcccttcaactagagctttcacctttttacatttcccttctgaaggacacaaatctgcttttctgcccatacactggcccaagggctcacctaacttgggagggaaggggctgttggtacaaggatgattttctgttaggctgccattttgcacggtctccccctccccatctgatgtgtcctgcccctcagctctttgccttatctgtgtcactgtcactttagcaaaaatacagcggccatttgtatcaaaaaaaaaaaaaaaaaaaaaaaa

SEQ ID NO: 60 - protein, 239 aa, Homo sapien
MPTATGLTLLTSASSAISDPGGEVSAPWGGLRTWTQPLRCWERLLPPPGDPRTVAENTQQDECGLPGSCPARPLSRKPECGREGILPCCSSSAWPEGSFRPFQMNLFSFLSFFFLFFFFLRWSLTLSPRLECSSAISAHCNLRLPGSSNSPALASQVAGITGICHHARQIFVFLVETGFCHVGQAGLELLISGDSPASAFQSAGIIGVSHRARPGSVFLARSEESLYLRPGQQSQEVKV

SEQ ID NO: 61 - DNA, 3546 bp, Homo sapien
atgggtgtgctggatagccggttgcacctgtttcttgggtcttctctcctgttcccactgttccacttcaggagagccaagcatctcacccatgctctcatattcagtctaggcatcctacccaagtatcctaattataaactagccaccagctcaggctctgtatcccagtcaccacccccattcaggcccccaactatccagtgccagaggccctcaggtgcagagggccagttcagccaaaccaggacagacccagccacccttgtttccagcccagcctacaagcctcctgaaacccaccagtctgatggtagcctcccctccctgttctcccaggaagaaagagaaatcgcctccctccaaaaccaagcccaaccagaaacctgtccccaccccctcatcagctgctcccagatccgaatgggatttgcagaagtcctgagcactggtggttggtgggcagcaacaggccctttgcgcggcagctggacggatggggtgggggcgaggtctgggccagggcctgagggtacgggcactaaggccgaggcgtcgcctcccggcgcctctcccacggccacggccgagcgggctccacggctccaggagttcgccgcgctagctgcctccccctgcgtccgcgtcttgagctctgagctcttcaccctgacctatggtgccctggtcacccagctatgtaaggactatgaaaatgatgaagatgtgaataaacagctggacaaaatgggctttaacattggagtccggctgattgaagatttcttggctcggtcaaatgttgggaggtgccatgactttcgggaaactgcggatgtcattgccaaggtggcgttcaagatgtacttgggcatcactccaagcattactaattggagcccagctggtgatgaattctccctcattttggaaaataaccccttggtggactttgtggaacttcctgataaccactcatcccttatttattccaatctcttgtgtggggtgttgcggggagctttggagatggtccagatggctgtggaggccaagtttgtccaggacaccctgaaaggagacgccgcgaggggcggccggcagagcgacgcggaaccccgccggcgcggaccccggaccccaacgccgcccgcccagccgcggacgcccctgcccggagccctcgccgcccgggccgccctcgagggccgggagcggcgcccggcggccgcgcccgcaggccctgcctctgctggaaccttcccaggcccctccgacctgaaagcccagcccctcctgctgccgctgctgccgccaccacgcagggtagccgcagaggcccaggaatcttggcaggcgtggggaggcagcgggtggcgggtggcgctccggaaaaggctgcaaatgcgaaccagaagcacgtccacggacgccatgctggggactctgacacccctgtcttcgctgctgctgctgctactggtgctggtgctggggtgtgggccgcgggcgtcctctggtggcggggccggtggggcggcgggctatgccccagtgaagtacatccagcccatgcagaaaggacctgtgggaccgcccttccgtgagggcaaaggccagtacctggaaatgcctctaccgctgctgccgatggacctgaagggagagcccggcccccctgggaagcccgggcctcggggtccccctggcccccctggcttcccaggaaaaccaggcatgggaaagccaggactccatgggcagcctggccctgctgggccccctggcttctcccggatgggcaaggctggtcccccagggctccctggcaaggtcgggccaccagggcagccggggcttcggggggagccaggaatacgaggggaccagggcctccggggacccccaggaccccctggcctcccgggcccctcaggcattactatccctggaaaaccaggtgcccaaggggtgccagggcccccaggattccagggggaaccagggccccagggggagcctgggcccccaggtgatcgaggcctcaagggggataatggagtgggccagcccgggctgcctggggccccagggcaggggggtgcccccggcccccccggcctccctggtccagctggcttaggcaaacctggtttggatgggcttcctggggccccaggagacaagggtgagtctgggcctcctggagttccaggccccaggggggagccaggagctgtgggcccaaaaggacctcctggagtagacggtgtgggagtcccaggggcagcagggttgccaggaccacagggcccatcaggggccaaaggggagccagggacccggggcccccctgggctgataggccccactggctatgggatgccaggactgccaggccccaagggggacaggggcccagctggggtcccaggactcttgggggacaggggtgagccaggggaggatggggagccaggggagcagggcccacagggtcttgggggtccccctggacttcctgggtctgcagggcttcctggcagacgtgggccccctgggcctaagggtgaggcagggcctggaggacccccaggagtgcctggcattcgaggtgaccaggggcctagtggcctggctgggaaaccaggggtcccaggtgagaggggacttcctggggcccatggaccccctggaccaactgggcccaagggtgagccgggtttcacgggtcgccctggaggaccaggggtggcaggagccctggggcagaaaggtgacttggggctccctgggcagcctggcctgaggggtccctcaggaatcccaggactccagggtccagctggccctattgggccccaaggcctgccgggcctgaagggggaaccaggcctgccagggccccctggagaggggagagcaggggaacctggcacggctgggcccacggggcccccaggggtccctggctcccctggaatcacgggccctccggggcctcccgggcccccgggaccccctggtgcccctggggccttcgatgagactggcatcgcaggcttgcacctgcccaacggcggtgtggagggtgccgtgctgggcaaggggggcaagccacagtttgggctgggcgagctgtctgcccatgccacaccggccttcactgcggtgctcacctcgcccttccccgcctcgggcatgcccgtgaaatttgaccggactctctacaatggccacagcggctacaacccagccactggcatcttcacctgccctgtgggcggcgtctactactttgcttaccatgtgcacgtcaagggcaccaacgtgtgggtggccctgtacaagaacaacgtgccggccacctatacctacgatgagtacaagaagggctacctggaccaggcatctggtggggccgtgctccagctgcggcccaacgaccaggtctgggtgcagatgccgtcggaccaggccaacggcctctactccacggagtacatccactcctccttttcaggattcttgctctgccccacataa

SEQ ID NO: 62 - protein, 1181 aa, Homo sapien
MGVLDSRLHLFLGSSLLFPLFHFRRAKHLTHALIFSLGILPKYPNYKLATSSGSVSQSPPPFRPPTIQCQRPSGAEGQFSQTRTDPATLVSSPAYKPPETHQSDGSLPSLFSQEEREIASLQNQAQPETCPHPLISCSQIRMGFAEVLSTGGWWAATGPLRGSWTDGVGARSGPGPEGTGTKAEASPPGASPTATAERAPRLQEFAALAASPCVRVLSSELFTLTYGALVTQLCKDYENDEDVNKQLDKMGFNIGVRLIEDFLARSNVGRCHDFRETADVIAKVAFKMYLGITPSITNWSPAGDEFSLILENNPLVDFVELPDNHSSLIYSNLLCGVLRGALEMVQMAVEAKFVQDTLKGDAARGGRQSDAEPRRRGPRTPTPPAQPRTPLPGALAARAALEGRERRPAAAPAGPASAGTFPGPSDLKAQPLLLPLLPPPRRVAAEAQESWQAWGGSGWRVALRKRLQMRTRSTSTDAMLGTLTPLSSLLLLLLVLVLGCGPRASSGGGAGGAAGYAPVKYIQPMQKGPVGPPFREGKGQYLEMPLPLLPMDLKGEPGPPGKPGPRGPPGPPGFPGKPGMGKPGLHGQPGPAGPPGFSRMGKAGPPGLPGKVGPPGQPGLRGEPGIRGDQGLRGPPGPPGLPGPSGITIPGKPGAQGVPGPPGFQGEPGPQGEPGPPGDRGLKGDNGVGQPGLPGAPGQGGAPGPPGLPGPAGLGKPGLDGLPGAPGDKGESGPPGVPGPRGEPGAVGPKGPPGVDGVGVPGAAGLPGPQGPSGAKGEPGTRGPPGLIGPTGYGMPGLPGPKGDRGPAGVPGLLGDRGEPGEDGEPGEQGPQGLGGPPGLPGSAGLPGRRGPPGPKGEAGPGGPPGVPGIRGDQGPSGLAGKPGVPGERGLPGAHGPPGPTGPKGEPGFTGRPGGPGVAGALGQKGDLGLPGQPGLRGPSGIPGLQGPAGPIGPQGLPGLKGEPGLPGPPGEGRAGEPGTAGPTGPPGVPGSPGITGPPGPPGPPGPPGAPGAFDETGIAGLHLPNGGVEGAVLGKGGKPQFGLGELSAHATPAFTAVLTSPFPASGMPVKFDRTLYNGHSGYNPATGIFTCPVGGVYYFAYHVHVKGTNVWVALYKNNVPATYTYDEYKKGYLDQASGGAVLQLRPNDQVWVQMPSDQANGLYSTEYIHSSFSGFLLCPT

SEQ ID NO: 63 - DNA, 1695 bp, Homo sapien
gttgccgctgcgcacctggctcaggtgagctgccccgcccccgcccggcgcgagccccaggtcctggcagcagcccctgacctgtccaggtgccctgtccagctgactgcaaggacagagaggagtcctgcccagctcttggatcagtctgctggccgaggagcccggtggagccaggggtgaccctggagcccagcctgccccgaggaggccccggctcagagccatgccaggtgtctgtgatagggcccctgacttcctctccccgtctgaagaccaggtgctgaggcctgccttgggcagctcagtggctctgaactgcacggcttgggtagtctctgggccccactgctccctgccttcagtccagtggctgaaagacgggcttccattgggaattgggggccactacagcctccacgagtactcctgggtcaaggccaacctgtcagaggtgcttgtgtccagtgtcctgggggtcaacgtgaccagcactgaagtctatggggccttcacctgctccatccagaacatcagcttctcctccttcactcttcagagagctggccctacaagccacgtggctgcggtgctggcctccctcctggtcctgctggccctgctgctggccgccctgctctatgtcaagtgccgtctcaacgtgctgctctggtaccaggacgcgtatggggaggtggagataaacgacgggaagctctacgacgcctacgtctcctacagcgactgccccgaggaccgcaagttcgtgaacttcatcctaaagccgcagctggagcggcgtcggggctacaagctcttcctggacgaccgcgacctcctgccgcgcgctgagccctccgccgacctcttggtgaacctgagccgctgccgacgcctcatcgtggtgctttcggacgccttcctgagccgggcctggtgcagccacagcttccgggagggcctgtgccggctgctggagctcacccgcagacccatcttcatcaccttcgagggccagaggcgcgaccccgcgcacccggcgctccgcctgctgcgccagcaccgccacctggtgaccttgctgctctggaggcccggctccgtgactccttcctccgatttttggaaagaagtgcagctggcgctgccgcggaaggtgcggtacaggccggtggaaggagacccccagacgcagctgcaggacgacaaggaccccatgctgattcttcgaggccgagtccctgagggccgggccctggactcagaggtggacccggaccctgagggcgacctgggtgtccgggggcctgtttttggagagccatcagctccaccgcacaccagtggggtctcgctgggagagagccggagcagcgaagtggacgtctcggatctcggctcgcgaaactacagtgcccgcacagacttctactgcctggtgtccaaggatgatatgtagctcccaccccagagtgcaggatcatagggacagcgggggccagggcagcggcgtcgctcctctgctcaacaggaccacaacccctgccagcagccctgggaccctgccagcagccctgggaaaaggctgtggcctcagggcgcctcccagtgccagaaaataaagtccttttggattctgaaaaaaaaaaaaaaaaaaaaaaaaaaaaaaaaaaaaaaaaaaaaaaaaaaaaaaaa

SEQ ID NO: 64 - protein, 410 aa, Homo sapien
MPGVCDRAPDFLSPSEDQVLRPALGSSVALNCTAWVVSGPHCSLPSVQWLKDGLPLGIGGHYSLHEYSWVKANLSEVLVSSVLGVNVTSTEVYGAFTCSIQNISFSSFTLQRAGPTSHVAAVLASLLVLLALLLAALLYVKCRLNVLLWYQDAYGEVEINDGKLYDAYVSYSDCPEDRKFVNFILKPQLERRRGYKLFLDDRDLLPRAEPSADLLVNLSRCRRLIVVLSDAFLSRAWCSHSFREGLCRLLELTRRPIFITFEGQRRDPAHPALRLLRQHRHLVTLLLWRPGSVTPSSDFWKEVQLALPRKVRYRPVEGDPQTQLQDDKDPMLILRGRVPEGRALDSEVDPDPEGDLGVRGPVFGEPSAPPHTSGVSLGESRSSEVDVSDLGSRNYSARTDFYCLVSKDDM

SEQ ID NO: 65 - DNA, 5779 bp, Homo sapien
ggagctggggatccccgctctcctggaccccaatgacatggtctccatgagcgtccctgactgcctcagcatcatgacctatgtgtcccagtattacaaccacttctgcagtcctggccaagctggtgtctcgccacccagaaagggccttgcaccctgttccccgccgtctgtagcacccactccagtggaatcagaagatgtggctcagggcgaggagctctcctcaggcagcctgtcagagcagggcaccggccagacccccagcagcacgtgcgcagcctgccagcagcatgtgcacttggtgcagcgctacctggctgacggcaggctgtaccatcgccactgcttccggtgtcggcggtgctccagcaccctgctccctggggcttatgagaatgggcctgaggagggcacctttgtgtgtgcagaacactgtgccaggctgggcccggggacacggtcggggaccaggcctgggcccttctcacagccaaagcagcagcaccagcagcaactcgcagaagatgccaaggatgttccaggaggcggccccagctccagtgctcctgcaggggctgaggccgatggacccaaggccagccctgaggcccggccgcagatccctaccaagccccgggttcctggcaaactacaggagctggccagcccccctgcgggccgccccacccctgcccccaggaaggcctctgagagcaccaccccagcaccccccacgccccggccccgctccagtctgcagcaggagaacctggtggagcaggctggcagcagcagcctggtgaacgggagactgcacgaactgcctgtccccaagccgagggggacaccgaagccgtccgaggggacaccagcccccaggaaggaccccccatggatcacgctggtgcaggcagaaccaaagaagaagccagccccacttcccccaagcagcagcccggggccaccaagccaggacagcaggcaggtggagaatggaggcaccgaggaggtggcccagccgagcccaacggccagcctggagtccaaaccctataacccctttgaggaggaggaggaggacaaggaggaagaggctccagctgcacccagcctggccaccagccctgccctgggccacccggagtccacacccaagtccctgcacccctggtacggcatcacccctaccagcagccccaagacaaagaagcgccctgccccgcgcgcacccagcgcgtccccactggctctccacgcctcccgcctctcgcactcggagccgccctcggccacaccatcgccagcgctcagcgtggagagcctgtcgtctgagagcgccagccagactgcaggtgcagagcttctggagccgccagctgtgcccaagagctcctcagagcctgctgtccatgcccctggtacccctggaaaccctgtcagcctctctaccaactcctccctggcctcctctggggaactagtggagcctagagtggaacaaatgcctcaagccagccctggccttgcccccaggaccaggggcagctcaggtccccagccagccaagccctgcagtggcgccaccccaacgcctctcttgttggttggagacaggagcccggtgccttcccctggaagctcgtccccacagctgcaggtaaagtcctcctgcaaggagaatccttttaaccggaagccatcacctgcagcgtccccagccacaaagaaggccaccaagggatccaagccagtgaggccacctgcccctggacacggctttccactcatcaaacgcaaggtccaggctgaccagtacatccctgaggaggacatccatggagagatggataccattgagcgccggctggatgccctggagcaccgtggggtgctgctggaggagaagctgcgtggcggcctgaatgagggccgtgaggatgacatgctggtggactggttcaagctcatccacgagaagcacctactggtgcggcgagagtccgagctcatctatgtcttcaagcagcagaacctggagcagcgccaggctgatgtcgagtatgagctccggtgcctcctcaataagccagaaaaggactggacggaggaggaccgggcccgggagaaggtgctgatgcaggagcttgtgaccctcattgagcagcgcaacgctatcatcaactgcctggatgaggaccggcagagggaggaagaggaagacaagatgttggaagccatgatcaagaagaaagagttccagagggaggctgaacctgagggcaagaagaaggggaagttcaagaccatgaagatgttgaaactgctaggaaacaaacgtgatgccaagagcaagtcccccagagacaagagctaacagcacgagaagccagttggggactgccccctcctggagcagctcctgggctgtgctctgtttgaagggggcgccctgctcccctcagatcagtcaggaggaagatgactaaggggagggatcctctgggtgatggcctcttcctcctcagggacctctgactgctctgggccaaagaatctcttgtttcttctccgagccccaggcagcggtgattcagccctgcccaacctgattctgatgactgcggatgctgtgacggacccaaggggcaaatagggtcccagggtccagggaggggcgcctgctgagcacttccgcccctcaccctgcccagcccctgccatgagctctgggctgggtctccgcctccagggttctgctcttccaggcaggccagcaagtggcgctgggccacactggcttcttcctgccccatccctggctctgagtctctgtcttcctgtcctgtgcaggcgcccttggatctcagtttccctcactcaggaactctgtttctgaagtcttcagttaagtttgagtttatgactgagtggcctgtactgtcagacgtgaatgggcctgacgggcaaatccatccctctctccctcacagttccaggagcggcttccctcgtctccccttactccacagggagcctcccttgccaggaccagggctgcgacggccatgctggggcaggtgagtgctctgttagctgctcccagtgctgtccccaggctgcagttctggtccctggttgtcaggtaggaagggtgcacttgaagcaggtgctcatctcggttccttaacgtttatagtctgacccctcacttaggctttcctctgccaccccggtccagggaagaggctcgctcccgcccatggtcatcactggtctgtctgctctgttgtctgttctttccctgactccctcccaccgaaggcctgatggctactcacccctctgggatggctatgggagaggaggagtgatggggaccgccaccttttctgcaggaaatgtgcccagcagctcttggtcaaagcactgttgctataagctatctctgggatgcctctaggcccccttccctctacacacctctgggaaaagattacactgtattaactctcgaggagtttcctcaccaataaacagacaacctcaactgccagtgccctgcagcctcgggccacagcggcagccttgtttgccttcccacctgcctctgccacacctggtggctgaacatctctggtcgcccagaggccatgttggggccatcctccaagagggatctctgccctcaccgcctgccactgggcaggatccctttcctctgcagggagaggtggctcctcggccatgcagcccctggcaggctccttctaaacatgcctgttgacctggagctggcgccaccaactccagggcctttccagggccagacaggtaacacgcatgaacccgagtgacagctctgacgggctgtttcggtgtcaggagacaaagctggcaggggcaggggtgaactggaggcaagtcaagtcacctgtggcctgtggggctgaatgtgggcccggtgttgccagatcctttgtcataagaagctagaaatccagattttatgtgtgtgtaatttgtaaatgctgaaagctagcctgaattttttttttttttttgagacagagtctcgctctgtcgcccaggctggagtgcagtggcgcgatctcagctcactgcaggctccgcctcctgggttcacgccatcctcctgcctcggcctcctgagcagctgggactacaggcgcatgctacgacgcctggctaattttttgtatttttagtagagacggggtttcaccgtgttaaccaggatggtctcgatctcctgaccttgtgatccacccaccttggcctcccaaagtgctgggattacaggcgtgagccaccacgcccggccactagcctgaatttcaatcaagggttggctgatactgtgtgtccagggtggactggatttgtcctggggggttctctggtttgctgcctcctgaccacatgatggggccttcgaggtcgaggacaactgttcccattagattgcaccctctgccctcaggttcttgagggtgtgtggacacagaggctttccatgggatgtccctgagccggcccttgattggggcctcaccatttacagggccgttttattctgcaaaccgaaacttgggtcatgtgacctgatgggattatgggactccctccaggtgcccgagacaaggttgatatttccaaaatattttggtgatttagtgggacaagcaaatgacagaataccggagaaggcagggatcgtgggtgtcaggagccagaggggagggggacagatgtgctgtgtacaggacaaggtgtcaggtgactccttcccagcagggcctcgcagatgcacaagcacggagctggtgggttttgcccaagaaaggtcacgcggcacatgcagggattggaactcccaggccagggctctaggtcgctcccaccttttcatgtttctttctgtggccatgggtatagtggaaagacataaagctaaagccaacttttaatcctgaatgcactgcttgccaggtaaatgcccttggttgtggtatcttgttgagacttagttttcacagagggataatgaaccgttgcagaggtttattgagatcattaacagagtggaattcagcacctgccactgcactccagcctgggcgacagagcaagactcagtctcaaaaaaaaaaaaaattagctgggcagggcatggtgatggtgcctgtaatcctagctacttgggaggctgaggcatgagaattgcctgaacccaggaggtggaggttgcagtgagccgagatcgtgccactgtactccagcctgggtgacagcgcgagactccgtctcaaaaaaagctgggtgtggggaacacctgtggtcccagctattctggagactgaggcaggaggattgcttgagctcaggagttctggctgcagtgagctatgatcatgccactgtattacagaatgggtgacagaatgagagcgacactgtctcaaaaaaaaaaaaaaaaaaaggccgggagcggtcgtttgtgcctgtaatcccaacactttgggaggccagggtgggcggatcacttgaggccaggagttcaagaccagcctggccaacatggtgaatccccatctctactaaaaaaattaactggacatggtggtggacacttgtaatcccagctactcaggaggctgacacatgagaattgcttgaacccgggaggcggaggttacagtgagccgagatagcaccactgcactccaacctgggcacagagtaaggctctgtcttt

SEQ ID NO: 66 - protein, 791 aa, Homo sapien
ELGIPALLDPNDMVSMSVPDCLSIMTYVSQYYNHFCSPGQAGVSPPRKGLAPCSPPSVAPTPVESEDVAQGEELSSGSLSEQGTGQTPSSTCAACQQHVHLVQRYLADGRLYHRHCFRCRRCSSTLLPGAYENGPEEGTFVCAEHCARLGPGTRSGTRPGPFSQPKQQHQQQLAEDAKDVPGGGPSSSAPAGAEADGPKASPEARPQIPTKPRVPGKLQELASPPAGRPTPAPRKASESTTPAPPTPRPRSSLQQENLVEQAGSSSLVNGRLHELPVPKPRGTPKPSEGTPAPRKDPPWITLVQAEPKKKPAPLPPSSSPGPPSQDSRQVENGGTEEVAQPSPTASLESKPYNPFEEEEEDKEEEAPAAPSLATSPALGHPESTPKSLHPWYGITPTSSPKTKKRPAPRAPSASPLALHASRLSHSEPPSATPSPALSVESLSSESASQTAGAELLEPPAVPKSSSEPAVHAPGTPGNPVSLSTNSSLASSGELVEPRVEQMPQASPGLAPRTRGSSGPQPAKPCSGATPTPLLLVGDRSPVPSPGSSSPQLQVKSSCKENPFNRKPSPAASPATKKATKGSKPVRPPAPGHGFPLIKRKVQADQYIPEEDIHGEMDTIERRLDALEHRGVLLEEKLRGGLNEGREDDMLVDWFKLIHEKHLLVRRESELIYVFKQQNLEQRQADVEYELRCLLNKPEKDWTEEDRAREKVLMQELVTLIEQRNAIINCLDEDRQREEEEDKMLEAMIKKKEFQREAEPEGKKKGKFKTMKMLKLLGNKRDAKSKSPRDKS

SEQ ID NO: 67 - DNA, 1377 bp, Homo sapien
ctttgttttgcttcgagatggctgcggggatgtatttggaacattatctggacagtattgaaaaccttccctttgaattacagagaaactttcagctcatgagggacctagaccaaagaacagaggacctgaaggctgaaattgacaagttggccactgagtatatgagtagtgcccgcagcctgagctccgaggaaaaattggcccttctcaaacagatccaggaagcctatggcaagtgcaaggaatttggtgacgacaaggtgcagcttgccatgcagacctatgagatggtggacaaacacattcggcggctggacacagacctggcccgttttgaggctgatctcaaggagaaacagattgagtcaagtgactatgacagctcttccagcaaaggcaaaaagaaaggccggactcaaaaggagaagaaagctgctcgtgctcgttccaaagggaaaaactcggatgaagaagcccccaagactgcccagaagaagttaaagctcgtgcgcacaagtcctgagtatgggatgccctcagtgacctttggcagtgtccacccctctgatgtgttggatatgcctgtggatcccaacgaacccacctattgcctttgtcaccaggtctcctatggagagatgattggctgtgacaaccctgattgttccattgagtggttccattttgcctgtgtggggctgacaaccaagcctcgggggaaatggttttgcccacgctgctcccaagaacggaagaagaaatagataagggccttggattccaacacagtttcttccacatcccctgacttgggctagtgggcagaggaatgcctgtgctggggccaggggttcagggaggagtggatggcacagtgctgtcatcccttctcctcccctctccccactcccggtgctgaggctgcatcagaccctggtagggaggggtgccgcagccactaacggtatgtgctctccttcagccctctccttcggagggacgtggtcttgcccactgtccttttgcctccatgctgaggtcggtgctgtatttcagagggagggtccttttcattctccttgctttgtatttaaggactggggcatagcatgggggcagtcccccagacctcttcattccccctcctgtggtgagggctaggtgtgatcaacacttttcttctccattcccttcctgcttttttcatggtggggatccaccaggtcatctagctctggccctagttgaagggcaccccttcctctgtgccaagaggattcatcctgggagagggggcaaggtggaatgcagataactcacatgtaaaaggaacttgggtaggtaaataaaagctatacatgttgaaaaaaaaaa

SEQ ID NO: 68 - protein, 249 aa, Homo sapien
MAAGMYLEHYLDSIENLPFELQRNFQLMRDLDQRTEDLKAEIDKLATEYMSSARSLSSEEKLALLKQIQEAYGKCKEFGDDKVQLAMQTYEMVDKHIRRLDTDLARFEADLKEKQIESSDYDSSSSKGKKKGRTQKEKKAARARSKGKNSDEEAPKTAQKKLKLVRTSPEYGMPSVTFGSVHPSDVLDMPVDPNEPTYCLCHQVSYGEMIGCDNPDCSIEWFHFACVGLTTKPRGKWFCPRCSQERKKK

SEQ ID NO: 69 - DNA, 1450 bp, Homo sapien
tacgtgaagcaccgacacaaactggagaatggtctggctgcgctcagtcccttaagcaagggctccatggaggctggcccttacctgccccgagccctgcagcagcctctggaacagctgactcggtatgggcggctcctggaggagctcctgagggaagctgggcctgagctcagttctgagtgccgggcccttggggctgctgtacagctgctccgggaacaagaggcccgtggcagagacctgctggccgtggaggcggtgcgtggctgtgagatagatctgaaggagcagggacagctcttgcatcgagaccccttcactgtcatctgtggccgaaagaagtgccttcgccatgtctttctcttcgagcatctcctcctgttcagcaagctcaagggccctgaaggggggtcagagatgtttgtttacaagcaggcctttaagactgctgatatggggctgacagaaaacatcggggacagcggactctgctttgagttgtggtttcggcggcggcgtgcacgagaggcatacactctgcaggcaacctcaccagagatcaaactcaagtggacaagttctattgcccagctgctgtggagacaggcagcccacaacaaggagctccgagtgcagcagatggtgtccatgggcattgggaataaacccttcctggacatcaaagcccttggggagcggacgctgagtgccctgctcactggaagagccccagaaacacttgactcttctggagatgtgtccccaggaccaagaaacagccccagcctgcaacccccccaccctgggagcagcactcccaccctggccagtcgagggatcttagggctatcccgacagagtcatgctcgagccctgagtgaccccaccacgcctctgtgacctggagaagatccagaacttgcgtgcagcttctcctctcagcacactttgggctgggatggcagtggggcataatggagccctgggcgatcgctgaatttcttccctctgcttcctggacacagaggaggtctaacgaccagagtattgccctgccaccactatctctagtctccctagcttggtgccttctcctgcaggagtcagagcagccacattgcttgccttcataccctggaggtggggaagttatccctcttccggtgctttcccatcctgggccactgtatccaggacatcactcccatgccagccctccctggcagcccatgttctcctcttttctcaccccctgactttccctgagaagaatcatctctgccaggtcaactggagtccctggtgactccattctgaggtgtcacaagcaatgaagctatgcaaacaataggagggtgtgacaggggaaccgtagactttatatatgtaattactgttattataatactattgttatattaaatgtatttactcacactttgcctct

SEQ ID NO: 70 - protein, 278 aa, Homo sapien
MEAGPYLPRALQQPLEQLTRYGRLLEELLREAGPELSSECRALGAAVQLLREQEARGRDLLAVEAVRGCEIDLKEQGQLLHRDPFTVICGRKKCLRHVFLFEHLLLFSKLKGPEGGSEMFVYKQAFKTADMGLTENIGDSGLCFELWFRRRRAREAYTLQATSPEIKLKWTSSIAQLLWRQAAHNKELRVQQMVSMGIGNKPFLDIKALGERTLSALLTGRAPETLDSSGDVSPGPRNSPSLQPPHPGSSTPTLASRGILGLSRQSHARALSDPTTPL

SEQ ID NO: 71 - DNA, 1891 bp, Homo sapien
ctttctgcccgactcccacagctacaccatgcaggaattcgcccggcgttacttccggaggtcccaggccttgctgggccagactgatggaggtgccgcaggaaaggacacggacagcctggtgcagtacaccaaggctcccatccaggagtcgctcctcagcctcagtgatgatgtgagcaagctggctgtagccagcttcctggccctgatgcggtttatgggtgaccagtccaagccccggggcaaggatgagatggatctgctctatgaactgctgaagctgtgccagcaggagaagctgagggatgagatttactgccaggttatcaagcaggtcacgggacacccccggccggaacactgcactcgaggctggagcttcctcagccttctcacaggcttcttccccccgtcgaccaggctgatgccctacctgaccaagtttctgcaggattcaggccccagccaagagctggcccggagcagccaggagcacctccagcgcacagtcaaatatggggggcgccggcggatgcccccaccgggtgaaatgaaggctttcctgaaaggacaagcgattcgcctgcttcttattcacctgccggggggtgtggattataggacgaatatccagactttcacagtagcagcagaagtgcaggaggagctgtgccggcaaatgggtatcacggagcctcaggaagtgcaggaattcgccctcttcctcatcaaagagaagagccagctggtgcggcccctgcagcccgccgaatgcctcaacagcgtggtagtggaccaggacgtgagcctgcacagccggcggctccactgggagaccccactgcacttcgataactccacctacatcagcacccactacagccaggtgctgtgggactaccttcaggggaagctgccagtcagcgccaaggcagacgcgcagctcgccaggctggccgccctgcagcacctcagcaaggccaacaggaataccccctcagggcaggacctgctagcttacgtgccaaagcagctgcaacggcaggtgaacacggcctccatcaagaacctgatgggtcaggagctgagacggctggaaggacacagcccccaggaagcacagatcagcttcatcgaggccatgagccagctgcccctcttcggctacaccgtctatggggtgctgcgagtgagcatgcaggccctgtccggacccactctcctggggctcaaccgccagcatctcatcctcatggaccccagctcccagagcctgtactgccgcattgccctgaagagcctgcagcggctccacctgctaagccctctggaggagaaggggccccctggcctggaagtcaactatggctcagctgacaacccccagaccatctggtttgagctgccacaggcccaggagctgctatacaccactgtcttcctgatagacagcagtgcctcttgcactgagtggcccagcatcaactgagaggagtgcaggccggggagagaagaggatgaggcctcccccggcccaagtctcacccacatggtctgccttggatgctatcagatcactgttctagaacctgcctcagcacagcccagccggcccacatgcaggccatgaggcaggggctgctatcacgtcaccagcaggcaaagaaaacagccagaccctctccaggacggcctggggccaaagcgggctgcaggaactcggctggggcacctgaggttgcccagtctgagggagatgcccacccgaccccaggctccgcccaggccccacattagcacaagcccaggcatgggagaaacagctgctgaggaaataaaactccctggagaaaaaaaaaaaaaaaaaaaaaaaaaaaaaaaaaaaaaa

SEQ ID NO: 72 - protein, 487 aa, Homo sapien
MQEFARRYFRRSQALLGQTDGGAAGKDTDSLVQYTKAPIQESLLSLSDDVSKLAVASFLALMRFMGDQSKPRGKDEMDLLYELLKLCQQEKLRDEIYCQVIKQVTGHPRPEHCTRGWSFLSLLTGFFPPSTRLMPYLTKFLQDSGPSQELARSSQEHLQRTVKYGGRRRMPPPGEMKAFLKGQAIRLLLIHLPGGVDYRTNIQTFTVAAEVQEELCRQMGITEPQEVQEFALFLIKEKSQLVRPLQPAECLNSVVVDQDVSLHSRRLHWETPLHFDNSTYISTHYSQVLWDYLQGKLPVSAKADAQLARLAALQHLSKANRNTPSGQDLLAYVPKQLQRQVNTASIKNLMGQELRRLEGHSPQEAQISFIEAMSQLPLFGYTVYGVLRVSMQALSGPTLLGLNRQHLILMDPSSQSLYCRIALKSLQRLHLLSPLEEKGPPGLEVNYGSADNPQTIWFELPQAQELLYTTVFLIDSSASCTEWPSIN

SEQ ID NO: 73 - DNA, 2793 bp, Homo sapien
caggtcccccagaccatccgaaccagccgcccatgatgacctgcgagagactcccatgccccactgcaggcctgggccccctcagggaggaagcgatgaagccaggggcagcctccagtcccttgcagcaggtccccgccccgccactgcctgcgaagaagaaccttcccactgcccctcccagacgccgcgtttccgagagggtgtccttagaagaccaaagtccggggatggcggcagagggggaccagctcagcctgcctccccaagggacctcagacggccctgaggacacgccccgggagagcacggagcaaggccaggacacagaggtgaaagccagcgatcctcacagcatgccagagctgcccaggacagccaaacaacccccagtcccgccccccaggaaaaaacggatctctcgacaactggcctcgaccctcccagctcccttagagaacgctgagctctgcacacaggcgatggccttggagacacccacgccgggtccacccagagagggccaaagccctgcttctcaggctgggactcagcaccctcctgcccaggccactgcccattcccagagctctccagagttcaagggctccctggcctccctctcagacagcttgggggtgtctgtcatggccaccgaccaggactcctactccaccagcagcacggaggaggagctggagcagttcagcagccccagcgtgaagaagaagccctccatgatcctgggcaaggctcggcaccggctgagctttgccagtttcagcagcatgttccacgctttcctctccaacaaccgcaagctgtacaagaaggtggtggagctggcgcaggacaagggctcgtactttggcagcctggtgcaggactacaaggtgtacagcctggagatgatggcgcgccagacctccagcacggagatgctgcaggagattcgcaccatgatgacccagctcaagagctacctgctgcagagcaccgagctcaaggccctggtggaccccgccctgcactccgaggaggagctcgaagcaattgtagagtctgccttgtacaaatgtgtcctgaagcccctgaaggaagccatcaactcatgcctgcatcagatccacagcaaggatggttcgctgcagcagctcaaggagaaccagttagtgatcctggccaccaccaccactgacctaggtgtgaccaccagcgtgccggaggtgcccatgatggagaagttcctgcagaagttcaccagcatgcacaaggcctactcacctgagaagaagatctccatcctgctcaagacctgcaaactcatctacgactccatggccctcggcaacccagggaagccctatggggcggatgacttcctgcctgtgctcatgtatgtgctggcccgcagcaacctcacggagatgcttctcaatgtggagtacatgatggagctcatggaccccgccctgcagctgggggagggttcctactatctgaccaccacctacggggccctggagcacatcaagagctacgacaagatcacggtgacccggcagctgagtgtggaggtgcaggactccatccaccgctgggagcgccggcgtactctcaacaaggcccgggcctcccgctcctccgtacaggacttcatctgcgtgtcgtacctggagcccgagcagcaggcgcggacgctggcgtcgcgggcggacacccaggcccaggcgctgtgcgcgcagtgcgcggagaagttcgcggtggagcggccgcaggcgcaccggctgttcgtgctggtggacgggcgctgcttccagctggcggacgacgcgctgccgcactgcatcaagggctacctgctgcgcagcgagcccaagcgcgacttccactttgtctaccggcccctggacggtggtggcggcggcggcgggagcccgccctgcctggtggtgcgggagcccaacttcctgtgaggccctcccggggcgcctcccctcacccccaggcgcacgtctggccccgcctctggctgcgcactcccgaccgcgacgtccacgcagcagagggacatgggccattccatgacgtgcccaggccaacgtcgcaggacagttgtgaaaataacatgacgctcgtccaaggccacttcctgagggcaagtcctaatagccctgagacaccgagacggcatgttcttcattagacggaaagggaaactgaggctcaggagagaggcgctccaggccgctgcagccaacaaaccggcgccctcttcacacgtagctcctcaggccattccccatgagtcccccacacccaccccatcctcggtctttgcaaagaagggcccgagcttagtttccccaggactggcctaggaaggagcaccggccacagctgctccccgtgccactcagggtggacccagcatctcaggagcacctcagggtgtcggttaagagacaggcctccacccctgcaccagagcctgctcttagctcccggtgcccccagaccccgcagctctgtgcccggcaagaagcagctagacacacgccagggcgccaagcacggccagctccgcggacccatggacaagcccagccccgcctcagggaaaacagggcctttccctacaggacacgccccagagctgtggcagattgcaggagccatcgtgtggggagaatttaataaaagcccttttgaaaaaaaaaaaaaaaaaaaaaaaaaaaaaaaaaaaaaaaaaaaaaaaaaaaaaaaaaaaaaaaaaaaaaaaaaaaaaaaaaa

SEQ ID NO: 74 - protein, 497 aa, Homo sapien
MALETPTPGPPREGQSPASQAGTQHPPAQATAHSQSSPEFKGSLASLSDSLGVSVMATDQDSYSTSSTEEELEQFSSPSVKKKPSMILGKARHRLSFASFSSMFHAFLSNNRKLYKKVVELAQDKGSYFGSLVQDYKVYSLEMMARQTSSTEMLQEIRTMMTQLKSYLLQSTELKALVDPALHSEEELEAIVESALYKCVLKPLKEAINSCLHQIHSKDGSLQQLKENQLVILATTTTDLGVTTSVPEVPMMEKFLQKFTSMHKAYSPEKKISILLKTCKLIYDSMALGNPGKPYGADDFLPVLMYVLARSNLTEMLLNVEYMMELMDPALQLGEGSYYLTTTYGALEHIKSYDKITVTRQLSVEVQDSIHRWERRRTLNKARASRSSVQDFICVSYLEPEQQARTLASRADTQAQALCAQCAEKFAVERPQAHRLFVLVDGRCFQLADDALPHCIKGYLLRSEPKRDFHFVYRPLDGGGGGGGSPPCLVVREPNFL

SEQ ID NO: 75 - DNA, 3352 bp, Homo sapien
acgagggacgcagccatggcggaggcggctttggaagccgtgcggagcgagttacgagaattcccggccgctgcaagggagctctgcgtgcctcttgctgtgccctacctggacaaacccccaactccgctccacttctaccgggactgggtctgccccaacaggccgtgcattatccgcaacgctctgcagcactggccggccctccagaagtggtccctcccctatttcagagccacagtgggctccacagaggtgagtgtggccgtgaccccagatggttacgcggatgccgtgagaggggatcgcttcatgatgccagctgagcgccgcctgcccctgagcttcgtgctggatgtgctggagggccgggcccagcaccctggagtcctctatgtgcagaagcagtgctccaacctgcccagcgagctgccccagctgctgcctgatctggaatcccatgtgccctgggcctccgaagccctgggaaagatgcccgatgctgtgaacttctggctgggggaggcggctgcagtgacttctttgcacaaggaccactatgagaacctctactgcgtggtctcaggagagaagcatttcctgttccatccgcccagcgaccggcccttcatcccctatgagctgtacacgccggcaacctaccagctaactgaagagggcacctttaaggtggtggatgaagaggccatggagaaggcagaggtgtccaggacctgcctgctcacggttcgtgtcctgcaggcccatcgcctaccctctaaggacctagtgaccccctctgactgctacgtgactctctggctgcccacggcctgcagccacaggctccagacacgcacggtcaagaacagcagtagccctgtctggaaccagagctttcacttcaggatccacaggcagctcaagaatgtcatggaactgaaagtctttgaccaggacctggtgaccggagatgaccctgtgttgtcagtactgtttgatgcggggactctgcgggctggggagttccggcgcgagagcttctcactgagccctcagggtgaggggcgcctggaagttgaatttcgcctgcagagtctggctgaccgtggcgagtggctcgtcagcaatggcgttctggtggcccgggagctctcctgcttgcacgttcaactggaggagacaggagaccagaagtcctcagagcacagagttcagcttgtggttcctgggtcctgtgagggtccgcaggaggcctctgtgggcactggcaccttccgcttccactgcccagcctgctgggagcaggagctgagtattcgcctgcaggatgcccccgaggagcaactaaaggcgccactgagtgccctgccctctggtcaagtggtgaggcttgtcttccccacgtcccaggagcccctgatgagagtggagctgaaaaaagaagcaggactgagggagctggccgtgcgactgggcttcgggccctgtgcagaggagcaggccttcctgagcaggaggaagcaggtggtggccgcggccttgaggcaggccctgcagctggatggagacctgcaggaggatgagatcccagtggtagctattatggccactggtggtgggatccgggcaatgacttccctgtatgggcagctggctggcctgaaggagctgggcctcttggattgcgtctcctacatcaccggggcctcgggctccacctgggccttggccaacctttatgaggacccagagtggtctcagaaggacctggcagggcccactgagttgctgaagacccaggtgaccaagaacaagctgggtgtgctggcccccagccagctgcagcggtaccggcaggagctggccgagcgtgcccgcttgggctacccaagctgcttcaccaacctgtgggccctcatcaacgaggcgctgctgcatgatgagccccatgatcacaagctctcagatcaacgggaggccctgagtcatggccagaaccctctgcccatctactgtgccctcaacaccaaagggcagagcctgaccacttttgaatttggggagtggtgcgagttctctccctacgaggtcggcttccccaagtacggggccttcatcccctctgagctctttggctccgagttctttatggggcagctgatgaagaggcttcctgagtcccgcatctgcttcttagaaggtatctggagcaacctgtatgcagccaacctccaggacagcttatactgggcctcagagcccagccagttctgggaccgctgggtcaggaaccaggccaacctggacaaggagcaggtcccccttctgaagatagaagaaccaccctcaacagccggcagratagctgagtttttcaccgatcttctgacgtggcgtccactggcccaggccacacataatttcctgcgtggcctccatttccacaaagactactttcagcatcctcacttctccacatggaaagctaccactctggatgggctccccaaccagctgacaccctcggagccccacctgtgcctgctggatgttggctacctcatcaataccagctgcctgcccctcctgcagcccactcgggacgtggacctcatcctgtcattggactacaacctccacggagccttccagcagttgcagctcctgggccggttctgccaggagcaggggatcccgttcccacccatctcgcccagccccgaagagcagctccagcctcgggagtgccacaccttctccgaccccacctgccccggagcccctgcggtgctgcactttcctctggtcagcgactccttccgggagtactcggcccctggggtccggcggacacccgaggaggcggcagctggggaggtgaacctgtcttcatcggactctccctaccactacacgaaggtgacctacagccaggaggacgtggacaagctgctgcacctgacacattacaatgtctgcaacaaccaggagcagctgctggaggctctgcgccaggcagtgcagcggaggcggcagcgcaggccccactgatggccggggcccctgccacccctaactctcattcattccctggctgctgagttgcaggtgggaactgtcatcacgcagtgcttcagagcctcgggctcaggtggcackgtcccagggtccaggctgagggctgggagctcccttgcgcctcagcagtttgcagtggggtaaggaggccaagcccatttgtgtaatcacccaaaaccccccggcctgtgcctgttttcccttctgcgctaccttgagtagttggagcacttgatacatcacagactcatacaaaaaaaaaaaaaaaaaa

SEQ ID NO: 76 - protein, 1012 aa, Homo sapien
MAEAALEAVRSELREFPAAARELCVPLAVPYLDKPPTPLHFYRDWVCPNRPCIIRNALQHWPALQKWSLPYFRATVGSTEVSVAVTPDGYADAVRGDRFMMPAERRLPLSFVLDVLEGRAQHPGVLYVQKQCSNLPSELPQLLPDLESHVPWASEALGKMPDAVNFWLGEAAAVTSLHKDHYENLYCVVSGEKHFLFHPPSDRPFIPYELYTPATYQLTEEGTFKVVDEEAMEKAEVSRTCLLTVRVLQAHRLPSKDLVTPSDCYVTLWLPTACSHRLQTRTVKNSSSPVWNQSFHFRIHRQLKNVMELKVFDQDLVTGDDPVLSVLFDAGTLRAGEFRRESFSLSPQGEGRLEVEFRLQSLADRGEWLVSNGVLVARELSCLHVQLEETGDQKSSEHRVQLVVPGSCEGPQEASVGTGTFRFHCPACWEQELSIRLQDAPEEQLKAPLSALPSGQVVRLVFPTSQEPLMRVELKKEAGLRELAVRLGFGPCAEEQAFLSRRKQVVAAALRQALQLDGDLQEDEIPVVAIMATGGGIRAMTSLYGQLAGLKELGLLDCVSYITGASGSTWALANLYEDPEWSQKDLAGPTELLKTQVTKNKLGVLAPSQLQRYRQELAERARLGYPSCFTNLWALINEALLHDEPHDHKLSDQREALSHGQNPLPIYCALNTKGQSLTTFEFGEWCEFSPYEVGFPKYGAFIPSELFGSEFFMGQLMKRLPESRICFLEGIWSNLYAANLQDSLYWASEPSQFWDRWVRNQANLDKEQVPLLKIEEPPSTAGRIAEFFTDLLTWRPLAQATHNFLRGLHFHKDYFQHPHFSTWKATTLDGLPNQLTPSEPHLCLLDVGYLINTSCLPLLQPTRDVDLILSLDYNLHGAFQQLQLLGRFCQEQGIPFPPISPSPEEQLQPRECHTFSDPTCPGAPAVLHFPLVSDSFREYSAPGVRRTPEEAAAGEVNLSSSDSPYHYTKVTYSQEDVDKLLHLTHYNVCNNQEQLLEALRQAVQRRRQRRPH

SEQ ID NO: 77 - DNA, 4311 bp, Homo sapien
ccagacagccttgtatgggaagatgggaagggtgaggtcgccacatccttatgggcaccggaagttcatcactatgtctgatggagccacttctacattcgacctcttcgagcccttggctgagcactgtgttggagatgatatcaccatggtcatctgccctggaattgccacacaattcaaaagttggatctgagtttggagaaagatatttccaacctaagtgggtactattttgaaaccagatttttaatttaatagcctatatttgtagtctgttggataggtgtttccaaagtgtgtcttctcaagtgaaaacgcaactctaggtttcaagtactccttttctccgatcctgtggtacttgaatatccaaaaaccctgcactttgaacaatcagctgttgctatctggaactaaacagaactatgagtaaaattgcctggatactttaaaaagatatttttcctccttcatctcctttgactccaggacagactggaatataagtagtgggtctgcatggatgtttcagggatcaaaggagccacctgggcgcctgagtgccaaccctcagggccacaggtgggtgtggtttgggcacgggtccaagtgactgtgacgggacccctgggcatggggccaggtctgtaacctgaagaagttgttttctgacaatcaccaaatcatccgaatgacatcaaaagcagcccttatctcagagaccgagatttctgtggtctcaacttcgctttggtataatttctggcactcaccagcctctatcattatgactttccccccagtgtattatttctctaataggtttccttttcacgttcttttagcacagactggcactttaccctctcaatttggaagttagcccctctcctctgttacttttcccttcacccaactacagctgtgatctagaacattcatagtcatatttctgctactactaccttcatttatcaagactttttatgagaataggtaaaccaagcaataacttcctaggactgaatcaccaccccagaagagcgagaggctcctttcatatgcctgaggccacaccccttaacctgttctgacaaaatagtggctggcccatgtaccagctccattcagaaattcaggaagagaaaagacagccctgttgtcacacaaaccggtgtgggggagggtggagcctggtctgcacggcagtcctggtggcccctgtggaggacaggcagggctggcagcatagcctttgttgccacacaaccggaatttgctcccccaggactgtgggagccagtgtcccagctgaaatctttttagtgtgtggctctgaatggcactcacattccattttggctcacatgaaactaactgaagccctttgttcaagcttcaggctcttaggcatggaaatgagaatgtgactgtggctgtcttacaggaaaattcttgtttgtccctgaatgagagcacagaggcattgaattcacagagctgcaaacttgcctgataaatgagggagtggcagtttatagataggtcatcttttttccttcctccaggtgtccttgcctttcttcccaaagtcattcatttctgatgagtatatgaatccccctcttgctagtaaggttctatttgggctaaaacaaggctgaatttttaaagagtatttgaatatattttagaatcaaattgaggctataaattgcatcaatctggacaattccattgcaggaataatatgttaaaaaccaatggggagaagcacccacatctctcctgtagcactccgtgtctcataagcaatttgaagacacttacaagtaactgattccagtcaaattaggattaactgactcaaaaaatggtgtcaagtttctttaatgtttttatgttagaagtgagtttaacagacttgaagaaaactgttatcttttcctgctgtgagtttacacaaatgattccagagcagaatgaaagcagaaagctgttggttacaatattcttttaacctctctgcagcattttacacttactgggaaccttatgattcaccgtaagagtggaaatatacctgagttcgtgtcctaatggtctctaattcacattggatcgtgggcaaatcacctcacctctctgagcctgttccctcctcttagaccatctctaagaccacttcatctatttacacatcatttgcttgaacattgctgaacatctgcgtgaacttggcctctccagcccttgcaggtggaaacagctgtgtcaaggctcaaggctcacgctgaggggacttggagggagggggcttctgcattaagctttcctggtgaagacccttgatcttgtccaaagccctgtgtctttgactggcttctcttcagagtccccgttgtcatcgtaagacccttgctgtttggagggtggtcttgtgactgtggcagctgctggccgctggaatgaggagcctatctccatcctccagtgtgactcaggcagagcattgagaattcccagggcagaaatccttcctgctcaggctttcattctaaaactacagtcttcattaaagctgaactttctgggtagctgagcttatatgcccggcatctgaatgagagctctctttgtaactgtgtgacttgagatctagtttgccagctcctgggaaacaatacatgtgttcttgtttgtgtttgctcagcaagcagatgtctgagatgtaagaagcttttcttttcctgtggcattgattctgacttagagctgaagtaaagatcactgaaacatcacgtcaagttgaagtcactcataggtctttgtcctttaggcaggacaggagagtcattaagaagcatttcactgtagcattctatcacaatatcatctggaattgttttctttgcccagaaagccttaacttgcctctagagaatccctggtattacaacgatattgcggcattagaattccaactcttctgctgtggaagtttgaagcgaagctgcagcaaaaccagagaatttcctcaagtggcctgtaggctccttgttatcttatgcccccacccctccctcaacaatatgagtgatccagaactggcccaaacacctcagctctggtccctttttgcccttcttggccttactctgttgttcaaagccactttggattgcttggatgcttcgaacagccatgaaaagtagcctgcctgtggcatttagaggccaagcaattgacagaaagggtttcttctacctctgttatctaagcagagggaagtaaacttctcaccgccccccacccctcactgcccccgattacactagaattgctttcgccaaattgtagttgaagctaaggaaggggaatctggcccctgctgggagagggaactggaatgccacacaaggcaaggcctgcttccttccttcccctctgctgctgctgcctcggaacgctgcagcccaggcttcctcccacagtggcccttggaagcaggccgcagagtagacagctgctccttttggaagagtcagtcccctgtgttttctgaactgtttttcctagcatgtatgtgggtagagctttcatgcatctctagtaataataagctgaaattagttttttttttaattctccaatttaaaacttttaattaaaaagtaaattttaatgtcgaaaatgcaaacttggggagggcagaaagatcacacacaaggctgtcacttcatacttgcaggattgcacagcagccgggcagaggcgctcctcacttcccagatggggcggcgggcagcagagacgcacctcacttcctagacagtgcggcaccaggcacaggcacacctcacttcccagacagttgggcggcccaggcaagcgctcctcacttccccagatggggcggctcccgggaagcggggctccctcacttcccagacagggtggccaggcagaggtgctcctcacttcccagaacaattctttatgaatttgataaaggactgaagtgcaactgaaagctgctagtgatgatctggtaatatacaatttgtccagtagccagtttgtttttattgtgttttctaaccataagagatcattaaaggcaaagcctgtatgacgctgtacacacacaaaaaaatggtcaccgcaggccatactaccaatgaaatggtaggtaaacaaatcttctggtcaagagaaaaaaaaaagaaatagcactctgcatgctttgctctacaagatgaatttccctagaaagaatccaatgaaggccgggcatagtggctcact

SEQ ID NO: 78 - protein, 64 aa, Homo sapien
QTALYGKMGRVRSPHPYGHRKFITMSDGATSTFDLFEPLAEHCVGDDITMVICPGIATQFKSWI

SEQ ID NO: 79 - DNA, 2895 bp, Homo sapien
gagatgcctgaacccagccttggggaatctcacagccctcacctacctcaacctcagccgaaaccagctgtcgctgctgccaccctacatctgccagctgcccctgagggtcctcatcgtcagcaacaacaagctgggagccctgccccctgacatcggcaccctgggaagcctgcgacagcttgacgtgagcagcaacgagctccaatccctgccctcggaactgtgtggcctctcttccctgcgggacctcaatgtccggaggaaccagctcagtacgctgcccgaagagctgggggacctccctctggtccgcctggatttctcctgtaaccgcgtctcccgaatcccagtctccttctgccgcctgaggcacctgcaggtcattctgctggacagcaaccctctgcagagtccacctgcccaggtctgcctgaaggggaaacttcacatcttcaagtatttgtccacagaggccgggcagcgtgggtcggccctgggggacctggccccttctcggcccccgagtttcagtccctgccctgcagaggatctatttccgggacatcggtacgatggtgggctggactcaggcttccacagcgttgatagtggcagcaagaggtggtctggaaatgagtcaacagatgaattttcagagctgtcattccggatctcagagctggcccgggagccccgggggcccagagaacgcaaggaggatggctcagcggacggagaccctgtgcagattgacttcatcgacagccatgtccccggggaggatgaagagcgaggcactgtggaggagcagcgaccacccgaattaagccctggggcaggggacagggagagggcaccaagcagcaggcgggaggagccggcaggggaggagcggcggcgcccggacaccttgcagctgtggcaggagcgggaacggcggcagcagcagcagagcggggcgtggggggccccgaggaaggatagcctcttgaagccagggctcagggctgttgtgggaggggccgccgccgtgtccactcaagccatgcacaacggctcgcctaagtccagtgcctcccaagcaggggctgcagcggggcagggagcccccgcccctgcccctgcctcccaagagccccttcccatagctggaccagcgacagcacctgctccacggccacttggctccattcagagaccaaacagcttcctcttccgttcctcctctcagagtggctcaggcccttcctcaccagactctgtcctgagacctcggcggtacccccaggttccagatgagaaggacttaatgactcagctgcgccaggtccttgagtcccggctgcagcggcccctgcctgaggacctggccgaggctctggccagtggggtcatcctgtgccagctggccaaccagctacggccgcgctccgtgcccttcatccatgtgccctcccctgctgtgccaaaactcagtgccctcaaggctcggaagaatgtggagagttttctagaagcctgtcgaaaaatgggggtgcctgaggctgacctgtgctcgccctcggatctcctccagggcactgcccgggggctgcggaccgcgctggaggccatgaagcgggtggggggcaaggccctaccgcccctctggcccccctctggtctgggcggcttcgtcgtcttctacgtggtcctcatgctgctgctctatgtcacctacactcggctcctgggttcctaggccccaaaatcggccctccctcacccctttcccttcctctctatttataaggtccctgctccacccgaccccacctgcggtgccttcagccccaaccaaagacactagtgcacccccttcacagacactgacctcagaggccccactctggtgcccccagaccctgggcccccagcctctggcctccctccagtagccccacgagtccccacctctcagtgctgacggtgccttcatgtccccgccggccctgcccctgccctctgtaccccgtgaggggtggcaggagctggagtctcccccttcctcctgtgccctccccttccccccccaacagctgctatgggggggctaaattatctctattttgtagagaggatctatatttgtaggggttcggggcccaggccgggtccctatctctgtgtataaactgtacagaccgtggccgccctgcctgtgtgtgtgtgtgtgcgcgcgcgcgcgcgtctgctccgcgtgttggtggctgtggccatggctctgtgcccaccagcatctccctcctgagatgccggcctctcatgctcccggagcgtccgccaaccccccgtgtcacctcccttctgttatcgctgacagctttcttgcgtctcatttgtcgccgagccccgagcgcacggtgatgctcgggtctgcccccgaccccctgccacaggccggaagccgcagggggcaccgtggggaagctaacccggccccttcccccaggagtcactgtgccagccccaccacatcctggaagaggagggggccccgggaaggggcctcccctacatcgctgctgtcgtccacgccctgctggaccggccttaggggtgaaggtgggggcacagggcccaccccgcccgggaccccgggagcagaagacgcgcctgggctccgcgctctcagagaagcacgtggtgagggtggcctgggcctgggcacccttggcctgccggcctggctgcctctggggtcgagggtctgggtggaaggaccgcgggtgtcgcaggtgtcgtgtcagccgcaataaacagaagccagaagccctctgggtggccctcagaaaaaaaaaaaaaaaaaaaaaaaaaaaaaaaaaaaaaaaaaaaaaaaaaaaaaaaaaaaaa

SEQ ID NO: 80 - DNA, 5701 bp, Homo sapien
ctgcccaccatctttgtccctggcaaagtgggttttgcgcagtggcttagacctagaaaagaatcgtgacgggcaggaaaccattacaccaccacctgggctgtgctctccggctcccgccgccacccccgccctcgccttcgcctccgctccggtgcacattaaagatccaaagtcatgactgactccaagtatttcacaaccaataaaaaaggagaaatatttgaactaaaagctgaactcaacaatgaaaagaaagaaaagagaaaggaggctgtgaagaaagtgattgctgctatgaccgtggggaaggatgttagttctctctttccagacgtagtgaactgtatgcagactgacaatctggaactaaagaagcttgtgtatctctacttgatgaactacgccaagagtcagccagacatggccatcatggctgtaaacagctttgtgaaggactgtgaagatcctaatcctttgattcgagccttggcagtcagaaccatggggtgcatccgggtagacaaaattacagaatatctctgtgagccgctccgcaagtgcttgaaggatgaggatccctatgttcggaaaacagcagcagtctgcgtggcaaaactccatgatatcaatgcccaaatggtggaagatcagggatttctggattctctacgggatctcatagcagattcaaatccaatggtggtggctaatgccgtagcggcattatctgaaatcagtgagtctcacccaaacagcaacttacttgatctgaacccacagaacattaataagctgctgacagccctgaatgaatgcactgaatggggccagattttcatcctggactgcctgtctaattacaaccctaaagatgatcgggaggctcagagcatctgtgagcgggtaactccccggctatcccatgccaactcagcagtggtgctttcagcggtaaaagtcctaatgaagtttctagaattgttacctaaggattctgactactacaatatgctgctgaagaagttagcccctccacttgtcactttgctgtctggggagccagaagtgcagtatgtcgccctgaggaacatcaacttaattgtccagaaaaggcctgaaatcttgaagcaggaaatcaaagtcttctttgtgaagtacaatgatcccatctatgttaaactagagaagttggacatcatgattcgtttggcatctcaagccaacattgctcaggttctggcagaactgaaagaatatgctacagaggtggatgttgactttgttcgaaaagctgtgcgggccattggacggtgtgccatcaaggtggagcaatctgcagagcgctgtgtaagcacattgcttgatctaatccagaccaaagtgaattatgtggtccaagaagcaattgttgtcatcagggacatcttccgcaaataccccaacaagtatgaaagtatcatcgccactctgtgtgagaacttagactcgctggatgagccagatgctcgagcagctatgatttggattgtgggagaatatgctgaaagaattgacaatgcagatgagttactagaaagcttcctggagggttttcacgatgaaagcacccaggtgcagctcactctgcttactgccatagtgaagctgtttctcaagaaaccatcagaaacacaggagctagtccagcaggtcttgagtttggcaacacaggattctgataatcctgaccttcgagaccggggctatatttattggcgccttctctcaactgaccctgttacagctaaagaagtagtcttgtctgagaagccactgatctctgaggagacggaccttattgagccaactctgctggatgagctaatctgccacattggttctttggcctctgtgtatcataagcctcccaatgcttttgtggaaggaagtcatggaattcatcgtaaacacttgccaattcatcatgggagcactgatgcaggtgacagccctgttggcactaccactgcaacgaacctggaacagcctcaggttatcccctctcaaggtgatcttctaggggatcttttaaaccttgacctcggtcccccagtcaatgtgccacaggtgtcctccatgcagatgggagcagtggatctcctaggaggaggactagatagtctggtgggacaatccttcatcccatcatcggtgcctgcaacctttgctccttcacctacacctgctgtggtcagcagtggactgaatgacctgtttgaactctccacagggataggcatggcacctggtggatatgtggctcctaaggctgtctggctacctgcagtaaaggctaaaggcttggagatttccggaacatttactcaccgccaagggcacatctatatggaaatgaacttcaccaataaagctctgcagcacatgacagattttgcaatccagtttaacaaaaatagctttggtgtcatccccagcactcctctggccatccatacaccactgatgccaaaccagagcattgatgtctccctgcctctcaataccttgggcccagtcatgaagatggaacctctgaataacctccaggtggctgtgaaaaacaatatcgatgtcttctacttcagctgcctcatcccactcaatgtgctttttgtagaagatggcaaaatggagcgccaggtcttccttgcaacatggaaggatattcccaatgaaaatgaacttcagtttcagattaaggaatgtcatttaaatgctgacactgtttccagcaagttgcaaaacaacaatgtttatactattgccaagaggaatgtggaagggcaggacatgctgtaccaatccctgaagctcactaatggcatttggattttggccgaactacgtatccagccaggaaaccccaattacacgctgtcactgaagtgtagagctcctgaagtctctcaatacatctatcaggtctacgacagcattttgaaaaactaacaagactggtccagtacccttcaaccatgctgtgatcggtgcaagtcaagaactcttaactggaagaaattgtattgctgcgtagaatctgaacacactgaggccacctagcaaggtagtaactagtctaacctgtgctaacattagggcacaacctgttggatagttttagcttcctgtgaacatttgtaaccactgcttcagtcacctcccacctcttgccacctgctgctgctatctgtccttacttgtgggcttctccatgctgtgccaatggctggctttttctacaccctcttttgagtgtagtttggtattttgtaattgagagctcatttcaaaagcagaaaaagacaacaaatattaaagcaaggaaaagtgtaactgaaacactgcactttactgttttatacttttgtacatatgagaaatcaagggattagtgcaaccagtagaaggcattgaaatgactgtcattaaccacacagtcctggaggcagagatgcagttacctaccctagcttttgatgggttctcttacctgtagtagccttatccctggtcatttggattttcagtttgcttttttctttttttcccctccaaactccttttccttggccaagccttcatgcttccccctttccatattataatctcatttgattgctctgcagttgggaacggtgatcttcttgaatgatgtttcagtgtgcaaaaactatagagcctgtcagcaccaaagctgacagaagttataccttactcctttcctttcccctgaacaaacctgctaatcccactaattcaggaatttgagtagagatggggaacaagaacccagatgctgtcccctcaccccctctcctgtatttctcaggtccagttcaaatctaaaattctacttttagagttgaaacagagtaataacttatctaaccctcttttcctacaaaggagaaagataaaaggcacaaaggttaccgccaaggcccgtcagctgtgtagtggcaaagccgagaccgagtctcctaagtccccgtcagtgtggttttcaccacaggactgtctcttgtcgttttcccctaatgccttctcctgccttttctgtgcctagtttttggctcttcacatattccatattgattttgacgctctgtatattggcatcaggtggcagctgaatatcttttgaattactcgaaggtaaagccagatgccagaatgaaggtgtagccagtgtttcccatatgcccctggagccccacttattgaggccagcagaataggtgcagagatgaagtgagcttagagatgttgcaaatgctctttatcccttcagctctctgatctgctctttcttcatgatacttagtctgcagggcatattaagatcatcccagaggttcaggcagttcctgtcatctctgaaaagactgggggatatgaaatcttccccctaccccacttaatgcgttggatatgatttttcaaagaatgcttcatgcccaaaataccagcctgtttagcagtgttacactgtttgatctgcgggcacttgttgcattgcctggcacccaatattcagggtccatgactaagactggtcttctcagatgccctgcttaaatcaggggcacttcaggctccacaggcgtcatgttggactgagacctaactcactggactcagaggaggaatcgtggaaaacaagagcaaaactaccccacacccctatttcatgtctgaaataaccctgtttcataccagttgcaaagcttgtggggagcggtcccacaaagcactttcttaaaccttgagaatctccaagagaaaaatatttggggaaggagggaggaaatatgtcccttgcacaccacccctgaagcacatggcagtaggaaacagcataggattgtatgtgggaggtggataggtcggtgatgtgtggagcggaaaagcaggttggtaaagttcccttcttgggacttattcctggagtcagtggatacaagtagtgcagaaggttcacactgcaaatagtgttctcatctcaaagcaaactatcattccagaaggaaaagtgtgtcagggcaagcagacaacacaatttcctatcagaatatgtccctcaacccccgaaacaaggcttctctcagcctccccaccagtgatggataacagctcctattctcagctgacctgactgagccaacccatgaactcttcactccttggggaagccacctcccatcacacccctgagcagagttagggaggaattctacttcccataaaaggacctctcctgagaggcaaaacctgttgcctccaccacggcttccctcttggctcattccaagcttggccaaattggggaagtgggatggaggttgccctgcatcccccctcctctgcctgagtgtgtctttgtaatgtcagctggcatcatacaaagagcaggagaagcaaacacccagaactcttttgctggtcagagattccctgagtgtctgtcctcacccaagcctgctctgtgtctgtgttgtgaagcttgagactctggaaagaaatggggagggggggcaggggaaatgttgccctaagaatgcttctcattcctctgttcttattgggtcctgtttttcgggagggtgggggttgggggaagcttgaccttgtgtcttcgtcaataaactcacatttacac

SEQ ID NO: 81 - protein, 937 aa, Homo sapien
MTDSKYFTTNKKGEIFELKAELNNEKKEKRKEAVKKVIAAMTVGKDVSSLFPDVVNCMQTDNLELKKLVYLYLMNYAKSQPDMAIMAVNSFVKDCEDPNPLIRALAVRTMGCIRVDKITEYLCEPLRKCLKDEDPYVRKTAAVCVAKLHDINAQMVEDQGFLDSLRDLIADSNPMVVANAVAALSEISESHPNSNLLDLNPQNINKLLTALNECTEWGQIFILDCLSNYNPKDDREAQSICERVTPRLSHANSAVVLSAVKVLMKFLELLPKDSDYYNMLLKKLAPPLVTLLSGEPEVQYVALRNINLIVQKRPEILKQEIKVFFVKYNDPIYVKLEKLDIMIRLASQANIAQVLAELKEYATEVDVDFVRKAVRAIGRCAIKVEQSAERCVSTLLDLIQTKVNYVVQEAIVVIRDIFRKYPNKYESIIATLCENLDSLDEPDARAAMIWIVGEYAERIDNADELLESFLEGFHDESTQVQLTLLTAIVKLFLKKPSETQELVQQVLSLATQDSDNPDLRDRGYIYWRLLSTDPVTAKEVVLSEKPLISEETDLIEPTLLDELICHIGSLASVYHKPPNAFVEGSHGIHRKHLPIHHGSTDAGDSPVGTTTATNLEQPQVIPSQGDLLGDLLNLDLGPPVNVPQVSSMQMGAVDLLGGGLDSLVGQSFIPSSVPATFAPSPTPAVVSSGLNDLFELSTGIGMAPGGYVAPKAVWLPAVKAKGLEISGTFTHRQGHIYMEMNFTNKALQHMTDFAIQFNKNSFGVIPSTPLAIHTPLMPNQSIDVSLPLNTLGPVMKMEPLNNLQVAVKNNIDVFYFSCLIPLNVLFVEDGKMERQVFLATWKDIPNENELQFQIKECHLNADTVSSKLQNNNVYTIAKRNVEGQDMLYQSLKLTNGIWILAELRIQPGNPNYTLSLKCRAPEVSQYIYQVYDSILKN

SEQ ID NO: 82 - DNA, 1571 bp, Homo sapien
ggcacgagggcgcggagcggagcggcggcgggcgcagctagcgggtcggccgcggagcggaggtgcagctcggcttcccccggcacccctccccctcgggcgccagccccacccctccgccggccgggccgaccccgccgtactatcccctgcggcgcgagcccggggcggctccaagcgccccccagcagacccccatcatgggcagccagagctccaaggctccccggggcgacgtgaccgccgaggaggcagcaggcgcttcccccgcgaaggccaacggccaggagaatggccacgtgaaaagcaatggagacttatcccccaagggtgaaggggagtcgccccctgtgaacggaacagatgaggcagccggggccactggcgatgccatcgagccagcaccccctagccagggtgctgaggccaagggggaggtcccccccaaggagacccccaagaagaagaagaaattctctttcaagaagcctttcaaattgagcggcctgtccttcaagagaaatcggaaggagggtgggggtgattcttctgcctcctcacccacagaggaagagcaggagcagggggagatcggtgcctgcagcgacgagggcactgctcaggaagggaaggccgcagccacccctgagagccaggaaccccaggccaagggggcagaggctagtgcagcctcagaagaagaggcagggccccaggctacagagccatccactccctcggggccggagagtggccctacaccagccagcgctgagcagaatgagtagctaggtaggggcaggtgggtgatctctaagctgcaaaaactgtgctgtccttgtgaggtcactgcctggacctggtgccctggctgccttcctgtgcccagaaaggaaggggctattgcctcctcccagccacgttccctttcctcctctccctcctgtggattctcccatcagccatctggttctcctcttaaggccagttgaagatggtcccttacagcttcccaagttaggttagtgatgtgaaatgctcctgtccctggccctacctccttccctgtccccacccctgcataaggcagttgttggttttcttccccaattcttttccaagtaggttttgtttaccctactccccaaatccctgagccagaagtggggtgcttatactcccaaaccttgagtgtccagccttcccctgttgtttttagtctcttgtgctgtgcctagtggcacctgggctggggaggacactgccccgtctaggtttttataaatgtcttactcaagttcaaacctccagcctgtgaatcaactgtgtctcttttttgacttggtaagcaagtattaggctttggggtggggggaggtctgtaatgtgaaacaacttcttgtctttttttctcccactgttgtaaataacttttaatggccaaaccccagatttgtacttttttttttttctaactgctaaaaccattctcttccacctggttttactgtaacatttggaaaaggaataaatgtcgtccctttttaaaaaaaaaaaaaaaaaaaaaaaaa

SEQ ID NO: 83 - protein, 195 aa, Homo sapien
MGSQSSKAPRGDVTAEEAAGASPAKANGQENGHVKSNGDLSPKGEGESPPVNGTDEAAGATGDAIEPAPPSQGAEAKGEVPPKETPKKKKKFSFKKPFKLSGLSFKRNRKEGGGDSSASSPTEEEQEQGEIGACSDEGTAQEGKAAATPESQEPQAKGAEASAASEEEAGPQATEPSTPSGPESGPTPASAEQNE

SEQ ID NO: 84 - DNA, 3137 bp, Homo sapien
gcggagcgtgtgagcagtactgcggcctcctctcctctcctaacctcgctctcgcggcctacctttacccgcccgcctgctcggcgaccagcggggatcctcccccagccgcaagtccacgaagaaagcaacgaatgaaaattatgaagacaacgagaagtcagactcctccgggtcgcgctccagctgcttcggcttcgtcgcctactctgtgaactccggggagagatctcgagtcaagattaagaccttaacccaccaacctgcctgttcggacaccccccgggccggccgctgtctgtccccttctccatcgccctctcccagaaagctccggtgcttggaccagctagagtctgagaaagaggagaggcgcgaacgccactccaaaaagagaagggttaaagagggcaaccctaacgatacgcttgactttctgtggctgggaacaccttccaccatgaccacctcagcaagttcccacttaaataaaggcatcaagcaggtgtacatgtccctgcctcagggtgagaaagtccaggccatgtatatctggatcgatggtactggagaaggactgcgctgcaagacccggaccctggacagtgagcccaagtgtgtggaagagttgcctgagtggaatttcgatggctccagtactttacagtctgagggttccaacagtgacatgtatctcgtgcctgctgccatgtttcgggaccccttccgtaaggaccctaacaagctggtgttatgtgaagttttcaagtacaatcgaaggcctgcagagaccaatttgaggcacacctgtaaacggataatggacatggtgagcaaccagcacccctggtttggcatggagcaggagtataccctcatggggacagatgggcacccctttggttggccttccaacggcttcccagggccccagggtccatattactgtggtgtgggagcagacagagcctatggcagggacatcgtggaggcccattaccgggcctgcttgtatgctggagtcaagattgcggggactaatgccgaggtcatgcctgcccagtgggaatttcagattggaccttgtgaaggaatcagcatgggagatcatctctgggtggcccgtttcatcttgcatcgtgtgtgtgaagactttggagtgatagcaacctttgatcctaagcccattcctgggaactggaatggtgcaggctgccataccaacttcagcaccaaggccatgcgggaggagaatggtctgaagtacatcgaggaggccattgagaaactaagcaagcggcaccagtaccacatccgtgcctatgatcccaagggaggcctggacaatgcccgacgtctaactggattccatgaaacctccaacatcaacgacttttctgctggtgtagccaatcgtagcgccagcatacgcattccccggactgttggccaggagaagaagggttactttgaagatcgtcgcccctctgccaactgcgaccccttttcggtgacagaagccctcatccgcacgtgtcttctcaatgaaaccggcgatgagcccttccagtacaaaaattaagtggactagacctccagctgttgagcccctcctagttcttcatcccactccaactcttccccctctcccagttgtcccgattgtaactcaaagggtggaatatcaaggtcgtttttttcattccatgtgcccagttaatcttgctttctttgtttggctgggatagaggggtcaagttattaatttcttcacacctaccctcctttttttccctatcactgaagctttttagtgcattagtggggaggagggtggggagacataaccactgcttccatttaatggggtgcacctgtccaataggcgtagctatccggacagagcacgtttgcagaagggggactcttcttccaggtagctgaaaggggaagacctgacgtactctggttaggttaggacttgccctcgtggtggaaacttttcttaaaaagttataaccaacttttctattaaaagtgggaattaggagagaaggtaggggttgggaatcagagagaatggctttggtctcttgcttgtgggactagcctggcttgggactaaatgccctgctctgaacacgaagcttagtataaactgatggatatccctaccttgaaagaagaaaaggttcttactgcttggtccttgatttatcacacaaagcagaatagtatttttatatttaaatgtaaagacaaaaaactatatgtatggttttgtggattatgtgtgttttgctaaaggaaaaaaccatccaggtcacggggcaccaaatttgagacaaatagtcggattagaaataaagcatctcattttgagtagagagcaagggaagtggttcttagatggtgatctgggattaggccctcaagacccttttgggtttctgccctgcccaccctctggagaaggtgggcactggattagttaacagacgacacgttactagcagtcacttgatctccgtggctttggtttaaaagacacacttgtccacataggtttagagataagagttggctgttcaacttgagcatgttactgacagagggggtattggggttattttctggtaggaatagcatgtcactaaagcaggccttttgatattaaattttttaaaaagcaaaattatagaagtttagattttaatcaaatttgtagggtttctaggtaatttttacagaattgcttgtttgcttcaactgtctcctacctctgctcttggaggagatggggacagggctggagtcaaaacacttgtaattttgtatcttgatgtctttgttaagactgctgaagaattattttttttcttttataataaggaataaaccccacctttattccttcatttcatctaccattttctggttcttgtgttggctgtggcaggccagctgtggttttcttttgccatgacaacttctaattgccatgtacagtatgttcaaagtcaaataactcctcattgtaaacaaactgtgtaactgcccaaagcagcacttataaatcagcctaacataaaaaaaaaaaaaaaaaaaaaaaaaaaaaaaaaaaaaaaaaaaaaaaa

SEQ ID NO: 85 - protein, 373 aa, Homo sapien
MTTSASSHLNKGIKQVYMSLPQGEKVQAMYIWIDGTGEGLRCKTRTLDSEPKCVEELPEWNFDGSSTLQSEGSNSDMYLVPAAMFRDPFRKDPNKLVLCEVFKYNRRPAETNLRHTCKRIMDMVSNQHPWFGMEQEYTLMGTDGHPFGWPSNGFPGPQGPYYCGVGADRAYGRDIVEAHYRACLYAGVKIAGTNAEVMPAQWEFQIGPCEGISMGDHLWVARFILHRVCEDFGVIATFDPKPIPGNWNGAGCHTNFSTKAMREENGLKYIEEAIEKLSKRHQYHIRAYDPKGGLDNARRLTGFHETSNINDFSAGVANRSASIRIPRTVGQEKKGYFEDRRPSANCDPFSVTEALIRTCLLNETGDEPFQYKN

SEQ ID NO: 86 - DNA, 1826 bp, Homo sapien
agtatgtgtggttggggaattcatgtggaggtcagagtggaagcaggtgtgagagggtccagcagaaggaaacatggctgccaaagtgtttgagtccattggcaagtttggcctggccttagctgttgcaggaggcgtggtgaactctgccttatataatgtggatgctgggcacagagctgtcatctttgaccgattccgtggagtgcaggacattgtggtaggggaagggactcattttctcatcccgtgggtacagaaaccaattatctttgactgccgttctcgaccacgtaatgtgccagtcatcactggtagcaaagatttacagaatgtcaacatcacactgcgcatcctcttccggcctgtcgccagccagcttcctcgcatcttcaccagcatcggagaggactatgatgagcgtgtgctgccgtccatcacaactgagatcctcaagtcagtggtggctcgctttgatgctggagaactaatcacccagagagagctggtctccaggcaggtgagcgacgaccttacagagcgagccgccacctttgggctcatcctggatgacgtgtccttgacacatctgaccttcgggaaggagttcacagaagcggtggaagccaaacaggtggctcagcaggaagcagagagggccagatttgtggtggaaaaggctgagcaacagaaaaaggcggccatcatctctgctgagggcgactccaaggcagctgagctgattgccaactcactggccactgcaggggatggcctgatcgagctgcgcaagctggaagctgcagaggacatcgcgtaccagctctcacgctctcggaacatcacctacctgccagcggggcagtccgtgctcctccagctgccccagtgagggcccaccctgcctgcacctccgcgggctgactgggccacagccccgatgattcttaacacagccttccttctgctcccaccccagaaatcactgtgaaatttcatgattggcttaaagtgaaggaaataaaggtaaaatcacttcagatctctaattagtctatcaaatgaaactctttcattcttctcacatccatctacttttttatccacctccctaccaaaaattgccaagtgcctatgcaaaccagctttaggtcccaattcggggcctgctggagttccggcctgggcaccagcatttggcagcacgcaggcggggcagtatgtgatggactggggagcacaggtgtctgcctagatccacgtgtggcctccgtcctgtcactgatggaaggtttgcggatgagggcatgtgcggctgaactgagaaggcaggcctccgtcttcccagcggttcctgtgcagatgctgctgaagagaggtgccggggaggggcagagaggaagtggtctgtctgttaccataagtctgattctctttaactgtgtgaccagcggaaacaggtgtgtgtgaactgggcacagattgaagaatctgcccctgttgaggtgggtgggcctgactgttgccccccagggtcctaaaacttggatggacttgtatagtgagagaggaggcctggaccgagatgtgagtcctgttgaagacttcctctctaccccccaccttggtccctctcagatacccagtggaattccaacttgaaggattgcatcctgctggggctgaacatgcctgccaaagacgtgtccgacctacgttcctggccccctcgttcagagactgcccttctcacgggctctatgcctgcactgggaaggaaacaaatgtgtataaactgctgtcaataaatgacacccagaccttcc

SEQ ID NO: 87 - protein, 272 aa, Homo sapien
MAAKVFESIGKFGLALAVAGGVVNSALYNVDAGHRAVIFDRFRGVQDIVVGEGTHFLIPWVQKPIIFDCRSRPRNVPVITGSKDLQNVNITLRILFRPVASQLPRIFTSIGEDYDERVLPSITTEILKSVVARFDAGELITQRELVSRQVSDDLTERAATFGLILDDVSLTHLTFGKEFTEAVEAKQVAQQEAERARFVVEKAEQQKKAAIISAEGDSKAAELIANSLATAGDGLIELRKLEAAEDIAYQLSRSRNITYLPAGQSVLLQLPQ

SEQ ID NO: 88 - DNA, 925 bp, Homo sapien
ggcacgaggggccggggggcgcagctagagagccccggagccgcggcgggagaggaacgcgcagccagccttgggaagcccaggcccggcagccatggcggtggaaggaggaatgaaatgtgtgaagttcttgctctacgtcctcctgctggccttttgcgcctgtgcagtgggactgattgccgtgggtgtcggggcacagcttgtcctgagtcagaccataatccagggggctacccctggctctctgttgccagtggtcatcatcgcagtgggtgtcttcctcttcctggtggcttttgtgggctgctgcggggcctgcaaggagaactattgtcttatgatcacgtttgccatctttctgtctcttatcatgttggtggaggtggccgcagccattgctggctatgtgtttagagataaggtgatgtcagagtttaataacaacttccggcagcagatggagaattacccgaaaaacaaccacactgcttcgatcctggacaggatgcaggcagattttaagtgctgtggggctgctaactacacagattgggagaaaatcccttccatgtcgaagaaccgagtccccgactcctgctgcattaatgttactgtgggctgtgggattaatttcaacgagaaggcgatccataaggagggctgtgtggagaagattgggggctggctgaggaaaaatgtgctggtggtagctgcagcagcccttggaattgcttttgtcgaggttttgggaattgtctttgcctgctgcctcgtgaagagtatcagaagtggctacgaggtgatgtaggggtctggtctcctcagcctcctcatctgggggagtggaatagtatcctccaggtttttcaattaaacggattattttttcagaccgaaaagaaaaaaaaaaaaaaaaaaaaaa

SEQ ID NO: 89 - protein, 238 aa, Homo sapien
MAVEGGMKCVKFLLYVLLLAFCACAVGLIAVGVGAQLVLSQTIIQGATPGSLLPVVIIAVGVFLFLVAFVGCCGACKENYCLMITFAIFLSLIMLVEVAAAIAGYVFRDKVMSEFNNNFRQQMENYPKNNHTASILDRMQADFKCCGAANYTDWEKIPSMSKNRVPDSCCINVTVGCGINFNEKAIHKEGCVEKIGGWLRKNVLVVAAAALGIAFVEVLGIVFACCLVKSIRSGYEVM

SEQ ID NO: 90 - DNA, 2133 bp, Homo sapien
cgggagagcgcgctctgcctgccgcctgcctgcctgccactgagggttcccagcaccatgagggcctggatcttctttctcctttgcctggccgggagggccttggcagcccctcagcaagaagccctgcctgatgagacagaggtggtggaagaaactgtggcagaggtgactgaggtatctgtgggagctaatcctgtccaggtggaagtaggagaatttgatgatggtgcagaggaaaccgaagaggaggtggtggcggaaaatccctgccagaaccaccactgcaaacacggcaaggtgtgcgagctggatgagaacaacacccccatgtgcgtgtgccaggaccccaccagctgcccagcccccattggcgagtttgagaaggtgtgcagcaatgacaacaagaccttcgactcttcctgccacttctttgccacaaagtgcaccctggagggcaccaagaagggccacaagctccacctggactacatcgggccttgcaaatacatccccccttgcctggactctgagctgaccgaattccccctgcgcatgcgggactggctcaagaacgtcctggtcaccctgtatgagagggatgaggacaacaaccttctgactgagaagcagaagctgcgggtgaagaagatccatgagaatgagaagcgcctggaggcaggagaccaccccgtggagctgctggcccgggacttcgagaagaactataacatgtacatcttccctgtacactggcagttcggccagctggaccagcaccccattgacgggtacctctcccacaccgagctggctccactgcgtgctcccctcatccccatggagcattgcaccacccgctttttcgagacctgtgacctggacaatgacaagtacatcgccctggatgagtgggccggctgcttcggcatcaagcagaaggatatcgacaaggatcttgtgatctaaatccactccttccacagtaccggattctctctttaaccctccccttcgtgtttcccccaatgtttaaaatgtttggatggtttgttgttctgcctggagacaaggtgctaacatagatttaagtgaatacattaacggtgctaaaaatgaaaattctaacccaagacatgacattcttagctgtaacttaactattaaggccttttccacacgcattaatagtcccatttttctcttgccatttgtagctttgcccattgtcttattggcacatgggtggacacggatctgctgggctctgccttaaacacacattgcagcttcaacttttctctttagtgttctgtttgaaactaatacttaccgagtcagactttgtgttcatttcatttcagggtcttggctgcctgtgggcttccccaggtggcctggaggtgggcaaagggaagtaacagacacacgatgttgtcaaggatggttttgggactagaggctcagtggtgggagagatccctgcagaatccaccaaccagaacgtggtttgcctgaggctgtaactgagagaaagattctggggctgtcttatgaaaatatagacattctcacataagcccagttcatcaccatttcctcctttacctttcagtgcagtttcttttcacattaggctgttggttcaaacttttgggagcacggactgtcagttctctgggaagtggtcagcgcatcctgcagggcttctcctcctctgtcttttggagaaccagggctcttctcaggggctctagggactgccaggctgtttcagccaggaaggccaaaatcaagagtgagatgtagaaagttgtaaaatagaaaaagtggagttggtgaatcggttgttctttcctcacatttggatgattgtcataaggtttttagcatgttcctccttttcttcaccctcccctttgttcttctattaatcaagagaaacttcaaagttaatgggatggtcggatctcacaggctgagaactcgttcacctccaagcatttcatgaaaaagctgcttcttattaatcatacaaactctcaccatgatgtgaagagtttcacaaatctttcaaaataaaaagtaatgacttagaaactgaaaaaaaaaaaaaaaaaaaaaaaaaaaaaa

SEQ ID NO: 91 - protein, 303 aa, Homo sapien
MRAWIFFLLCLAGRALAAPQQEALPDETEVVEETVAEVTEVSVGANPVQVEVGEFDDGAEETEEEVVAENPCQNHHCKHGKVCELDENNTPMCVCQDPTSCPAPIGEFEKVCSNDNKTFDSSCHFFATKCTLEGTKKGHKLHLDYIGPCKYIPPCLDSELTEFPLRMRDWLKNVLVTLYERDEDNNLLTEKQKLRVKKIHENEKRLEAGDHPVELLARDFEKNYNMYIFPVHWQFGQLDQHPIDGYLSHTELAPLRAPLIPMEHCTTRFFETCDLDNDKYIALDEWAGCFGIKQKDIDKDLVI

SEQ ID NO: 92 - DNA, 1332 bp, Homo sapien
ccggcccgcgccccgcaggccgcccgccgcccgcgccgccatgggagtggagggctgcaccaagtgcatcaagtacctgctcttcgtcttcaatttcgtcttctggctggctggaggcgtgatcctgggtgtggccctgtggctccgccatgacccgcagaccaccaacctcctgtatctggagctgggagacaagcccgcgcccaacaccttctatgtaggcatctacatcctcatcgctgtgggcgctgtcatgatgttcgttggcttcctgggctgctacggggccatccaggaatcccagtgcctgctggggacgttcttcacctgcctggtcatcctgtttgcctgtgaggtggccgccggcatctggggctttgtcaacaaggaccagatcgccaaggatgtgaagcagttctatgaccaggccctacagcaggccgtggtggatgatgacgccaacaacgccaaggctgtggtgaagaccttccacgagacgcttgactgctgtggctccagcacactgactgctttgaccacctcagtgctcaagaacaatttgtgtccctcgggcagcaacatcatcagcaacctcttcaaggaggactgccaccagaagatcgatgacctcttctccgggaagctgtacctcatcggcattgctgccatcgtggtcgctgtgatcatgatcttcgagatgatcctgagcatggtgctgtgctgtggcatccggaacagctccgtgtactgaggccccgcagctctggccacagggacctctgcagtgccccctaagtgacccggacacttccgagggggccatcaccgcctgtgtatataacgtttccggtattactctgctacacgtagcctttttacttttggggttttgtttttgttctgaactttcctgttaccttttcagggctgacgtcacatgtaggtggcgtgtatgagtggagacgggcctgggtcttggggactggagggcaggggtccttctgccctggggtcccagggtgctctgcctgctcagccaggcctctcctgggagccactcgcccagagactcagcttggccaacttggggggctgtgtccacccagcccgcccgtcctgtgggctgcacagctcaccttgttccctcctgccccggttcgagagccgagtctgtgggcactctctgccttcatgcacctgtcctttctaacacgtcgccttcaactgtaatcacaacatcctgactccgtcatttaataaagaaggaacatcaggcatgctaaaaaaaaaaaaaaaaaaaaaaaaaaaaaaaaaaaaaaaaaaaaaaaaaaa

SEQ ID NO: 93 - protein, 236 aa, Homo sapien
MGVEGCTKCIKYLLFVFNFVFWLAGGVILGVALWLRHDPQTTNLLYLELGDKPAPNTFYVGIYILIAVGAVMMFVGFLGCYGAIQESQCLLGTFFTCLVILFACEVAAGIWGFVNKDQIAKDVKQFYDQALQQAVVDDDANNAKAVVKTFHETLDCCGSSTLTALTTSVLKNNLCPSGSNIISNLFKEDCHQKIDDLFSGKLYLIGIAAIVVAVIMIFEMILSMVLCCGIRNSSVY

SEQ ID NO: 94 - DNA, 4190 bp, Homo sapien
gctaagttagcttttcaactggcactgtatggcagcatttttggtatggttagcgtggcacatggcgaaacataaagcattttactgtacaggtaaggaatgtgccatgtgttttacctatctctctttctctctcactcccatgcacacatcctgtgtgtattcagagaccttcagaaacattcatattcattttcatgagtcagcaaaagccctatgcttgattccaacagaatatttcctttacatactttcttctcttaatttttacaaaattgtatggtaggtgtaaaagaaaatcatagtaactgtaccatattattaacccctaaatcaaactttttttgtcttgtgtatcttgatttttctgtgtgctttatagtgaagcagccgacacgagtcgttgttcataaaacagcttttgaaagttgagagcacacccctggagaaccgactgtgcttgcttacgtttggttcatgacttaaaaatcgagtacaggtgatgaaatcttggcagtgttaacaaaaaagtagtgtgtattgtgctattttttttttactctagaaacttaaccatttgtagagaaaaaggaaacaaattttcacacattgaagttcattctgacataaaattaatgataaataatcatagaaatcaagctttgtattttagcgaacataagtactttcaacaaactcaggtggtgtatcagggagacattttctgggtgtttttgtgtgttttctgtcttagaaaagaatgtgttctaatgcaaggatgtttctctgcaggagttattcctgatgaagctaaagctttgtctctgttggcaccagctaatgcagtggcaggtcttctgcctggtggtggactcctgcctactcctaacccacttacccagattggcgctgttccactggctgctttgggggctcctactcttgatcctgcccttgctgcacttgggcttcctggagcaaacttgaactctcagtctcttgctgcagatcagttgctgaagcttatgagtactgttgatcccaagttgaatcatgtagctgctggtctcgtttcaccaagtctgaaatcggatacctctagtaaagaaatagaggaagctatgaaaagagtacgagaagcacagtccctaatttctgctgctatagaaccagataagaaagaagaaaaaagaaggcattcaagatcaagatcacgttctaggaggaggaggactccctcatcttctagacacaggcggtcaagaagcagatcgagacggcggtcacattctaagtctaggagtcggcgacgatccaaaagcccaaggcggagaagatctcattccagagaaagaggtagaaggtcaaggagcacatcaaaaacaagagacaaaaagaaagaagacaaagaaaagaaacgttctaaaacaccaccaaaaagttacagcacagccagacgttctagaagtgcaagcagagtatatttgaagtaacatggaattcaagagagagagagacgacgacgaagaagcaggagtggcacaagatctcctaaaaagcctcggtctcctaaaagaaaattgtcccgctcaccatcccctaggagacataaaaaggagaagaagaaagataaagacaaagaaagaagtagggatgaaagagaacgatcaacaagcaagaagaagaagagtaaagataaggaaaaggaccgggaaagaaaatcagagagtgataaagatgtaaaacaggttacacgggattatgatgaagaggaacaggggtatgacagtgagaaagagaaaaaagaagagaagaaaccaatagaaacaggttcccctaaaacaaaggaatgttctgtggaaaagggaactggtgattcactaagagaatccaaagtgaatggggatgatcatcatgaagaagacatggatatgagtgactgaatattgcctctgagggagtccaactgtatacctgcatcagtgtcattcctttgtgtgatttcttaatgctgtatttgttcatctcaaacctagatgtatacagctctgagttataaatggttataaagctcctgttactcatattagttatttacatcaaaaagcttttagaaaatggtacgaggtaaccaattcttgtcatggtgaaatctgattgagtaaccaagcagttttactattctggtgctgcttcataacaaaaatgaaaagctgcatgcatctacagcaggcatggattgtttatgtcgtatgatatcctttattaagtaagttcacttatagtatttctataatttgattcattgccgtaatagagccatgtaggaaatgcactgattgcatgttattgtggcaagaatatcctaaatgtcattaaaatcctccaacatgatggatctacttatggtcttgtttgttgacatgacaaattaacattcttatagttacatctggaaatgagcatttgaaatagataatcctttaagccttgtggcaaaatttttgtggcttttgtttaactttgaaaggttattatgcactaaccttttttggtggctaattagggtttaaatacagaaacaagatttcaaataaaactgtctttggcagtgagtaaatagcatattttgaagtagagttgtatactttttcataagatgtttgggaatttttttcctgaagtaataatttattccacatctacatcagtgaaagctatctacctatcctgagtctatcttaaaggaaaaaaagaaaaaaaccttatctcttgcccttattttgaattttccactctttcattaatttgttttaagctccgtgttggaaaaaaggggtagtgcattttaaattgaccttcatacgcttttaaaataagacaaatctacttgataatgtacctttatttgatctcaagttgtataaaaccaataaatttgtgttactgcagtagtaatcttatgcacacggtgatttcatgttatatatgcaaagtaggcaactgttttcttagttacagaagtttcaagcttcacttttgtgcagtagaaacaaaagtaggctacagtctgtgccatgttgatgtacagtttctgaaattgttttacaagactttgataataaaacccttaaacttatgttcatgttcctgtaaaaccgtatttgtatttatttacgctactgaatgtatgacatttacctcattcattttacaaattctttccctttctgtccacatatttcagtatagtaaaaagaggaagtctatcactgtagtgataattgccatcaaaattgtcaaaaatgatttaatttctatccaaaatagtccttttcttagcttagtatcattttattgcttattttttgtgtgggaatggggttggataaagcaatgaactttagtataaacaaatcccacctatatctagcaaatttatattttcggtgaaatacagatatttgcctttctggagtagtatagaagctgtcaatatgtatctactgtacagtactaaatagtattcatttatgaaatgagtagtgtttgggtggctggggttaagggaaaatgagacttggaattgtagcttttatccaagttttgagtataaatagggttttgttttgttttttttaacctaaaaactgaaatgccatatagaaaaacagcattgtttttacagtttgtagtaagtaactttttaaagattttatcaaaaagaattttgtctatagtgagtaaaagaagttctaataatggtcctaatcactgcatttttaaaaaacaaagttcaacacaaatgacatttgttttaaactttagtagataaaaggtgaaccatgtgacatgggcatttttgtaagtcaaaaacaaatttcacatatggtaaacctaatattcacagtgtgttccctcacttgtaatctctgaatacaaatatactagcttttctaaagggaatcatttttttaaaagtagtgccactgacaagatgctacagtgaagattatccattcttaggatatttattttcagtgaacattttctgcacaaaggtagtgttgcactgggacacaagccttttaacagataaccagttgaaatcaaacactgcctccacaccgagttctgttgtgtatttgatagtaaattgatttaaaaataaaagtggtttttgttagaaa

SEQ ID NO: 95 - protein, 285 aa, Homo sapien
MINNHRNQALYFSEHKYFQQTQVVYQGDIFWVFLCVFCLRKECVLMQGCFSAGVIPDEAKALSLLAPANAVAGLLPGGGLLPTPNPLTQIGAVPLAALGAPTLDPALAALGLPGANLNSQSLAADQLLKLMSTVDPKLNHVAAGLVSPSLKSDTSSKEIEEAMKRVREAQSLISAAIEPDKKEEKRRHSRSRSRSRRRRTPSSSRHRRSRSRSRRRSHSKSRSRRRSKSPRRRRSHSRERGRRSRSTSKTRDKKKEDKEKKRSKTPPKSYSTARRSRSASRVYLK

SEQ ID NO: 96 - DNA, 2811 bp, Homo sapien
ggcacgaggggagcgcttgtttgctgcctcgtactcctccatttatccgccatgataagtgccagccgagctgcagcagcccgtctcgtgggcgccgcagcctcccggggccctacggccgcccgccaccaggatagctggaatggccttagtcatgaggcttttagacttgtttcaaggcgggattatgcatcagaagcaatcaagggagcagttgttggtattgatttgggtactaccaactcctgcgtggcagttatggaaggtaaacgagcaaaggtgctggagaatgccgaaggtgccagaaccaccccttcagttgtggcctttacagcagatggtgagcgacttgttggaatgccggccaagcgacaggctgtcaccaacccaaacaatacattttatgctaccaagcgtctcattggccggcgatatgatgatcctgaagtacagaaagacattaaaaatgttccctttaaaattgtccgtgcctccaatggtgatgcctgggttgaggctcatgggaaattgtattctccgagtcagattggagcatttgtgttgatgaagatgaaagagactgcagaaaattacttggggcgcacagcaaaaaatgctgtgatcacagtcccagcttatttcaatgactcgcagagacaggccactaaagatgctggccagatatctggactgaatgtgcttcgggtgattaatgagcccacagctgctgctcttgcctatggtctagacaaatcagaagacaaagtcattgctgtatatgatttaggtggtggaacttttgatatttctatcctggaaattcagaaaggagtatttgaggtgaaatccacaaatggggataccttcttaggtggggaagactttgaccaggccttgctacggcacattgtgaaggagttcaagagagagacaggggttgatttgactaaagacaacatggcacttcagagggtacgggaagctgctgaaaaggctaagtgtgaactctcctcatctgtgcagactgacatcaatttgccctatcttacaatggattcttctggacccaagcatttgaatatgaagttgacccgtgctcaatttgaagggattgtcactgatctaatcagaaggactatcgctccatgccaaaaagctatgcaagatgcagaagtcagcaagagtgacataggagaagtgattcttgtgggtggcatgactaggatgcccaaggttcagcagactgtacaggatctttttggcagagccccaagtaaagctgtcaatcctgatgaggctgtggccattggagctgccattcagggaggtgtgttggccggcgatgtcacggatgtgctgctccttgatgtcactcccctgtctctgggtattgaaactctaggaggtgtctttaccaaacttattaataggaataccactattccaaccaagaagagccaggtattctctactgccgctgatggtcaaacgcaagtggaaattaaagtgtgtcagggtgaaagagagatggctggagacaacaaactccttggacagtttactttgattggaattccaccagcccctcgtggagttcctcagattgaagttacatttgacattgatgccaatgggatagtacatgtttctgctaaagataaaggcacaggacgtgagcagcagattgtaatccagtcttctggtggattaagcaaagatgatattgaaaatatggttaaaaatgcagagaaatatgctgaagaagaccggcgaaagaaggaacgagttgaagcagttaatatggctgaaggaatcattcacgacacagaaaccaagatggaagaattcaaggaccaattacctgctgatgagtgcaacaagctgaaagaagagatttccaaaatgagggagctcctggctagaaaagacagcgaaacaggagaaaatattagacaggcagcatcctctcttcagcaggcatcattgaagctgttcgaaatggcatacaaaaagatggcatctgagcgagaaggctctggaagttctggcactggggaacaaaaggaagatcaaaaggaggaaaaacagtaataatagcagaaattttgaagccagaaggacaacatatgaagcttaggagtgaagagacttcctgagcagaaatgggcgaacttcagtctttttactgtgtttttgcagtattctatatataatttccttaatttgtaaatttagtgaccattagctagtgatcatttaatggacagtgattctaacagtataaagttcacaatattctatgtccctagcctgtcatttttcagctgcatgtaaaaggaggtaggatgaattgatcattataaagatttaactattttatgctgaagtgaccatattttcaaggggtgaaaccatctcgcacacagcaatgaaggtagtcatccatagacttgaaatgagaccacatatggggatgagatccttctagttagcctagtactgctgtactggcctgtatgtacatggggtccttcaactgaggccttgcaagtcaagctggctgtgccatgtttgtagatggggcagaggaatctagaacaatgggaaacttagctatttatattaggtacagctattaaaacaaggtaggaatgaggctagacctttaacttccctaaggcatacttttctagctaccttctgccctgtgtctggcacctacatccttgatgattgttctcttacccattctggaattttttttttttttaaataaatacagaaagcatcttgaaaaaaaaaaaaaaaaaa

SEQ ID NO: 97 - protein, 679 aa, Homo sapien
MISASRAAAARLVGAAASRGPTAARHQDSWNGLSHEAFRLVSRRDYASEAIKGAVVGIDLGTTNSCVAVMEGKRAKVLENAEGARTTPSVVAFTADGERLVGMPAKRQAVTNPNNTFYATKRLIGRRYDDPEVQKDIKNVPFKIVRASNGDAWVEAHGKLYSPSQIGAFVLMKMKETAENYLGRTAKNAVITVPAYFNDSQRQATKDAGQISGLNVLRVINEPTAAALAYGLDKSEDKVIAVYDLGGGTFDISILEIQKGVFEVKSTNGDTFLGGEDFDQALLRHIVKEFKRETGVDLTKDNMALQRVREAAEKAKCELSSSVQTDINLPYLTMDSSGPKHLNMKLTRAQFEGIVTDLIRRTIAPCQKAMQDAEVSKSDIGEVILVGGMTRMPKVQQTVQDLFGRAPSKAVNPDEAVAIGAAIQGGVLAGDVTDVLLLDVTPLSLGIETLGGVFTKLINRNTTIPTKKSQVFSTAADGQTQVEIKVCQGEREMAGDNKLLGQFTLIGIPPAPRGVPQIEVTFDIDANGIVHVSAKDKGTGREQQIVIQSSGGLSKDDIENMVKNAEKYAEEDRRKKERVEAVNMAEGIIHDTETKMEEFKDQLPADECNKLKEEISKMRELLARKDSETGENIRQAASSLQQASLKLFEMAYKKMASEREGSGSSGTGEQKEDQKEEKQ

SEQ ID NO: 98 - DNA, 2811 bp, Homo sapien; identical to SEQ ID NO: 96

SEQ ID NO: 99 - protein, 679 aa, Homo sapien; identical to SEQ ID NO: 97

SEQ ID NO: 100 - DNA, 2602 bp, Homo sapien
gccgtgtcgccaccatggctccgcaccgccccgcgcccgcgctgctttgcgcgctgtccctggcgctgtgcgcgctgtcgctgcccgtccgcgcggccactgcgtcgcggggggcgtcccaggcgggggcgccccaggggcgggtgcccgaggcgcggcccaacagcatggtggtggaacaccccgagttcctcaaggcagggaaggagcctggcctgcagatctggcgtgtggagaagttcgatctggtgcccgtgcccaccaacctttatggagacttcttcacgggcgacgcctacgtcatcctgaagacagtgcagctgaggaacggaaatctgcagtatgacctccactactggctgggcaatgagtgcagccaggatgagagcggggcggccgccatctttaccgtgcagctggatgactacctgaacggccgggccgtgcagcaccgtgaggtccagggcttcgagtcggccaccttcctaggctacttcaagtctggcctgaagtacaagaaaggaggtgtggcatcaggattcaagcacgtggtacccaacgaggtggtggtgcagagactcttccaggtcaaagggcggcgtgtggtccgtgccaccgaggtacctgtgtcctgggagagcttcaacaatggcgactgcttcatcctggacctgggcaacaacatccaccagtggtgtggttccaacagcaatcggtatgaaagactgaaggccacacaggtgtccaagggcatccgggacaacgagcggagtggccgggcccgagtgcacgtgtctgaggagggcactgagcccgaggcgatgctccaggtgctgggccccaagccggctctgcctgcaggtaccgaggacaccgccaaggaggatgcggccaaccgcaagctggccaagctctacaaggtctccaatggtgcagggaccatgtccgtctccctcgtggctgatgagaaccccttcgcccagggggccctgaagtcagaggactgcttcatcctggaccacggcaaagatgggaaaatctttgtctggaaaggcaagcaggcaaacacggaggagaggaaggctgccctcaaaacagcctctgacttcatcaccaagatggactaccccaagcagactcaggtctcggtccttcctgagggcggtgagaccccactgttcaagcagttcttcaagaactggcgggacccagaccagacagatggcctgggcttgtcctacctttccagccatatcgccaacgtggagcgggtgcccttcgacgccgccaccctgcacacctccactgccatggccgcccagcacggcatggatgacgatggcacaggccagaaacagatctggagaatcgaaggttccaacaaggtgcccgtggaccctgccacatatggacagttctatggaggcgacagctacatcattctgtacaactaccgccatggtggccgccaggggcagataatctataactggcagggtgcccagtctacccaggatgaggtcgctgcatctgccatcctgactgctcagctggatgaggagctgggaggtacccctgtccagagccgtgtggtccaaggcaaggagcccgcccacctcatgagcctgtttggtgggaagcccatgatcatctacaagggcggcacctcccgcgagggcgggcagacagcccctgccagcacccgcctcttccaggtccgcgccaacagcgctggagccacccgggctgttgaggtattgcctaaggctggtgcactgaactccaacgatgcctttgttctgaaaaccccctcagccgcctacctgtgggtgggtacaggagccagcgaggcagagaagacgggggcccaggagctgctcagggtgctgcgggcccaacctgtgcaggtggcagaaggcagcgagccagatggcttctgggaggccctgggcgggaaggctgcctaccgcacatccccacggctgaaggacaagaagatggatgcccatcctcctcgcctctttgcctgctccaacaagattggacgttttgtgatcgaagaggttcctggtgagctcatgcaggaagacctggcaacggatgacgtcatgcttctggacacctgggaccaggtctttgtctgggttggaaaggattctcaagaagaagaaaagacagaagccttgacttctgctaagcggtacatcgagacggacccagccaatcgggatcggcggacgcccatcaccgtggtgaagcaaggctttgagcctccctcctttgtgggctggttccttggctgggatgatgattactggtctgtggaccccttggacagggccatggctgagctggctgcctgaggaggggcagggcccacccatgtcaccggtcagtgccttttggaactgtccttccctcaaagaggccttagagcgagcagagcagctctgctatgagtgtgtgtgtgtgtgtgtgttgtttcttttttttttttttacagtatccaaaaatagccctgcaaaaattcagagtccttgcaaaattgtctaaaatgtcagtgtttgggaaattaaatccaataaaaacattttgaagtgtg

SEQ ID NO: 101 - protein, 782 aa, Homo sapien
MAPHRPAPALLCALSLALCALSLPVRAATASRGASQAGAPQGRVPEARPNSMVVEHPEFLKAGKEPGLQIWRVEKFDLVPVPTNLYGDFFTGDAYVILKTVQLRNGNLQYDLHYWLGNECSQDESGAAAIFTVQLDDYLNGRAVQHREVQGFESATFLGYFKSGLKYKKGGVASGFKHVVPNEVVVQRLFQVKGRRVVRATEVPVSWESFNNGDCFILDLGNNIHQWCGSNSNRYERLKATQVSKGIRDNERSGRARVHVSEEGTEPEAMLQVLGPKPALPAGTEDTAKEDAANRKLAKLYKVSNGAGTMSVSLVADENPFAQGALKSEDCFILDHGKDGKIFVWKGKQANTEERKAALKTASDFITKMDYPKQTQVSVLPEGGETPLFKQFFKNWRDPDQTDGLGLSYLSSHIANVERVPFDAATLHTSTAMAAQHGMDDDGTGQKQIWRIEGSNKVPVDPATYGQFYGGDSYIILYNYRHGGRQGQIIYNWQGAQSTQDEVAASAILTAQLDEELGGTPVQSRVVQGKEPAHLMSLFGGKPMIIYKGGTSREGGQTAPASTRLFQVRANSAGATRAVEVLPKAGALNSNDAFVLKTPSAAYLWVGTGASEAEKTGAQELLRVLRAQPVQVAEGSEPDGFWEALGGKAAYRTSPRLKDKKMDAHPPRLFACSNKIGRFVIEEVPGELMQEDLATDDVMLLDTWDQVFVWVGKDSQEEEKTEALTSAKRYIETDPANRDRRTPITVVKQGFEPPSFVGWFLGWDDDYWSVDPLDRAMAELAA

SEQ ID NO: 102 - DNA, 2368 bp, Homo sapien
gtttctctccctgcccccgcgacttcgcgcaagatccgggaaggacacccgaggcccctgggagaccctggggaggtgaaagtcagagagcgaagcgggccgtggcccctaggcctgacccctccccgcggggtaaggcgggcaccccgcgagcgcaggggtcctcttactgctgatggcacccagctctgggcccagacgccgctcaccgtccaccgccggtgctgggtaaaatgtcggttccaggaccttaccaggcggccactgggccttcctcagcaccatccgcacctccatcctatgaagagacagtggctgttaacagttattaccccacacctccagctcccatgcctgggccaactacggggcttgtgacggggcctgatgggaagggcatgaatcctccttcgtattatacccagccagcgcccatccccaataacaatccaattaccgtgcagacggtctacgtgcagcaccccatcacctttttggaccgccctatccaaatgtgttgtccttcctgcaacaagatgatcgtgagtcagctgtcctataacgccggtgctctgacctggctgtcctgcgggagcctgtgcctgctggggtgcatagcgggctgctgcttcatccccttctgcgtggatgccctgcaggacgtggaccattactgtcccaactgcagagctctcctgggcacctacaagcgtttgtaggactcagccagacgtggagggagccgggtgccgcaggaagtcctttccacctctcatccagcttcacgcctggtggaggttctgccctggtggtctcacctctccagggggcccaccttcatgtcttcttttggggggaatacgtcgcaaaactaacaaatctccaaaccccagaaattgctgcttggagtcgtgcataggacttgcaaagacattccccttgagtgtcagttccacggtttcctgcctccctgagaccctgagtcctgccatctaactgtgatcattgccctatccgaatatcttcctgtgatctgccatcagtggctcttttttcctgcttccatgggcctttctggtggcagtctcaaactgagaagccacagttgccttatttttgaggctgttctgcccagagctcggctgaaccagcctttagtgcctaccattatcttatccgtctcttcccgtccctgatgacaaagatcttgccttacagactttacaggcttggctttgagattctgtaactgcagacttcattagcacacagattcactttaatttcttaattttttttttaaatacaaggagggggctattaacacccagtacagacatatccacaaggtcgtaaatgcatgctagaaaaatagggctggatcttatcactgccctgtctccccttgtttctctgtgccagatcttcagtgcccctttccatacagggatttttttctcatagagtaattatatgaacagtttttatgacctccttttggtctgaaatacttttgaacagaatttcttttttttaaaaaaaaacagagatggggtcttactatgttgcccaggctggtgtcgaactcctgggctcaagcgatccttctgccttggcctcccgaagtgctgggattgcaggcataagctaccatgctgggcctgaacataatttcaagaggaggatttataaaaccattttctgtaatcaaatgattggtgtcattttcccatttgccaatgtagtctcacttaaaaaaaaaaaaaagaaaaagaaatggataatttcatctactgcctttacttggggttaatgtgattcttaaacaccttcatcatggaactctcagagtggggtccgttttggtttcctggtggtgggttttgaaagataagggaaagcacattttgagcatgtctgggtaccatggtgcggatgcttgggaaccagaactgtttcagaggaatctaaagtctgattttagttttcagagacacagcttgttgtaaaacatgagaagacatgatttctaggactcaagcagcaagccaggattctaggttggctgctgtgtcatctttgaagtcaagacaaagctgggctcgaccttcaagggtcctcgttttgataatacttcagaatagggaactcatgtgaatactactatgtagaaataaaacctagaccttgagcgaacatctgtatattggttgaaaacgatagtggtaaccattgatcccccttcatttgatgtttggaaaattccagtaattatcatttttgcaacgaatatggataccacatagtactttggtgttacctgcttttgaaaaataaagtctttggttcacccggtaaaaaaaaaaaa

SEQ ID NO: 103 - protein, 161 aa, Homo sapien
MSVPGPYQAATGPSSAPSAPPSYEETVAVNSYYPTPPAPMPGPTTGLVTGPDGKGMNPPSYYTQPAPIPNNNPITVQTVYVQHPITFLDRPIQMCCPSCNKMIVSQLSYNAGALTWLSCGSLCLLGCIAGCCFIPFCVDALQDVDHYCPNCRALLGTYKRL

SEQ ID NO: 104 - DNA, 1773 bp, Homo sapien
gtttctctccctgcccccgcgacttcgcgcaagatccgggaaggacacccgaggcccctgggagaccctggggaggtgaaagtcagagagcgaagcgggccgtggcccctaggcctgacccctccccgcggggtaaggcgggcaccccgcgagcgcaggggtcctcttactgctgatggcacccagctctgggcccagacgccgctcaccgtccaccgccggtgctgggtaaaatgtcggttccaggaccttaccaggcggccactgggccttcctcagcaccatccgcacctccatcctatgaagagacagtggctgttaacagttattaccccacacctccagctcccatgcctgggccaactacggggcttgtgacggggcctgatgggaagggcatgaatcctccttcgtattatacccagccagcgcccatccccaataacaatccaattaccgtgcagacggtctacgtgcagcaccccatcacctttttggaccgccctatccaaatgtgttgtccttcctgcaacaagatgatcgtgagtcagctgtcctataacgccggtgctctgacctggctgtcctgcgggagcctgtgcctgctgggggtgcatagcgggctgctgcttcatccccttctgcgtggatgccctgcaggacgtggaccattactgtcccaactgcagagctctcctgggcacctacaagcgtttgtaggactcagccagacgtggagggagccgggtgccgcaggaagtcctttccacctctcatccagcttcacgcctggtggaggttctgccctggtggtctcacctctccagggggcccaccttcatgtcttcttttggggggaatacgtcgcaaaactaacaaatctccaaaccccagaaattgctgcttggagtcgtgcataggacttgcaaagacattccccttgagtgtcagttccacggtttcctgcctccctgagaccctgagtcctgccatctaactgtgatcattgccctatccgaatatcttcctgtgatctgccatcagtggctcttttttcctgcttccatgggcctttctggtggcagtctcaaactgagaagccacagttgccttatttttgaggctgttctgcccagagctcggctgaaccagcctttagtgcctaccattatcttatccgtctcttcccgtccctgatgacaaagatcttgccttacagactttacaggcttggctttgagattctgtaactgcagacttcattagcacacagattcactttaatttcttaattttttttttaaatacaaggagggggctattaacacccagtacagacatatccacaaggtcgtaaatgcatgctagaaaaatagggctggatcttatcactgccctgtctccccttgtttctctgtgccagatcttcagtgcccctttccatacagggatttttttctcatagagtaattatatgaacagtttttatgacctccttttggtctgaaatacttttgaacagaatttcttttttttaaaaaaaaacagagatggggtcttactatgttgcccaggctggtgtcgaactcctgggctcaagcgatccttctgccttggcctcccgaagtgctgggattgcaggcataagctaccatgctgggcctgaacataatttcaagaggaggatttataaaaccattttctgtaatcaaatgattggtgtcattttcccatttgccaatgtagtctcacttaaaaaaaaaaaaaaaaaaa

SEQ ID NO: 105 - protein, 228 aa, Homo sapien
MSVPGPYQAATGPSSAPSAPPSYEETVAVNSYYPTPPAPMPGPTTGLVTGPDGKGMNPPSYYTQPAPIPNNNPITVQTVYVQHPITFLDRPIQMCCPSCNKMIVSQLSYNAGALTWLSCGSLCLLGVHSGLLLHPLLRGCPAGRGPLLSQLQSSPGHLQAFVGLSQTWREPGAAGSPFHLSSSFTPGGGSALVVSPLQGAHLHVFFWGEYVAKLTNLQTPEIAAWSRA

SEQ ID NO: 106 - DNA, 2339 bp, Homo sapien
ggtccaccatggccctgctgcactccggccgcgtcctccccgggatcgccgccgccttccacccgggcctcgccgccgcggcctctgccagagccagctcctggtggacccatgtggaaatgggacctccagatcccattctgggagtcactgaagcctttaagagggacaccaatagcaaaaagatgaatctgggagttggtgcctaccgggatgataatggaaagccttacgttctgcctagcgtccgcaaggcagaggcccagattgccgcaaaaaatttggacaaggaatacctgcccattgggggactggctgaattttgcaaggcatctgcagaactagccctgggtgagaacagcgaagtcttgaagagtggccggtttgtcactgtgcagaccatttctggaactggagccttaaggatcggagccagttttctgcaaagattttttaagttcagccgagatgtctttctgcccaaaccaacctggggaaaccacacacccatcttcagggatgctggcatgcagctacaaggttatcggtattatgaccccaagacttgcggttttgacttcacaggcgctgtggaggatatttcaaaaataccagagcagagtgttcttcttctgcatgcctgcgcccacaatcccacgggagtggacccgcgtccggaacagtggaaggaaatagcaacagtggtgaagaaaaggaatctctttgcgttctttgacatggcctaccaaggctttgccagtggtgatggtgataaggatgcctgggctgtgcgccacttcatcgaacagggcattaatgtttgcctctgccaatcatatgccaagaacatgggcttatatggtgagcgtgtaggagccttcactatggtctgcaaagatgcggatgaagccaaaagggtagagtcacagttgaagatcttgatccgtcccatgtattccaaccctcccctcaatggggcccggattgctgctgccattctgaacaccccagatttgcgaaaacaatggctgcaagaagtgaaaggcatggctgaccgcatcattggcatgcggactcaactggtctccaacctcaagaaggagggttccacccacaattggcaacacatcaccgaccaaattggcatgttctgtttcacagggctaaagcctgaacaggtggagcggctgatcaaggagttctccatctacatgacaaaagatggccgcatctctgtggcaggggtcacctccagcaacgtgggctaccttgcccatgccattcaccaggtcaccaagtaatgtccctgggtcgaggaaacagagacaacctttctgtcttcagcctctgctattgagagcttcacacagacaatgagagagggtggatggtggtgagtggatcatttctttcagccacagtgtgtaacactcagcatttgaatgtttctcagaaaagaacatgtagtgacacagggcagaggcatccatggctggcgtctggaatattaaaccaaactctccccggtccttttttctccaacttttctcaaagagtttacatgtgcaagaaagtcatcgcaccaaaaaacctgtcaattatgccattgcaatatttcagaagctttaactgaagtgtcaggttcctcgtgagaaacaagcacaccttagaggctttgagagaaggccagctagttctgtcatgagtagtcggcctcgtgtctgtcctcccatcttggaacaaccttatcaacaggccgcactgcagaaatgatgttttatgaaaaccatgagctgctgccactccagcaagggaaataatgcagtttcctgtcttatttaagaaaaagagaaggctctcttttctcccttgtcattgccgttcttttccttacacgcaaaacatttttaactattgcagtttcatcccattctactgcttgattgaccatcaactccatcctatcgagattatttaagaatgaagaacataatttttctgctgatgccgtaccctcacccttttcagcaaagaatagtggagagtaggaaactgtactttatctcggcatcctcttgaatgatagtgcaagtttctccagttgggatgttgtctctgcccggttggacctcctccctttgttgaatgtggtgtgcagcctctcatctcacactgtgagtccagcggcgcagggtggtaccaggaaagaggatattctaggcttgcgtgctgctagctgggttcaggcttcacccactggaaagaaccaccatctgctctaaccatgtagacttattgcggcctggttttctctgttacaataaaattactgtagaccc

SEQ ID NO: 107 - protein, 430 aa, Homo sapien
MALLHSGRVLPGIAAAFHPGLAAAASARASSWWTHVEMGPPDPILGVTEAFKRDTNSKKMNLGVGAYRDDNGKPYVLPSVRKAEAQIAAKNLDKEYLPIGGLAEFCKASAELALGENSEVLKSGRFVTVQTISGTGALRIGASFLQRFFKFSRDVFLPKPTWGNHTPIFRDAGMQLQGYRYYDPKTCGFDFTGAVEDISKIPEQSVLLLHACAHNPTGVDPRPEQWKEIATVVKKRNLFAFFDMAYQGFASGDGDKDAWAVRHFIEQGINVCLCQSYAKNMGLYGERVGAFTMVCKDADEAKRVESQLKILIRPMYSNPPLNGARIAAAILNTPDLRKQWLQEVKGMADRIIGMRTQLVSNLKKEGSTHNWQHITDQIGMFCFTGLKPEQVERLIKEFSIYMTKDGRISVAGVTSSNVGYLAHAIHQVTK

SEQ ID NO: 108 - DNA, 3320 bp, Homo sapien
gtgggtgagcggcggccacggcatcctgtgctgtgggggctacgaggaaagatctaattatcatggacctgcgacagtttcttatgtgcctgtccctgtgcacagcctttgccttgagcaaacccacagaaaagaaggaccgtgtacatcatgagcctcagctcagtgacaaggttcacaatgatgctcagagttttgattatgaccatgatgccttcttgggtgctgaagaagcaaagacctttgatcagctgacaccagaagagagcaaggaaaggcttggaaagattgtaagtaaaatagatggcgacaaggacgggtttgtcactgtggatgagctcaaagactggattaaatttgcacaaaagcgctggatttacgaggatgtagagcgacagtggaaggggcatgacctcaatgaggacggcctcgtttcctgggaggagtataaaaatgccacctacggctacgttttagatgatccagatcctgatgatggatttaactataaacagatgatggttagagatgagcggaggtttaaaatggcagacaaggatggagacctcattgccaccaaggaggagttcacagctttcctgcaccctgaggagtatgactacatgaaagatatagtagtacaggaaacaatggaagatatagataagaatgctgatggtttcattgatctagaagagtatattggtgacatgtacagccatgatgggaatactgatgagccagaatgggtaaagacagagcgagagcagtttgttgagtttcgggataagaaccgtgatgggaagatggacaaggaagagaccaaagactggatccttccctcagactatgatcatgcagaggcagaagccaggcacctggtctatgaatcagaccaaaacaaggatggcaagcttaccaaggaggagatcgttgacaagtatgacttatttgttggcagccaggccacagattttggggaggccttagtacggcatgatgagttctgagctgcggaggaaccctcatttcctcaaaagtaatttatttttacagcttctggtttcacatgaaattgtttgcgctactgagactgttactacaaactttttaagacatgaaaaggcgtaatgaaaaccatcccgtccccattcctcctcctctctgagggactggagggaagccgtgcttctgaggaacaactctaattagtacacttgtgtttgtagatttacactttgtattatgtattaacatggcgtgtttatttttgtatttttctctggttgggagtatgatatgaaggatcaagatcctccactcacacatgtagacaaacattagctctttactctttctcaaccccttatatgattttaataattctcacttcactaattttgtaagcctgagatcaataagaaatgttcaggagagaggaaagaaaaaatatatatgctccacaatttatatttagagagagaacacttagtcttgcctgtcaaaaagtccaacatttcataggtagtaggggccacatattacattcagttgctataggtccagcaactgaacctgccattacctgggcaaggaaagatccctttgctctaggaaagcttggcccaaattgattttcttctttttccccctgtaggactgactgttggctaattttgtcaagcacagctgtggtgggaagagttagggccagtgtcttgaaaatcaatcaagtagtgaatgtgatctctttgcagagctatagatagaaacagctggaaaactaaaggaaaaatacaaatgttttcggggcatacattttttttctgggtgtgcatctgttgaaatgctcaagacttaattatttgccttttgaaatcactgtaaatgcccccatccggttcctcttcttcccaggtgtgccaaggaattaatcttggtttcactacaattaaaattcactcctttccaatcatgtcattgaaagtgcctttaacgaaagaaatggtcactgaatgggaattctcttaagaaaccctgagattaaaaaaagactatttggataacttataggaaagcctagaacctcccagtagagtggggatttttttcttcttccctttctcttttggacaatagttaaattagcagtattagttatgagtttggttgcagtgttcttatcttgtgggctgatttccaaaaaccacatgctgctgaatttaccagggatcctcatacctcacaatgcaaaccacttactaccaggcctttttctgtgtccactggagagcttgagctcacactcaaagatcagaggacctacagagagggctctttggtttgaggaccatggcttacctttcctgcctttgacccatcacaccccatttcctcctctttccctctccccgctgccaaaaaaaaaaaaaaggaaacgtttatcatgaatcaacagggtttcagtccttatcaaagagagatgtggaaagagctaaagaaaccaccctttgttcccaactccactttacccatattttatgcaacacaaacactgtccttttgggtccctttcttacagatggacctcttgagaagaattatcgtattccacgtttttagccctcaggttaccaagataaatatatgtatatataacctttattattgctatatctttgtggataatacattcaggtggtgctgggtgatttattataatctgaacctaggtatatcctttggtcttccacagtcatgttgaggtgggctccctggtatggtaaaaagccaggtataatgtaacttcaccccagcctttgtactaagctcttgatagtggatatactcttttaagtttagccccaatatagggtaatggaaatttcctgccctctgggttccccatttttactattaagaagaccagtgataatttaataatgccaccaactctggcttagttaagtgagagtgtgaactgtgtggcaagagagcctcacacctcactaggtgcagagagcccaggccttatgttaaaatcatgcacttgaaaagcaaaccttaatctgcaaagacagcagcaagcattatacggtcatcttgaatgatccctttgaaattttttttttgtttgtttgtttaaatcaagcctgaggctggtgaacagtagctacacacccatattgtgtgttctgtgaatgctagctctcttgaatttggatattggttattttttatagagtgtaaaccaagttttatattctgcaatgcgaacaggtacctatctgtttctaaataaaactgtttacattcaaaaa

SEQ ID NO: 109 - protein, 315 aa, Homo sapien
MDLRQFLMCLSLCTAFALSKPTEKKDRVHHEPQLSDKVHNDAQSFDYDHDAFLGAEEAKTFDQLTPEESKERLGKIVSKIDGDKDGFVTVDELKDWIKFAQKRWIYEDVERQWKGHDLNEDGLVSWEEYKNATYGYVLDDPDPDDGFNYKQMMVRDERRFKMADKDGDLIATKEEFTAFLHPEEYDYMKDIVVQETMEDIDKNADGFIDLEEYIGDMYSHDGNTDEPEWVKTEREQFVEFRDKNRDGKMDKEETKDWILPSDYDHAEAEARHLVYESDQNKDGKLTKEEIVDKYDLFVGSQATDFGEALVRHDEF

SEQ ID NO: 110 - DNA, 4760 bp, Homo sapien
ggccggcggtggcggcggcgagggctggactcgggcttagggcctgctgtggaggcagcggcggacgccgagctaagcagtttctctggaaacccccctggtaagtgtggaggaggcgggacactctgacccaagacgaaaggcctgtagctccagccaaagaaaataaaccttaggagggagaaggaaaaaaaaaaatccatcagctgttcctgagaacagcctgcattggaatctacagagaggacaactaatgtgagtgaggaagtgactgtatgtggactgtggagaaagtaagtcacgtgggcccttgaggacctggactgggttaggaacagttgtactttcagaggtgaggtgtcgagaagggaaagtgaatgtggtctggagtgtgtccttggccttggctccacagggtgtgctttcctctggggccgtcagggagctcatcccttgtgttctgccagggtggggtacggggtttgacactgaggagggtaacctgctggctggagcggcagagcagtggccttgatttgtcttttggaagattttaaaaaccaaaaagcataaacattctggtccttcagcaatgctttctctgaagaaatacttaacggaaggacttctccagttcaccattctgctgagtttgattggggtacgggtggacgtggatacttacctgacctcacagcttcccccactccgggagatcatcctggggcccagttctgcctatactcagacccagttccacaacctgaggaataccttggatggctatggtatccaccccaagagcatagacctggacaattacttcactgcccggcggctcctcagtcaggtgagggccctggacaggttccaggtgccaaccactgaggtaaatgcctggctggttcaccgagacccagaggggtctgtctctggcagtcagcccaactcaggcctcgccctcgagagttccagtggcctccaagatgtgacaggcccagacaacggggtgcgagaaagcgaaacggagcagggattcggtgaagatttggaggatttgggggctgtagcccccccagtcagtggagacttaaccaaagaggacatagatctgattgacatcctttggcgacaggatattgatctgggggctgggcgtgaggtttttgactatagtcaccgccagaaggagcaggatgtggagaaggagctgcgagatggaggcgagcaggacacctgggcaggcgagggcgcggaagctctggcacggaacctgctagtggatggagagactggggagagcttccctgcacaggtgcctagtggggaggaccagacggccctgtccctggaagagtgccttaggctgctggaagccacctgcccctttggggagaatgctgagtttccagcagacatttccagcataacagaagcagtgcctagtgagagtgagccccctgctcttcaaaacaacctcttgtctcctcttctgaccgggacagagtcaccatttgatttggaacagcagtggcaagatctcatgtccatcatggaaatgcaggccatggaagtgaacacatcagcaagtgaaatcctgtacagtgcccctcctggagacccactgagcaccaactacagccttgcccccaacactcccatcaatcagaatgtcagcctgcatcaggcgtccctggggggctgcagccaggacttcttactcttcagccccgaggtggaaagcctgcctgtggccagtagctccacgctgctcccgttggcccccagcaattctaccagcctcaactccaccttcggctccaccaacctgacagggctcttctttccaccccagctcaatggcacagccaatgacacagcaggcccagagctgcctgaccctttggggggtctgttagatgaagctatgttggatgagatcagccttatggacctggccattgaagaaggctttaaccctgtgcaggcctcccagctggaggaggaatttgactctgactcaggcctttccttagactcgagccatagcccttcttccctaagcagctctgaaggcagttcttcctcttcttcctcctcctcttcctcttcttcctctgcttcttcctctgcctcttcctccttttctgaggaaggtgcggttggctacagctctgactctgagaccctggatctggaagaggccgagggtgctgtgggctaccagcctgagtattccaagttctgccgcatgagctaccaggatccagctcagctctcatgcctgccctacctggagcacgtgggccacaaccacacatacaacatggcacccagtgccctggactcagccgacctgccaccacccagtgccctcaagaaaggcagcaaggagaagcaggctgacttcctggacaagcagatgagccgggatgagcaccgagcccgagccatgaagatccctttcaccaatgacaaaatcatcaacctgcctgtggaggagttcaatgaactgctgtccaaataccagttgagtgaagcccagctgagcctcatccgagacatccggcgccggggcaagaacaagatggcggcgcagaactgccgcaagcgcaagctggacaccatcctgaatctggagcgtgatgtggaggacctgcagcgtgacaaagcccggctgctgcgggagaaagtggagttcctgcgctccctgcgacagatgaagcagaaggtccagagcctgtaccaggaggtgtttgggcggctgcgagatgagaacggacgaccctactcgcccagtcagtatgcgctccagtacgccggggacggcagtgtcctcctcatcccccgcacgatggccgaccagcaggcccggcggcaggagaggaagccaaaggaccggagaaagtgagcctggggaagaagggggtttgaagcccaccaagaccgaaactggagaagggctggacctggacctggacctggacctacagcggggacttaaatgccttcttatccaatatatcttctcagatgggatgactgcgggtcagtgtacaggaagaggcaggcactggctggctcagctccactcgggtggagtggaagtggccagaccatttagacggacagggtcctcaccctacccctttcctgtgaggcaggggtggtggtggagttgctggaggtagaggagctatgtggagcaaaggccgacagaggggaaggaatggacctgtgagaggaagggaaggtggcagaaagtctcatttcaggaaggagggatagaaggaaggaaggaaggaacccccccccccccccgaaaaaaaaatcaaagcgggaagaaaatcagagggaaggttaaggttggctctggccaggattccaggcagcaggttggagtgactggtgggcctagatcactggtgtgataaaccccatttcaccccggggggggtggggtacacagacacagggtgggggtggggaggggcggtgttaactctttctgctccttgcattttgacatccctgaaggggagctcttggatatcattggccatgtttcaatcgaatggagccactgggccccaacactggctttgagatttagagtcaaagggtagagtgaacaggaaagggtcacgtggtcccatgttgcaacagccccaacatcacgcatgtcattcactgccttgccactccatctccctccgtgctccagccacccctgagctgaggctcccattgtctccatcagagcctgcatgtgtatgccgtcctcccctggtccggtgtttgtgttccccacccctcacagactgcctgagctcttctgtaagctggggtagggtgatggcagtgctccgggaactgggcctgcagccttcctcttctgggactgctgtgaggcagaggaatgatggagaatctagtgtagcagcctccaggcaggattcagcacaacactggggagtcacccttccctcgggcctctgcctaccaacaactgggcttatcactgggaaaacacaaaaaattacacaacccagcaacaacaaaagaactagtcctcttagaatttcttgcgctttgatttttttagggcttgtgccctgtttcacttatagggtctagaatgcttgtgttgagtaaaaaggagattcccaatattcaaagctgctaaatgttctctttgccataaagactccgtgtaactgtgtgaacacttgggatttttctcctctgtcccgaggtcgtcgtctgctttcttttttgggtttctttctagaagattgagaagtgcatatgacaggctgagagcacctccccaaacacacaagctctcagccacaggcagcttctccacagccccagcttcgcacaggctcctggagggctgcctgggggaggcagacatgggagtgccaaggtggccagatggttccaggactacaatgtctttatttttaactgtttgccactgctgccctcacccctgcccggctctggagtaccgtctgccccagacaagtgggagtgaaatgggggtggggggaagcactgattcccagttagggggtgcctaactgagcagtagggatagaaggtgtgaacctgggagtgcttttataaattattttccttgtagattttatttttaatttatctctgtgacctgccagggagaggggagagagagagagatgctgttgagcacatgacaaaataaaataaaatggatgattcaaaaaaaaaaa

SEQ ID NO: 111 - protein, 772 aa, Homo sapien
MLSLKKYLTEGLLQFTILLSLIGVRVDVDTYLTSQLPPLREIILGPSSAYTQTQFHNLRNTLDGYGIHPKSIDLDNYFTARRLLSQVRALDRFQVPTTEVNAWLVHRDPEGSVSGSQPNSGLALESSSGLQDVTGPDNGVRESETEQGFGEDLEDLGAVAPPVSGDLTKEDIDLIDILWRQDIDLGAGREVFDYSHRQKEQDVEKELRDGGEQDTWAGEGAEALARNLLVDGETGESFPAQVPSGEDQTALSLEECLRLLEATCPFGENAEFPADISSITEAVPSESEPPALQNNLLSPLLTGTESPFDLEQQWQDLMSIMEMQAMEVNTSASEILYSAPPGDPLSTNYSLAPNTPINQNVSLHQASLGGCSQDFLLFSPEVESLPVASSSTLLPLAPSNSTSLNSTFGSTNLTGLFFPPQLNGTANDTAGPELPDPLGGLLDEAMLDEISLMDLAIEEGFNPVQASQLEEEFDSDSGLSLDSSHSPSSLSSSEGSSSSSSSSSSSSSSASSSASSSFSEEGAVGYSSDSETLDLEEAEGAVGYQPEYSKFCRMSYQDPAQLSCLPYLEHVGHNHTYNMAPSALDSADLPPPSALKKGSKEKQADFLDKQMSRDEHRARAMKIPFTNDKIINLPVEEFNELLSKYQLSEAQLSLIRDIRRRGKNKMAAQNCRKRKLDTILNLERDVEDLQRDKARLLREKVEFLRSLRQMKQKVQSLYQEVFGRLRDENGRPYSPSQYALQYAGDGSVLLIPRTMADQQARRQERKPKDRRK

SEQ ID NO: 112 - DNA, 2126 bp, Homo sapien
ggcacgaggaagcgcacggcctcggcgaccctctccgacccggccgccgccgccatgcagccctccagccttctgccgctcgccctctgcctgctggctgcacccgcctccgcgctcgtcaggatcccgctgcacaagttcacgtccatccgccggaccatgtcggaggttgggggctctgtggaggacctgattgccaaaggccccgtctcaaagtactcccaggcggtgccagccgtgaccgaggggcccattcccgaggtgctcaagaactacatggacgcccagtactacggggagattggcatcgggacgcccccccagtgcttcacagtcgtcttcgacacgggctcctccaacctgtgggtcccctccatccactgcaaactgctggacatcgcttgctggatccaccacaagtacaacagcgacaagtccagcacctacgtgaagaatggtacctcgtttgacatccactatggctcgggcagcctctccgggtacctgagccaggacactgtgtcggtgccctgccagtcagcgtcgtcagcctctgccctgggcggtgtcaaagtggagaggcaggtctttggggaggccaccaagcagccaggcatcaccttcatcgcagccaagttcgatggcatcctgggcatggcctacccccgcatctccgtcaacaacgtgctgcccgtcttcgacaacctgatgcagcagaagctggtggaccagaacatcttctccttctacctgagcagggacccagatgcgcagcctgggggtgagctgatgctgggtggcacagactccaagtattacaagggttctctgtcctacctgaatgtcacccgcaaggcctactggcaggtccacctggaccaggtggaggtggccagcgggctgaccctgtgcaaggagggctgtgaggccattgtggacacaggcacttccctcatggtgggcccggtggatgaggtgcgcgagctgcagaaggccatcggggccgtgccgctgattcagggcgagtacatgatcccctgtgagaaggtgtccaccctgcccgcgatcacactgaagctgggaggcaaaggctacaagctgtccccagaggactacacgctcaaggtgtcgcaggccgggaagaccctctgcctgagcggcttcatgggcatggacatcccgccacccagcgggccactctggatcctgggcgacgtcttcatcggccgctactacactgtgtttgaccgtgacaacaacagggtgggcttcgccgaggctgcccgcctctagttcccaaggcgtccgcgcgccagcacagaaacagaggagagtcccagagcaggaggcccctggcccagcggcccctcccacacacacccacacactcgcccgcccactgtcctgggcgccctggaagccggcggcccaagcccgacttgctgttttgttctgtggttttcccctccctgggttcagaaatgctgcctgcctgtctgtctctccatctgtttggtgggggtagagctgatccagagcacagatctgtttcgtgcattggaagaccccacccaagcttggcagccgagctcgtgtatcctggggctcccttcatctccagggagtcccctccccggccctaccagcgcccgctgggctgagcccctaccccacaccaggccgtcctcccgggccctcccttggaaacctgccctgcctgagggcccctctgcccagcttgggcccagctgggctctgccaccctacctgttcagtgtcccgggcccgttgaggatgaggccgctagaggcctgaggatgagctggaaggagtgagaggggacaaaacccaccttgttggagcctgcagggtggtgctgggactgagccagtcccaggggcatgtattggcctggaggtggggttgggattgggggctggtgccagccttcctctgcagctgacctctgttgtcctccccttgggcggctgagagccccagctgacatggaaatacagttgttggcctccggcctcccctcaaaaaaaaaaaaaaaaaaaaaaaaaaaaaaaaaaaaaaaaaaaaaaaaaaaaaaaaaaaaaaaaaaaaaaaaaaaaaaaaaaaaa

SEQ ID NO: 113 - protein, 412 aa, Homo sapien
MQPSSLLPLALCLLAAPASALVRIPLHKFTSIRRTMSEVGGSVEDLIAKGPVSKYSQAVPAVTEGPIPEVLKNYMDAQYYGEIGIGTPPQCFTVVFDTGSSNLWVPSIHCKLLDIACWIHHKYNSDKSSTYVKNGTSFDIHYGSGSLSGYLSQDTVSVPCQSASSASALGGVKVERQVFGEATKQPGITFIAAKFDGILGMAYPRISVNNVLPVFDNLMQQKLVDQNIFSFYLSRDPDAQPGGELMLGGTDSKYYKGSLSYLNVTRKAYWQVHLDQVEVASGLTLCKEGCEAIVDTGTSLMVGPVDEVRELQKAIGAVPLIQGEYMIPCEKVSTLPAITLKLGGKGYKLSPEDYTLKVSQAGKTLCLSGFMGMDIPPPSGPLWILGDVFIGRYYTVFDRDNNRVGFAEAARL

SEQ ID NO: 114 - DNA, 7923 bp, Mus musculus
gcgcactcgggcacgcgctcggaagtcgggggtcggcgcggagtgcaggctgctcccggggtaggtgagggaagcgcggaggcggggcgcgggggcagtggtcggcgagcagcgcggtcctcgctaggggcgcccacccgtcagtctctccggcgcgagccgccgccaccgcccgcgccggagtcaggcccctgggcccccaggctcaagcagcgaagcggcctccgggggacgccgctaggcgagaggaacgcgccggtgcccttgccttcgccgtgacccagcgtgcgggcggcgggatgagagggagccatcgggccgcgccggccctgcggccccgggggcggctctggcccgtgctggccgtgctggcggcggccgccgcggcgggctgtgcccaggcagccatggacgagtgcacggacgagggcgggcggccgcagcgctgcatgcccgagttcgtcaacgccgctttcaacgtgactgtggtggccaccaacacgtgtgggactccgcccgaggaatactgtgtgcagaccggggtgaccggggtcaccaagtcctgtcacctgtgcgacgccgggcagccccacctgcagcacggggcagccttcctgaccgactacaacaaccaggccgacaccacctggtggcaaagccagaccatgctggccggggtgcagtaccccagctccatcaacctcacgctgcacctgggaaaagcttttgacatcacctatgtgcgtctcaagttccacaccagccgcccggagagctttgccatttacaagcgcacacgggaagacgggccctggattccttaccagtactacagtggttcctgcgagaacacctactccaaggcaaaccgcggcttcatcaggacaggaggggacgagcagcaggccttgtgtactgatgaattcagtgacatttctcccctcactgggggcaacgtggccttttctaccctggaaggaaggcccagcgcctataactttgacaatagccctgtgctgcaggaatgggtaactgccactgacatcagagtaactcttaatcgcctgaacacttttggagatgaagtgtttaacgatcccaaagttctcaagtcctattattatgccatctctgattttgctgtaggtggcagatgtaaatgtaatggacacgcaagcgagtgtatgaagaacgaatttgataagctggtgtgtaattgcaaacataacacatatggagtagactgtgaaaagtgtcttcctttcttcaatgaccggccgtggaggagggcaactgcggaaagtgccagtgaatgcctgccctgtgattgcaatggtcgatcccaggaatgctacttcgaccctgaactctatcgttccactggccatgggggccactgtaccaactgccaggataacacagatggcgcccactgtgagaggtgccgagagaacttcttccgccttggcaacaatgaagcctgctcttcatgccactgtagtcctgtgggctctctaagcacacagtgtgatagttacggcagatgcagctgtaagccaggagtgatgggggacaaatgtgaccgttgccagcctggattccattctctcactgaagcaggatgcaggccatgctcttgtgatccctctggcagcatagatgaatgtaatgttgaaacaggaagatgtgtttgcaaagacaatgtcgaaggcttcaattgtgaaagatgcaaacctggattttttaatctggaatcatctaatcctcggggttgcacaccctgcttctgctttgggcattcttctgtctgtacaaacgctgttggctacagtgtttattctatctcctctacctttcagattgatgaggatgggtggcgtgcggaacagagagatggctctgaagcatctctcgagtggtcctctgagaggcaagatatcgccgtgatctcagacagctactttcctcggtacttcattgctcctgcaaagttcttgggcaagcaggtgttgagttatggtcagaacctctccttctcctttcgagtggacaggcgagatactcgcctctctgccgaagaccttgtgcttgagggagctggcttaagagtatctgtacccttgatcgctcagggcaattcctatccaagtgagaccactgtgaagtatgtcttcaggctccatgaagcaacagattacccttggaggcctgctcttaccccttttgaatttcagaagctcctaaacaacttgacctctatcaagatacgtgggacatacagtgagagaagtgctggatatttggatgatgtcaccctggcaagtgctcgtcctgggcctggagtccctgcaacttgggtggagtcctgcacctgtcctgtgggatatggagggcagttttgtgagatgtgcctctcaggttacagaagagaaactcctaatcttggaccatacagtccatgtgtgctttgcgcctgcaatggacacagcgagacctgtgatcctgagacaggtgtttgtaactgcagagacaatacggctggcccgcactgtgagaagtgcagtgatgggtactatggagattcaactgcaggcacctcctccgattgccaaccctgtccgtgtcctggaggttcaagttgtgctgttgttcccaagacaaaggaggtggtgtgcaccaactgtcctactggcaccactggtaagagatgtgagctctgtgatgatggctactttggagaccccctgggtagaaacggccctgtgagactttgccgcctgtgccagtgcagtgacaacatcgatcccaacgcagttggaaattgcaatcgcttgacgggagaatgcctgaagtgcatctataacactgctggcttctattgtgaccggtgcaaagacggattttttggaaatcccctggctcccaatccagcagacaaatgcaaagcctgcaattgcaatccgtatgggaccatgaagcagcagagcagctgtaaccccgtgacggggcagtgtgaatgtttgcctcacgtgactggccaggactgtggtgcttgtgaccctggattctacaatctgcagagtgggcaaggctgtgagaggtgtgactgccatgccttgggctccaccaatgggcagtgtgacatccgcaccggccagtgtgagtgccagcccggcatcactggtcagcactgtgagcgctgtgaggtcaaccactttgggtttggacctgaaggctgcaaaccctgtgactgtcatcctgagggatctctttcacttcagtgcaaagatgatggtcgctgtgaatgcagagaaggctttgtgggaaatcgctgtgaccagtgtgaagaaaactatttctacaatcggtcttggcctggctgccaggaatgtccagcttgttaccggctggtaaaggataaggttgctgatcatagagtgaagctccaggaattagagagtctcatagcaaaccttggaactggggatgagatggtgacagatcaagccttcgaggatagactaaaggaagcagagagggaagttatggacctccttcgtgaggcccaggatgtcaaagatgttgaccagaatttgatggatcgcctacagagagtgaataacactctgtccagccaaattagccgtttacagaatatccggaataccattgaagagactggaaacttggctgaacaagcgcgtgcccatgtagagaacacagagcggttgattgaaatcgcatccagagaacttgagaaagcaaaagtcgctgctgccaatgtgtcagtcactcagccagaatctacaggggacccaaacaacatgactcttttggcagaagaggctcgaaagcttgctgaacgtcataaacaggaagctgatgacattgttcgagtggcaaagacagccaatgatacgtcaactgaggcatacaacctgcttctgaggacactggcaggagaaaatcaaacagcatttgagattgaagagcttaataggaagtatgaacaagcgaagaacatctcacaggatctggaaaaacaagctgcccgagtacatgaggaggccaaaagggccggtgacaaagctgtggagatctatgccagcgtggctcagctgagccctttggactctgagacactggagaatgaagcaaataacataaagatggaagctgagaatctggaacaactgattgaccagaaattaaaagattatgaggacctcagagaagatatgagagggaaggaacttgaagtcaagaaccttctggagaaaggcaagactgaacagcagaccgcagaccaactcctagcccgagctgatgctgccaaggccctcgctgaagaagctgcaaagaagggacgggataccttacaagaagctaatgacattctcaacaacctgaaagattttgataggcgcgtgaacgataacaagacggccgcagaggaggcactaaggaagattcctgccatcaaccagaccatcactgaagccaatgaaaagaccagagaagcccagcaggccctgggcagtgctgcggcggatgccacagaggccaagaacaaggcccatgaggcggagaggatcgcaagcgctgtccaaaagaatgccaccagcaccaaggcagaagctgaaagaacttttgcagaagttacagatctggataatgaggtgaacaatatgttgaagcaactgcaggaagcagaaaaagagctaaagagaaaacaagatgacgctgaccaggacatgatgatggcagggatggcttcacaggctgctcaagaagccgagatcaatgccagaaaagccaaaaactctgttactagcctcctcagcattattaatgacctcttggagcagctggggcagctggatacagtggacctgaataagctaaacgagattgaaggcaccctaaacaaagccaaagatgaaatgaaggtcagcgatcttgataggaaagtgtctgacctggagaatgaagccaagaagcaggaggctgccatcatggactataaccgagatatcgaggagatcatgaaggacattcgcaatctggaggacatcaggaagaccttaccatctggctgcttcaacaccccgtccattgaaaagccctagtgtctttagggctggaaggcagcatccctctgacaggggggcagttgtgaggccacagagtgccttgacacaaagattacatttttcagacccccactcctctgctgctgtccatcactgtccttttgaaccaggaaaagtcacagagtttaaagagaagcaaattaaacatcctgaatcgggaacaaagggttttatctaataaagtgtctcttccatcacgttgctaccttacccacacttccctctgatttgcgtgaggacgtggcatcctacttacgtacgtggcataacacatcgtgtgagcccatgtatgctggggtagagcaagtagccctcccctgtctcatcgatccagcagaacctcctcagtctcagtactcttgtttctataaggaaaagttttgctactaacagtagcattgtgatggccagtatatccagtccatggataaagaaaatgcatctgcatctcctgcccctcttccttctaagcaaaaggaaataaacatcctgtgccaaaggtattggtcatttagaatgtcggtagccatccatcagtgcttttagctattatgagtgtaggacactgagccatccgtgggtcaggatgcaattatttataaaagtccccaggtgaacatggctgaagatttttctagtatattaataattgactaggaagatgaactttttttcagatctttgggcagctgataatttaaatctggatgggcagcttgcactcaccaatagaccaaaagacatcttttgatattcttataaatggaacttacacagaagaaatagggatatgataaccactaaagttttgttttcaaaatcaaactaattcttacagcttttttattagttagtcttggaactagtgttaagtatctggcagagaacagttaatccctaaggtcttgacaaaacagaagaaaaacaagcctcctcgtcctagtcttttctagcaaagggataaaacttagatggcagcttgtactgtcagaatcccgtgtatccatttgttcttctgttggagagatgagacatttgacccttagctccagttttcttctgatgtttccatcttccagaatccctcaaaaaacattgtttgccaaatcctggtggcaaatacttgcactcagtatttcacacagctgccaacgctatcgagttcctgcactttgtgatttaaatccactctaaaccttccctctaagtgtagagggaagacccttacgtggagtttcctagtgggcttctcaacttttgatcctcagctctgtggttttaagaccacagtgtgacagttccctgccacacacccccttcctcctaccaacccacctttgagattcatatatagcctttaacactatgcaactttgtactttgcgtagcaggggctggggtggggggaaagaaacctattatcatggacacactggtgctattaattatttcaaatttatatttttgtgtgaatgttttgtgttttgtttatccatgctatagaacaaggaatttatgtagatatacttagtcctatttctagaatgacactctgttcactttgctcaatttttcctcttcactggcacaagtatctgaatacctccttccctcccttctagagttctttggattgtactccaaagaattgtgccttgtgtttgcagcatctccattctctaaattaatataattgctttcctccacacccagccacgtaaagaggtaacttgggtcctcttccattgcagtcctgatgatcctaacctgcagcacggtggttttacaatgttccagagcaggaacgccaggttgacaagctatggtaggattaggaaagtttgctgaagaggatctttgacgccacagtgggactagccaggaatgagggagaaatgccctttttggcaattgttggagctggataggtaagttttataagggagtacattttgactgagcacttagggcatcaggaacagtgctacttactggtgggtagactgggagaggtggtgtaacttagttcttgatgatcccacttcctgtttccatctgcttgggatataccagagtttaccacaagtgttttgacgatatactcctgagctttcactctgctggcttctcccaggcctcttctactatggcaggagatgtggtgtgctgttgcaaagttttcacgtcatcgtttcctggctagttcatttcattaagtggctacatcctaacatatgcattggtcaaggttgcagcaagaggactgaagattgactgccaagctagtttgggtgaagttcactccagcaagtctcaggccacaatggggtggtttggtttggtttccttttaactttctttttgttatttgcttttctcctccacctgtgtggtatattttttaagcagaattttattttttaaaataaaaggttctttacaagatgataccttaattacactcccgcaacacagccattattttattgtctagctccagttatctgtattttatgtaatgtaattgacaggatggctgctgcagaatgctggttgacacagggattattatactgctatttttccctgaattcttttccttggaattccaactgtggaccttttatatgtgccttcactttagctgtttgccttactctacagccttgctctccggggtggttaataaaatgcaacacttggcatttttatgttataagaaaaacagtattttatttataataaaatctgaatattttgtaacccttta

SEQ ID NO: 115 - protein, 1609 aa, Mus musculus
MRGSHRAAPALRPRGRLWPVLAVLAAAAAAGCAQAAMDECTDEGGRPQRCMPEFVNAAFNVTVVATNTCGTPPEEYCVQTGVTGVTKSCHLCDAGQPHLQHGAAFLTDYNNQADTTWWQSQTMLAGVQYPSSINLTLHLGKAFDITYVRLKFHTSRPESFAIYKRTREDGPWIPYQYYSGSCENTYSKANRGFIRTGGDEQQALCTDEFSDISPLTGGNVAFSTLEGRPSAYNFDNSPVLQEWVTATDIRVTLNRLNTFGDEVFNDPKVLKSYYYAISDFAVGGRCKCNGHASECMKNEFDKLVCNCKHNTYGVDCEKCLPFFNDRPWRRATAESASECLPCDCNGRSQECYFDPELYRSTGHGGHCTNCQDNTDGAHCERCRENFFRLGNNEACSSCHCSPVGSLSTQCDSYGRCSCKPGVMGDKCDRCQPGFHSLTEAGCRPCSCDPSGSIDECNVETGRCVCKDNVEGFNCERCKPGFFNLESSNPRGCTPCFCFGHSSVCTNAVGYSVYSISSTFQIDEDGWRAEQRDGSEASLEWSSERQDIAVISDSYFPRYFIAPAKFLGKQVLSYGQNLSFSFRVDRRDTRLSAEDLVLEGAGLRVSVPLIAQGNSYPSETTVKYVFRLHEATDYPWRPALTPFEFQKLLNNLTSIKIRGTYSERSAGYLDDVTLASARPGPGVPATWVESCTCPVGYGGQFCEMCLSGYRRETPNLGPYSPCVLCACNGHSETCDPETGVCNCRDNTAGPHCEKCSDGYYGDSTAGTSSDCQPCPCPGGSSCAVVPKTKEVVCTNCPTGTTGKRCELCDDGYFGDPLGRNGPVRLCRLCQCSDNIDPNAVGNCNRLTGECLKCIYNTAGFYCDRCKDGFFGNPLAPNPADKCKACNCNPYGTMKQQSSCNPVTGQCECLPHVTGQDCGACDPGFYNLQSGQGCERCDCHALGSTNGQCDIRTGQCECQPGITGQHCERCEVNHFGFGPEGCKPCDCHPEGSLSLQCKDDGRCECREGFVGNRCDQCEENYFYNRSWPGCQECPACYRLVKDKVADHRVKLQELESLIANLGTGDEMVTDQAFEDRLKEAEREVMDLLREAQDVKDVDQNLMDRLQRVNNTLSSQISRLQNIRNTIEETGNLAEQARAHVENTERLIEIASRELEKAKVAAANVSVTQPESTGDPNNMTLLAEEARKLAERHKQEADDIVRVAKTANDTSTEAYNLLLRTLAGENQTAFEIEELNRKYEQAKNISQDLEKQAARVHEEAKRAGDKAVEIYASVAQLSPLDSETLENEANNIKMEAENLEQLIDQKLKDYEDLREDMRGKELEVKNLLEKGKTEQQTADQLLARADAAKALAEEAAKKGRDTLQEANDILNNLKDFDRRVNDNKTAAEEALRKIPAINQTITEANEKTREAQQALGSAAADATEAKNKAHEAERIASAVQKNATSTKAEAERTFAEVTDLDNEVNNMLKQLQEAEKELKRKQDDADQDMMMAGMASQAAQEAEINARKAKNSVTSLLSIINDLLEQLGQLDTVDLNKLNEIEGTLNKAKDEMKVSDLDRKVSDLENEAKKQEAAIMDYNRDIEEIMKDIRNLEDIRKTLPSGCFNTPSIEKP

SEQ ID NO: 116 - DNA, 2486 bp, Homo sapien
ggcatcaccggccagccgggtggagtgagcggcgctgggctcgggctccggctccgcgggcggaagaggcggcggcggcggcagaagcggcggcggcggcggcggcgggagccgaggaggaggttccggacgctgcttaggaaccggggactcaggagtgcccgcgccctgagcgctcagctccagaggcgtcatggctgagtacgggaccctcctgcaagacctgaccaacaacatcacccttgaagatctagaacagctcaagtcggcctgcaaggaagacatccccagcgaaaagagtgaggagatcactactggcagtgcctggtttagcttcctggagagccacaacaagctggacaaagacaacctctcctacattgagcacatctttgagatctcccgccgtcctgacctactcactatggtggttgactacagaacccgtgtgctgaaaatctctgaggaggatgagctggacaccaagctaacccgtatccccagtgccaagaagtacaaagacattatccggcagccctctgaggaagagatcatcaaattggctcccccaccgaagaaggcctgagcaagggggaggaagaggaggaaggttggaccttcatcagaccactcccttcccccatcctccaggagagggggcaagggcaacccaccatctacccacttactaacctggtcctaacccccttactgtgcgcgtgtgtgtgcgtgtgcgcacgctctggctgtttgtctatatgtctagctcatctagttcctcttcttaaggggatgggggtcaggggctaggggagggggctgagtttccccactttaggaggaggtgggggctatttctatgcaaatagaaatcagcacattcctcctacttccctttcctccactccccccatatctttaaagtgtggaagcagaaaggacctgcattttcctacattgaggagctgacataggggtaaggtatgggagaggtaggtggatccagggaaaagcagtggggacggaaggcaaagagaccactcaacccccacctggaaggggcaaagaaaagccagagttccatgtttgtactcctgtgctggactgtttcctgagtaccagcaggtccctttttgtctctcatgggcctagcataggtatgagccagggatcctttcctggtccctaagatcaaaccccatggagcagccagcgttagatgcccccacccacctgtactctggagagactgtgctgggaacatgtaccactgagcctgagatggggatgagggcagagagaggggagccccctcttccactcagttgttcctactcagactgttgcactctaaacctagggaggttgaagaatgagacccttaggttttaacacgaatcctgacaccaccatctatagggtcccaacttggttattgtaggcaaccttccctctctccttggtgaagaacatcccaagccagaaagaagttaactacagtgttttcctttgcaccgatccccaccccaattcaatcccggaagggacttacttaggaaacccttctttactagatatcctggccccctgggcttgtgaacacctcctagccacatcactacagtacagtgagtgaccccagcctcctgcctaccccaagatgcccctccccaccctgaccgtgctaactgtgtgtacatatatattctacatatatgtatattaaaactgcactgccatgtctgcccttttttgtggtgtctagcattaacttattgtctaggccagagcgggggtgggaggggaatgccacagtgaagggagtggcagaatcaaattgctacatagtccaaacaaaaaagaaggctttttcaaaaaacattaaattcacatgcagtctcagagactatttagacaaagttcaagttaggagcttttaggatgtgggagtaaaactttaatgggaggggagggctggctgctggaagaaggaagaagccagactggttagacagtactcttaactcctagcccagcctagcgtgccctgcccctctggccactgctgcagacacctgccttaacacacacacctctaggactccacagttttgccttaaaggaccttcccaagtctccctttccctgtctggcttctcccttaagaagagagagatacttgtagaattgggtggggggaatgagcatgaactgtccttccatttgggatatgttacgttagagtgagagagagaataaggagcctttcttatggaagaaatgggagaagagagacagggttcttttcagcagagtctagtagtttctctgtaaggcaaaataatctaaaaagactaacctgcccacccactccttatattgctgtgagattgcccctatcttgtgctcttctgtctgcagtgtgcacggccttgttctaacccggaataaaggtgattgattgtattgcaaaaaaaaaaaaaaaa

SEQ ID NO: 117 - protein, 130 aa, Homo sapien
MAEYGTLLQDLTNNITLEDLEQLKSACKEDIPSEKSEEITTGSAWFSFLESHNKLDKDNLSYIEHIFEISRRPDLLTMVVDYRTRVLKISEEDELDTKLTRIPSAKKYKDIIRQPSEEEIIKLAPPPKKA

SEQ ID NO: 118 - DNA, 2467 bp, Homo sapien
catctttgtcagtgcacaaaatggcgccctacagcctactggtgactcggctgcagaaagctctgggtgtgcggcagtaccatgtggcctcagtcctgtgccaacgggccaaggtggcgatgagccactttgagcccaacgagtacatccattatgacctgctagagaagaacattaacattgttcgcaaacgactgaaccggccgctgacactctcggagaagattgtgtatggacacctggatgaccccgccagccaggaaattgagcgaggcaagtcgtacctgcggctgcggccggaccgtgtggccatgcaggatgcgacggcccagatggccatgctccagttcatcagcagcgggctgtccaaggtggctgtgccatccaccatccactgtgaccatctgattgaagcccaggttgggggcgagaaagacctgcgccgggccaaggacatcaaccaggaagtttataatttcctggcaactgcaggtgccaaatatggcgtgggcttctggaagcctggatctggaatcattcaccagattattctggaaaactatgcgtaccctggtgttcttctgattggcactgactcccacacccccaatggtggcggccttgggggcatctgcattggagttgggggtgccgatgctgtggatgtcatggctgggatcccctgggagctgaagtgccccaaggtgattggcgtgaagctgacgggctctctctccggttggtcctcacccaaagatgtgatcctgaaggtggcaggcatcctcacggtgaaaggtggcacaggtgcaatcgtggaataccacgggcctggtgtagactccatctcctgcactggcatggcgacaatctgcaacatgggtgcagaaattggggccaccacttccgtgttcccttacaaccacaggatgaagaagtacctgagcaagaccggccgggaagacattgccaatctagctgatgaattcaaggatcacttggtgcctgaccctggctgccattatgaccaactaattgaaattaacctcagtgagctgaagccacacatcaatgggcccttcacccctgacctggctcaccctgtggcagaagtgggcaaggtggcagagaaggaaggatggcctctggacatccgagtgggtctaattggtagctgcaccaattcaagctatgaagatatggggcgctcagcagctgtggccaagcaggcactggcccatggcctcaagtgcaagtcccagttcaccatcactccaggttccgagcagatccgcgccaccattgagcgggacggctatgcacagatcttgagggatctgggtggcattgtcctggccaatgcttgtggcccctgcattggccagtgggacaggaaggacatcaagaagggggagaagaacacaatcgtcacctcctacaacaggaacttcacgggccgcaacgacgcaaaccccgagacccatgcctttgtcacgtccccagagattgtcacagccctggccattgcgggaaccctcaagttcaacccagagaccgactacctgacgggcacggatggcaagaagttcaggctggaggctccggatgcagatgagcttcccaaaggggagtttgacccagggcaggacacctaccagcacccacccaaggacagcagcgggcagcatgtggacgtgagccccaccagccagcgcctgcagctcctggagccttttgacaagtgggatggcaaggacctggaggacctgcagatcctcatcaaggtcaaagggaagtgtaccactgaccacatctcagctgctggcccctggctcaagttccgtgggcacttggataacatctccaacaacctgctcattggtgccatcaacattgaaaacggcaaggccaactccgtgcgcaatgccgtcactcaggagtttggccccgtccctgacactgcccgctactacaagaaacatggcatcaggtgggtggtgatcggagacgagaactacggcgagggctcgagccgggagcatgcagctctggagcctcgccaccttgggggccgggccatcatcaccaagagctttgccaggatccacgagaccaacctgaagaaacagggcctgctgcctctgaccttcgctgacccggctgactacaacaagattcaccctgtggacaagctgaccattcagggcctgaaggacttcacccctggcaagcccctgaagtgcatcatcaagcaccccaacgggacccaggagaccatcctcctgaaccacaccttcaacgagacgcagattgagtggttccgcgctggcagtgccctcaacagaatgaaggaactgcaacagtgagggcagtgcctccccgccgcgctggcgtcaagttcagctccacgtgtgccatcagtggatccgatccgtccagccatggcttcctattccaagtagtgtaaccc

SEQ ID NO: 119 - protein, 780 aa, Homo sapien
MAPYSLLVTRLQKALGVRQYHVASVLCQRAKVAMSHFEPNEYIHYDLLEKNINIVRKRLNRPLTLSEKIVYGHLDDPASQEIERGKSYLRLRPDRVAMQDATAQMAMLQFISSGLSKVAVPSTIHCDHLIEAQVGGEKDLRRAKDINQEVYNFLATAGAKYGVGFWKPGSGIIHQIILENYAYPGVLLIGTDSHTPNGGGLGGICIGVGGADAVDVMAGIPWELKCPKVIGVKLTGSLSGWSSPKDVILKVAGILTVKGGTGAIVEYHGPGVDSISCTGMATICNMGAEIGATTSVFPYNHRMKKYLSKTGREDIANLADEFKDHLVPDPGCHYDQLIEINLSELKPHINGPFTPDLAHPVAEVGKVAEKEGWPLDIRVGLIGSCTNSSYEDMGRSAAVAKQALAHGLKCKSQFTITPGSEQIRATIERDGYAQILRDLGGIVLANACGPCIGQWDRKDIKKGEKNTIVTSYNRNFTGRNDANPETHAFVTSPEIVTALAIAGTLKFNPETDYLTGTDGKKFRLEAPDADELPKGEFDPGQDTYQHPPKDSSGQHVDVSPTSQRLQLLEPFDKWDGKDLEDLQILIKVKGKCTTDHISAAGPWLKFRGHLDNISNNLLIGAINIENGKANSVRNAVTQEFGPVPDTARYYKKHGIRWVVIGDENYGEGSSREHAALEPRHLGGRAIITKSFARIHETNLKKQGLLPLTFADPADYNKIHPVDKLTIQGLKDFTPGKPLKCIIKHPNGTQETILLNHTFNETQIEWFRAGSALNRMKELQQ

SEQ ID NO: 120 - DNA, 1897 bp, Homo sapien
ctccgaacaggaagaggacgaaaaaaataaccgtccgcgacgccgagacaaaccggacccgcaaccaccatgaacagcaaaggtcaatatccaacacagccaacctaccctgtgcagcctcctgggaatccagtataccctcagaccttgcatcttcctcaggctccaccctataccgatgctccacctgcctactcagagctctatcgtccgagctttgtgcacccaggggctgccacagtccccaccatgtcagccgcatttcctggagcctctctgtatcttcccatggcccagtctgtggctgttgggcctttaggttccacaatccccatggcttattatccagtcggtcccatctatccacctggctccacagtgctggtggaaggagggtatgatgcaggtgccagatttggagctggggctactgctggcaacattcctcctccacctcctggatgccctcccaatgctgctcagcttgcagtcatgcagggagccaacgtcctcgtaactcagcggaaggggaacttcttcatgggtggttcagatggtggctacaccatctggtgaggaaccaaggccacctctgtgccgggaaagacatcacataccttcagcacttctcacaatgtaactgctttagtcatattaacctgaagttgcagtttagacacatgttgttggggtgtctttctggtgcccaaactttcaggcacttttcaaatttaataaggaaccatgtaatggtagcagtacctccctaaagcattttgaggtaggggaggtatccattcataaaatgaatgtgggtgaagccgccctaaggattttcctttaatttctctggagtaatactgtaccatactggtctttgcttttagtaataaaacatcaaattaggtttggagggaactttgatcttcctaagaattaaagttgccaaattattctgattggtctttaatctcctttaagtctttgatatatattacttgttataaatggaacgcattagttgtctgccttttcctttccatcccttgccccacccatcccatctccaaccctagtcttccatttcctcccgccagtctccattgaatcaatggtgcaggacagaaagccagtcagactaatttccttctttcctcgcacttctccccactcgtcatcttttaactagtgtttcacaaggatcctctgaaaccctctctgtgccccaagtacagatgccattacttctgctttcgtatctcctcaggcaaaagtggagggtgccttatgggccctcctcataggttgtctctgcatacacgaacctaacccaaatttgctttggtgccagaaaaactgagctatgtttgaacaaagatgtcgtgcaaactgtactgtgaacaacagttggtttaaaatatgaggggcaaggaggaggatgcatttcaaaagcttgattgatgtgttcagagctaaattaagaggagttttcagatcaaaaactggttaccattttttgtcagagtgtctgatgcggccactcattcggctccccagaattcctagactgggttaatagggtcatattgtgaatgtctcactacaaaatgacttgagtccagtgaaatctcattagggtttaagaatatttcagggatccttaatgttttgatttttgttttctgaaattggattttattttattttatcttataatttcagttcatctaaattgtgtgttctgtacatgtgatgtttgactgtaccattgactgttatggaagttcagcgttgtatgtctctctctacactgtggtgcacttaacttgtggaatttttatactaaaaatgtagaataaagactattttgaagatttgaataaagtgatgaagttgc

SEQ ID NO: 121 - protein, 168 aa, Homo sapien
MNSKGQYPTQPTYPVQPPGNPVYPQTLHLPQAPPYTDAPPAYSELYRPSFVHPGAATVPTMSAAFPGASLYLPMAQSVAVGPLGSTIPMAYYPVGPIYPPGSTVLVEGGYDAGARFGAGATAGNIPPPPPGCPPNAAQLAVMQGANVLVTQRKGNFFMGGSDGGYTIW

SEQ ID NO: 122 - DNA, 3953 bp, Homo sapien
ggcacgaggaaggagtcggggtcttccccagttttctcagccaggcggcggcggcgactggcaatgtttggcctcaaaagaaacgcggtaatcggactcaacctctactgtgggggggccggcttgggggccggcagcggcggcgccacccgcccgggagggcgacttttggctacggagaaggaggcctcggcccggcgagagatagggggaggggaggccggcgcggtgattggcggaagcgccggcgcaagccccccgtccaccctcacgccagactcccggagggtcgcgcggccgccgcccattggcgccgaggtccccgacgtcaccgcgacccccgcgaggctgcttttcttcgcgcccacccgccgcgcggcgccgcttgaggagatggaagccccggccgctgacgccatcatgtcgcccgaagaggagctggacgggtacgagccggagcctctcgggaagcggccggctgtcctgccgctgctggagttggtcggggaatctggtaataacaccagtacggacgggtcactaccctcgacgccgccgccagcagaggaggaggaggacgagttgtaccggcagtcgctggagattatctctcggtaccttcgggagcaggccaccggcgccaaggacacaaagccaatgggcaggtctggggccaccagcaggaaggcgctggagaccttacgacgggttggggatggcgtgcagcgcaaccacgagacggccttccaaggcatgcttcggaaactggacatcaaaaacgaagacgatgtgaaatcgttgtctcgagtgatgatccatgttttcagcgacggcgtaacaaactggggcaggattgtgactctcatttcttttggtgcctttgtggctaaacacttgaagaccataaaccaagaaagctgcatcgaaccattagcagaaagtatcacagacgttctcgtaaggacaaaacgggactggctagttaaacaaagaggctgggatgggtttgtggagttcttccatgtagaggacctagaaggtggcatcaggaatgtgctgctggcttttgcaggtgttgctggagtaggagctggtttggcatatctaataagatagccttactgtaagtgcaatagttgacttttaaccaaccaccaccaccaccaaaaccagtttatgcagttggactccaagctgtaacttcctagagttgcaccctagcaacctagccagaaaagcaagtggcaagaggattatggctaacaagaataaatacatgggaagagtgctccccattgattgaagagtcactgtctgaaagaagcaaagttcagtttcagcaacaaacaaactttgtttgggaagctatggaggaggacttttagatttagtgaagatggtagggtggaaagacttaatttccttgttgagaacaggaaagtggccagtagccaggcaagtcatagaattgattacccgccgaattcattaatttactgtagtgttaagagaagcactaagaatgccagtgacctgtgtaaaagttacaagtaatagaactatgactgtaagcctcagtactgtacaagggaagcttttcctctctctaattagctttcccagtatacttcttagaaagtccaagtgttcaggacttttatacctgttatactttggcttggtttccatgattcttactttattagcctagtttatcaccaataatacttgacggaaggctcagtaattagttatgaatatggatatcctcaattcttaagacagcttgtaaatgtatttgtaaaaattgtatatatttttacagaaagtctatttctttgaaacgaaggaagtatcgaatttacattagtttttttcatacccttttgaactttgcaacttccgtaattaggaacctgtttcttacagcttttctatgctaaactttgttctgttcagttctagagtgtatacagaacgaattgatgtgtaactgtatgcagactggttgtagtggaacaaatctgataactatgcaggtttaaattttcttatctgattttggtaagtattccttagataggtttttctttgaaaacctgggattgagaggttgatgaatggaaattctttcacttcattatatgcaagttttcaataattaggtctaagtggagttttaaggttactgatgacttacaaataatgggctctgattgggcaatactcatttgagttccttccatttgacctaatttaactggtgaaatttaaagtgaattcatgggctcatctttaaagcttttactaaaagattttcagctgaatggaactcattagctgtgtgcatataaaaagatcacatcaggtggatggagagacatttgatcccttgtttgcttaataaattataaaatgatggcttggaaaagcaggctagtctaaccatggtgctattattaggcttgcttgttacacacacaggtctaagcctagtatgtcaataaagcaaatacttactgttttgtttctattaatgattcccaaaccttgttgcaagtttttgcattggcatctttggatttcagtcttgatgtttgttctatcagacttaaccttttatttcctgtccttccttgaaattgctgattgttctgctccctctacagatatttatatcaattcctacagctttcccctgccatccctgaactctttctagcccttttagattttggcactgtgaaacccctgctggaaacctgagtgaccctccctccccaccaagagtccacagacctttcatctttcacgaacttgatcctgttagcaggtggtaataccatgggtgctgtgacactaacagtcattgagaggtgggaggaagtcccttttccttggactggtatcttttcaactattgttttatcctgtctttgggggcaatgtgtcaaaagtcccctcaggaattttcagaggaaagaacattttatgaggctttctctaaagtttcctttgtataggagtatgctcacttaaatttacagaaagaggtgagctgtgttaaacctcagagtttaaaagctactgataaactgaagaaagtgtctatattggaactagggtcatttgaaagcttcagtctcggaacatgacctttagtctgtggactccatttaaaaataggtatgaataagatgactaagaatgtaatggggaagaactgccctgcctgcccatctcagagccataaggtcatctttgctagagctatttttacctatgtatttatcgttcttgatcataagccgcttatttatatcatgtatctctaaggacctaaaagcactttatgtagtttttaattaatcttaagatctggttacggtaactaaaaaagcctgtctgccaaatccagtggaaacaagtgcatagatgtgaattggtttttaggggccccacttcccaattcattaggtatgactgtggaaatacagacaaggatcttagttgatattttgggcttggggcagtgagggcttaggacaccccaagtggtttgggaaaggaggaggggagtggtgggtttatagggggaggaggaggcaggtggtctaagtgctgactggctacgtagtttgggcaaatcctccaaaagggaaagggaggatttgcttagaaggatggcgctcccagtgactactttttgacttctgtttgtcttacgcttctctcagggaaaaacatgcagtcctctagtgtttcatgtacattctgtggggggtgaacaccttggttctggttaaacagctgtacttttgatagctgtgccaggaagggttaggaccaactacaaattaatgttggttgtcaaatgtagtgtgtttccctaactttctgtttttcctgagaaaaaaaaataaatcttttattcaaaaaaaaaaaaaaaaaaa

SEQ ID NO: 123 - protein, 350 aa, Homo sapien
MFGLKRNAVIGLNLYCGGAGLGAGSGGATRPGGRLLATEKEASARREIGGGEAGAVIGGSAGASPPSTLTPDSRRVARPPPIGAEVPDVTATPARLLFFAPTRRAAPLEEMEAPAADAIMSPEEELDGYEPEPLGKRPAVLPLLELVGESGNNTSTDGSLPSTPPPAEEEEDELYRQSLEIISRYLREQATGAKDTKPMGRSGATSRKALETLRRVGDGVQRNHETAFQGMLRKLDIKNEDDVKSLSRVMIHVFSDGVTNWGRIVTLISFGAFVAKHLKTINQESCIEPLAESITDVLVRTKRDWLVKQRGWDGFVEFFHVEDLEGGIRNVLLAFAGVAGVGAGLAYLIR

SEQ ID NO: 124 - DNA, 2202 bp, Homo sapien
cacgcttgccgccgccccgcagaaatgcttcggttacccacagtctttcgccagatgagaccggtgtccagggtactggctcctcatctcactcgggcttatgccaaagatgtaaaatttggtgcagatgcccgagccttaatgcttcaaggtgtagaccttttagccgatgctgtggccgttacaatggggccaaagggaagaacagtgattattgagcagggttggggaagtcccaaagtaacaaaagatggtgtgactgttgcaaagtcaattgacttaaaagataaatacaagaacattggagctaaacttgttcaagatgttgccaataacacaaatgaagaagctggggatggcactaccactgctactgtactggcacgctctatagccaaggaaggcttcgagaagattagcaaaggtgctaatccagtggaaatcaggagaggtgtgatgttagctgttgatgctgtaattgctgaacttaaaaagcagtctaaacctgtgaccacccctgaagaaattgcacaggttgctacgatttctgcaaacggagacaaagaaattggcaatatcatctctgatgcaatgaaaaaagttggaagaaagggtgtcatcacagtaaaggatggaaaaacactgaatgatgaattagaaattattgaaggcatgaagtttgatcgaggctatatttctccatactttattaatacatcaaaaggtcagaaatgtgaattccaggatgcctatgttctgttgagtgaaaagaaaatttctagtatccagtccattgtacctgctcttgaaattgccaatgctcaccgtaagcctttggtcataatcgctgaagatgttgatggagaagctctaagtacactcgtcttgaataggctaaaggttggtcttcaggttgtggcagtcaaggctccagggtttggtgacaatagaaagaaccagcttaaagatatggctattgctactggtggtgcagtgtttggagaagagggattgaccctgaatcttgaagacgttcagcctcatgacttaggaaaagttggagaggtcattgtgaccaaagacgatgccatgctcttaaaaggaaaaggtgacaaggctcaaattgaaaaacgtattcaagaaatcattgagcagttagatgtcacaactagtgaatatgaaaaggaaaaactgaatgaacggcttgcaaaactttcagatggagtggctgtgctgaaggttggtgggacaagtgatgttgaagtgaatgaaaagaaagacagagttacagatgcccttaatgctacaagagctgctgttgaagaaggcattgttttgggagggggttgtgccctccttcgatgcattccagccttggactcattgactccagctaatgaagatcaaaaaattggtatagaaattattaaaagaacactcaaaattccagcaatgaccattgctaagaatgcaggtgttgaaggatctttgatagttgagaaaattatgcaaagttcctcagaagttggttatgatgctatggctggagattttgtgaatatggtggaaaaaggaatcattgacccaacaaaggttgtgagaactgctttattggatgctgctggtgtggcctctctgttaactacagcagaagttgtagtcacagaaattcctaaagaagagaaggaccctggaatgggtgcaatgggtggaatgggaggtggtatgggaggtggcatgttctaactcctagactagtgctttacctttattaatgaactgtgacaggaagcccaaggcagtgttcctcaccaataacttcagagaagtcagttggagaaaatgaagaaaaaggctggctgaaaatcactataaccatcagttactggtttcagttgacaaaatatataatggtttactgctgtcattgtccatgcctacagataatttattttgtatttttgaataaaaaacatttgtacattcctgatactgggtacaagagccatgtaccagtgtactgctttcaacttaaatcactgaggcatttttactactattctgttaaaatcaggattttagtgcttgccaccaccagatgagaagttaagcagcctttctgtggagagtgagaataattgtgtacaaagtagagaagtatccaattatgtgacaacctttgtgtaataaaaatttgtttaa

SEQ ID NO: 125 - protein, 573 aa, Homo sapien
MLRLPTVFRQMRPVSRVLAPHLTRAYAKDVKFGADARALMLQGVDLLADAVAVTMGPKGRTVIIEQGWGSPKVTKDGVTVAKSIDLKDKYKNIGAKLVQDVANNTNEEAGDGTTTATVLARSIAKEGFEKISKGANPVEIRRGVMLAVDAVIAELKKQSKPVTTPEEIAQVATISANGDKEIGNIISDAMKKVGRKGVITVKDGKTLNDELEIIEGMKFDRGYISPYFINTSKGQKCEFQDAYVLLSEKKISSIQSIVPALEIANAHRKPLVIIAEDVDGEALSTLVLNRLKVGLQVVAVKAPGFGDNRKNQLKDMAIATGGAVFGEEGLTLNLEDVQPHDLGKVGEVIVTKDDAMLLKGKGDKAQIEKRIQEIIEQLDVTTSEYEKEKLNERLAKLSDGVAVLKVGGTSDVEVNEKKDRVTDALNATRAAVEEGIVLGGGCALLRCIPALDSLTPANEDQKIGIEIIKRTLKIPAMTIAKNAGVEGSLIVEKIMQSSSEVGYDAMAGDFVNMVEKGIIDPTKVVRTALLDAAGVASLLTTAEVVVTEIPKEEKDPGMGAMGGMGGGMGGGMF

SEQ ID NO: 126 - DNA, 928 bp, Homo sapien
cggggcggcaggcttctcgagctccgggcccgcggcaacctcgggcgctgttctgcaggccgcgaccggcatgtacgagcaactcaagggcgagtggaaccgtaaaagccccaatcttagcaagtgcggggaagagctgggtcgactcaagctagttcttctggagctcaacttcttgccaaccacagggaccaagctgaccaaacagcagctaattctggcccgtgacatactggagatcggggcccaatggagcatcctacgcaaggacatcccctccttcgagcgctacatggcccagctcaaatgctactactttgattacaaggagcagctccccgagtcagcctatatgcaccagctcttgggcctcaacctcctcttcctgctgtcccagaaccgggtggctgagttccacacggagttggagcggctgcctgccaaggacatacagaccaatgtctacatcaagcacccagtgtccctggagcaatacctgatggagggcagctacaacaaagtgttcctggccaagggtaacatccccgccgagagctacaccttcttcattgacatcctgctcgacactatcagggatgagatcgctgggtgcatcgagaaggcctacgagaaaatccttttcactgaggccacccggatcctcttcttcaacacacccaaaaagatgacagactacgccaagaagcgagggtgggtcctgggccccaacaactactacagttttgccagccagcagcagaagccggaagacaccaccattccctccacagaactggccaaacaggtcatcgagtatgcccggcagctggagatgatcgtctgagccccccgggcactgggtggggcagggcacgagttatttaaaacagttacactgcagggtttcgcccaataaaggtggactgac

SEQ ID NO: 127 - protein, 257 aa, Homo sapien
MYEQLKGEWNRKSPNLSKCGEELGRLKLVLLELNFLPTTGTKLTKQQLILARDILEIGAQWSILRKDIPSFERYMAQLKCYYFDYKEQLPESAYMHQLLGLNLLFLLSQNRVAEFHTELERLPAKDIQTNVYIKHPVSLEQYLMEGSYNKVFLAKGNIPAESYTFFIDILLDTIRDEIAGCIEKAYEKILFTEATRILFFNTPKKMTDYAKKRGWVLGPNNYYSFASQQQKPEDTTIPSTELAKQVIEYARQLEMIV

SEQ ID NO: 128 - DNA, 5329 bp, Homo sapien
  Unsure 1986: Unknown base
gtggtgtcggtgtcggcagcatccccggcgccctgctgcggtcgccggagccctcggcctctgttctcctccccctcccgcccttacctccacgcgggaccgcccgcgccagtcaactcctcgcactttgcccctgcttggcagcggataaaagggggctgaggaaataccggacacgtccacccgttgccagctctagcctttaaattcccggctcgggacctccacgcaccgggctagcgccgacaaccagctagcgtgcaaggcgccgcggctcagcgcgtaccggcgggcttcgaaaccgcagtcctccggcgaccccgaactccgctccggagcctcagccccctggaaagtgatcccggcatcggagagccaagatgccggcccacttgctgcaggacgatatctctagctcctataccaccaccaccaccattacagcgcctccctccagggtcctgcagaatggaggagataagttggagacgatgcccctctacttggaagacgacattcgccctgatataaaagatgatatatatgaccccacctacaaggataaggaaggcccaagccccaaggttgaatatgtctggagaaacatcatccttatgtctctgctacacttgggagccctgtatgggatcactttgattcctacctgcaagttctacacctggctttggggggtattctactattttgtcagtgccctgggcataacagcaggagctcatcgtctgtggagccaccgctcttacaaagctcggctgcccctacggctctttctgatcattgccaacacaatggcattccagaatgatgtctatgaatgggctcgtgaccaccgtgcccaccacaagttttcagaaacacatgctgatcctcataattcccgacgtggctttttcttctctcacgtgggttggctgcttgtgcgcaaacacccagctgtcaaagagaaggggagtacgctagacttgtctgacctagaagctgagaaactggtgatgttccagaggaggtactacaaacctggcttgctgctgatgtgcttcatcctgcccacgcttgtgccctggtatttctggggtgaaacttttcaaaacagtgtgttcgttgccactttcttgcgatatgctgtggtgcttaatgccacctggctggtgaacagtgctgcccacctcttcggatatcgtccttatgacaagaacattagcccccgggagaatatcctggtttcacttggagctgtgggtgagggcttccacaactaccaccactcctttccctatgactactctgccagtgagtaccgctggcacatcaacttcaccacattcttcattgattgcatggccgccctcggtctggcctatgaccggaagaaagtctccaaggccgccatcttggccaggattaaaagaaccggagatggaaactacaagagtggctgagtttggggtccctcaggttcctttttcaaaaaccagccaggcagaggttttaatgtctgtttattaactactgaataatgctaccaggatgctaaagatgatgatgttaacccattccagtacagtattcttttaaaattcaaaagtattgaaagccaacaactctgcctttatgatgctaagctgatattatttcttctcttatcctctctctcttctaggcccattgtcctccttttcactttaatcgccctcctttcccttattgcctcccaggcaagcagctggtcagtctttgctcagtgtccagcttccaaagcctagacaacctttctgtagcctaaaacgaatggtctttgctccagataactctctttccttgagctgttgtgagctttgaagtaggtggcttgagctagagataaaacagaatcttctgggtagtcccctgttgattatcttcagcccaggcttttgctagatggaatggaaaagcaacttcatttgacacaaagcttctaaagcnaggtaaattgtcgggggagagagttagcatgtatgaatgtaaggatgagggaagcgaaggaacctctcgccatgatcagacatacagctgcctacctaatgaggacttcaagccccaccacatagcatgcttcctttctctcctggctcggggtaaaaagtggctgcggtgtttggcaatgctaattcaatgccgcaacatatagttgaggccgaggataaagaaaagacattttaagtttgtagtaaaagtggtctctgctggggaagggttttcttttctttttttctttaataacaaggagatttcttagttcatatatcaagaagtcttgaagttgggtgtttccagaattggtaaaaacagcagctcatagaattttgagtattccatgagctgctcattacagttctttcctctttctgctctgccatcttcaggatattggttcttcccctcatagtaataagatggctgtggcatttccaaacatccaaaaaaagggaaggatttaaggaggtgaagtcgggtcaaaaataaaatatatatacatatatacattgcttagaacgttaaactattagagtatttcccttccaaagagggatgtttggaaaaaactctgaaggagaggaggaattagttgggatgccaatttcctctccactgctggacatgagatggagaggctgagggacaggatctataggcagcttctaagagcgaacttcacataggaagggatctgagaacacgttcaggggttgagaaggttactgagtgagttattgggagtcttaataaactagatattaggtccattcattaattagttccagtttctccttgaaatgagtaaaaactagaaggcttctctccacagtgttgtgccccttcactcatttttttttgaggagaagggggtctctgttaacatctagcctaaagtatacaaactgcctggggggcagggttaggaatctcttcactaccctgattcttgattcctggctctaccctgtctgtcccttttctttgaccagatctttctcttccctgaacgttttcttctttccctggacaggcagcctcctttgtgtgtattcagaggcagtgatgacttgctgtccaggcagctccctcctgcacacagaatgctcagggtcactgaaccactgcttctcttttgaaagtagagctagctgccactttcacgtggcctccgcagtgtctccacctacacccctgtgctcccctgccacactgatggctcaagacaaggctggcaaaccctcccagaaacatctctggcccagaaagcctctctctccctccctctctcatgagaagccaagcgctcatgttgagccagtgggccagccacagagcaaaagagggtttattttcagtcccctctctctgggtcagaaccagagggcatgctgaatgccccctgcttacttggtgagggtgccccgcctgagtcagtgctctcagctggcagtgcaatgcttgtagaagtaggaggaaacagttctcactgggaagaagcaagggcaagaacccaagtgcctcacctcgaaaggaggccctgttccctggagtcagggtgaactgcaaagctttggctgagacctgggatttgagataccacaaaccctgctgaacacagtgtctgttcagcaaactaaccagcattccctacagcctagggcagacaatagtatagaagtctggaaaaaaacaaaaacagaatttgagaaccttggaccactcctgtccctgtagctcagtcatcaaagcagaagtctggctttgctctattaagattggaaatgtacactaccaaacactcagtccactgttgagccccagtgctggaagggaggaaggcctttcttctgtgttaattgcgtagaggctacaggggttagcctggactaaaggcatccttgtctttgagctattcacctcagtagaaaaggatctaagggaagatcactgtagtttagttctgttgacctgtgcacctaccccttggaaatgtctgctggtatttctaattccacaggtcatcagatgcctgcttgataatatataaacaataaaaacaactttcacttcttcctattgtaatcgtgtgccatggatctgatctgtaccatgaccctacataaggctggatggcacctcaggctgagggccccaatgtatgtgtggctgtgggtgtgggtgggagtgtgtctgctgagtaaggaacacgattttcaagattctaaagctcaattcaagtgacacattaatgataaactcagatctgatcaagagtccggatttctaacagtccttgctttggggggtgtgctggcaacttagctcaggtgccttacatcttttctaatcacagtgttgcatatgagcctgccctcactccctctgcagaatccctttgcacctgagaccctactgaagtggctggtagaaaaaggggcctgagtggaggattatcagtatcacgatttgcaggattcccttctgggcttcattctggaaacttttgttagggctgcttttcttaagtgcccacatttgatggagggtggaaataatttgaatgtatttgatttataagtttttttttttttttgggttaaaagatggttgtagcatttaaaatggaaaattttctccttggtttgctagtatcttgggtgtattctctgtaagtgtagctcaaataggtcatcatgaaaggttaaaaaagcgaggtggccatgttatgctggtggttgccagggcctccaaccactgtgccactgacttgctgtgtgaccctgggcaagtcacttaactataaggtgcctcagttttccttctgttaaaatggggataataatactgacctacctcaaagggcagttttgaggcatgactaatgctttttagaaagcattttgggatccttcagcacaggaattctcaagacctgagtattttttataataggaatgtccaccatgaacttgatacgtccgtgtgtcccagatgctgtcattagtctatatggttctccaagaaactgaatgaatccattggagaagcggtggataactagccagacaaaatttgagaatacataaacaacgcattgccacggaaacatacagaggatgccttttctgtgattgggtgggattttttccctttttatgtgggatatagtagttacttgtgacaagaataattttggaataatttctattaatatcaactctgaagctaattgtactaatctgagattgtgtttgttcataataaaagtgaagtgaatctgattgcactg

SEQ ID NO: 129 - protein, 359 aa, Homo sapien
MPAHLLQDDISSSYTTTTTITAPPSRVLQNGGDKLETMPLYLEDDIRPDIKDDIYDPTYKDKEGPSPKVEYVWRNIILMSLLHLGALYGITLIPTCKFYTWLWGVFYYFVSALGITAGAHRLWSHRSYKARLPLRLFLIIANTMAFQNDVYEWARDHRAHHKFSETHADPHNSRRGFFFSHVGWLLVRKHPAVKEKGSTLDLSDLEAEKLVMFQRRYYKPGLLLMCFILPTLVPWYFWGETFQNSVFVATFLRYAVVLNATWLVNSAAHLFGYRPYDKNISPRENILVSLGAVGEGFHNYHHSFPYDYSASEYRWHINFTTFFIDCMAALGLAYDRKKVSKAAILARIKRTGDGNYKSG

SEQ ID NO: 130 - DNA, 1314 bp, Homo sapien
tttccggccgcggtatgaggggcggggccggggctgctgtgggagagttcggttgctgcggcggggcctgcacgttgactgtgggaaactcggaaacaagctcacatcttcctgtgggaaaccttctagcaacaggatgagtctgcagtggactgcagttgccaccttcctctatgcggaggtctttgttgtgttgcttctctgcattcccttcatttctcctaaaagatggcagaagattttcaagtcccggctggtggagttgttagtgtcctatggcaacaccttctttgtggttctcattgtcatccttgtgctgttggtcatcgatgccgtgcgcgaaattcggaagtatgatgatgtgacggaaaaggtgaacctccagaacaatcccggggccatggagcacttccacatgaagcttttccgtgcccagaggaatctctacattgctggcttttccttgctgctgtccttcctgcttagacgcctggtgactctcatttcgcagcaggccacgctgctggcctccaatgaagcctttaaaaagcaggcggagagtgctagtgaggcggccaagaagtacatggaggagaatgaccagctcaagaagggagctgctgttgacggaggcaagttggatgtcgggaatgctgaggtgaagttggaggaagagaacaggagcctgaaggctgacctgcagaagctaaaggacgagctggccagcactaagcaaaaactagagaaagctgaaaaccaggttctggccatgcggaagcagtctgagggcctcaccaaggagtacgaccgcttgctggaggagcacgcaaagctgcaggctgcagtagatggtcccatggacaagaaggaagagtaagggcctccttcctcccctgcctgcagctggcttccacctggcacgtgcctgctgcttcctgagagcccggcctctccctccagtacttctgtttgtgcccttctgcttcccccattcccttccacagctcatagctcgtcatctcggcccttgtccacactctccaagcacattacaggggacctgattgctacacgttcagaatgcgtttgctgtcatcctgcttggcctggccaggcctggcacagccttggcttccacgcctgagcgtggagagcacgagttagttgtagtccggcttgcggtggggctgacttcctgttggtttgagcccctttttgttttgccctctgggtgttttctttggtcccgcaggagggtgggtggaacaggtggactggagtttctcttgagggcaataaaagttttcatggtgg

SEQ ID NO: 131 - protein, 246 aa, Homo sapien
MSLQWTAVATFLYAEVFVVLLLCIPFISPKRWQKIFKSRLVELLVSYGNTFFVVLIVILVLLVIDAVREIRKYDDVTEKVNLQNNPGAMEHFHMKLFRAQRNLYIAGFSLLLSFLLRRLVTLISQQATLLASNEAFKKQAESASEAAKKYMEENDQLKKGAAVDGGKLDVGNAEVKLEEENRSLKADLQKLKDELASTKQKLEKAENQVLAMRKQSEGLTKEYDRLLEEHAKLQAAVDGPMDKKEE

SEQ ID NO: 132 - DNA, 1996 bp, Homo sapien
tccggcaacgccaaccgctccgctgcgcgcaggctgggctgcaggctctcggctgcagcgctgggctggtgtgcagtggtgcgaccacggctcacggcagcctcagccacccagatgtaagcgatctggttcccacctcagcctcccgagtagtggatctaggatccggcttccaacatgtggcagctctgggcctccctctgctgcctgctggtgttggccaatgcccggagcaggccctctttccatcccctgtcggatgagctggtcaactatgtcaacaaacggaataccacgtggcaggccgggcacaacttctacaacgtggacatgagctacttgaagaggctatgtggtaccttcctgggtgggcccaagccaccccagagagttatgtttaccgaggacctgaagctgcctgcaagcttcgatgcacgggaacaatggccacagtgtcccaccatcaaagagatcagagaccagggctcctgtggctcctgctgggccttcggggctgtggaagccatctctgaccggatctgcatccacaccaatgcgcacgtcagcgtggaggtgtcggcggaggacctgctcacatgctgtggcagcatgtgtggggacggctgtaatggtggctatcctgctgaagcttggaacttctggacaagaaaaggcctggtttctggtggcctctatgaatcccatgtagggtgcagaccgtactccatccctccctgtgagcaccacgtcaacggctcccggcccccatgcacgggggagggagatacccccaagtgtagcaagatctgtgagcctggctacagcccgacctacaaacaggacaagcactacggatacaattcctacagcgtctccaatagcgagaaggacatcatggccgagatctacaaaaacggccccgtggagggagctttctctgtgtattcggacttcctgctctacaagtcaggagtgtaccaacacgtcaccggagagatgatgggtggccatgccatccgcatcctgggctggggagtggagaatggcacaccctactggctggttgccaactcctggaacactgactggggtgacaatggcttctttaaaatactcagaggacaggatcactgtggaatcgaatcagaagtggtggctggaattccacgcaccgatcagtactgggaaaagatctaatctgccgtgggcctgtcgtgccagtcctgggggcgagatcggggtagaaatgcattttattctttaagttcacgtaagatacaagtttcaggcagggtctgaaggactggattggccaaacatcagacctgtcttccaaggagaccaagtcctggctacatcccagcctgtggttacagtgcagacaggccatgtgagccaccgctgccagcacagagcgtccttccccctgtagactagtgccgtgggagtacctgctgcccagctgctgtggccccctccgtgatccatccatctccagggagcaagacagagacgcaggatggaaagcggagttcctaacaggatgaaagttcccccatcagttcccccagtacctccaagcaagtagctttccacatttgtcacagaaatcagaggagagatggtgttgggagccctttggagaacgccagtctccaggtccccctgcatctatcgagtttgcaatgtcacaacctctctgatcttgtgctcagcatgattctttaatagaagttttatttttcgtgcactctgctaatcatgtgggtgagccagtggaacagcgggagcctgtgctggtttgcagattgcctcctaatgacgcggctcaaaaggaaaccaagtggtcaggagttgtttctgacccactgatctctactaccacaaggaaaatagtttaggagaaaccagcttttactgtttttgaaaaattacagcttcaccctgtcaagttaacaaggaatgcctgtgccaataaaaggtttctccaacttga

SEQ ID NO: 133 - protein, 339 aa, Homo sapien
MWQLWASLCCLLVLANARSRPSFHPLSDELVNYVNKRNTTWQAGHNFYNVDMSYLKRLCGTFLGGPKPPQRVMFTEDLKLPASFDAREQWPQCPTIKEIRDQGSCGSCWAFGAVEAISDRICIHTNAHVSVEVSAEDLLTCCGSMCGDGCNGGYPAEAWNFWTRKGLVSGGLYESHVGCRPYSIPPCEHHVNGSRPPCTGEGDTPKCSKICEPGYSPTYKQDKHYGYNSYSVSNSEKDIMAEIYKNGPVEGAFSVYSDFLLYKSGVYQHVTGEMMGGHAIRILGWGVENGTPYWLVANSWNTDWGDNGFFKILRGQDHCGIESEVVAGIPRTDQYWEKI

SEQ ID NO: 134 - DNA, 4586 bp, Homo sapien
tatacttcgctacttggctagagttgcaactacagctgggttatatggctctaatctgatggaacatactgagattgatcactggttggagttcagtgctacaaaattatcttcatgtgattcctttacttctacaattaatgaactcaatcattgcctgtctctgagaacatacttagttggaaactccttgagtttagcagatttatgtgtttgggccaccctaaaaggaaatgctgcctggcaagaacagttgaaacagaagaaagctccagttcatgtaaaacgttggtttggctttcttgaagcccagcaggccttccagtcagtaggtaccaagtgggatgtttcaacaaccaaagctcgagtggcacctgagaaaaagcaagatgttgggaaatttgttgagcttccaggtgcggagatgggaaaggttaccgtcagatttcctccagaggccagtggttacttacacattgggcatgcaaaagctgctcttctgaaccagcactaccaggttaactttaaagggaaactgatcatgagatttgatgacacaaatcctgaaaaagaaaaggaagattttgagaaggttatcttggaagatgttgcaatgttgcatatcaaaccagatcaatttacttatacttcggatcattttgaaactataatgaagtatgcagagaagctaattcaagaagggaaggcttatgtggatgatactcctgctgaacagatgaaagcagaacgtgagcagaggatagaatctaaacatagaaaaaaccctattgagaagaatctacaaatgtgggaagaaatgaaaaaagggagccagtttggtcactcctgttgtttgcgagcaaaaattgacatgagtagtaacaatggatgcatgagagatccaaccctttatcgctgcaaaattcaaccacatccaagaactggaaataaatacaatgtttatccaacatatgattttgcctgccccatagttgacagcatcgaaggtgttacacatgccctgagaacaacagaataccatgacagagatgagcagttttactggattattgaagctttaggcataagaaaaccatatatttgggaatatagtcggctaaatctcaacaacacagtgctatccaaaagaaaactcacatggtttgtcaatgaaggactagtagatggatgggatgacccaagatttcctacggttcgtggtgtactgagaagagggatgacagttgaaggactgaaacagtttattgctgctcagggctcctcacgttcagtcgtgaacatggagtgggacaaaatctgggcgtttaacaaaaaggttattgacccagtggctccacgatatgttgcattactgaagaaagaagtgatcccagtgaatgtacctgaagctcaggaggagatgaaagaagtagccaaacacccaaagaatcctgaggttggcttgaagcctgtgtggtatagtcccaaagttttcattgaaggtgctgatgcagagactttttcggagggtgagatggttacatttataaattggggcaacctcaacattacaaaaatacacaaaaatgcagatggaaaaatcatatctcttgatgcaaagtttaatttggaaaacaaagactacaagaaaaccactaaggtcacttggcttgcagagactacacatgctcttcctattccagtaatctgtgtcacttatgagcacttgatcacaaagccagtgctaggaaaagacgaggactttaagcagtatgtcaacaagaacagtaagcatgaagagctaatgctaggggatccctgccttaaggatttgaaaaaaggagatattatacaactccagagaagaggattcttcatatgtgatcaaccttatgaacctgttagcccatatagttgcaaggaagccccgtgtgttttgatatacattcctgatgggcacacaaaggaaatgccaacatcagggtcaaaggaaaagaccaaagtagaagccacaaaaaatgagacctctgctccttttaaggaaagaccaacaccttctctgaataataattgtactacatctgaggattccttggtcctttacaatagagtggctgttcaaggagatgtggttcgtgaattaaaagccaagaaagcaccaaaggaagatgtagatgcagctgtaaaacagcttttgtctttgaaagctgaatataaggagaaaactggccaggaatataaacctggaaaccctcctgctgaaataggacagaatatttcttctaattcctcagcaagtattctggaaagtaaatctctgtatgatgaagttgctgcacaaggggaggtggttcgtaagctaaaagctgaaaaatcccctaaggctaaaataaatgaagctgtagaatgcttactgtccctgaaggctcagtataaagaaaaaactgggaaggagtacatacctggtcagcccccattatctcaaagttcggattcaagcccaaccagaaattctgaacctgctggtttagaaacaccagaagcgaaagtactttttgacaaagtagcttctcaaggggaagtagttcggaaacttaaaactgaaaaagcccctaaggatcaagtagatatagctgttcaagaactccttcagctaaaggcacagtacaagtctttgataggagtagagtataagcctgtgtcggccactggagctgaggacaaagataagaagaagaaagaaaaagaaaataaatctgaaaagcagaataagcctcagaaacaaaatgatggccaaaggaaagacccttctaaaaaccaaggaggtgggctctcatcaagtggagcaggagaagggcaggggcctaagaaacagaccaggttgggtcttgaggcaaaaaaagaagaaaatcttgctgattggtattctcaggtcatcacaaagtcagaaatgattgaataccatgacataagtggctgttatattcttcgtccctgggcctatgccatttgggaagccatcaaggacttttttgatgctgagatcaagaaacttggtgttgaaaactgctacttccccatgtttgtgtctcaaagtgcattagagaaagagaagactcatgttgctgactttgccccagaggttgcttgggttacaagatctggcaaaaccgagctggcagaaccaattgccattcgtcctactagtgaaacagtaatgtatcctgcatatgcaaaatgggtacaatcacacagagacctgcccatcaagctcaatcagtggtgcaatgtggtgcgttgggaattcaagcatcctcagcctttcctacgtactcgtgaatttctttggcaggaagggcacagtgcttttgctaccatggaagaggcagcggaagaggtcttgcagatacttgacttatatgctcaggtatatgaagaactcctggcaattcctgttgttaaaggaagaaagacggaaaaggaaaaatttgcaggaggagactatacaactacaatagaagcatttatatctgctagtggaagagctatccagggaggaacatcacatcatttagggcagaatttttccaaaatgtttgaaatcgtttttgaagatccaaagataccaggagagaagcaatttgcctatcaaaactcctggggcctgacaactcgaactattggtgttatgaccatggttcatggggacaacatgggtttagtattaccaccccgtgtagcatgtgttcaggtggtgattattccttgtggcattaccaatgcactttctgaagaagacaaagaagcgctgattgcaaaatgcaatgattatcgaaggcgattactcagtgttaacatccgcgttagagctgatttacgagataattattctccaggttggaaattcaatcactgggagctcaagggagttcccattagacttgaagttgggccacgtgatatgaagagctgtcagtttgtagccgtcagacgagatactggagaaaagctgacagttgctgaaaatgaggcagagactaaacttcaagctattttggaagacatccaggtcacccttttcacaagggcttctgaagaccttaagactcatatggttgtggctaatacaatggaagactttcagaagatactagattctggaaagattgttcagattccattctgtggggaaattgactgtgaggactggatcaaaaagaccactgccagggatcaagatcttgaacctggtgctccatccatgggagctaaaagcctttgcatccccttcaaaccactctgtgaactgcagcctggagccaaatgtgtctgtggcaagaaccctgccaagtactacaccttatttggtcgcagctactgagggatgaacgaaagccccctcttcaactcctctcactttttaaagcattgatattagtatcttctcagatacagaccgttttatgattttttaaaaagtaaaagttctaaaatgaagtcacacaggacaattattcttatgcctaagttaacagtggataaaagacttttctgtaaacaactccagtaataaatatcatgaacta

SEQ ID NO: 135 - protein, 1440 aa, Homo sapien
MEHTEIDHWLEFSATKLSSCDSFTSTINELNHCLSLRTYLVGNSLSLADLCVWATLKGNAAWQEQLKQKKAPVHVKRWFGFLEAQQAFQSVGTKWDVSTTKARVAPEKKQDVGKFVELPGAEMGKVTVRFPPEASGYLHIGHAKAALLNQHYQVNFKGKLIMRFDDTNPEKEKEDFEKVILEDVAMLHIKPDQFTYTSDHFETIMKYAEKLIQEGKAYVDDTPAEQMKAEREQRIESKHRKNPIEKNLQMWEEMKKGSQFGHSCCLRAKIDMSSNNGCMRDPTLYRCKIQPHPRTGNKYNVYPTYDFACPIVDSIEGVTHALRTTEYHDRDEQFYWIIEALGIRKPYIWEYSRLNLNNTVLSKRKLTWFVNEGLVDGWDDPRFPTVRGVLRRGMTVEGLKQFIAAQGSSRSVVNMEWDKIWAFNKKVIDPVAPRYVALLKKEVIPVNVPEAQEEMKEVAKHPKNPEVGLKPVWYSPKVFIEGADAETFSEGEMVTFINWGNLNITKIHKNADGKIISLDAKFNLENKDYKKTTKVTWLAETTHALPIPVICVTYEHLITKPVLGKDEDFKQYVNKNSKHEELMLGDPCLKDLKKGDIIQLQRRGFFICDQPYEPVSPYSCKEAPCVLIYIPDGHTKEMPTSGSKEKTKVEATKNETSAPFKERPTPSLNNNCTTSEDSLVLYNRVAVQGDVVRELKAKKAPKEDVDAAVKQLLSLKAEYKEKTGQEYKPGNPPAEIGQNISSNSSASILESKSLYDEVAAQGEVVRKLKAEKSPKAKINEAVECLLSLKAQYKEKTGKEYIPGQPPLSQSSDSSPTRNSEPAGLETPEAKVLFDKVASQGEVVRKLKTEKAPKDQVDIAVQELLQLKAQYKSLIGVEYKPVSATGAEDKDKKKKEKENKSEKQNKPQKQNDGQRKDPSKNQGGGLSSSGAGEGQGPKKQTRLGLEAKKEENLADWYSQVITKSEMIEYHDISGCYILRPWAYAIWEAIKDFFDAEIKKLGVENCYFPMFVSQSALEKEKTHVADFAPEVAWVTRSGKTELAEPIAIRPTSETVMYPAYAKWVQSHRDLPIKLNQWCNVVRWEFKHPQPFLRTREFLWQEGHSAFATMEEAAEEVLQILDLYAQVYEELLAIPVVKGRKTEKEKFAGGDYTTTIEAFISASGRAIQGGTSHHLGQNFSKMFEIVFEDPKIPGEKQFAYQNSWGLTTRTIGVMTMVHGDNMGLVLPPRVACVQVVIIPCGITNALSEEDKEALIAKCNDYRRRLLSVNIRVRADLRDNYSPGWKFNHWELKGVPIRLEVGPRDMKSCQFVAVRRDTGEKLTVAENEAETKLQAILEDIQVTLFTRASEDLKTHMVVANTMEDFQKILDSGKIVQIPFCGEIDCEDWIKKTTARDQDLEPGAPSMGAKSLCIPFKPLCELQPGAKCVCGKNPAKYYTLFGRSY

SEQ ID NO: 136 - DNA, 1653 bp, Homo sapien
cggttgcttgctgtcccagcggcgccccctcatcaccgtcgccatgcccggaggtctgcttctcggggacgtggctcccaactttgaggccaataccaccgtcggccgcatccgtttccacgactttctgggagactcatggggcattctcttctcccaccctcgggactttaccccagtgtgcaccacagagcttggcagagctgcaaagctggcaccagaatttgccaagaggaatgttaagttgattgccctttcaatagacagtgttgaggaccatcttgcctggagcaaggatatcaatgcttacaattgtgaagagcccacagaaaagttaccttttcccatcatcgatgataggaatcgggagcttgccatcctgttgggcatgctggatccagcagagaaggatgaaaagggcatgcctgtgacagctcgtgtggtgtttgtttttggtcctgataagaagctgaagctgtctatcctctacccagctaccactggcaggaactttgatgagattctcagggtagtcatctctctccagctgacagcagaaaaaagggttgccaccccagttgattggaaggatggggatagtgtgatggtccttccaaccatccctgaagaagaagccaaaaaacttttcccgaaaggagtcttcaccaaagagctcccatctggcaagaaatacctccgctacacaccccagccttaagtctcttggagaagttggtgctgtgagccagaggatgtcagctgccaattgtgttttcctgcagcaattccataaacacatcctggtgtcatcacagccaaggtttttaggttgctataccaatggcttattaaatgaaaatggcactaaaagtttcttgagattctttatactctctgccttcagcaatcaattccattcatacatcagcactctgctggttctgtttgaaatatgttctgtatttaaaactcaaatcttgttggatctctgcagggcttgtgaccaatgaagtcatatttgttgatggttgacaaagcttgcttcactccatcagagaatgactatcaatttttttttaactgtcctatcacgtcctctcctgtcacccattttgaagagtggcagaacttgaagttcaacttcctctgtaaatatccaagtataaagcccaggaacttctagaataacccagatgcgctttaattttttttaatatgttttgatcacagaacttctagaataacccagatgctctttcatattcttttaatacatcttgatcacagctgggggaaaaaaagctttttaattctgtaccttcctagtagataagtgaagagcagggaaagagacctttaaatattttgctataaaaaaatttgtgataagtttctatcaaaatggggagattgcagaaaaggcttcccttggctcccaaggaggtgtagcaggtgtgagcaatattagtgccatgtgcctttcacacagggtttgcatttatcagtctgttttccgatgatgtgtacatgaaagagtacaccatgtgaagagaagagagaatgattgaaaatgttttagtatagaactcttcttgcagtgggttgctattttctagattttactttttagggaacaaaataaaatcctttgtt

SEQ ID NO: 137 - protein, 224 aa, Homo sapien
MPGGLLLGDVAPNFEANTTVGRIRFHDFLGDSWGILFSHPRDFTPVCTTELGRAAKLAPEFAKRNVKLIALSIDSVEDHLAWSKDINAYNCEEPTEKLPFPIIDDRNRELAILLGMLDPAEKDEKGMPVTARVVFVFGPDKKLKLSILYPATTGRNFDEILRVVISLQLTAEKRVATPVDWKDGDSVMVLPTIPEEEAKKLFPKGVFTKELPSGKKYLRYTPQP

SEQ ID NO: 138 - DNA, 2677 bp, Homo sapien
cagagtgccctttctccccgcctcttccccctcccgggagctgccagtacttgacgtggcgtcaccgccctctaccctcgctttgcgtgcgtgtttgcgtacagcggaggtggcggcgcgggcaggtcggagctcggagctgctgcttctggttctcttgtggccaccgtcgctgtccggctgccttgggctgccgaacagacaaggcgtgggccacagcacctcagaagccgacgcagctcgacgcaggggccggcaggagggtgggcgatcgcgtgtcggagggcgccgcgcgggcaggcgggcgggcgccagagggggaaagaggcgggggcggcgggtcagccgctggccgggccggcgggggaatgtcgatgcctgacgcgatgccgctgcccggggtcggggaggagctgaagcaggccaaggagatcgaggacgccgagaagtactccttcatggccaccgtcaccaaggcgcccaagaagcaaatccagtttgctgatgacatgcaggagttcaccaaattccccaccaaaactggccgaagatctttgtctcgctcgatctcacagtcctccactgacagctacagttcagctgcatcctacacagatagctctgatgatgaggtttctccccgagagaagcagcaaaccaactccaagggcagcagcaatttctgtgtgaagaacatcaagcaggcagaatttggacgccgggagattgagattgcagagcaagacatgtctgctctgatttcactcaggaaacgtgctcagggggagaagcccttggctggtgctaaaatagtgggctgtacacacatcacagcccagacagcggtgttgattgagacactctgtgccctgggggctcagtgccgctggtctgcttgtaacatctactcaactcagaatgaagtagctgcagcactggctgaggctggagttgcagtgttcgcttggaagggcgagtcagaagatgacttctggtggtgtattgaccgctgtgtgaacatggatgggtggcaggccaacatgatcctggatgatgggggagacttaacccactgggtttataagaagtatccaaacgtgtttaagaagatccgaggcattgtggaagagagcgtgactggtgttcacaggctgtatcagctctccaaagctgggaagctctgtgttccggccatgaacgtcaatgattctgttaccaaacagaagtttgataacttgtactgctgccgagaatccattttggatggcctgaagaggaccacagatgtgatgtttggtgggaaacaagtggtggtgtgtggctatggtgaggtaggcaagggctgctgtgctgctctcaaagctcttggagcaattgtctacattaccgaaatcgaccccatctgtgctctgcaggcctgcatggatgggttcagggtggtaaagctaaatgaagtcatccggcaagtcgatgtcgtaataacttgcacaggaaataagaatgtagtgacacgggagcacttggatcgcatgaaaaacagttgtatcgtatgcaatatgggccactccaacacagaaatcgatgtgaccagcctccgcactccggagctgacgtgggagcgagtacgttctcaggtggaccatgtcatctggccagatggcaaacgagttgtcctcctggcagagggtcgtctactcaatttgagctgctccacagttcccacctttgttctgtccatcacagccacaacacaggctttggcactgatagaactctataatgcacccgaggggcgatacaagcaggatgtgtacttgcttcctaagaaaatggatgaatacgttgccagcttgcatctgccatcatttgatgcccaccttacagagctgacagatgaccaagcaaaatatctgggactcaacaaaaatgggccattcaaacctaattattacagatactaatggaccatactaccaaggaccagtccacctgaaccacacactctaaagaaatattttttaagataacttttattttcttcttactcctttcctcttgatttttttcctataatttcattcttgttttttcatctcattatccaagttctgcagaccacacaggaacttgcttcatggctctttagatgaaatagaagttcagggtccctcactctagtcactaaagaaggattttactcccccagcccagaaaggtgattcttctctttaccatttctggggactttagtcttaattaggtaccttattaacaggaaatgctaaggtaccttctctgtggaacaatctgcaatgtctaaatcgccttaaaagagcccatttcttagctgctgaaatcagtgctctttcacttcttcagagaagcagggatggtacctacccggcaggtaggttagatgtgggtggtgcatgttaatttcccttagaagttccaagccctgtttcctgcgtaaaggtggtatgtccagttcagagatgtgtataatgagcatggcttgttaagatcaggaggcccacttggatttatagtatagcccttcctccactcccaccagacttgctcatttttcgagtttttaactagactacactctatttgagtttaattttgtcctctaggatttatttctgttgtccaaaaaaaaaaaaaaaaaaaa

SEQ ID NO: 139 - protein, 530 aa, Homo sapien
MSMPDAMPLPGVGEELKQAKEIEDAEKYSFMATVTKAPKKQIQFADDMQEFTKFPTKTGRRSLSRSISQSSTDSYSSAASYTDSSDDEVSPREKQQTNSKGSSNFCVKNIKQAEFGRREIEIAEQDMSALISLRKRAQGEKPLAGAKIVGCTHITAQTAVLIETLCALGAQCRWSACNIYSTQNEVAAALAEAGVAVFAWKGESEDDFWWCIDRCVNMDGWQANMILDDGGDLTHWVYKKYPNVFKKIRGIVEESVTGVHRLYQLSKAGKLCVPAMNVNDSVTKQKFDNLYCCRESILDGLKRTTDVMFGGKQVVVCGYGEVGKGCCAALKALGAIVYITEIDPICALQACMDGFRVVKLNEVIRQVDVVITCTGNKNVVTREHLDRMKNSCIVCNMGHSNTEIDVTSLRTPELTWERVRSQVDHVIWPDGKRVVLLAEGRLLNLSCSTVPTFVLSITATTQALALIELYNAPEGRYKQDVYLLPKKMDEYVASLHLPSFDAHLTELTDDQAKYLGLNKNGPFKPNYYRY

SEQ ID NO: 140 - DNA, 4248 bp, Homo sapien
cccgggctgtgggctacaggcgcagagcgggccaggcgcggagctggcggcagtgacaggaggcgcgaacccgcagcgcttaccgcgcggcgccgcaccatggagcccgccgtgtcgctggccgtgtgcgcgctgctcttcctgctgtgggtgcgcctgaaggggctggagttcgtgctcatccaccagcgctgggtgttcgtgtgcctcttcctcctgccgctctcgcttatcttcgatatctactactacgtgcgcgcctgggtggtgttcaagctcagcagcgctccgcgcctgcacgagcagcgcgtgcgggacatccagaagcaggtgcgggaatggaaggagcagggtagcaagaccttcatgtgcacggggcgccctggctggctcactgtctcactacgtgtcgggaagtacaagaagacacacaaaaacatcatgatcaacctgatggacattctggaagtggacaccaagaaacagattgtccgtgtggagcccttggtgaccatgggccaggtgactgccctgctgacctccattggctggactctccccgtgttgcctgagcttgatgacctcacagtggggggcttgatcatgggcacaggcatcgagtcatcatcccacaagtacggcctgttccaacacatctgcactgcttacgagctggtcctggctgatggcagctttgtgcgatgcactccgtccgaaaactcagacctgttctatgccgtaccctggtcctgtgggacgctgggtttcctggtggccgctgagatccgcatcatccctgccaagaagtacgtcaagctgcgtttcgagccagtgcggggcctggaggctatctgtgccaagttcacccacgagtcccagcggcaggagaaccacttcgtggaagggctgctctactccctggatgaggctgtcattatgacaggggtcatgacagatgaggcagagcccagcaagctgaatagcattggcaattactacaagccgtggttctttaagcatgtggagaactatctgaagacaaaccgagagggcctggagtacattcccttgagacactactaccaccgccacacgcgcagcatcttctgggagctccaggacatcatcccctttggcaacaaccccatcttccgctacctctttggctggatggtgcctcccaagatctccctcctgaagctgacccagggtgagaccctgcgcaagctgtacgagcagcaccacgtggtgcaggacatgctggtgcccatgaagtgcctgcagcaggccctgcacaccttccaaaacgacatccacgtctaccccatctggctgtgtccgttcatcctgcccagccagccaggcctagtgcaccccaaaggaaatgaggcagagctctacatcgacattggagcatatggggagccgcgtgtgaaacactttgaagccaggtcctgcatgaggcagctggagaagtttgtccgcagcgtgcatggcttccagatgctgtatgccgactgctacatgaaccgggaggagttctgggagatgtttgatggctccttgtaccacaagctgcgagagaagctgggttgccaggacgccttccccgaggtgtacgacaagatctgcaaggccgccaggcactgagctggagcccgcctggagagacagacacgtgtgagtggtcaggcatcttcccttcactcaagcttggctgctttcctagatccacactttcaaagagaaacccctccagaactcccaccctgacagcccaacaccaccttcctcctggcttccagggggcagcccagtggaatggaaagaatgtgggatttggagtcagacaagcctgagtccagttccccgtttagaactcattagctgtgtgactctgggtgagtcccttaacccctctgagcccgggtctcttcattagttgaaagggatagtaatacctacttgcaggttgttgtcatctgagttgagcactggtcacattgaaggtgctgggtaagtggtagctcttgttgcttcccgttcagcgtcacatctgcagtggagcctgaaaaggctccacattaggtcacctgtgcacagccatggctggaatgatgaaggggatacgctggagttgccctgccatcgcctccatcagccagacgaggtcctcacaggagaaggacagctcttccccaccctgggatctcaggagggcagccacggagtggggaggccccagatgcgctgtgccaaagccaggtccgaggccaaagttctccctgccatccttggtgccgtcctgccccttcctccttcatgcctgggcctgcaggcccaccccagccaccactgagtccactcggagtgccctgtgttcctggagaaggcattccagggttgaatcttgtcccagcctcagcctgggacacctaggtggagagagtggtctccgctctgaattggatccaggggacctgggctcattcttcttggctcaccaaccctgcaggcctcatctttcccaaaacccactttgtcttggtgggagtgggtccgcgctgctctgcagcaggggctggggagtggacagcatcaggtgggaaagtggagtccaccctcatgtttctgtaggattctcaccgtggggctggaagaaaagagcatcgacttgatttctccaaccactcatccctctttttctttcttccaccactccccaccccagctgtagttaatttcagtgccttacaaatcctaagctcagagaaagttccatttccgttccagagggaagggaacctccctaggtccttccctggcttgttataacgcaaagcttggttgtttatgcaactctatcttaagaactgcccagcctcagctgaaaacccgaatctgagaaggaattgcgtcatgtaagggaagctggaattaagggagctgagccagtcatggttgtggcgtgtgagtcaggagacctaggtttcagcccctctctactgtcagcgagctgtgcaacgtgggcaagtcattgtcctctgagctgcagtttcctcatctgtcacatcgctacagacaagacctccctggaacccttctgattgtcttagacactgtggttgcaaaacccacggaaagcctcatttgtgtggaaagtcagaggaaaaatgatccagtggacacttggggattatctgtcattcaagatccttccttcaaccccaaggccagctcccatctcatttccagaaaggctcatacctggcttgcagggaagcatctgtcttgtcattccaggtgccagaatcctctcagagtcattgaagggtgttcacccatcccacccaaggcttggcacactgccagtgtcttagcagggtcttgtgagggctgggggcatccaggcactcagaaggcaaaggaaccaccctacccatttggcctctggagggggcagaagaaagaaagaaacctcatcctatattttacaaagcatgtgaattctggcattagctctcataggagacccatgtgcttccttgctcagtgcaaaactgatgattctacttgctgtagatgaatggttaacacgagctagttaaacagtgccattgttttgccagtgaagcctccaaccctaagccactgggacggtggccagagatgccagcagcctctgtcgcccttagtcatataaccaaaatccagaccttatccacaacccggggcttggaaaggaaggtattttggaatcacaccctccggttatgttgctccagtaaaatcttgcctggaaagaggcagtcttcttagcatggtgagctgagttcatggcttttttttgtagccagtcctgtccctggccatccatgtgatggttttggatggagttaaacttgatgccagtgggcagtgcatgtggaaagtatcagagtaagcctctcccctccagagccctgagtttcttggctgcatgaaggttttctttagaatcagaattgtagccagtttctttggccagaaggatgaatacttggatattactgaaagggaggggtggagatgggtgtggcagtgtatggtgtgtgatttttattttcttctttggtcatgggggccaaggagaaaggcatgaatcttccctgtcaggctcttacagccacaggcactgtgtctactgtctggaagacatgtccccgtggctgtggggccgctgcttctgtttaaataaaagtggcctgg

SEQ ID NO: 141 - protein, 516 aa, Homo sapien
MEPAVSLAVCALLFLLWVRLKGLEFVLIHQRWVFVCLFLLPLSLIFDIYYYVRAWVVFKLSSAPRLHEQRVRDIQKQVREWKEQGSKTFMCTGRPGWLTVSLRVGKYKKTHKNIMINLMDILEVDTKKQIVRVEPLVTMGQVTALLTSIGWTLPVLPELDDLTVGGLIMGTGIESSSHKYGLFQHICTAYELVLADGSFVRCTPSENSDLFYAVPWSCGTLGFLVAAEIRIIPAKKYVKLRFEPVRGLEAICAKFTHESQRQENHFVEGLLYSLDEAVIMTGVMTDEAEPSKLNSIGNYYKPWFFKHVENYLKTNREGLEYIPLRHYYHRHTRSIFWELQDIIPFGNNPIFRYLFGWMVPPKISLLKLTQGETLRKLYEQHHVVQDMLVPMKCLQQALHTFQNDIHVYPIWLCPFILPSQPGLVHPKGNEAELYIDIGAYGEPRVKHFEARSCMRQLEKFVRSVHGFQMLYADCYMNREEFWEMFDGSLYHKLREKLGCQDAFPEVYDKICKAARH

SEQ ID NO: 142 - DNA, 975 bp, Homo sapien
gggggggaagtgctctaacttttcttaaggttttgttgctagcccttcaagtgcactgagctatgtgactcggatggtctttcacacggcacatttggacatttccagaactaccatgagatggtttagacgggaattcatgcaaatgaggggtcaaaaatggtatagtgaccccgtccacgtcctccaagctcacgaccttggagccccgtggagctggactgaggaggaggctgcacagcgggagagcagctggtccagaccagccctgcagcccccactcagccggcagccagatggccccgcaaggcctccagggatggcccctagccacaggccctggctgaggtctctgggtcggtcagtgacatgtaggtaggaagcactgaaaatagtgttcccagagcactttgcaactccctgggtaagagggacgacacctctggtttttcaataccaattacatggaacttttctgtaatgggtacaatgaagaagtttctaaaaacacacacaaagcacattgggccaactatttagtaagcccggatagacttattgccaaaaacaaaaaatagctttcaaaagaaatttaagttctatgagaaattccttagtcatggtgttgcgtaaatcatattttagctgcacggcattaccccacacagggtggcagaacttgaagggttactgacgtgtaaatgctggtatttgatttcctgtgtgtgttgccctggcattaagggcattttacccttgcagttttactaaaacactgaaaaatattccaagcttcatattaaccctacctgtcaacgtaacgatttcatgaacgttattatattgtcgaattcctactgacaacattataactgtatgggagcttaactttataaggaaatgtattttgacactggtatcttattaaagtattctgatcctaccaaaaaaaaaaaaaaaaaaaaaaaaaaaaaa

SEQ ID NO: 143 - protein, 101 aa, Homo sapien
MVFHTAHLDISRTTMRWFRREFMQMRGQKWYSDPVHVLQAHDLGAPWSWTEEEAAQRESSWSRPALQPPLSRQPDGPARPPGMAPSHRPWLRSLGRSVTCR

SEQ ID NO: 144 - DNA, 2251 bp, Homo sapien
gccgcgtgcagaggtgctcaagcctcctcgcggtccgcagtcagtgccgccgcgcccggcctcccgcacgccccgcaggtagcgcccccgcccgcggcccagagtgcgctcgcgccggcaccagctcccggataaacggcgcgccgcgcggagatgacagccgaggagatgaaggcgaccgagagcggggcgcagtcggcgccgctgcccatggagggagtggacatcagccccaaacaggacgaaggcgtgctgaaggtcatcaagagagagggcacaggtacagagatgcccatgattggggaccgagtctttgtccactacactggctggctattagatggcacaaagtttgactccagtctggatcgcaaggacaaattctcctttgacctgggaaaaggggaggtcatcaaggcttgggacattgccatagccaccatgaaggtgggggaggtgtgccacatcacctgcaaaccagaatatgcctacggttcagcaggcagtcctccaaagattccccccaatgccacgcttgtatttgaggtggagttgtttgagtttaagggagaagatctgacggaagaggaagatggcggaatcattcgcagaatacagactcgcggtgaaggctatgctaagcccaatgagggtgctatcgtggaggttgcactggaagggtactacaaggacaagctctttgaccagcgggagctccgctttgagattggcgagggggagaacctggatctgccttatggtctggagagggccattcagcgcatggagaaaggagaacattccatcgtgtacctcaagcccagctatgcttttggcagtgttgggaaggaaaagttccaaatcccaccaaatgctgagctgaaatatgaattacacctcaagagttttgaaaaggccaaggagtcttgggagatgaattcagaagagaagctggaacagagcaccatagtgaaagagcggggcactgtgtacttcaaggaaggtaaatacaagcaagctttactacagtataagaagatcgtgtcttggctggaatatgagtctagtttttccaatgaggaagcacagaaagcacaggcccttcgactggcctctcacctcaacctggccatgtgtcatctgaaactacaggccttctctgctgccattgaaagctgtaacaaggccctagaactggacagcaacaacgagaagggcctcttccgccggggagaggcccacctggccgtgaatgactttgaactggcacgggctgatttccagaaggtcctgcagctctaccccaacaacaaagccgccaagacccagctggctgtgtgccagcagcggatccgaaggcagcttgcccgggagaagaagctctatgccaatatgtttgagaggctggctgaggaggagaacaaggccaaggcagaggcttcctcaggagaccatcccactgacacagagatgaaggaggagcagaagagcaacacggcagggagccagtctcaggtggagacagaagcatagcccctctccaccagccctactcctgcggctgcctgccccccagtctccccactccaccctgttagttttgtaaaaactgaagaattttgagtgaattagacctttatttttctatctggttggatggtggctttaggggaagggggaaaggtgtaggctgggggattgaggtggggaatcattttagctggtgtcagcccctcttcccttcctccattgcacatgaacatatgtccatccatatatattcatcagaatgttaatttattttgctccctctgttaggtccattttctaagggtagaagaggcaagtggtagggatgaggtctgataagaacccagggtggagagggagactcctgggcagccgttttcctcatcctttccctctcccagtccatttccaaatgtggcctccatgtgggtgctagggacatgggaaaaaccactgctatgccatttcttctctctgttcccttcctcacccccgacggtgtggctgatgatgtcttctggtgtcatggtgaccaccccctgttccctgttctggtatttcccctgtcagtttcccctctcggccaggttgtgtcccaaaatcccctcagcctcttctctgcacgttgctgaaggtccaggcttgcctcaagttccatgcttgagcaataaagtggaaacaataaaacctgggtgtcagacaaaaaaaaaaaaaaaaaaaa

SEQ ID NO: 145 - protein, 459 aa, Homo sapien
MTAEEMKATESGAQSAPLPMEGVDISPKQDEGVLKVIKREGTGTEMPMIGDRVFVHYTGWLLDGTKFDSSLDRKDKFSFDLGKGEVIKAWDIAIATMKVGEVCHITCKPEYAYGSAGSPPKIPPNATLVFEVELFEFKGEDLTEEEDGGIIRRIQTRGEGYAKPNEGAIVEVALEGYYKDKLFDQRELRFEIGEGENLDLPYGLERAIQRMEKGEHSIVYLKPSYAFGSVGKEKFQIPPNAELKYELHLKSFEKAKESWEMNSEEKLEQSTIVKERGTVYFKEGKYKQALLQYKKIVSWLEYESSFSNEEAQKAQALRLASHLNLAMCHLKLQAFSAAIESCNKALELDSNNEKGLFRRGEAHLAVNDFELARADFQKVLQLYPNNKAAKTQLAVCQQRIRRQLAREKKLYANMFERLAEEENKAKAEASSGDHPTDTEMKEEQKSNTAGSQSQVETEA

SEQ ID NO: 146 - DNA, 5147 bp, Homo sapien
aggcagcagcagagggagagctcggggcttggaggggaaacagcggaagacctaagattatcgggagggcagcagaggcagagaacgaggacaggacccttggccgtcttcttccagggaacgagaggtcacagcctcgctctccgcttatgcttctggcgccccagcttaaagccgaggctgcggctgacaaagggctcgcgccggtgccgccgcccttctcatccgggcattcgggtccctgcgagaaggagggggaaggacagagggggaggggaaggagccggaggggcgcacacttggagctgaagccctctccagggctccgggccggtgccccaacggacagaggtcgaggaggacccgcagaggtggcagcggccgggggcaggaggatggtgcagaaggagagtcaagcgacgttggaggagcgggagagcgagctcagctccaaccctgccgcctctgcgggggcatcgctggagccgccggcagctccggcacccggagaagacaaccccgccggggctgggggagcggcggtggccggggctgcaggaggggctcggcggttcctctgcggtgtggtggaaggattttatggaagaccttgggttatggaacagagaaaagaactctttagaaggctccagaaatgggaattaaatacatacttgtatgccccaaaagatgactacaaacataggatgttttggcgagagatgtattcagtggaggaagctgagcaacttatgactctcatctctgctgcacgagaatatgagatagagttcatctatgcgatctcacctggattggatatcactttttctaaccccaaggaagtatccacattgaaacgtaaattggaccaggtttctcagtttgggtgcagatcatttgctttgctttttgatgatatagaccataatatgtgtgcagcagacaaagaggtattcagttcttttgctcatgcccaagtctccatcacaaatgaaatctatcagtacctaggagagccagaaactttcctcttctgtcccacagaatactgtggcactttctgttatccaaatgtgtctcagtctccatatttaaggactgtgggtgaaaagcttctacctggaattgaagtgctttggacaggtcccaaagttgtttctaaagaaattccagtagagtccatcgaagaggtttctaagattattaagagagctccagtaatctgggataacattcatgctaatgattatgatcagaagagactgtttctgggcccgtacaaaggaagatccacagaactcatcccacggttaaaaggagtcctcactaatccaaattgtgaatttgaagccaactacgttgctatccacacccttgccacctggtacaaatcaaacatgaatggagtgagaaaagatgtagtgatgactgacagtgaagatagtactgtgtccatccagataaaattagaaaatgaaggcagtgatgaagatattgaaactgatgtactctatagtccacagatggctctaaagctagcattaacagaatggttgcaagagtttggtgtgcctcatcaatacagcagtaggcaagttgcacacagtggagctaaagcaagtgtagttgatgggactcctttagttgcagcaccctctttaaatgccacaaccgtagtaacaacagtttatcaggagcccattatgagccagggagcagccttgagtggtgagcctactactctgaccaaggaagaagaaaagaaacagcctgatgaagaacccatggacatggtggtggaaaaacaagaagaaacggaccacaagaatgacaatcaaatactgagtgaaattgttgaagcgaaaatggcagaggaattgaaaccaatggacactgataaagagagcatagctgaatcaaaatccccagagatgtccatgcaagaagattgtattagtgacattgcccccatgcaaactgatgaacagacaaacaaggagcagtttgtgccaggtccaaatgaaaagcctttgtacactgcggaaccagtgaccctggaggatttgcagttacttgctgatctattctaccttccttacgagcatggacccaaaggagcacagatgttacgggaatttcaatggcttcgagcaaatagtagtgttgtcagtgtcaattgcaaaggaaaagactctgaaaaaattgaagaatggcggtcacgagcagccaagtttgaagagatgtgtggactagtgatgggaatgttcactcggctctccaattgtgccaacaggacaattctttatgacatgtactcctatgtttgggatatcaagagtataatgtctatggtgaagtcttttgtacagtggttagggtgtcgtagtcattcttcagcacaattcttaattggagaccaagaaccctgggcctttagaggtggtctagcaggagagttccagcgtttgctgccaattgatggggcaaatgatctcttttttcagccacctccactgactcctacctccaaagtttatactatcagaccttattttcctaaggatgaggcatccgtgtacaagatttgcagagaaatgtatgacgatggagtgggtttaccctttcaaagtcagcctgatcttattggagacaagttagtaggagggctgctttccctcagcctggattactgctttgtcctagaagatgaagatggcatatgtggttatgccttgggcactgtagatgtgaccccctttattaaaaaatgtaaaatttcctggatccccttcatgcaggagaagtataccaagccaaatggtgacaaggaactctctgaggctgagaaaataatgttgagtttccatgaagaacaggaagtactgccagaaactttccttgctaatttcccttctctgataaagatggacattcacaaaaaagtaactgacccaagtgtggccaaaagcatgatggcttgcctcctgtcttcactgaaggctaatggctcccggggagctttctgtgaagtgagaccagatgataaaagaattctggaattttacagcaagttaggatgttttgaaattgcaaaaatggaaggatttccaaaggatgtggttatacttggtcggagcctgtgacatttgttgacactgtgaactgtccaaaagtctcttaactgcaccttgtgaatggtagttgaggtcttcatacagttcagcctctagaatggtaacaaatcagccaattggattcgaaacaaagaagactatgtaaaactcacccatcacactttgagactactcactggttggaagaatatagtattgcagcaaatcctgtatgaaagagagatgtgggcttcctttttgagtcttgtgttaggtgctgagaccttttacatgggcttatacagggagagagtcttcaataaatgtagtcagcactattttctgcatccagtgtggttgcgtttctcacctgagagtaatcaagataacatctgtcatcttccttggtttattgagtgaaatgcctctcagtcttaggggacatggcagagatgaaagaaagaaagagtgggtttcagaagtgtcagggtggagtgattccaagtgggatggttgtggcattagtttaagctgaataaataatttcaatttggggcagttattctgctttttgtaaagccgtggccaattgtctcctgtaatgactgttggttcaggcatgttgtactttgtagggacaaatgtgcatttgtttgtggcaaaagcctacaattgacaaacttgtaaatttctttgtatataaactagctgtaacctgactatcctttgtgtttactgtttttgtaaatttttttcctctataaatgaaagggtgttggttcagaatggcactttgaataatgtaaaccagtgaaaagtggattttctttacttttgtctttgggtttggggttgtttttgttctttttgaagttttattatttttaaagtgcctcccacctaggcgtaggccatgaccatttggggtacgagagcctaattttgtaggacttaatctgttgaaaagtgcagttacttctggaaattaacctcaatattaggtcagcatgtgaaatgttggatttgacatgtcaggtagggttcagggactgattggtcccatttgccctcaggtcagttgtttaatctcaagacctgttactactgattttattaaatcagagtctttaattcttgcatgtttgtatctaatttctgaacgaatgagcacactttaaccagttatttacagttacctttttcctttaaccggattgtgaaagcttcatgtattttaatttagattctgtgtttttaagggttctgagcatgaagctggcagatagtcggcaggactcattttttcatcatggctggctgatttctccatagattgataacagtattttgttatcttgcttctctgtagttttgcatcagctgtttaactttgagctgagtgaggggagaggggtaaagagaaagaaacttaagttttctttcacagaactccaccattgtgggctttgagagagccctaaagcattgtacctagtggtacctagtgacttccaaccaaagcctttgagtatgcactaaataggtgagaagaaaggagagaaggtttttaggttagaaacctttaaccgatagaaggatatggtatgttgtaaagctggaaccaagtttgcatttttgagggcttgagatgaagggaagactcttaccagatagtaagacagctgagttttcctcagttttctcgtcttaacactagtggacaattctagcattttgtttggaggatttcagagttaacctcatggaattcaggattttttagcaagtttgcttttggttttatcttggcttttagtaatcatgttggctggtctggtcacaggtgactgtgaaacagatgcccctggtcttgctttcatcactctaggatcatgaagtgctatgctatttcctggttatgaatattaaggttggaattacatttttattgattgtttggatcagagctcagttcctgtagaaaacgaactgtaaaagaccatgcaagaggcaaaataaaacttgaagtgg

SEQ ID NO: 147 - protein, 916 aa, Homo sapien
MVQKESQATLEERESELSSNPAASAGASLEPPAAPAPGEDNPAGAGGAAVAGAAGGARRFLCGVVEGFYGRPWVMEQRKELFRRLQKWELNTYLYAPKDDYKHRMFWREMYSVEEAEQLMTLISAAREYEIEFIYAISPGLDITFSNPKEVSTLKRKLDQVSQFGCRSFALLFDDIDHNMCAADKEVFSSFAHAQVSITNEIYQYLGEPETFLFCPTEYCGTFCYPNVSQSPYLRTVGEKLLPGIEVLWTGPKVVSKEIPVESIEEVSKIIKRAPVIWDNIHANDYDQKRLFLGPYKGRSTELIPRLKGVLTNPNCEFEANYVAIHTLATWYKSNMNGVRKDVVMTDSEDSTVSIQIKLENEGSDEDIETDVLYSPQMALKLALTEWLQEFGVPHQYSSRQVAHSGAKASVVDGTPLVAAPSLNATTVVTTVYQEPIMSQGAALSGEPTTLTKEEEKKQPDEEPMDMVVEKQEETDHKNDNQILSEIVEAKMAEELKPMDTDKESIAESKSPEMSMQEDCISDIAPMQTDEQTNKEQFVPGPNEKPLYTAEPVTLEDLQLLADLFYLPYEHGPKGAQMLREFQWLRANSSVVSVNCKGKDSEKIEEWRSRAAKFEEMCGLVMGMFTRLSNCANRTILYDMYSYVWDIKSIMSMVKSFVQWLGCRSHSSAQFLIGDQEPWAFRGGLAGEFQRLLPIDGANDLFFQPPPLTPTSKVYTIRPYFPKDEASVYKICREMYDDGVGLPFQSQPDLIGDKLVGGLLSLSLDYCFVLEDEDGICGYALGTVDVTPFIKKCKISWIPFMQEKYTKPNGDKELSEAEKIMLSFHEEQEVLPETFLANFPSLIKMDIHKKVTDPSVAKSMMACLLSSLKANGSRGAFCEVRPDDKRILEFYSKLGCFEIAKMEGFPKDVVILGRSL

SEQ ID NO: 148 - DNA, 2454 bp, Homo sapien
ttccggttcccagagtggggcacagcgaggcgctagggggaacgctggcctctgaaactagctctgggaccggggtctgcggccggcccctagctggccccgtctcccatccccagaagggtattcactggggattctgagctttggctactccagtttcccacgacacgatgttccctttctacagctgctggaggactggactgctactactactcctggctgtggcagtgagagaatcctggcagacagaagaaaaaacttgcgacttggtaggagaaaagggtaaagagtcagagaaagagttggctctagtgaagaggctgaaaccactgtttaataaaagctttgagagcactgtgggccagggttcagacacatacatctacatcttcagggtgtgccgggaagctggcaaccacacttctggggcaggcctggtgcaaatcaacaaaagtaatgggaaggagacagtggtagggagactcaacgagactcacatcttcaacggaagtaattggatcatgctgatctataaagggggtgatgaatatgacaaccactgtggcaaggagcagcgtcgtgcagtggtgatgatctcctgcaatcgacacaccctagcggacaattttaaccctgtgtctgaggagcgtggcaaagtccaagattgtttctacctctttgagatggatagcagcctggcctgttcaccagagatctcccacctcagtgtgggttccatcttacttgtcacgtttgcatcactggttgctgtttatgttgttggggggttcctataccagcgactggtagtgggagccaaaggaatggagcagtttccccacttagccttctggcaggatcttggcaacctggtagcagatggctgtgactttgtctgccgttctaaacctcgaaatgtgcctgcagcatatcgtggtgtgggggatgaccagctgggggaggagtcagaagaaagggatgaccatttattaccaatgtagattgcactttatatgtccagcctcttcctcagtcccccaaaccaaagctacacagccagatttctcaagcagtctcaactccagtccctcatctcacccttactattgctcttgctttccagtttgcttttgatttgcatcttctcactagtaaaactgccttccctttgttccttattttctgttttttctctagagaggtacagttgtaagtcagagttaatataatagggcctgtgaaaacagaggcttttgcattgtctcttgacatcagaagttacaataggcatatgggcaaaatggtgtagcaggctcactggccgtttgttttttaaacacattttcacaagtttttgagacactggatttctttaattaaaaaaaaaatgccaagaaacattatttatacagggttgattgctttcatgttgttattctgtaccctatagtagcctccatgagaatctggtatttcttgctgcttggaactactttgcagtgattacttggttgcagtccaagtactctcgtttagtctgagcctggagatgttctagacttgcttctcccacctctgagattaggacaggaaaaatgtgaaatttcccaattacaggattatacggtaccatcacatcatttgtggaaattggggtgactgtatagctgggattgggctaaggactgtggtcttatctgtccacatacagccaaaatgcctatccagaaatccagttcgttggaaaggaaaattggtactcctgtgccacaggggttccagaaaagggaagtcactttaccttgcggtggtgggatcctgatgtctttcatccatttgtagtaaaagctggtaaagcttttcttactcctggttccctaccagtatttctaaacatgtcgcactttctccacaggcatgtggttttgacctttttttcaatcttctagaaagggaacggaagcagaagtgggacatcgagggctctgctgtcctctgcgctgggtgtggaatgctgctgcacctgtcccttctgctggctcagggaagtgtcttcttgcccacatttctgtggggaaaggtttttaatcctctgatgcttccatcttcctgtttaggccatgtgcccagaaacctggactgatctttctttaatagtgaacccctgggccactgaagagtaacatggctccactggacacaaaagagggatggaatcaacaggcagggggccttttataagccttaggaaaagaaaatgaaactatttcatctttggacttttcaatactattggagtgatttttttctttctaaacagggaaaataatgttacaaaagcatcttttttgttatttgtttgcatccctcccccacaccctggtgttttaaaatgaagaaaaaaaaccatcaccttttgtacaaaaactcttaatgattaaaaaacaaaca

SEQ ID NO: 149 - protein, 277 aa, Homo sapien
MFPFYSCWRTGLLLLLLAVAVRESWQTEEKTCDLVGEKGKESEKELALVKRLKPLFNKSFESTVGQGSDTYIYIFRVCREAGNHTSGAGLVQINKSNGKETVVGRLNETHIFNGSNWIMLIYKGGDEYDNHCGKEQRRAVVMISCNRHTLADNFNPVSEERGKVQDCFYLFEMDSSLACSPEISHLSVGSILLVTFASLVAVYVVGGFLYQRLVVGAKGMEQFPHLAFWQDLGNLVADGCDFVCRSKPRNVPAAYRGVGDDQLGEESEERDDHLLPM

SEQ ID NO: 150 - DNA, 2110 bp, Homo sapien
ctgaggcccagcccccttcgcccgtttccatcacgagtgccgccagcatgtctgacaaactgccctacaaagtcgccgacatcggcctggctgcctggggacgcaaggccctggacattgctgagaacgagatgccgggcctgatgcgtatgcgggagcggtactcggcctccaagccactgaagggcgcccgcatcgctggctgcctgcacatgaccgtggagacggccgtcctcattgagaccctcgtcaccctgggtgctgaggtgcagtggtccagctgcaacatcttctccacccaggaccatgcggcggctgccattgccaaggctggcattccggtgtatgcctggaagggcgaaacggacgaggagtacctgtggtgcattgagcagaccctgtacttcaaggacgggcccctcaacatgattctggacgacgggggcgacctcaccaacctcatccacaccaagtacccgcagcttctgccaggcatccgaggcatctctgaggagaccacgactggggtccacaacctctacaagatgatggccaatgggatcctcaaggtgcctgccatcaatgtcaatgactccgtcaccaagagcaagtttgacaacctctatggctgccgggagtccctcatagatggcatcaagcgggccacagatgtgatgattgccggcaaggtagcggtggtagcaggctatggtgatgtgggcaagggctgtgcccaggccctgcggggtttcggagcccgcgtcatcatcaccgagattgaccccatcaacgcactgcaggctgccatggagggctatgaggtgaccaccatggatgaggcctgtcaggagggcaacatctttgtcaccaccacaggctgtattgacatcatccttggccggcactttgagcagatgaaggatgatgccattgtgtgtaacattggacactttgacgtggagatcgatgtcaagtggctcaacgagaacgccgtggagaaggtgaacatcaagccgcaggtggaccggtatcggttgaagaatgggcgccgcatcatcctgctggccgagggtcggctggtcaacctgggttgtgccatgggccaccccagcttcgtgatgagtaactccttcaccaaccaggtgatggcgcagatcgagctgtggacccatccagacaagtaccccgttggggttcatttcctgcccaagaagctggatgaggcagtggctgaagcccacctgggcaagctgaatgtgaagttgaccaagctaactgagaagcaagcccagtacctgggcatgtcctgtgatggccccttcaagccggatcactaccgctactgagagccaggtctgcgtttcaccctccagctgctgtccttgcccaggccccacctctcctccctaagagctaatggcaccaactttgtgactggtttgtcagtgtcccccatcgactctctggggctgatcacttagtttttggcctctgctgcagccgtcatactgttccaaatgtggcagcgggaacagagtaccctcttcaagccccggtcatgatggaggtcccagccacagggaaccatgagctcagtggtcttggaacagctcactaagtcagtccttccttagcctggaagccagtagtggagtcacaaagcccatgtgttttgccatctaggccttcacctggtctgtggacttatacctgtgtgcttggtttacaggtccagtggttcttcagcccatgacagatgagaaggggctatattgaagggcaaagaggaactgttgtttgaattttcctgagagcctggcttagtgctgggccttctcttaaacctcattacaatgaggttagtacttttagtccctgttttacaggggttagaatagactgttaaggggcaactgagaaagaacagagaagtgacagctaggggttgagaggggccagaaaaacatgaatgcaggcagatttcgtgaaatctgccaccactttataaccagatggttcctttcacaaccctgggtcaaaaagagaataatttggcctataatgttaaaagaaagcaggaaggtgggtaaataaaaatcttggtgcctgg

SEQ ID NO: 151 - protein, 432 aa, Homo sapien
MSDKLPYKVADIGLAAWGRKALDIAENEMPGLMRMRERYSASKPLKGARIAGCLHMTVETAVLIETLVTLGAEVQWSSCNIFSTQDHAAAAIAKAGIPVYAWKGETDEEYLWCIEQTLYFKDGPLNMILDDGGDLTNLIHTKYPQLLPGIRGISEETTTGVHNLYKMMANGILKVPAINVNDSVTKSKFDNLYGCRESLIDGIKRATDVMIAGKVAVVAGYGDVGKGCAQALRGFGARVIITEIDPINALQAAMEGYEVTTMDEACQEGNIFVTTTGCIDIILGRHFEQMKDDAIVCNIGHFDVEIDVKWLNENAVEKVNIKPQVDRYRLKNGRRIILLAEGRLVNLGCAMGHPSFVMSNSFTNQVMAQIELWTHPDKYPVGVHFLPKKLDEAVAEAHLGKLNVKLTKLTEKQAQYLGMSCDGPFKPDHYRY

SEQ ID NO: 152 - DNA, 1692 bp, Homo sapien
atacacgtgccatgtgcagcatgaggggctacccgagcccgtcaccctgagatggaagccggcttcccagcccaccatccccatcgtgggcatcattgctggcctggttctccttggatctgtggtctctggagctgtggttgctgctgtgatatggaggaagaagagctcaggtggaaaaggagggagctactctaaggctgagtggagcgacagtgcccaggggtctgagtctcacagcttgtaaagcctgagacagctgccttgtgtgcgactgagatgcacagctgccttgtgtgcgactgagatgcaggatttcctcacgcctcccctatgtgtcttaggggactctggcttctctttttgcaagggcctctgaatctgtctgtgtccctgttagcacaatgtgaggaggtagagaaacagtccacctctgtgtctaccatgacccccttcctcacactgacctgtgttccttccctgttctcttttctattaaaaataagaacctgggcagagtgcggcagctcatgcctgtaatcccagcacttagggaggccgaggagggcagatcacgaggtcaggagatcgaaaccatcctggctaacacggtgaaaccccgtctctactaaaaaatacaaaaaattagctgggcgcagaggcacgggcctgtagtcccagctactcaggaggcggaggcaggagaatggcgtcaacccgggaggcggaggttgcagtgagccaggattgtgcgactgcactccagcctgggtgacagggtgaaacgccatctcaaaaaataaaaattaaaaaataaaaaaagaacctggatctcaatttaatttttcatattcttgcaatgaaatggacttgaggaagctaagatcatagctagaaatacagataattccacagcacatctctagcaaatttagcctattcctattctctagcctattccttaccacctgtaatcttgaccatataccttggagttgaatattgttttcatactgctgtggtttgaatgttccctccaacactcatgttgagacttaatccctaatgtggcaatactgaaaggtggggcctttgagatgtgattggatcgtaaggctgtgccttcattcatgggttaatggattaatgggttatcacaggaatgggactggtggctttataagaagaggaaaagagaactgagctagcatgcccaacccacagagagcctccactagagtgatgctaagtggaaatgtgaggtgcagctgccacagagggcccccaccagggaaatgtctagtgtctagtggatccaggccacaggagagagtgccttgtggagcgctgggagcaggacctgaccaccaccaggaccccagaactgtggagtcagtggcagcatgcagcgcccccttgggaaagctttaggcaccagcctgcaacccattcgagcagccacgtaggctcgacccagcaaagccacaggcacggggctacctgaggccttgggggccaatccctgctccagtgtgtccgtgaggcagcacacgaagtcaaaagagattatctcttcccacagataccttttctctcccatgaccctttaacagcatctgcttcattcccctcaccttcccaggctgatctgaggtaaactttgaagtaaaataaaagctgtgtttgagcatc

SEQ ID NO: 153 - DNA, 1664 bp, Homo sapien
gggatcatggtagatggaaccctccttttactctcctcggaggccctggcccttacccagacctgggcgggctcccactccttgaagtatttccacacttccgtgtcccggcccggccgcggggagccccgcttcatctctgtgggctacgtggacgacacccagttcgtgcgcttcgacaacgacgccgcgagtccgaggatggtgccgcgggcgccgtggatggagcaggaggggtcagagtattgggaccgggagacacggagcgccagggacaccgcacagattttccgagtgaacctgcggacgctgcgcggctactacaatcagagcgaggccgggtctcacaccctgcagtggatgcatggctgcgagctggggcccgacaggcgcttcctccgcgggtatgaacagttcgcctacgacggcaaggattatctcaccctgaatgaggacctgcgctcctggaccgcggtggacacggcggctcagatctccgagcaaaagtcaaatgatgcctctgaggcggagcaccagagagcctacctggaagacacatgcgtggagtggctccacaaatacctggagaaggggaaggagacgctgcttcacctggagcccccaaagacacacgtgactcaccaccccatctctgaccatgaggccaccctgaggtgctgggccctgggcttctaccctgcggagatcacactgacctggcagcaggatggggagggccatacccaggacacggagctcgtggagaccaggcctgcaggggatggaaccttccagaagtgggcagctgtggtggtgccttctggagaggagcagagatacacgtgccatgtgcagcatgaggggctacccgagcccgtcaccctgagatggaagccggcttcccagcccaccatccccatcgtgggcatcattgctggcctggttctccttggatctgtggtctctggagctgtggttgctgctgtgatatggaggaagaagagctcaggtggaaaaggagggagctactctaaggctgagtggagcgacagtgcccaggggtctgagtctcacagcttgtaaagcctgagacagctgccttgtgtgcgactgagatgcacagctgccttgtgtgcgactgagatgcaggatttcctcacgcctcccctatgtgtcttaggggactctggcttctctttttgcaagggcctctgaatctgtctgtgtccctgttagcacaatgtgaggaggtagagaaacagtccacctctgtgtctaccatgacccccttcctcacactgacctgtgttccttccctgttctcttttctattaaaaataagaacctgggcagagtgcggcagctcatgcctgtaatcccagcacttagggaggccgaggagggcagatcacgaggtcaggagatcgaaaccatcctggctaacacggtgaaaccccgtctctactaaaaaatacaaaaaattagctgggcgcagaggcacgggcctgtagtcccagctactcaggaggcggaggcatggagaatggcgtcaacccgggaggcggaggttgcagtgagccaggattgtgcgactgcactccagcctgggtgacagggtgaaacgccatctcaaaaaataaaaattaaaaaataaaaaaagaacc

SEQ ID NO: 154 - protein, 358 aa, Homo sapien [sequence omitted]

SEQ ID NO: 155 - DNA, 1783 bp, Homo sapien
cctctcggagctggaaatgcagctattgagatcttcgaatgctgcggagctggaggcggaggcagctggggaggtccgagcgatgtgaccaggccgccatcgctcgtctcttcctctctcctgccgcctcctgtgtcgaaaataacttttttagtctaaagaaagaaagacaaaagtagtcgtccgcccctcacgccctctcttcctctcagccttccgcccggtgaggaagcccggggtggctgctccgccgtcggggccgcgccgccgagccccagcgccccgggccgcccccgcacgccgcccccatgcatcccttctacacccgggccgccaccatgataggcgagatcgccgccgccgtgtccttcatctccaagtttctccgcaccaaggggctgacgagcgagcgacagctgcagaccttcagccagagcctgcaggagctgctggcagaacattataaacatcactggttcccagaaaagccatgcaagggatcgggttaccgttgtattcgcatcaaccataaaatggatcctctgattggacaggcagcacagcggattggactgagcagtcaggagctgttcaggcttctcccaagtgaactcacactctgggttgacccctatgaagtgtcctacagaattggagaggatggctccatctgtgtgctgtatgaagcctcaccagcaggaggtagcactcaaaacagcaccaacgtgcaaatggtagacagccgaatcagctgtaaggaggaacttctcttgggcagaacgagcccttccaaaaactacaatatgatgactgtatcaggttaagatatagtctgtggatggatcatctgatgatgatccataaatttgatttttgctttgggtgggctcctcttggggatggattatggaatttaaaccatgtcacagctgtgaagatctggcacaagatagaatggtaaaaaaaaaaaaaaattttaagtgacagtgccatagtttggacagtacctttcaatgattaattttaatagcctgtgagtccaagtaaatgatcactttatttgctagggagggaagtcctagggtggtttcagtttctcccagacatacctaaatttttacatcaatccttttaaagaaaatctgtatttcaaagaatctttctctgcagtaaatctcgcaggggaatttgcactattacacttgaaagttgttattgttaaccttttcggcagcttttaataggaaagttaaacgttttaaacatggtagtactggaaattttacaagacttttacctagcacttaaatatgtataaatgtacataaagacaaactagtaagcatgacctggggaaatggtcagaccttgtattgtgtttttggccttgaaagtagcaagtgaccagaatctgccatggcaacaggctttaaaaaagacccttaaaaagacactgtctcaactgtggtgttagcaccagccagctctctgtacatttgctagcttgtagttttctaagactgagtaaacttcttatttttagaaagtggaggtctggtttgtaactttccttgtacttaattgggtaaaagtcttttccacaaaccaccatctattttgtgaactttgttagtcatcttttatttggtaaattatgaactggtgtaaatttgtacagttcatgtatattgattgtggcaaagttgtacagatttctatattttggatgagaaatttttcttctctctataataaatcgtttcttatcttggcatttttaacc

SEQ ID NO: 156 - protein, 171 aa, Homo sapien
MHPFYTRAATMIGEIAAAVSFISKFLRTKGLTSERQLQTFSQSLQELLAEHYKHHWFPEKPCKGSGYRCIRINHKMDPLIGQAAQRIGLSSQELFRLLPSELTLWVDPYEVSYRIGEDGSICVLYEASPAGGSTQNSTNVQMVDSRISCKEELLLGRTSPSKNYNMMTVSG

SEQ ID NO: 157 - DNA, 2188 bp, Homo sapien
ggcacgaggaccgaccgcattgcggcttggttttctcacccagtgcatgtggcaggagcggtgagatcactgcctcacggcgatcctggactgacggtcacgactgcctaccctctaaccctgttctgagctgccccttgcccacacaccccaaacctgtgtgcaggatccgcctccatggagctacagcctcctgaagcctcgatcgccgtcgtgtcgattccgcgccagttgcctggctcacattcggaggctggtgtccagggtctcagcgcgggggacgactcagagttggggtctcactgtgttgcccagactggtctcgaactcttggcctcaggtgatcctcttccctcagcttcccagaatgccgagatgatagagacggggtctgactgtgttacccaggctggtcttcaactcttggcctcaagtgatcctcctgccttagcttccaagaatgctgaggttacaggcaccatgagccaggacaccgaggtggatatgaaggaggtggagctgaatgagttagagcccgagaagcagccgatgaacgcggcgtctggggcggccatgtccctggcgggagccgagaagaatggtctggtgaagatcaaggtggcggaagacgaggcggaggcggcagccgcggctaagttcacgggcctgtccaaggaggagctgctgaaggtggcaggcagccccggctgggtacgcacccgctgggcactgctgctgctcttctggctcggctggctcggcatgcttgctggtgccgtggtcataatcgtgcgagcgccgcgttgtcgcgagctaccggcgcagaagtggtggcacacgggcgccctctaccgcatcggcgaccttcaggccttccagggccacggcgcgggcaacctggcgggtctgaaggggcgtctcgattacctgagctctctgaaggtgaagggccttgtgctgggtccaattcacaagaaccagaaggatgatgtcgctcagactgacttgctgcagatcgaccccaattttggctccaaggaagattttgacagtctcttgcaatcggctaaaaaaaagagcatccgtgtcattctggaccttactcccaactaccggggtgagaactcgtggttctccactcaggttgacactgtggccaccaaggtgaaggatgctctggagttttggctgcaagctggcgtggatgggttccaggttcgggacatagagaatctgaaggatgcatcctcattcttggctgagtggcaaaatatcaccaagggcttcagtgaagacaggctcttgattgcggggactaactcctccgaccttcagcagatcctgagcctactcgaatccaacaaagacttgctgttgactagctcatacctgtctgattctggttctactggggagcatacaaaatccctagtcacacagtatttgaatgccactggcaatcgctggtgcagctggagtttgtctcaggcaaggctcctgacttccttcttgccggctcaacttctccgactctaccagctgatgctcttcaccctgccagggacccctgttttcagctacggggatgagattggcctggatgcagctgcccttcctggacagcctatggaggctccagtcatgctgtgggatgagtccagcttccctgacatcccaggggctgtaagtgccaacatgactgtgaagggccagagtgaagaccctggctccctcctttccttgttccggcggctgagtgaccagcggagtaaggagcgctccctactgcatggggacttccacgcgttctccgctgggcctggactcttctcctatatccgccactgggaccagaatgagcgttttctggtagtgcttaactttggggatgtgggcctctcggctggactgcaggcctccgacctgcctgccagcgccagcctgccagccaaggctgacctcctgctcagcacccagccaggccgtgaggagggctcccctcttgagctggaacgcctgaaactggagcctcacgaagggctgctgctccgcttcccctacgcggcctgacttcagcctgacatggacccactacccttctcctttccttcccaggccctttggcttctgatttttctcttttttaaaaacaaacaaacaaactgttgcaaaaaaaaaaaaaaaaaaa

SEQ ID NO: 158 - protein, 529 aa, Homo sapien
MSQDTEVDMKEVELNELEPEKQPMNAASGAAMSLAGAEKNGLVKIKVAEDEAEAAAAAKFTGLSKEELLKVAGSPGWVRTRWALLLLFWLGWLGMLAGAVVIIVRAPRCRELPAQKWWHTGALYRIGDLQAFQGHGAGNLAGLKGRLDYLSSLKVKGLVLGPIHKNQKDDVAQTDLLQIDPNFGSKEDFDSLLQSAKKKSIRVILDLTPNYRGENSWFSTQVDTVATKVKDALEFWLQAGVDGFQVRDIENLKDASSFLAEWQNITKGFSEDRLLIAGTNSSDLQQILSLLESNKDLLLTSSYLSDSGSTGEHTKSLVTQYLNATGNRWCSWSLSQARLLTSFLPAQLLRLYQLMLFTLPGTPVFSYGDEIGLDAAALPGQPMEAPVMLWDESSFPDIPGAVSANMTVKGQSEDPGSLLSLFRRLSDQRSKERSLLHGDFHAFSAGPGLFSYIRHWDQNERFLVVLNFGDVGLSAGLQASDLPASASLPAKADLLLSTQPGREEGSPLELERLKLEPHEGLLLRFPYAA

SEQ ID NO: 159 - DNA, 1396 bp, Homo sapien
ggcacgaggccccggttccggcgcggttgaggccttcggtggtgaacgagtctccagcaccatgtctggtttgtctggcccaccagcccggcgcggcccttttccgttagcgttgctgcttttgttcctgctcggccccagattggtccttgccatctccttccatctgcccattaactctcgcaagtgcctccgtgaggagattcacaaggacctgctagtgactggcgcgtacgagatctccgaccagtctgggggcgctggcggcctgcgcagccacctcaagatcacagattctgctggccatattctctactccaaagaggatgcaaccaaggggaaatttgcctttaccactgaagattatgacatgtttgaagtgtgttttgagagcaagggaacagggcggatacctgaccaactcgtgatcctagacatgaagcatggagtggaggcgaaaaattacgaagagattgcaaaagttgagaagctcaaaccattagaggtagagctgcgacgcctagaagacctttcagaatctattgttaatgattttgcctacatgaagaagagagaagaggagatgcgtgataccaacgagtcaacaaacactcgggtcctatacttcagcatcttttcaatgttctgtctcattggactagctacctggcaggtcttctacctgcgacgcttcttcaaggccaagaaattgattgagtaatgaatgaggcatattctcctcccaccttgtacctcagccagcagaacatcgctgggacgtgcctggcctaaggcatcctaccaacagcaccatcaaggcacgttggagctttcttgccagaactgatctcttttggtgtgggaggacatggggtaccacctacacccaacaagtcaatgagggacttctttttaatttggtaggattttgactggttttgcaacaataggtctattattagagtcacctatgacaaaaaataggggttacctagataatgccaaagtcagcatttgtcctgggttcccttgtgtgatctgtttggactatgttttcttttcttctcccacttgctcagcagcttgggcttccattctagttcttttaccaagatttttgtgtgaccatgttgacttcatttggattgccctctttcaatttccttgtgaaaacacccttaactttctctttacccttagctgaaatgtttacatagcttctggtgatatcttttcatgattttatatctcttaaaatggtgatggatgtgacacctcataaaagtgagctttgaactgtagataactcttaaagaaaatgtcattttagacaattaaaatatttgtgctcaactgcttgaaaaaaaaaaaaaaaaaaaaaaaaaaaaaaaaaaaa

SEQ ID NO: 160 - protein, 219 aa, Homo sapien
MSGLSGPPARRGPFPLALLLLFLLGPRLVLAISFHLPINSRKCLREEIHKDLLVTGAYEISDQSGGAGGLRSHLKITDSAGHILYSKEDATKGKFAFTTEDYDMFEVCFESKGTGRIPDQLVILDMKHGVEAKNYEEIAKVEKLKPLEVELRRLEDLSESIVNDFAYMKKREEEMRDTNESTNTRVLYFSIFSMFCLIGLATWQVFYLRRFFKAKKLIE

SEQ ID NO: 161 - DNA, 1899 bp, Homo sapien
gtccgtactgcagagccgctgccggagggtcgttttaaagggccgcgttgccgccccctcggcccgccatgctgctatccgtgccgctgctgctcggcctcctcggcctggccgtcgccgagcccgccgtctacttcaaggagcagtttctggacggagacgggtggacttcccgctggatcgaatccaaacacaagtcagattttggcaaattcgttctcagttccggcaagttctacggtgacgaggagaaagataaaggtttgcagacaagccaggatgcacgcttttatgctctgtcggccagtttcgagcctttcagcaacaaaggccagacgctggtggtgcagttcacggtgaaacatgagcagaacatcgactgtgggggcggctatgtgaagctgtttcctaatagtttggaccagacagacatgcacggagactcagaatacaacatcatgtttggtcccgacatctgtggccctggcaccaagaaggttcatgtcatcttcaactacaagggcaagaacgtgctgatcaacaaggacatccgttgcaaggatgatgagtttacacacctgtacacactgattgtgcggccagacaacacctatgaggtgaagattgacaacagccaggtggagtccggctccttggaagacgattgggacttcctgccacccaagaagataaaggatcctgatgcttcaaaaccggaagactgggatgagcgggccaagatcgatgatcccacagactccaagcctgaggactgggacaagcccgagcatatccctgaccctgatgctaagaagcccgaggactgggatgaagagatggacggagagtgggaacccccagtgattcagaaccctgagtacaagggtgagtggaagccccggcagatcgacaacccagattacaagggcacttggatccacccagaaattgacaaccccgagtattctcccgatcccagtatctatgcctatgataactttggcgtgctgggcctggacctctggcaggtcaagtctggcaccatctttgacaacttcctcatcaccaacgatgaggcatacgctgaggagtttggcaacgagacgtggggcgtaacaaaggcagcagagaaacaaatgaaggacaaacaggacgaggagcagaggcttaaggaggaggaagaagacaagaaacgcaaagaggaggaggaggcagaggacaaggaggatgatgaggacaaagatgaggatgaggaggatgaggaggacaaggaggaagatgaggaggaagatgtccccggccaggccaaggacgagctgtagagaggcctgcctccagggctggactgaggcctgagcgctcctgccgcagagcttgccgcgccaaataatgtctctgtgagactcgagaactttcatttttttccaggctggttcggatttggggtggattttggttttgttcccctcctccactctcccccaccccctccccgccctttttttttttttttttaaactggtattttatcctttgattctccttcagccctcacccctggttctcatctttcttgatcaacatcttttcttgcctctgtgccccttctctcatctcttagctcccctccaacctggggggcagtggtgtggagaagccacaggcctgagatttcatctgctctccttcctggagcccagaggagggcagcagaagggggtggtgtctccaaccccccagcactgaggaagaacggggctcttctcatttcacccctccctttctcccctgcccccaggactgggccacttctgggtggggcagtgggtcccagattggctcacactgagaatgtaagaactacaaacaaaatttctattaaattaaattttgtgtctc

SEQ ID NO: 162 - protein, 417 aa, Homo sapien
MLLSVPLLLGLLGLAVAEPAVYFKEQFLDGDGWTSRWIESKHKSDFGKFVLSSGKFYGDEEKDKGLQTSQDARFYALSASFEPFSNKGQTLVVQFTVKHEQNIDCGGGYVKLFPNSLDQTDMHGDSEYNIMFGPDICGPGTKKVHVIFNYKGKNVLINKDIRCKDDEFTHLYTLIVRPDNTYEVKIDNSQVESGSLEDDWDFLPPKKIKDPDASKPEDWDERAKIDDPTDSKPEDWDKPEHIPDPDAKKPEDWDEEMDGEWEPPVIQNPEYKGEWKPRQIDNPDYKGTWIHPEIDNPEYSPDPSIYAYDNFGVLGLDLWQVKSGTIFDNFLITNDEAYAEEFGNETWGVTKAAEKQMKDKQDEEQRLKEEEEDKKRKEEEEAEDKEDDEDKDEDEEDEEDKEEDEEEDVPGQAKDEL

SEQ ID NO: 163 - DNA, 2418 bp, Homo sapien
gaatttaatatgactcactatagggaatttggccctcgaggccaagaattcggcacgagggcgcgcggcctcgaggccttccggtgcgggagaaactactactcccataatgccccgcggtcccgcgagctgccagtctcgtcgcgagaagcagcggcccggggcgactgagcggacaaacggaagtgtaggttacggtctgagacatcaccgccaagctgggcatcggggagatggccgagactgaccccaagaccgtgcaggacctcacctcggtggtgcagacactcctgcagcagatgcaagataaatttcagaccatgtctgaccagatcattgggagaattgatgatatgagtagtcgcattgatgatctggaaaagaatatcgcggacctcatgacacaggctggggtggaagaactggaaagtgaaaacaagatacctgccacgcaaaagagttgaaggttgctaataatttatactggaatctggcatttttccaagccaagagaagatcgaatggctttttgcagctaactactatgtgtagacaggttttatattataaagtatgcattcttatcacctagtatatagttagtttgtagagtgatttccccccagtttcttgaacatggtatcttcacatcttggaccttggtcagttgtgctattcattattaaacactaaaactttggcggttcttgcataacattgtcagattttttagtgtatttctgtgaagtcattttttttcttgtcattccttttgtagtagttgctgtttggataaaagttgatgtgtgattttttattaaacaaatagtaaacccttcaattatagttagtcttggtgaagtaagatgtttgtagactttagagttctttaattcttggcacaacgtgactgttgagctaacaccaaatagtgtgttggcaatacttttcaaatggctgaaaacacctaaaaattgttcattcagaaatatctgtcactgctctgttgccaaaactcagaatagaacttagacgtatgtctgagtccctgagatcacatgctaaagtcgatgaaaagtaaccactgccactgtcttgtgtcagaacttttacagtacagaaaataacagaatagccttctgtaatgaggcgtttgttagagttttgcatgagattctaatacttcagtaggaccctacctacgtggttcatctacaatggttaccataaaaaatctggcaggattttaaaactcaatcagtctttcctttgagctagtgacttgaaaagaaagagagaaggaaaagagaccatattaagtccatgccagttgcttggctagaatatgatcaacgacttgtagtagactcaagtttttaaaaaacactattttacttaaactgtttcttatctaaattcttgcagagtgtcaatgttatcattgattatagaagacagggataatacctttatctctggccactcaaaaatgcagtgccaggagtgctaaacctagaggccaatactgatgacctggaaggtgatccatatgattgtcaccacaaagtgcttttacacaaaaacttgaaaatttgaaaaacatgatttttttaagtttctcatctcaccagtcttggtgtttatattgcaaatctatcaaagtaagaaataatttgtgctgtatacaaattacatggggaacataaaggagtgagatccttctgtgataaaatgaattcaccactctggttacccaactacagaacctcctttgatcaggccagtaggttgtgatgcaggctggagcccccgaatgccccacacacactgcagcattgaccagaccatccgaaacctgcgtccctggtgatgttctcaagcctcggaagtggcaaatggaaatgatatggccggttgcggttgtaggagagttgtgacttaggcaggagtcgacctcctcaagtaatggaacgatttcaaaggcaggctgccctgaccaaaaatatctgccatgaataaaggtgcctgaaatcctgctatgaagcttcctttgtgtcaaaaatctgtttggttttcagatggaaatgcagaaatcacattagagtatcaactaaaacctctggacggattaagtacaagtagcccaaggcaaagcaggagagggggtgttgggggaggttgcctgctggaaggggaagctgaggagcgggaggagggcttgccaagactggcattgcaggagacttgtctcaggtgtgttcccagaactcttgcccctggagatgctgcaggaaggaaggggttatggtcacttgggtttagacgacattctgtgaacctcatgaagaaattagcatattaaagactctgaaagtagagcagagaactcagctttaacctgctcacctgctagttttc

SEQ ID NO: 164 - protein, 126 aa, Homo sapien
MKLPLCQKSVWFSDGNAEITLEYQLKPLDGLSTSSPRQSRRGGVGGGCLLEGEAEEREEGLPRLALQETCLRCVPRTLAPGDAAGRKGLWSLGFRRHSVNLMKKLAYKDSESRAENSALTCSPASF

SEQ ID NO: 165 - DNA, 1255 bp, Homo sapien
ggcacgagggcgggaggagtggcagcggcaaggcagcccagtttcgcgaaggctgtcggcgcgccgcggcccgcaggcacccggcacgcgccttccccgcaggcacccggcacgcgccttccccgccgccacgatgcccaagaggaaggtcagctccgccgaaggcgccgccaaggaagagcccaagaggagatcggcgcggttgtcagctaaacctcctgcaaaagtggaagcgaagccgaaaaaggcagcagcgaaggataaatcttcagacaaaaaagtgcaaacaaaagggaaaaggggagcaaagggaaaacaggccgaagtggctaaccaagaaactaaagaagacttacctgcggaaaacggggaaacgaagactgaggagagtccagcctctgatgaagcaggagagaaagaagccaagtctgattaataaccatataccatgtcttatcagtggtccctgtctcccttcttgtacaatccagaggaatatttttatcaactattttgtaaatgcaagttttttagtagctctagaaacatttttaagaaggagggaatcccacctcatcccattttttaagtgtaaatgcttttttttaagaggtgaaatcatttgctggttgtttattttttggtacaaccagaaaatagtgtgggatattgaattatgggaggctctgactgtctcgggtgtcagcttaacattccacagatggggggttagtttttatatcctataatacaaagcatattaaatggcaatatggagtcagtcctgcatttaatgtcttgaacattttaaattacttctattaccatgttgttttttagtagaattgtttcctaaagaaaaccactctttgatcatggctctctctgccagaattgtgtgcactctgtaacatctttggttgtggtagtcctgttttcctaataactttgttactgtgctgtgaaagattacagatttgaacatgtagtgtacgtgctattgagttgtgaactggtgggccgtatgtaacagctgaccaacgtgaagatactggtacttgatagcctcttaaggaaaatttgcttccaaattttaagctggaaagtcactggaataactttaaaaaagaattacaatacatggctttttagaatttcgttacgtatgttaagatttgtgtacaaattgaaatgtctgtactgatcctcaaccaataaaatctcagttatgaaaataaaaaaaaaaaaaaaaaaa

SEQ ID NO: 166 - protein, 100 aa, Homo sapien
MPKRKVSSAEGAAKEEPKRRSARLSAKPPAKVEAKPKKAAAKDKSSDKKVQTKGKRGAKGKQAEVANQETKEDLPAENGETKTEESPASDEAGEKEAKSD

SEQ ID NO: 167 - DNA, 6480 bp, Homo sapien
agagcgagcaggggagagcgagaccagttttaaggggaggaccggtgcgagtgaggcagccccgaggctctgctcgcccaccacccaatcctcgcctcccttctgctccaccttctctctctgccctcacctctcccccgaaaaccccctatttagccaaaggaaggaggtcaggggaacgctctcccctccccttccaaaaaacaaaaacagaaaaacccttttccaggccggggaaagcaggagggagaggggccgccgggctggccatggagctgctgtgccacgaggtggacccggtccgcagggccgtgcgggaccgcaacctgctccgagacgaccgcgtcctgcagaacctgctcaccatcgaggagcgctaccttccgcagtgctcctacttcaagtgcgtgcagaaggacatccaaccctacatgcgcagaatggtggccacctggatgctggaggtctgtgaggaacagaagtgcgaagaagaggtcttccctctggccatgaattacctggaccgtttcttggctggggtcccgactccgaagtcccatctgcaactcctgggtgctgtctgcatgttcctggcctccaaactcaaagagaccagcccgctgaccgcggagaagctgtgcatttacaccgacaactccatcaagcctcaggagctgctggagtgggaactggtggtgctggggaagttgaagtggaacctggcagctgtcactcctcatgacttcattgagcacatcttgcgcaagctgccccagcagcgggagaagctgtctctgatccgcaagcatgctcagaccttcattgctctgtgtgccaccgactttaagtttgccatgtacccaccgtcgatgatcgcaactggaagtgtgggagcagccatctgtgggctccagcaggatgaggaagtgagctcgctcacttgtgatgccctgactgagctgctggctaagatcaccaacacagacgtggattgtctcaaagcttgccaggagcagattgaggcggtgctcctcaatagcctgcagcagtaccgtcaggaccaacgtgacggatccaagtcggaggatgaactggaccaagccagcacccctacagacgtgcgggatatcgacctgtgaggatgccagttgggccgaaagagagagacgcgtccataatctggtctcttcttctttctggttgtttttgttctttgtgttttagggtgaaacttaaaaaaaaaattctgcccccacctagatcatatttaaagatcttttagaagtgagagaaaaaggtcctacgaaaacggaataataaaaagcatttggtgcctatttgaagtacagcataagggaatcccttgtatatgcgaacagttattgtttgattatgtaaaagtaatagtaaaatgcttacaggaaaacctgcagagtagttagagaatatgtatgcctgcaatatgggaacaaattagaggagacttttttttttcatgttatgagctagcacatacacccccttgtagtataatttcaaggaactgtgtacgccatttatggcatgattagattgcaaagcaatgaactcaagaaggaattgaaataaggagggacatgatggggaaggagtacaaaacaatctctcaacatgattgaaccatttgggatggagaagcacctttgctctcagccacctgttactaagtcaggagtgtagttggatctctacattaatgtcctcttgctgtctacagtagctgctacctaaaaaaagatgttttattttgccagttggacacaggtgattggctcctgggtttcatgttctgtgacatcctgcttcttcttccaaatgcagttcattgcagacaccaccatattgctatctaatggggaaatgtagctatgggccataaccaaaactcacatgaaacggaggcagatggagaccaagggtgggatccagaatggagtcttttctgttattgtatttaaaagggtaatgtggccttggcatttcttcttagaaaaaaactaatttttggtgctgattggcatgtctggttcacagtttagcattgttataaaccattccattcgaaaagcactttgaaaaattgttcccgagcgatagatgggatggtttatgcaagtcatgctgaatactcctcccctcttctcttttgccccctcccttcctgcccccagtctgggttactcttcgcttctggtatctggcgttctttggtacacagttctggtgttcctaccaggactcaagagacaccccttcctgctgacattcccatcacaacattcctcagacaagcctgtaaactaaaatctgttaccattctgatggcacagaaggatcttaattcccatctctatacttctcctttggacatggaaagaaaagttattgctggtgcaaagatagatggctgaacatcagggtgtggcattttgttcccttttccgttttttttttttttattgttgttgttaattttattgcaaagttgtattcagcgtacttgaatttttcttcctctccacttcttagaggcattcagttagcaaagaggttggagcaacaacttttttttttttttttgcacaattgtaattgacaggtaatgaagctatttgttaaaatatttgcctttttaagtaaaaaagaaaaatcagaacagggctatttgaagaattattttatacacagattctgccttgtttcatagtatgagggttgaagacggaaaacaatctaagggtctctcatttttttaattttgttttgttcagtttggtttttttttttttttgcgctgctaagaagctaaagtcatccatccttattcacgttgacagtacctagctgtaatgtttcacagagtgtgctgctattttataaacatttttataatatattattttactgcttaaattccaagtcctgaagtagatggttgagatatgagttcttcgtactggaaaagcccttccgtagtttgttttcttctggtagcatattcatggttgtttttttttttcttttttggttttttggttttttttttttcctctgatcacattcttcaaagacggagtattctttacctcaggtttactggacaaaatcaataactacaaaaggcaatgattcacgcttttgttttcataatacctcacaaccgtacagtttctgcttgggagcccattcgcatgaggaatacagaagcagtgtgagcagggctgactccctctcaggtggaaggcagggcggtctcactcccagggacctttttggtcatggaggccatcgggctcccagttagaccctggtatcctcatcatgatggaaaaaatacattgaaccaagggatcctccctccccttcaaggcagacgttcagtacaaacatttatgcggtaggctcagatgtcgtaatttgcacttaggtaccaggtgtcaggaaacagactaaaaagaattccaccaggctgtttggagatcctcatcttggagctttttcaaaagcggggcttcatctgcaaagggccctttcatcttgaagtttttcccctccgtctttcccctcccctggcatggacaccttgtgtttaggatcatctctgcaggtttcctaggtctgaatctgcgagtagatgaacctgcagcaagcagcgtttatggtgcttccttctccctcctctgtctcaaactgcgcaggcaagcactatgcaagcccaggccctctgctgagcggtactaaacggtcgggttttcaatcacactgaattggcaggataagaaaaataggtcagataagtatgggatgatagttgaagggaggtgaagaggctgcttctctacagaggtgaaattccagatgagtcagtctcttgggaagtgtgtttagaagggttcaggactttgtgagttagcatgaccctaaaattctaggggatttctggtgggacaatgggtggtgaattttgaagttttggagagggaagtggagcagccagcaagtaagctagccagagttttctcaagagccagctttgctcagcacactctcctgggccccaaggagtcccacggaatggggaaagtgggaaccctggagttcttgggaatcttggagcctaaagagaaaccgaggtgcaaattcatttcatggtgactgacccttgagcttaaacagaagcagcaaatgaaagaaccggacaaataaggaagggcacaagcctacccgactctatttacagtctgtaactttccactcttcctgtagtcccgaggcccctgggtccttctagcttttctctttcccatccttggggccttgtgtgatgatgggtgtggggctgccgatgggaaagtcgggggttgttaggcttttctgcctgctcctgcttaaacacaagaaggaatcctggattttgccctctccttagctcttagtctctttggtaggagttttgttccagaggagctctcccccttggatttgaacttgctctttttgttgttgttgttctttctcttctttttcttacctcccactaaaggggttccaaattatcctggtctttttctaccttgttgtgtttctatctcgtctttacttccatctgtttgtttttttctccatcagtgggggccgagttgttcccccagcctgccaaattttgatccttcccctcttttggccaaatcctagggggaagaaatcctagtatgccaaaaatatatgctaagcataattaaactccatgcgggtccataacagccaagaagcctgcaggagaaagccaagggcagttccctccgcagaacaccccatgcgtgctgagaggcgagctccttgaagaaggggctgttcttccaggaggccttattttgaactgcctcaggaccccactggagagcacagcatgccttactactgggtcatccttggtctatgtgctctgtactggaggctctgttctgcctcttatcagccaggtcaggggcacacatggcttaagtgacaaagccagaggagaagacaaccctgacagcatcacgctgcatcccattgctagcaggattggcaactcttcagacggagctgcgcttccctgcagtctagcacctctagggcctctccagactgtgccctgggagctctgggactgaaaggttaagaacataaggcaggatcagatgactctctccaagagggcaggggaattttctctccatgggccacaggggacagggctgggagaagaaatagacttgcaccttatgtcatgtaaataattgattttctagttcaagaagataatattggtagtgtgggaattggaggtaggaaggggaggaagtctgagtaagccagttggcttctaagccaaaaggattcctctttgtttatctctgagacagtccaaccttgagaatagctttaaaagggaaattaatgctgagatgataaagtccccttaagccaacaaaccctctgtagctatagaatgagtgcaggtttctattggtgtggactcagagcaatttacaagagctgttcatgcagccatccatttgtgcaaaatagggtaagaagattcaagaggatatttattacttcctcataccacatggcttttgatgattctggattctaaacaacccagaatggtcatttcaggcacaacgatactacattcgtgtgtgtctgcttttaaacttggctgggctatcagaccctattctcggctcaggttttgagaagccatcagcaaatgtgtacgtgcatgctgtagctgcagcctgcatcccttcgcctgcagcctactttggggaaataaagtgccttactgactgtagccattacagtatccaatgtcttttgacaggtgcctgtccttgaaaaacaaagtttctatttttatttttaattggtttagttcttaactgctggccaactcttacatccccagcaaatcatcgggccattggattttttccattatgttcatcacccttatatcatgtacctcagatctctctctctctcctctctctcagttatatagtttcttgtcttggactttttttttcttttctttttctttttttttttgctttaaaacaagtgtgatgccatatcaagtccatgttattctctcacagtgtactctataagaggtgtgggtgtctgtttggtcaggatgttagaaagtgctgataagtagcatgatcagtgtatgcgaaaaggtttttaggaagtatggcaaaaatgttgtattggctatgatggtgacatgatatagtcagctgccttttaagaggtcttatctgttcagtgttaagtgatttaaaaaaataataacctgttttctgactagtttaaagatggatttgaaaatggttttgaatgcaattaggttatgctatttggacaataaactcaccttgacct

SEQ ID NO: 168 - protein, 289 aa, Homo sapien
MELLCHEVDPVRRAVRDRNLLRDDRVLQNLLTIEERYLPQCSYFKCVQKDIQPYMRRMVATWMLEVCEEQKCEEEVFPLAMNYLDRFLAGVPTPKSHLQLLGAVCMFLASKLKETSPLTAEKLCIYTDNSIKPQELLEWELVVLGKLKWNLAAVTPHDFIEHILRKLPQQREKLSLIRKHAQTFIALCATDFKFAMYPPSMIATGSVGAAICGLQQDEEVSSLTCDALTELLAKITNTDVDCLKACQEQIEAVLLNSLQQYRQDQRDGSKSEDELDQASTPTDVRDIDL

SEQ ID NO: 169 - DNA, 2253 bp, Homo sapien
gtgcatgccgtgggtctgacggcttgagtagcgctagggagaatccctgcaggtaatatttgacttttgcttcatattaatctgagtggaaaataaaagggccctcttctcctctcgcttccctgccgggcaggcgccatggcggaagcctcggcgacgggcgcctgcggagaggcgatggcagcggcggaaggctcctcgggcccggcgggcttgactctgggccggagcttctcgaactaccggcccttcgagccccaggcgttgggcctcagcccgagctggcggctgacgggcttctccggcatgaagggctgaggctgcaaggtcccgcaggaggcgctgctcaaactcctggcgggactgacgcggccggacgtgcggcccccgctgggccggggcctggtgggtggccaggaagaggcgtcccaggaagccggcctgccggcaggagcgggccccagccccacctttccagccctgggcatcgggatggactcctgcgtcatccccctgaggcacgggggcctgtcactggtgcagaccacggacttcttttaccccttggtagaagatccctacatgatggggcgcatagcttgtgccaacgtgctgagtgacctctacgccatggggattactgagtgtgacaacatgttgatgttactcagcgtcagccagagtatgagtgaggaggaacgcgaaaaggtaacgccactcatggtcaaaggctttcgggatgcggctgaggaaggagggacggcagtgaccggtgggcaaacggtggtcaacccttggattataatcggtggagttgccactgtagtatgccaaccaaatgagttcataatgccggacagcgccgtcgttggggacgtgctggtgttaaccaaaccgttaggaacccaggttgctgtcaatgcccaccaatggctggataatcctgaaagatggaataaagtaaagatggtggtctccagagaagaggtggagctggcctatcaggaagccatgttcaatatggctaccctcaacagaactgctgcaggtttaatgcacacatttaatgcccatgcggccacagatatcacaggctttggcattctaggacactcccagaaccttgcaaaacaacaaagaaatgaagtgtcctttgttattcataatctgccaataattgccaagatggctgccgtcagcaaggccagtggacggtttgggcttcttcaaggaacctcagctgaaacctctgggggattactgatttgtctgccaagagaacaggcggctcgcttttgttctgaaatcaaatcctccaagtacggagagggtcaccaagcgtggatcgttggcattgtggaaaagggaaaccgaacggcccggatcattgacaagccgcgagttattgaagtcctgcctcgtggggccacagctgctgttcttgctcctgacagttcaaatgcctcctctgagcctagctcgtgagatgaaagaacagaagttgtttggaccttagagccattgtccacaatcacggatggttctcaagagttgattgtaagaaatttccaaagaaggctgcctgcatagtggttccggctgccctttctaggtgattggaatcagcccatctaaagcagtctttatatgcattccgaggccagagtaacattttgaactttggggggatatttgttcatcacttgggtagaagaggagcaaaaatacttctgttttctcttgccaaagtaagatgaagctattccaggttgagggatttttctttgcacggggttgattaatttctgcacagggagtgagattattaaagtaacacacacacaaagtaaattgcaaaatgaaaaaaattagaagcaaatgagttttggaccaatattgttgataaatctaaattgttaagagagatcttataatgcaacatcaaattctttattcaattttactgaagtactggctctttcctgctctggacaagaattgagcaacttgtctgatgactgggaaaggaggacctgcaaccatctgacttggtctctgttaatgacgtctctccctctaaaccccattaaggactgggagaggcagagcaagcctcagagcccaggcctcagtggtcattaagatgttaagtcttttgcggcagattcctggtgatttgatcaataaagagtaatttcttgctaaataaataaaagaaaccttgttgaaaaactaaaaaaaaaaaaaaaaaaa

SEQ ID NO: 170 - protein, 448 aa, Homo sapien
  unsure 60: unknown amino acid
MAEASATGACGEAMAAAEGSSGPAGLTLGRSFSNYRPFEPQALGLSPSWRLTGFSGMKGXGCKVPQEALLKLLAGLTRPDVRPPLGRGLVGGQEEASQEAGLPAGAGPSPTFPALGIGMDSCVIPLRHGGLSLVQTTDFFYPLVEDPYMMGRIACANVLSDLYAMGITECDNMLMLLSVSQSMSEEEREKVTPLMVKGFRDAAEEGGTAVTGGQTVVNPWIIIGGVATVVCQPNEFIMPDSAVVGDVLVLTKPLGTQVAVNAHQWLDNPERWNKVKMVVSREEVELAYQEAMFNMATLNRTAAGLMHTFNAHAATDITGFGILGHSQNLAKQQRNEVSFVIHNLPIIAKMAAVSKASGRFGLLQGTSAETSGGLLICLPREQAARFCSEIKSSKYGEGHQAWIVGIVEKGNRTARIIDKPRVIEVLPRGATAAVLAPDSSNASSEPSS

SEQ ID NO: 171 - DNA, 1673 bp, Homo sapien
aaaaaaggccgtgcagttcctagcgaggaggcgccgccgccattgccgctctctcggtgagcgcagccccgctctccgggccgggccttcgcgggccaccggcgccatgggccagtgcggcatcacctcctccaagaccgtgctggtctttctcaacctcatcttctggggggcagctggcattttatgctatgtgggagcctatgtcttcatcacttatgatgactatgaccacttctttgaagatgtgtacacgctcatccctgctgtagtgatcatagctgtaggagccctgcttttcatcattgggctaattggctgctgtgccacaatccgggaaagtcgctgtggacttgccacgtttgtcatcatcctgctcttggtttttgtcacagaagttgttgtagtggttttgggatatgtttacagagcaaaggtggaaaatgaggttgatcgcagcattcagaaagtgtataagacctacaatggaaccaaccctgatgctgctagccgggctattgattatgtacagagacagctgcattgttgtggaattcacaactactcagactgggaaaatacagattggttcaaagaaaccaaaaaccagagtgtccctcttagctgctgcagagagactgccagcaattgtaatggcagcctggcccacccttccgacctctatgctgaggggtgtgaggctctagttgtgaagaagctacaagaaatcatgatgcatgtgatctgggccgcactggcatttgcagctattcagctgctgggcatgctgtgtgcttgcatcgtgttgtgcagaaggagtagagatcctgcttacgagctcctcatcactggcggaacctatgcatagttgacaactcaagcctgagctttttggtcttgttctgatttggaaggtgaattgagcaggtctgctgctgttggcctctggagttcatttagttaaggcacatgtacactggtgttggacagagcagcttggcttttcatgtgcccacctacttacctactacctgcgactttctttttccttgttctagctgactcttcatgcccctaagattttaagtacgatggtgaacgttctaatttcagaaccaattgcgagtcatgtagtgtggtagaattaaaggaggacacgagcctgcttctgttacctccaagtggtaacaggactgatgccgaaatgtcaccaggtcctttcagtcttcacagtggagaactcttggccaaaggtttttggggggaggaggaggaaaccagctttctggttaaggttaacaccagatggtgcccctcattggtgtccttttaaaaaatatttactgtagtccaataagatagcagctgtacaaaatgactaaaatagattgtaggatcatatggcgtatatcttggttcatcttcaaaatcagagactgagctttgaaactagtggtttttaatcaaagttggctttataggaggagtataatgtatgcactactgttttaaaagaattagtgtgagtgtgtttttgtatgaatgagcccattcatggtaagtcttaagcttgttggaaataatgtacccatgtagactagcaaaatagtatgtagatgtgatctcagttgtaaatagaaaaatctaattcaataaactctgtatcagccccc

SEQ ID NO: 172 - protein, 253 aa, Homo sapien
MGQCGITSSKTVLVFLNLIFWGAAGILCYVGAYVFITYDDYDHFFEDVYTLIPAVVIIAVGALLFIIGLIGCCATIRESRCGLATFVIILLLVFVTEVVVVVLGYVYRAKVENEVDRSIQKVYKTYNGTNPDAASRAIDYVQRQLHCCGIHNYSDWENTDWFKETKNQSVPLSCCRETASNCNGSLAHPSDLYAEGCEALVVKKLQEIMMHVIWAALAFAAIQLLGMLCACIVLCRRSRDPAYELLITGGTYA

SEQ ID NO: 173 - DNA, 1842 bp, Homo sapien
gttgccagggagcggcgcgggagccctgaggggactgcggcggctgcgcggaggagcgaggcgcttgctggggtcggggctgcgcgacggcgcaggggctgcggggagcgccgcgcaggccgtgcagttcctagcgaggaggcgccgccgccattgccgctctctcggtgagcgcagccccgctctccgggccgggccttcgcgggccaccggcgccatgggccagtgcggcatcacctcctccaagaccgtgctggtctttctcaacctcatcttctggggggcagctggcattttatgctatgtgggagcctatgtcttcatcacttatgatgactatgaccacttctttgaagatgtgtacacgctcatccctgctgtagtgatcatagctgtaggagccctgcttttcatcattgggctaattggctgctgtgccacaatccgggaaagtcgctgtggacttgccacgtttgtcatcatcctgctcttggtttttgtcacagaagttgttgtagtggttttgggatatgtttacagagcaaaggtggaaaatgaggttgatcgcagcattcagaaagtgtataagacctacaatggaaccaaccctgatgctgctagccgggctattgattatgtacagagacagctgcattgttgtggaattcacaactactcagactgggaaaatacagattggttcaaagaaaccaaaaaccagagtgtccctcttagctgctgcagagagactgccagcaattgtaatggcagcctggcccacccttccgacctctatgctgaggggtgtgaggctctagttgtgaagaagctacaagaaatcatgatgcatgtgatctgggccgcactggcatttgcagctattcagctgctgggcatgctgtgtgcttgcatcgtgttgtgcagaaggagtagagatcctgcttacgagctcctcatcactggcggaacctatgcatagttgacaactcaagcctgagctttttggtcttgttctgatttggaaggtgaattgagcaggtctgctgctgttggcctctggagttcatttagttaaagcacatgtacactggtgttggacagagcagcttggcttttcatgtgcccacctacttacctactacctgcgactttctttttccttgttctagctgactcttcatgcccctaagattttaagtacgatggtgaacgttctaatttcagaaccaattgcgagtcatgtagtgtggtagaattaaaggaggacacgagcctgcttctgttacctccaagtggtaacaggactgatgccgaaatgtcaccaggtcctttcagtcttcacagtggagaactcttggccaaaggtttttggggggaggaggaggaaaccagctttctggttaaggttaacaccagatggtgcccctcattggtgtccttttaaaaaatatttactgtagtccaataagatagcagctgtacaaaatgactaaaatagattgtaggatcatatggcgtatatcttggttcatcttcaaaatcagagactgagctttgaaactagtggtttttaatcaaagttggctttataggaggagtataatgtatgcactactgttttaaaagaattagtgtgagtgtgtttttgtatgaatgagcccattcatggtaagtcttaagcttgttggaaataatgtacccatgtagactagcaaaatagtatgtagatgtgatctcagttgtaaatagaaaaatctaattcaataaactctgtatcagcccccaacatattatttttcattatttgggggatatttcagttccaaaaaaaaaaaaaaaaaa

SEQ ID NO: 174 - protein, 253 aa, Homo sapien; identical to SEQ ID NO: 172

SEQ ID NO: 175 - DNA, 1268 bp, Homo sapien
ctgactctctgaggctcattttgcagttgttgaaattgtccccgcagttttcaatcatgtctgaaccaatcagagtccttgtgactggagcagctggtcaaattgcatattcactgctgtacagtattggaaatggatctgtctttggtaaagatcagcctataattcttgtgctgttggatatcacccccatgatgggtgtcctggacggtgtcctaatggaactgcaagactgtgcccttcccctcctgaaagatgtcatcgcaacagataaagaagacgttgccttcaaagacctggatgtggccattcttgtgggctccatgccaagaagggaaggcatggagagaaaagatttactgaaagcaaatgtgaaaatcttcaaatcccagggtgcagccttagataaatacgccaagaagtcagttaaggttattgttgtgggtaatccagccaataccaactgcctgactgcttccaagtcagctccatccatccccaaggagaacttcagttgcttgactcgtttggatcacaaccgagctaaagctcaaattgctcttaaacttggtgtgactgctaatgatgtaaagaatgtcattatctggggaaaccattcctcgactcagtatccagatgtcaaccatgccaaggtgaaattgcaaggaaaggaagttggtgtttatgaagctctgaaagatgacagctggctcaagggagaatttgtcacgactgtgcagcagcgtggcgctgctgtcatcaaggctcgaaaactatccagtgccatgtctgctgcaaaagccatctgtgaccacgtcagggacatctggtttggaaccccagagggagagtttgtgtccatgggtgttatctctgatggcaactcctatggtgttcctgatgatctgctctactcattccctgttgtaatcaagaataagacctggaagtttgttgaaggtctccctattaatgatttctcacgtgagaagatggatcttactgcaaaggaactgacagaagaaaaagaaagtgcttttgaatttctttcctctgcctgactagacaatgatgttactaaatgcttcaaagctgaagaatctaaatgtcgtctttgactcaagtaccaaataataataatgctatacttaaattacttgtgaaaaacaacacattttaaagattacgtgcttcttggtacaggtttgtgaatgacagtttatcgtcatgctgttagtgtgcattctaaataaatatatattcaaatg

SEQ ID NO: 176 - protein, 334 aa, Homo sapien
MSEPIRVLVTGAAGQIAYSLLYSIGNGSVFGKDQPIILVLLDITPMMGVLDGVLMELQDCALPLLKDVIATDKEDVAFKDLDVAILVGSMPRREGMERKDLLKANVKIFKSQGAALDKYAKKSVKVIVVGNPANTNCLTASKSAPSIPKENFSCLTRLDHNRAKAQIALKLGVTANDVKNVIIWGNHSSTQYPDVNHAKVKLQGKEVGVYEALKDDSWLKGEFVTTVQQRGAAVIKARKLSSAMSAAKAICDHVRDIWFGTPEGEFVSMGVISDGNSYGVPDDLLYSFPVVIKNKTWKFVEGLPINDFSREKMDLTAKELTEEKESAFEFLSSA

SEQ ID NO: 177 - DNA, 1946 bp, Homo sapien
ggcacgaggagaggatcctgggcgccgccaggttctgtggacaatcacaatgggaatccaaggagggtctgtcctgttcgggctgctgctcgtcctggctgtcttctgccattcaggtcatagcctgcagtgctacaactgtcctaacccaactgctgactgcaaaacagccgtcaattgttcatctgattttgatgcgtgtctcattaccaaagctgggttacaagtgtataacaagtgttggaagtttgagcattgcaatttcaacgacgtcacaacccgcttgagggaaaatgagctaacgtactactgctgcaagaaggacctgtgtaactttaacgaacagcttgaaaatggtgggacatccttatcagagaaaacagttcttctgctggtgactccatttctggcagcagcctggagccttcatccctaagtcaacaccaggagagcttctcccaaactccccgttcctgcgtagtccgctttctcttgctgccacattctaaaggcttgatattttccaaatggatcctgttgggaaagaataaaattagcttgagcaacctggctaagatagaggggctctgggagactttgaagaccagtcctgtttgcagggaagccccacttgaaggaagaagtctaagagtgaagtaggtgtgacttgaactagattgcatgcttcctcctttgctcttgggaagaccagctttgcagtgacagcttgagtgggttctctgcagccctcagattatttttcctctggctccttggatgtagtcagttagcatcattagtacatctttggagggtggggcaggagtatatgagcatcctctctcacatggaacgctttcataaacttcagggatcccgtgttgccatggaggcatgccaaatgttccatatgtgggtgtcagtcagggacaacaagatccttaatgcagagctagaggacttctggcagggaagtggggaagtgttccagatagcagggcatgaaaacttagagaggtacaagtggctgaaaatcgagtttttcctctgtctttaaattttatatgggctttgttatcttccactggaaaagtgtaatagcatacatcaatggtgtgttaaagctatttccttgccttttttttattggaatggtaggatatcttggctttgccacacacagttacagagtgaacactctactacatgtgactggcagtattaagtgtgcttattttaaatgttactggtagaaaggcagttcaggtatgtgtgtatatagtatgaatgcagtggggacaccctttgtggttacagtttgagacttccaaaggtcatccttaataacaacagatctgcaggggtatgttttaccatctgcatccagcctcctgctaactcctagctgactcagcatagattgtataaaatacctttgtaacggctcttagcacactcacagatgtttgaggctttcagaagctcttctaaaaaatgatacacacctttcacaagggcaaactttttccttttccctgtgtattctagtgaatgaatctcaagattcagtagacctaatgacatttgtattttatgatcttggctgtatttaatggcataggctgacttttgcagatggaggaatttcttgattaatgttgaaaaaaaacccttgattatactctgttggacaaaccgagtgcaatgaatgatgcttttctgaaaatgaaatataacaagtgggtgaatgtggttatggccgaaaaggatatgcagtatgcttaatggtagcaactgaaagaagacatcctgagcagtgccagctttcttctgttgatgccgttccctgaacataggaaaatagaaacttgcttatcaaaacttaaaaaaaaaaaaaaaaaaaaaaaaaaaaaaaaaaaaaaaaaaaaaaaaaaaaaaaaaaaaaa

SEQ ID NO: 178 - protein, 128 aa, Homo sapien
MGIQGGSVLFGLLLVLAVFCHSGHSLQCYNCPNPTADCKTAVNCSSDFDACLITKAGLQVYNKCWKFEHCNFNDVTTRLRENELTYYCCKKDLCNFNEQLENGGTSLSEKTVLLLVTPFLAAAWSLHP

SEQ ID NO: 179 - DNA, 3344 bp, Homo sapien
ggtacagctgcgcgtctgcgggaataggtgcagcgggcccttggcgggggactctgagggaggagctggggacggcgaccctaggagagttctttggggtgactttcaagatggactctactctaacagcaagtgaaatccggcagcgatttatagatttcttcaagaggaacgagcatacgtatgttcactcgtctgccaccatcccattggatgaccccactttgctctttgccaatgcaggcatgaaccagtttaaacccattttcctgaacacaattgacccatctcaccccatggcaaagctgagcagagctgccaatacccagaagtgcatccgggctgggggcaaacaaaatgacctggacgatgtgggcaaggatgtctatcatcacaccttcttcgagatgctgggctcttggtcttttggagattactttaaggaattggcatgtaagatggctctggaactcctcacccaagagtttggcattcccattgaaagactttatgttacttactttggcggggatgaagcagctggcttagaagcagatctggaatgcaaacagatctggcaaaatttggggctggatgacaccaaaatcctcccaggcaacatgaaggataacttctgggagatgggtgacacgggcccctgtggtccttgcagtgagatccactacgaccggattggtggtcgggacgccgcacatcttgtcaaccaggacgaccctaatgtgctggagatctggaaccttgtgttcatccagtataacagggaagctgatggcattctgaaacctcttcccaagaaaagcattgacacagggatgggcctggaacgactggtatctgtgctgcagaataagatgtccaactatgacactgacctttttgtcccttactttgaagccattcagaagggcacaggtgcccgaccatacactgggaaagttggtgctgaggatgccgatgggattgacatggcctaccgggtgctggctgaccatgctcggaccatcactgtggcactggctgatggtggccggcctgacaacacagggcgtggatatgtgttgagacggattctccgccgagctgtccgatacgcccatgaaaagctcaatgccagcaggggcttctttgctacgttagtggatgttgtcgtccagtccctgggagatgcatttcctgagctgaagaaggacccagacatggtgaaggacatcattaatgaagaagaggtgcagtttctcaagactctcagcagagggcgtcgcatcctggacaggaaaattcagagcctgggagacagcaagaccattcccggagacactgcttggctcctctatgacacctatgggtttccagtggatctgactggactgattgctgaagagaagggcctggtggtagacatggatggctttgaagaggagaggaaactggcccagctgaaatcacagggcaagggagctggtggggaagacctcattatgctggacatttacgctatcgaagagctccgggcacggggtctggaggtcacagatgattccccaaagtacaattaccatttggactccagtggtagctatgtatttgagaacacagtggctacggtgatggctctgcgcagggagaagatgttcgtggaagaggtgtccacaggccaggagtgtggagtggtgctggacaagacctgtttctatgctgagcaaggaggccagatctatgacgaaggctacctggtgaaggtggatgacagcagtgaagataaaacagagtttacagtgaagaatgctcaggtccgaggagggtatgtgctacacattggaaccatctacggtgacctgaaagtgggggatcaggtctggctgtttattgatgagccccgacgaagacccatcatgagcaaccacacagctacgcacattctgaacttcgccctgcgctcagtgcttggggaagctgaccagaaaggctcattggttgctcctgaccgcctcagatttgactttactgccaagggagccatgtccacccaacagatcaagaaggctgaagagattgctaatgagatgattgaggcagccaaggccgtctatacccaggattgccccctggcagcagcgaaagccatccagggcctacgggctgtgtttgatgagacctatcctgaccctgtgcgagtcgtctccattggggtcccggtgtccgagttgctggatgacccctctgggcctgctggctccctgacttctgttgagttctgtgggggaacgcacctgcggaactcgagtcatgcaggagcttttgtgatcgtgacggaagaagccattgccaagggtatccggaggattgtggctgtcacaggtgccgaggcccagaaggccctcaggaaagcagagagcttgaagaaatgtctctctgtcatggaagccaaagtgaaggctcagactgctccaaacaaggatgtgcagagggagatcgctgaccttggagaggccctggccactgcagtcatcccccagtggcagaaggatgaattgcgggagactctcaaatccctaaagaaggtcatggatgacttggaccgagccagcaaagccgatgtccagaaacgagtgttagagaagacgaagcagttcatcgacagcaaccccaaccagcctcttgtcatcctggagatggagagcggcgcctcagccaaggccctgaatgaagccttgaagctcttcaagatgcactcccctcagacttctgccatgctcttcacggtggacaatgaggctggcaagatcacgtgcctgtgtcaagtcccccagaatgcagccaatcggggcttaaaagccagcgagtgggtgcagcaggtgtcaggcttgatggacggtaaaggtggtggcaaggatgtgtctgcacaggccacaggcaagaacgttggctgcctgcaggaggcgctgcagctggccacttccttcgcccagctgcgcctcggggatgtaaagaactgagtggggaaggaggaggctcccactggatccatccgtccagccaagagctcttcatctgctacaagaacatttgaatcttgggacctttaaagagcccctcctaacccagcagtaactggaacacacttgggagcagtcctatgtctcagtgccccttaaatttctgccctgagccctccacgtcagtgccatcggtctagaaccactaaccccgcattgctgttgatcgtcacgctcgcatctatagataacggctctccagacctgagctttccgcgtcagcaagtaggaatcgtttttgctgcagagaataaaaggaccacgtgc

SEQ ID NO: 180 - protein, 968 aa, Homo sapien
MDSTLTASEIRQRFIDFFKRNEHTYVHSSATIPLDDPTLLFANAGMNQFKPIFLNTIDPSHPMAKLSRAANTQKCIRAGGKQNDLDDVGKDVYHHTFFEMLGSWSFGDYFKELACKMALELLTQEFGIPIERLYVTYFGGDEAAGLEADLECKQIWQNLGLDDTKILPGNMKDNFWEMGDTGPCGPCSEIHYDRIGGRDAAHLVNQDDPNVLEIWNLVFIQYNREADGILKPLPKKSIDTGMGLERLVSVLQNKMSNYDTDLFVPYFEAIQKGTGARPYTGKVGAEDADGIDMAYRVLADHARTITVALADGGRPDNTGRGYVLRRILRRAVRYAHEKLNASRGFFATLVDVVVQSLGDAFPELKKDPDMVKDIINEEEVQFLKTLSRGRRILDRKIQSLGDSKTIPGDTAWLLYDTYGFPVDLTGLIAEEKGLVVDMDGFEEERKLAQLKSQGKGAGGEDLIMLDIYAIEELRARGLEVTDDSPKYNYHLDSSGSYVFENTVATVMALRREKMFVEEVSTGQECGVVLDKTCFYAEQGGQIYDEGYLVKVDDSSEDKTEFTVKNAQVRGGYVLHIGTIYGDLKVGDQVWLFIDEPRRRPIMSNHTATHILNFALRSVLGEADQKGSLVAPDRLRFDFTAKGAMSTQQIKKAEEIANEMIEAAKAVYTQDCPLAAAKAIQGLRAVFDETYPDPVRVVSIGVPVSELLDDPSGPAGSLTSVEFCGGTHLRNSSHAGAFVIVTEEAIAKGIRRIVAVTGAEAQKALRKAESLKKCLSVMEAKVKAQTAPNKDVQREIADLGEALATAVIPQWQKDELRETLKSLKKVMDDLDRASKADVQKRVLEKTKQFIDSNPNQPLVILEMESGASAKALNEALKLFKMHSPQTSAMLFTVDNEAGKITCLCQVPQNAANRGLKASEWVQQVSGLMDGKGGGKDVSAQATGKNVGCLQEALQLATSFAQLRLGDVKN

SEQ ID NO: 181 - DNA, 1246 bp, Homo sapien
gaccagcctacagccgcctgcatctgtatccagcgccaggtcccgccagtcccagctgcgcgcgccccccagtcccgcacccgttcggcccaggctaagttagccctcaccatgccggtcaaaggaggcaccaagtgcatcaaatacctgctgttcggatttaacttcatcttctggcttgccgggattgctgtccttgccattggactatggctccgattcgactctcagaccaagagcatcttcgagcaagaaactaataataataattccagcttctacacaggagtctatattctgatcggagccggcgccctcatgatgctggtgggcttcctgggctgctgcggggctgtgcaggagtcccagtgcatgctgggactgttcttcggcttcctcttggtgatattcgccattgaaatagctgcggccatctggggatattcccacaaggatgaggtgattaaggaagtccaggagttttacaaggacacctacaacaagctgaaaaccaaggatgagccccagcgggaaacgctgaaagccatccactatgcgttgaactgctgtggtttggctgggggcgtggaacagtttatctcagacatctgccccaagaaggacgtactcgaaaccttcaccgtgaagtcctgtcctgatgccatcaaagaggtcttcgacaataaattccacatcatcggcgcagtgggcatcggcattgccgtggtcatgatatttggcatgatcttcagtatgatcttgtgctgtgctatccgcaggaaccgcgagatggtctagagtcagcttacatccctgagcaggaaagtttacccatgaagattggtgggattttttgtttgtttgttttgttttgtttgttgtttgttgtttgtttttttgccactaattttagtattcattctgcattgctagataaaagctgaagttactttatgtttgtcttttaatgcttcattcaatattgacatttgtagttgagcggggggtttggtttgctttggtttatattttttcagttgtttgtttttgcttgttatattaagcagaaatcctgcaatgaaaggtactatatttgctagactctagacaagatattgtacataaaagaatttttttgtctttaaatagatacaaatgtctatcaactttaatcaagttgtaacttatattgaagacaatttgatacataataaaaaattatgacaatgtcaaaaaaaaaaaaaaa

SEQ ID NO: 182 - protein, 228 aa, Homo sapien
MPVKGGTKCIKYLLFGFNFIFWLAGIAVLAIGLWLRFDSQTKSIFEQETNNNNSSFYTGVYILIGAGALMMLVGFLGCCGAVQESQCMLGLFFGFLLVIFAIEIAAAIWGYSHKDEVIKEVQEFYKDTYNKLKTKDEPQRETLKAIHYALNCCGLAGGVEQFISDICPKKDVLETFTVKSCPDAIKEVFDNKFHIIGAVGIGIAVVMIFGMIFSMILCCAIRRNREMV

SEQ ID NO: 183 - DNA, 1991 bp, Homo sapien
cttgctccgagagggagtcctcgcggacgtcagccaagattccagaatgactatcttgacttacccctttaaaaatcttcccactgcatcaaaatgggccctcagattttccataagacctctgagctgttcctcccagctacgagctgccccagctgtccagaccaaaacgaagaagacgttagccaaacccaatataaggaatgttgtggtggtggatggtgttcgcactccatttttgctgtctggcacttcatataaagacctgatgccacatgatttggctagagcagcgcttacgggtttgttgcatcggaccagtgtccctaaggaagtagttgattatatcatctttggtacagttattcaggaagtgaaaacaagcaatgtggctagagaggctgcccttggagctggcttctctgacaagactcctgctcacactgtcaccatggcttgtatctctgccaaccaagccatgaccacaggtgttggcttgattgcttctggccagtgtgatgtgatcgtggcaggtggtgttgagttgatgtccgatgtccctattcgtcactcaaggaaaatgagaaaactgatgcttgatctcaataaggccaaatctatgggccagcgactgtctttaatctctaaattccgatttaatttcctagcacctgagctccctgcggtttctgagttctccaccagtgagaccatgggccactctgcagaccgactggccgctgcctttgctgtttctcggctggaacaggatgaatatgcactgcgctctcacagtctagccaagaaggcacaggatgaaggactcctttctgatgtggtacccttcaaagtaccaggaaaagatacagttaccaaagataatggcatccgtccttcctcactggagcagatggccaaactaaaacctgcattcatcaagccctacggcacagtgacagctgcaaattcttctttcttgactgatggtgcatctgcaatgttaatcatggcggaggaaaaggctctggccatgggttataagccgaaggcatatttgagggattttatgtatgtgtctcaggatccaaaagatcaactattacttggaccaacatatgctactccaaaagttctagaaaaggcaggattgaccatgaatgatattgatgcttttgaatttcatgaagctttctcgggtcagattttggcaaattttaaagccatggattctgattggtttgcagaaaactacatgggtagaaaaaccaaggttggattgcctcctttggagaagtttaataactggggtggatctctgtccctgggacacccatttggagccactggctgcaggttggtcatggctgctgccaacagattacggaaagaaggaggccagtatggcttagtggctgcgtgtgcagctggagggcagggccatgctatgatagtggaagcttatccaaaataatagatccagaagaagtgacctgaagtttctgtgcaacactcacactaggcaatgccatttcaatgcattactaaatgacatttgtagttcctagctcctcttaggaaaacagttcttgtggccttctattaaatagtttgcacttaagccttgccagtgttctgagcttttcaataatcagtttactgctctttcagggatttctaagccaccagaatctcacatgagatgtgtgggtggttgtttttggtctctgttgtcactaaagactaaatgagggtttgcagttgggaaagaggtcaactgagatttggaaatcatctttgtaatatttgcaaattatacttgttcttatctgtgtcctaaagatgtgttctctataaaatacaaaccaacgtgcctaattaattatggaaaaataattcagaatctaaacaccactgaaaacttataaaaaatgtttagatacataaatatggtggtcagcgttaataaagtggagaaatattggaaaaaaaaa

SEQ ID NO: 184 - protein, 474 aa, Homo sapien
MTILTYPFKNLPTASKWALRFSIRPLSCSSQLRAAPAVQTKTKKTLAKPNIRNVVVVDGVRTPFLLSGTSYKDLMPHDLARAALTGLLHRTSVPKEVVDYIIFGTVIQEVKTSNVAREAALGAGFSDKTPAHTVTMACISANQAMTTGVGLIASGQCDVIVAGGVELMSDVPIRHSRKMRKLMLDLNKAKSMGQRLSLISKFRFNFLAPELPAVSEFSTSETMGHSADRLAAAFAVSRLEQDEYALRSHSLAKKAQDEGLLSDVVPFKVPGKDTVTKDNGIRPSSLEQMAKLKPAFIKPYGTVTAANSSFLTDGASAMLIMAEEKALAMGYKPKAYLRDFMYVSQDPKDQLLLGPTYATPKVLEKAGLTMNDIDAFEFHEAFSGQILANFKAMDSDWFAENYMGRKTKVGLPPLEKFNNWGGSLSLGHPFGATGCRLVMAAANRLRKEGGQYGLVAACAAGGQGHAMIVEAYPK

SEQ ID NO: 185 - DNA, 2704 bp, Homo sapien
gcttagtgtaaccagcggcgtatattttttaggcgccttttcgaaaacctagtagttaatattcatttgtttaaatcttattttatttttaagctcaaactgcttaagaataccttaattccttaaagtgaaataattttttgcaaaggggtttcctcgatttggagctttttttttcttccaccgtcatttctaactcttaaaaccaactcagttccatcatggtgatgttcaagaagatcaagtcttttgaggtggtctttaacgaccctgaaaaggtgtacggcagtggcgagagggtggctggccgggtgatagtggaggtgtgtgaagttactcgtgtcaaagccgttaggatcctggcttgcggagtggctaaagtgctttggatgcagggatcccagcagtgcaaacagacttcggagtacctgcgctatgaagacacgcttcttctggaagaccagccaacaggtgagaatgagatggtgatcatgagacctggaaacaaatatgagtacaagttcggctttgagcttcctcaggggcctctgggaacatccttcaaaggaaaatatgggtgtgtagactactgggtgaaggcttttcttgaccgcccgagccagccaactcaagagacaaagaaaaactttgaagtagtggatctggtggatgtcaatacccctgatttaatggcacctgtgtctgctaaaaaagaaaagaaagtttcctgcatgttcattcctgatgggcgggtgtctgtctctgctcgaattgacagaaaaggattctgtgaaggtgatgagatttccatccatgctgactttgagaatacatgttcccgaattgtggtccccaaagctgccattgtggcccgccacacttaccttgccaatggccagaccaaggtgctgactcagaagttgtcatcagtcagaggcaatcatattatctcagggacatgcgcatcatggcgtggcaagagccttcgggttcagaagatcaggccttctatcctgggctgcaacatccttcgagttgaatattccttactgatctatgttagcgttcctggatccaagaaggtcatccttgacctgcccctggtaattggcagcagatcaggtctaagcagcagaacatccagcatggccagccgaaccagctctgagatgagttgggtagatctgaacatccctgataccccagaagctcctccctgctatatggatgtcattcctgaagatcaccgattggagagcccaacaactcctctgctagatgacatggatggctctcaagacagccctatctttatgtatgcccctgagttcaagttcatgccaccaccgacttatactgaggtggatccctgcatcctcaacaacaatgtgcagtgagcatgtggaagaaaagaagcagctttacctacttgtttctttttgtctctcttcctggacactcactttttcagagactcaacagtctcgtcaatggagtgtgggtccaccttagcctctgacttcctaatgtaggaggtggtcagcaggcaatctcctgggccttaaaggatgcggactcatcctcagccagcgcccatgttgtgatacaggggtgtttgttggatgggtttaaaaataactagaaaaactcaggcccatccattttctcagatctccttgaaaattgaggccttttcgatagtttcgggtcaggtaaaaatggcctcctggcgtaagcttttcaaggttttttggaggctttttgtaaattgtgataggaactttggaccttgaacttacgtatcatgtggagaagagccaatttaacaaactaggaagatgaaaagggaaattgtggccaaaactttgggaaaaggaggttcttaaaatcagtgtttcccctttgtgcacttgtagaaaaaaaagaaaaaccttctagagctgatttgatggacaatggagagagctttccctgtgattataaaaaaggaagctagctgctctacggtcatctttgcttagagtatactttaacctggcttttaaagcagtagtaactgccccaccaaaggtcttaaaagccatttttggagcctattgcactgtgttctcctactgcaaatattttcatatgggaggatggttttctcttcatgtaagtccttggaattgattctaaggtgatgttcttagcactttaattcctgtcaaattttttgttctccccttctgccatcttaaatgtaagctgaaactggtctactgtgtctctagggttaagccaaaagacaaaaaaaattttactacttttgagattgccccaatgtacagaattatataattctaacgcttaaatcatgtgaaagggttgctgctgtcagccttgcccactgtgacttcaaacccaaggaggaactcttgatcaagatgcccaaccctgtgatcagaacctccaaatactgccatgagaaactagagggcaggtgttcataaaagccctttgaacccccttcctgccctgtgttaggagatagggatattggcccctcactgcagctgccagcacttggtcagtcactctcagccatagcactttgttcactgtcctgtgtcagagcactgagctccacccttttctgagagttattacagccagaaagtgtgggctgaagatggttggtttcatgtgggggtattatgtaccc

SEQ ID NO: 186 - protein, 391 aa, Homo sapien
MVMFKKIKSFEVVFNDPEKVYGSGERVAGRVIVEVCEVTRVKAVRILACGVAKVLWMQGSQQCKQTSEYLRYEDTLLLEDQPTGENEMVIMRPGNKYEYKFGFELPQGPLGTSFKGKYGCVDYWVKAFLDRPSQPTQETKKNFEVVDLVDVNTPDLMAPVSAKKEKKVSCMFIPDGRVSVSARIDRKGFCEGDEISIHADFENTCSRIVVPKAAIVARHTYLANGQTKVLTQKLSSVRGNHIISGTCASWRGKSLRVQKIRPSILGCNILRVEYSLLIYVSVPGSKKVILDLPLVIGSRSGLSSRTSSMASRTSSEMSWVDLNIPDTPEAPPCYMDVIPEDHRLESPTTPLLDDMDGSQDSPIFMYAPEFKFMPPPTYTEVDPCILNNNVQ

SEQ ID NO: 187 - DNA, 3322 bp, Homo sapien
gaaagctgtatttgctgcacgtggaaatctccgttattttccagcacccaacagtagcgtaatgggagtaacggacttaacctcatttctctttcagagcatttagccttcatatgcccttccctgcatgcttcccccaggccgtcaagacttgagttctgcctcgcttcccggcgcggtcgcagccctcagcccacttaggataatggcgacagctgaggtactgaacattggtaaaaaattatatgagggtaaaacaaaagaagtctacgaattgttagacagtccaggaaaagtcctcctgcagtccaaggaccagattacagcaggaaatgcagctagaaaaaaccacctggaaggaaaagctgcaatctcaaataaaatcaccagttgtatttttcagttattacaggaagcaggtattaaaactgccttcaccagaaaatgtggggagacagctttcattgcaccgcagtgtgaaatgattccaattgaatgggtttgcagaagaatagcaactggttcttttctcaaaagaaatcctggtgtcaaggaaggatataagttttacccacctaaagtggagttgtttttcaaggatgatgccaataatgacccacagtggtctgaggaacagctgattgctgcaaaattttgctttgctggacttcttataggccagactgaagtggatatcatgagtcatgctacacaggctatatttgaaatactggagaaatcctggttgccccagaattgtacactggttgatatgaagattgaatttggtgttgatgtaaccaccaaagaaattgttcttgctgatgttattgacaatgattcctggagactctggccatcaggagatcgaagccaacagaaagacaaacagtcttatcgggacctcaaagaagtaactcctgaagggctccaaatggtaaagaaaaactttgagtgggttgcagagagagtagagttgcttttgaaatcagaaagtcagtgcagggttgtagtgttgatgggctctacttctgatcttggtcactgtgaaaaaatcaagaaggcctgtggaaattttggcattccatgtgaacttcgagtaacatctgcgcataaaggaccagatgaaactctgaggattaaagctgagtatgaaggggatggcattcctactgtatttgtggcagtggcaggcagaagtaatggtttgggaccagtgatgtctgggaacactgcatatccagttatcagctgtcctcccctcacaccagactggggagttcaggatgtgtggtcttctcttcgactacccagtggtcttggctgttcaaccgtactttctccagaaggatcagctcaatttgctgctcagatatttgggttaagcaaccatttggtatggagcaaactgcgagcaagcattttgaacacatggatttccttgaagcaggctgacaagaaaatcagagaatgtaatttataagaaagaatgccattgaattttttaggggaaaaactacaaatttctaatttagctgaaggaaaatcaagcaagatgaaaaggtaattttaaattagagaacacaaataaaatgtattagtgaataaatgcttctctagatccatattaataaacatgagcatctaacccctcctttcttaggctagacaccaagatatttcagccagcctttatcattcctcttactttatcctttttccttaagtattggtggtcactactattgagtttcttccttaacactgattaaatgatcttaactccctcagctaaaactggcattactgactcccagctatatttctccagacttgcatttttttttttttttttgagacagggtctcactgtcgcccaggctggagtgcagtggcgtgatctcagttcactgctgctttccctcctgggctcaagcagttctcccacctcagcctctcgactaacagggactataatcttgcagcaccatgccgagctaattttattttttgtagagatgagctctcactatgtcacccaggttcgtctcaaactcctgaaccctagtaattctcctatctcagcctcccaaagtgctagggttacagacatgagccactgtgcctgtctagacttgtactttcaactgtccatttctccctgtctgtcccatgggcactcatgaaaaaacagaatgctcccaactttattcatcttccaagcctgtagctcttggtatactcactgttgcaagtcagaagcttgatttcatcattgatgtttttctcacgtttcacatctcactcatcaccaagtcatgttggtgttaatttctgattaacccttgaatttaccgtcttctcatcctctgtacaaaagcctcaagtgagggtcaaattcaacattatcctgatctagacagcccccattctcaatccacccttttccaagttgattgcccaaggacttctaacaataaactctcttttgcaccacagacttctttgaaaatatacatgctgttgaccctctctgtagaaaaccgcacacataaaacttaccaacagatttcattggttcttgggttctcccgaagcctatccatggtttatagattaagaattgatgaggtagctgggcacagtggctcacacctacgatcacagcacttcgggaggctgaagcaagcagatcacttgaggtcaggagtttgagaccagcctggccaacatggtgaaaccctgtctctactaaaaatacaaaaagtagccagccgtgatgacaggcacctgtaatcccagctactcgggaggctgaggcatgagaattgcttgaacccgggaggcggaggttgcagtgagcctggatcatgccactgcactccaacctgggcagcagagcaagactctgtctcaaaaggggaaaaaaaaaattgctgatgtgacccatgaagggaactcattttcctcgtaattttggactgccacacattggtacctttagttctctgaaggcccacgtttttatcattaagacctatttgttagctagtagagctttatgttcgctgtccatgaaaccttctgtaaccacagtgactacaagtagttctttctctattgaattattaggtccagaatagaagatgtcattgtacactttatttccctcacactgtgttatgctctgatgtgctatgcttagctatctgtcagagattagtaaattataaaactcatgtgtactacttaagtttatatcttatgctagtttataagaacaattaaaaggacttagaagattaaaaaaaaaaaaaaaaaa

SEQ ID NO: 188 - protein, 425 aa, Homo sapien
MATAEVLNIGKKLYEGKTKEVYELLDSPGKVLLQSKDQITAGNAARKNHLEGKAAISNKITSCIFQLLQEAGIKTAFTRKCGETAFIAPQCEMIPIEWVCRRIATGSFLKRNPGVKEGYKFYPPKVELFFKDDANNDPQWSEEQLIAAKFCFAGLLIGQTEVDIMSHATQAIFEILEKSWLPQNCTLVDMKIEFGVDVTTKEIVLADVIDNDSWRLWPSGDRSQQKDKQSYRDLKEVTPEGLQMVKKNFEWVAERVELLLKSESQCRVVVLMGSTSDLGHCEKIKKACGNFGIPCELRVTSAHKGPDETLRIKAEYEGDGIPTVFVAVAGRSNGLGPVMSGNTAYPVISCPPLTPDWGVQDVWSSLRLPSGLGCSTVLSPEGSAQFAAQIFGLSNHLVWSKLRASILNTWISLKQADKKIRECNL

SEQ ID NO: 189 - DNA, 1439 bp, Homo sapien
cggggaggacggtctgcatactcgctgcccgccggctccctcccccgcgtccctgcgaccgccgcggcgaagatggcctcaggagtgcaagtagctgatgaagtatgtcgcattttttatgacatgaaagttcgtaaatgctccacaccagaagaaatcaagaaaagaaagaaggctgtcattttttgtctcagtgcagacaaaaagtgcatcattgtagaagaaggcaaagagatcttggttggagatgttggtgtaaccataactgatcctttcaagcattttgtgggaatgcttcctgaaaaagattgtcgctatgctttgtatgatgcaagctttgaaacaaaagaatccagaaaagaagagttgatgttttttttgtgggcaccagaactagcacctctgaaaagtaaaatgatctatgcaagctccaaggatgcaattaaaaagaaatttcaaggcataaaacatgaatgtcaagcaaatggaccagaagatctcaatcgggcttgtattgctgaaaagttaggtggatccttaattgtagcctttgaaggatgccctgtgtagattattcagtgccacaaattgaaagcttccatgtttaatgttatcctcttgctatataaataaagcaaatatatttaggccagggtctcactgagggggagctgtcttgtcatcttttagagtaaactattctataaacatatgcaaacagccctaaataaatctaaagtctaaagttttattgatgtgaaattaaattcttattggccaaatgcctgttttgatgagttgatttataaagatttttgttaagctcaggattttaaattacacagttcacaaacagtaaaggccatgtgaagagaattattacatctttattaacctcagcatttactttgtttcttttgcttaggaaattgctcataatctggttataattttggtccaaattctttattcttccttgagctaagcagaataatggaatataatatgtcttcataatataacaacactaatacactaatagtaagattaagttaggcagtcttctaccaaatgtgtaatggagattgcctcaaaattgtgtccacataatccacgctcatcttgcaaagcgctatttcaggcacatcattggaatacaggaagtagccctgcacctgccagtgagctcgccattcactgattggaagagtgacctggcatcttggaaatcattgtgtgtcttcaggagaatgtgcagtgtcttgtaacaactaattaataatgcaaattagggctacattgtaatctgctttgttaatgaaaatgataaaacagaatattgacaagctaggacacctgtggtatctttaattgtatctccttcagaagtttgcttcttatggtataataaagtatggaagaataaaaaaaaaaaaaaa

SEQ ID NO: 190 - protein, 165 aa, Homo sapien
MASGVQVADEVCRIFYDMKVRKCSTPEEIKKRKKAVIFCLSADKKCIIVEEGKEILVGDVGVTITDPFKHFVGMLPEKDCRYALYDASFETKESRKEELMFFLWAPELAPLKSKMIYASSKDAIKKKFQGIKHECQANGPEDLNRACIAEKLGGSLIVAFEGCPV

SEQ ID NO: 191 - DNA, 2976 bp, Homo sapien
ggcacgagggtgcagaggcaaccaaaaaggaacccacacctccctccagggcccggggcgctgtcagacggggcagcaaccaggagattccctgggcctgcaggaagcccttccgcggaccgaaagattgttccccattttggagatgaagaaactgagactcaaagcagctgagtgaccttcccaaggacacacactgaactgggcggtgatcaggatctgaatgcacagggcgggtgttcagtgattgtttactacgttgaacgtgacctccaggaaagcagttctggccgagatcccctgacaacgcaaagcaagaagtaacgtggaaggaggctccccaagctggctggccattttgctgctgtgtgtggaggtgctgtcagtggcatgcccaaacccaaagctggaagaggaataaattacaagtggtcaaggttgctgctgtgtgtggaggtgctgtcagtggcatgcccaaacccaaagctggaagaggaataaattacaagtggtcaaggttgcatccttttgagcccaggacctgcttgtaagccgagagggttctctggccctaatctagccaagcaccatggagagaatcagtgccttcttcagctctatctgggacaccatcttgaccaaacaccaagaaggcatctacaacaccatctgcctgggagtcctcctgggcctgccactcttggtgatcatcacactcctcttcatctgttgccattgctgctggagcccaccaggcaagaggggccagcagccagagaagaacaagaagaaaaagaagaagaagaagaagaaggatgaagaagacctctggatctctgctcaacccaagcttctccagatggagaagagaccatcactgcctgtttagttaggcaggaagcagaggtgtttcctttctggggctaagcctccttctgaccacacacagacatttcaggaacccctgaaataatgcactatgtccatgtccacagagtaactactcaaccaaggaacaaacctcagactaagtgtcccagtggagggaagtcccagggaccacgtggacaattcttggatactgtcttggcagctatgtgtccaatagcaatgctccttactgcagacccaggcatgcctcccacctgtctctggcataccccacatgcaaagcacaaagaacatttatccatacatctcaatatggttcccaagtgtgtgcacatgcacgtaacacacacacacacaaattcaggtagcaggtacgtgggcaagtatattctgctcatcaaatggtcattggctatgtactttgtgcagggaagtacattatctacagtcacaaaaatgtctcatgggaaagccttgccagattcagacacatatatacaatttcctaaccagcaaggcccccatacaccatctattccataaaccactcaggttacagatgcatgctttcctatttctaactctacacataaacttttactggaagtactcataattggacattccagcaacctgctacagtccccacccttgtgtgtcttgatacagacacaccaagtttctgtgcctctgacccctcacctgtgccaagatgtttaaagtgtgatggttcaaaattcaaaaaaaaaaaaaaaaaactcgagaccggcgccggaggagacgcacgcagctgactttgtcttctccgcacgactgttacagaggtctccagagccttctctctcctgtgcaaaatggcaactcttaaggaaaaactcattgcaccagttgcggaagaagaggcaacagttccaaacaataagatcactgtagtgggtgttggacaagttggtatggcgtgtgctatcagcattctgggaaagtctctggctgatgaacttgctcttgtggatgttttggaagataagcttaaaggagaaatgatggatctgcagcatgggagcttatttcttcagacacctaaaattgtggcagataaagattattctgtgaccgccaattctaagattgtagtggtaactgcaggagtccgtcagcaagaaggggagagtcggctcaatctggtgcagagaaatgttaatgtcttcaaattcattattcctcagatcgtcaagtacagtcctgattgcatcataattgtggtttccaacccagtggacattcttacgtatgttacctggaaactaagtggattacccaaacaccgcgtgattggaagtggatgtaatctggattctgctagatttcgctaccttatggctgaaaaacttggcattcatcccagcagctgccatggatggattttgggggaacatggcgactcaagtgtggctgtgtggagtggtgtgaatgtggcaggtgtttctctccaggaattgaatccagaaatgggaactgacaatgatagtgaaaattggaaggaagtgcataagatggtggttgaaagtgcctatgaagtcatcaagctaaaaggatataccaactgggctattggattaagtgtggctgatcttattgaatccatgttgaaaaatctatccaggattcatcccgtgtcaacaatggtaaaggggatgtatggcattgagaatgaagtcttcctgagccttccatgtatcctcaatgcccggggattaaccagcgttatcaaccagaagctaaaggatgatgaggttgctcagctcaagaaaagtgcagataccctgtgggacatccagaaggacctaaaagacctgtgactagtgagctctaggctgtagaaatttaaaaactacaatgtgattaactcgagcctttagttttcatccatgtacatggatcacagtttgctttgatcttcttcaatatgtgaatttgggctcacagaatcaaagcctatgcttggtttaatgcttgcaatctgagctcttgaacaaataaaattaactattgtagtgtgaaaaaaaaaaaaaaaaaaaaaaaaaa

SEQ ID NO: 192 - protein, 334 aa, Homo sapien
MATLKEKLIAPVAEEEATVPNNKITVVGVGQVGMACAISILGKSLADELALVDVLEDKLKGEMMDLQHGSLFLQTPKIVADKDYSVTANSKIVVVTAGVRQQEGESRLNLVQRNVNVFKFIIPQIVKYSPDCIIIVVSNPVDILTYVTWKLSGLPKHRVIGSGCNLDSARFRYLMAEKLGIHPSSCHGWILGEHGDSSVAVWSGVNVAGVSLQELNPEMGTDNDSENWKEVHKMVVESAYEVIKLKGYTNWAIGLSVADLIESMLKNLSRIHPVSTMVKGMYGIENEVFLSLPCILNARGLTSVINQKLKDDEVAQLKKSADTLWDIQKDLKDL

SEQ ID NO: 193 - DNA, 1877 bp, Homo sapien
cgcccccagagtctggctttccgcggctgcccgcctcgcgcgtcttccctgcccgggtctcctcgctgtcgccgccgctgccacaccatggccttcgtcaccaggcagttcatgcgttccgtgtcctcctcgtccaccgcctcggcctcggccaagaagataatcgtcaagcacgtgacggtcatcggcggcgggctgatgggcgccggcattgcccaggttgctgcagcaactggtcacacagtagtgttggtagaccagacagaggacatcctggcaaaatccaaaaagggaattgaggaaagccttaggaaagtggcaaagaagaagtttgcagaaaaccctaaggccggcgatgaatttgtggagaagaccctgagcaccatagcgaccagcacggatgcagcctccgttgtccacagcacagacttggtggtggaagccatcgtggagaatctgaaggtgaaaaacgagctcttcaaaaggctggacaagtttgctgctgaacatacaatctttgccagcaacacttcctccttgcatattacaagcatagctaatgccaccaccagacaagaccgattcgctggcctccatttcttcaacccagtgcctgtcatgaaacttgtggaggtcattaaaacaccaatgaccagccagaagacatttgaatctttggtagactttagcaaagccctaggaaagcatcctgtttcttgcaaggacactcctgggtttattgtgaaccgcctcctggttccatacctcatggaagcaatcaggctgtatgaacgaggtgacgcatccaaagaagacattgacactgctatgaaattaggagccggttaccccatgggcccatttgagcttctagattatgtcggactggatactacgaagttcatcgtggatgggtggcatgaaatggatgcagagaacccattacatcagcccagcccatccttaaataagctggtagcagagaacaagttcggcaagaagactggagaaggattttacaaatacaagtgatgtgcagcttctccggctctgagaagaacacctgagagcgctttccagccagtgccccgagtgcctgtgggaatgctctttggtcagacattccctcacacagtacagtttaataaatgtgcattttgattgtaatctatcgaagtgattattacaccagttacagcagtaatagattctccattaagaaataattcccttttttagtctgttcatttctgtgtattttctaaacagctttacacccttggtgccttggagcaaacatgttttttgaaccttgtcatttttgtgaagaattgcctagattccttctctcatcaacgggaaagtacttcctctgagagtgcgagtgcaccatgctcactgttgctgcgtgggagagtcacaagccactggcaagcaagtggtatagtctgtgaagcactgcagcgagcagcacctggatcttgcctttataagaacattttactacctgcagctttgagtcttgccctacattttgggcatgacataagatgtgtctttattcagctcgtcgtgaagatgctgctgctgaatgggtcagcatatctctgtttgcatggtttgcaggaggtcggttttcatggtcattcagttccacagatctgaatgattactgtctgtctgtgtcttttttccatgagaaatcactgttgcaaattgcctataaattgactctactaaaataacaatgtttcagtctgaaaatttgaattgaaaaaaatgtataatataaaattgtaatacactcaaatgattataaaagtaaaagttggtaatttaggcaaaaaaaaaaaaaaaaaaaaaaaaaaaaaaaaaaa

SEQ ID NO: 194 - protein, 314 aa, Homo sapien
MAFVTRQFMRSVSSSSTASASAKKIIVKHVTVIGGGLMGAGIAQVAAATGHTVVLVDQTEDILAKSKKGIEESLRKVAKKKFAENPKAGDEFVEKTLSTIATSTDAASVVHSTDLVVEAIVENLKVKNELFKRLDKFAAEHTIFASNTSSLHITSIANATTRQDRFAGLHFFNPVPVMKLVEVIKTPMTSQKTFESLVDFSKALGKHPVSCKDTPGFIVNRLLVPYLMEAIRLYERGDASKEDIDTAMKLGAGYPMGPFELLDYVGLDTTKFIVDGWHEMDAENPLHQPSPSLNKLVAENKFGKKTGEGFYKYK

SEQ ID NO: 195 - DNA, 2591 bp, Homo sapien
cccggacgtgcggctcccctcggcctcctcgccatggacgcggacgactcccgggcccccaagggctccttgcggaagttcctggagcacctctccggggccggcaaggccatcggcgtgctgaccagcggcggggatgctcaaggtatgaacgctgccgtccgtgccgtggtgcgcatgggtatctacgtgggggccaaggtgtacttcatctacgagggctaccagggcatggtggacggaggctcaaacatcgcagaggccgactgggagagtgtctccagcatcctgcaagtgggcgggacgatcattggcagtgcgcggtgccaggccttccgcacgcgggaaggccgcctgaaggctgcttgcaacctgctgcagcgcggcatcaccaacctgtgtgtgatcggcggggacgggagcctcaccggggccaacctcttccggaaggagtggagtgggctgctggaggagctggccaggaacggccagatcgataaggaggccgtgcagaagtacgcctacctcaacgtggtgggcatggtgggctccatcgacaatgatttctgcggcaccgacatgaccatcggcacggactccgccctgcacaggatcatcgaggtcgtcgacgccatcatgaccacggcccagagccaccagaggaccttcgttctggaggtgatgggacgacactgtgggtacctggccctggtgagtgccttggcctgcggtgcggactgggtgttccttccagaatctccaccagaggaaggctgggaggagcagatgtgtgtcaaactctcggagaaccgtgcccggaaaaaaaggctgaatattattattgtggctgaaggagcaattgatacccaaaataaacccatcacctctgagaaaatcaaagagcttgtcgtcacgcagctgggctatgacacacgtgtgaccatcctcgggcacgtgcagagaggagggaccccttcggcattcgacaggatcttggccagccgcatgggagtggaggcagtcatcgccttgctagaggccaccccggacaccccagcttgcgtcgtgtcactgaacgggaaccacgccgtgcgcctgccgctgatggagtgcgtgcagatgactcaggatgtgcagaaggcgatggacgagaggagatttcaagatgcggttcgactccgagggaggagctttgcgggcaacctgaacacctacaagcgacttgccatcaagctgccggatgatcagatcccaaagaccaattgcaacgtagctgtcatcaacgtgggggcacccgcggctgggatgaacgcggccgtacgctcagctgtgcgcgtgggcattgccgacggccacaggatgctcgccatctatgatggctttgacggcttcgccaagggccagatcaaagaaatcggctggacagatgtcgggggctggaccggccaaggaggctccattcttgggacaaaacgcgttctcccggggaagtacttggaagagatcgccacacagatgcgcacgcacagcatcaacgcgctgctgatcatcggtggattcgaggcctacctgggactcctggagctgtcagccgcccgggagaagcacgaggagttctgtgtccccatggtcatggttcccgctactgtgtccaacaatgtgccgggttccgatttcagcatcggggcagacaccgccctgaacactatcaccgacacctgcgaccgcatcaagcagtccgccagcggaaccaagcggcgcgtgttcatcatcgagaccatgggcggctactgtggctacctggccaacatgggggggctcgcggccggagctgatgccgcatacattttcgaagagcccttcgacatcagggatctgcagtccaacgtggagcacctgacggagaaaatgaagaccaccatccagagaggccttgtgctcagaaatgagagctgcagtgaaaactacaccaccgacttcatttaccagctgtattcagaagagggcaaaggcgtgtttgactgcaggaagaacgtgctgggtcacatgcagcagggtggggcaccctctccatttgatagaaactttggaaccaaaatctctgccagagctatggagtggatcactgcaaaactcaaggaggcccggggcagaggaaaaaaatttaccaccgatgattccatttgtgtgctgggaataagcaaaagaaacgttatttttcaacctgtggcagagctgaagaagcaaacggattttgagcacaggattcccaaagaacagtggtggctcaagctacggcccctcatgaaaatcctggccaagtacaaggccagctatgacgtgtcggactcaggccagctggaacatgtgcagccctggagtgtctgacccagtcccgcctgcatgtgcctgcagccaccgtggactgtctgtttttgtaacacttaagttattttatcagcactttatgcacgtattattgacattaatacctaatcggcgagtgcccatctgccccaccagctccagtgcgtgctgtctgtggagtgtgtctcatgctttcagatgtgcatatgagcagaattaattaa

SEQ ID NO: 196 - protein, 784 aa, Homo sapien
MDADDSRAPKGSLRKFLEHLSGAGKAIGVLTSGGDAQGMNAAVRAVVRMGIYVGAKVYFIYEGYQGMVDGGSNIAEADWESVSSILQVGGTIIGSARCQAFRTREGRLKAACNLLQRGITNLCVIGGDGSLTGANLFRKEWSGLLEELARNGQIDKEAVQKYAYLNVVGMVGSIDNDFCGTDMTIGTDSALHRIIEVVDAIMTTAQSHQRTFVLEVMGRHCGYLALVSALACGADWVFLPESPPEEGWEEQMCVKLSENRARKKRLNIIIVAEGAIDTQNKPITSEKIKELVVTQLGYDTRVTILGHVQRGGTPSAFDRILASRMGVEAVIALLEATPDTPACVVSLNGNHAVRLPLMECVQMTQDVQKAMDERRFQDAVRLRGRSFAGNLNTYKRLAIKLPDDQIPKTNCNVAVINVGAPAAGMNAAVRSAVRVGIADGHRMLAIYDGFDGFAKGQIKEIGWTDVGGWTGQGGSILGTKRVLPGKYLEEIATQMRTHSINALLIIGGFEAYLGLLELSAAREKHEEFCVPMVMVPATVSNNVPGSDFSIGADTALNTITDTCDRIKQSASGTKRRVFIIETMGGYCGYLANMGGLAAGADAAYIFEEPFDIRDLQSNVEHLTEKMKTTIQRGLVLRNESCSENYTTDFIYQLYSEEGKGVFDCRKNVLGHMQQGGAPSPFDRNFGTKISARAMEWITAKLKEARGRGKKFTTDDSICVLGISKRNVIFQPVAELKKQTDFEHRIPKEQWWLKLRPLMKILAKYKASYDVSDSGQLEHVQPWSV

SEQ ID NO: 197 - DNA, 2015 bp, Homo sapien
tcgctgcgaaggacatttgggctgtgtgtgcgacgcgggtcggaggggcagtcgggggaaccgcgaagaagccgaggagcccggagccccgcgtgacgctcctctctcagtccaaaagcggcttttggttcggcgcagagagacccgggggtctagcttttcctcgaaaagcgccgccctgcccttggccccgagaacagacaaagagcaccgcagggccgatcacgctgggggcgctgaggccggccatggtcatggaagtgggcaccctggacgctggaggcctgcgggcgctgctgggggagcgagcggcgcaatgcctgctgctggactgccgctccttcttcgctttcaacgccggccacatcgccggctctgtcaacgtgcgcttcagcaccatcgtgcggcgccgggccaagggcgccatgggcctggagcacatcgtgcccaacgccgagctccgcggccgcctgctggccggcgcctaccacgccgtggtgttgctggacgagcgcagcgccgccctggacggcgccaagcgcgacggcaccctggccctggcggccggcgcgctctgccgcgaggcgcgcgccgcgcaagtcttcttcctcaaaggaggatacgaagcgttttcggcttcctgcccggagctgtgcagcaaacagtcgacccccatggggctcagccttcccctgagtactagcgtccctgacagcgcggaatctgggtgcagttcctgcagtaccccactctacgatcagggtggcccggtggaaatcctgccctttctgtacctgggcagtgcgtatcacgcttcccgcaaggacatgctggatgccttgggcataactgccttgatcaacgtctcagccaattgtcccaaccattttgagggtcactaccagtacaagagcatccctgtggaggacaaccacaaggcagacatcagctcctggttcaacgaggccattgacttcatagactccatcaagaatgctggaggaagggtgtttgtccactgccaggcaggcatttcccggtcagccaccatctgccttgcttaccttatgaggactaatcgagtcaagctggacgaggcctttgagtttgtgaagcagaggcgaagcatcatctctcccaacttcagcttcatgggccagctgctgcagtttgagtcccaggtgctggctccgcactgttcggcagaggctgggagccccgccatggctgtgctcgaccgaggcacctccaccaccaccgtgttcaacttccccgtctccatccctgtccactccacgaacagtgcgctgagctaccttcagagccccattacgacctctcccagctgctgaaaggccacgggaggtgaggctcttcacatcccattgggactccatgctccttgagaggagaaatgcaataactctgggaggggctcgagagggctggtccttatttatttaacttcacccgagttcctctgggtttctaagcagttatggtgatgacttagcgtcaagacatttgctgaactcagcacattcgggaccaatatatagtgggtacatcaagtccatctgacaaaatggggcagaagagaaaggactcagtgtgtgatccggtttctttttgctcgcccctgttttttgtagaatctcttcatgcttgacatacctaccagtattattcccgacgacacatatacatatgagaatataccttatttatttttgtgtaggtgtctgccttcacaaatgtcattgtctactcctagaagaaccaaatacctcaatttttgtttttgagtactgtactatcctgtaaatatatcttaagcaggtttgttttcagcactgatggaaaataccagtgttgggtttttttttagttgccaacagttgtatgtttgctgattatttatgacctgaaataatatatttcttcttctaagaagacattttgttacataaggatgacttttttatacaatggaataaattatggcatttctattg

SEQ ID NO: 198 - protein, 367 aa, Homo sapien
MVMEVGTLDAGGLRALLGERAAQCLLLDCRSFFAFNAGHIAGSVNVRFSTIVRRRAKGAMGLEHIVPNAELRGRLLAGAYHAVVLLDERSAALDGAKRDGTLALAAGALCREARAAQVFFLKGGYEAFSASCPELCSKQSTPMGLSLPLSTSVPDSAESGCSSCSTPLYDQGGPVEILPFLYLGSAYHASRKDMLDALGITALINVSANCPNHFEGHYQYKSIPVEDNHKADISSWFNEAIDFIDSIKNAGGRVFVHCQAGISRSATICLAYLMRTNRVKLDEAFEFVKQRRSIISPNFSFMGQLLQFESQVLAPHCSAEAGSPAMAVLDRGTSTTTVFNFPVSIPVHSTNSALSYLQSPITTSPSC

SEQ ID NO: 199 - DNA, 1557 bp, Homo sapien
gtgaggaatgctctgtgccagaaacagtgggagccctgaccttggctgactggggctggggtgagagaggaaagacctacattccctctcctgcccagatgccctttggaaagccattgaccacccaccatattgtttgatctacttcatagctccttggagcagccaaaaaagggacagcatgccccttggctggatcagggaatccagctccctagactgcatcccgtacctcttcccatgactgcacccagctccaggggcccttgggacagccagagctgggtggggacagtgataggcccaaggtcccctccacatcccagcagcccaagcttaatagccctccccctcaacctcaccattgtgaagcacctactatgtgctgggtgcctcccacacttgctggggctcacggggcctccaacccatttaatcaccatgggaaactgttgtgggcgctgcttccaggataaggagactgaggcttagagagaggaggcagccccctccacaccagtggcctcgtggttattagcaaggctgggtaatgtgaaggcccaagagcagagtctgggcctctgactctgagtccactgctccatttataaccccagcctgacctgagactgtcggagaggctgtctggggcctttatcaaaaaaagactcagccaagacaaggaggtagagaggggactgggggactgggagtcagagccctggctgggttcaggtcccacgtctggccaggcactgccttctcctctctgggcctttgtttccttgttggtcagaggagtgattgaaccagctcatctccaaggatcctctccactccatgtttgcaatgcttttatatggcccagccttgtaaataaccacaaggtccactccctgctccacgaagccttaagccataggcccaggatatttctgagagtgaaaccatgactgtgaccaccttctgtccccagccctgtcctggttccttcctatgcccaggtaccacccttcagaccccagttctaggggagaagagccctggacacccctgctctacccatgagcctgcccgctgcaatgcctagacttcccaacagccttagctgccagtgctggtcactaaccaacaaggttggcaccccagctaccccttctttgcagggctaaggcccccaaacatagcccctgccccggaggaagcttggggaacccatgagttgtcagctttgactttatctcctgctctttctacatgactgggcctcccttgggctggaagaattggggattctctattggaggtgagatcacagcctccagggccccccaaatcccagggaaggacttggagagaatcatgctgttgcatttagaactttctgctttgcacaggaaagagtcacacaattaatcaacatgtatattttctctatacatagagctctatttctctacggttttataaaagccttgggttccaaccaggcagtagatgtgcttctgaaccgcaaggagcaaacactgaaataaaatagtttatttttcacactca

SEQ ID NO: 200 - DNA, 2131 bp, Homo sapien
ctctttataatttagtttccatagaagttatatgtgcatttaaaaaaattcaatgctggagcgaccgtgtctggggagccgagccccgcttctcgctgcggtgagcccggactggggcacgcactgcgcagactccccgctgcagtgggcggagtcccacaggccccgcccctcctcccaccctcgttcagcctgtccagacagaagctggggcccagcggaggtagcagcagacgcctgagagcgaggccgaggccctcagggtttggagaccctgacacacccaccttctcacctgggctctgcgtatcccccagccttgagggaagatgaagcctaaactgatgtaccaggagctgaaggtgcctgcagaggagcccgccaatgagctgcccatgaatgagattgaggcgtggaaggctgcggaaaagaaagcccgctgggtcctgctggtcctcattctggcggttgtgggcttcggagcctgatgactcagctgtttctatgggaatacggcgacttgcatctctttgggcccaaccagcgcccagccccctgctatgacccttgcgaagcagtgctggtggaaagcattcctgagggcctggacttccccaatgcctccacggggaacccttccaccagccaggcctggctgggcctgctcgccggtgcgcacagcagcctggacatcgcctccttctactggaccctcaccaacaatgacacccacacgcaggagccctctgcccagcagggtgaggaggtcctccggcagctgcagaccctggcaccaaagggcgtgaacgtccgcatcgctgtgagcaagcccagcgggccccagccacaggcggacctgcaggctctgctgcagagcggtgcccaggtccgcatggtggacatgcagaagctgacccatggcgtcctgcataccaagttctgggtggtggaccagacccacttctacctgggcagtgccaacatggactggcgttcactgacccaggtcaaggagctgggcgtggtcatgtacaactgcagctgcctggctcgagacctgaccaagatctttgaggcctactggttcctgggccaggcaggcagctccatcccatcaacttggccccggttctatgacacccgctacaaccaagagacaccaatggagatctgcctcaatggaacccctgctctggcctacctggcgagtgcgcccccacccctgtgtccaagtggccgcactccagacctgaaggctctactcaacgtggtggacaatgcccggagtttcatctacgtcgctgtcatgaactacctgcccactctggagttctcccaccctcacaggttctggcctgccattgacgatgggctgcggcgggccacctacgagcgtggcgtcaaggtgcgcctgctcatcagctgctggggacactcggagccatccatgcgggccttcctgctctctctggctgccctgcgtgacaaccatacccactctgacatccaggtgaaactctttgtggtccccgcggatgaggcccaggctcgaatcccatatgcccgtgtcaaccacaacaagtacatggtgactgaacgcgccacctacatcggaacctccaactggtctggcaactacttcacggagacggcgggcacctcgctgctggtgacgcagaatgggaggggcggcctgcggagccagctggaggccattttcctgagggactgggactccccttacattcatgaccttgacacctcagctgacagcgtgggcaacgcctgccgcctgctctgaggcccgatccagtgggcaggccaaggcctgctgggcccccgcggacccaggtgctctgggtcacggtccctgtccccgcacccccgcttctgtctgccccattgtggctcctcaggctctctcccctgctctcccacctctacctccacccccaccggcctgacgctgtggccccgggacccagcagagctgggggagggatcagcccccaaagaaatgggggtgcatgctggcctgccccctggcccacccccactttccagggcaaaaagggcccagggttataataagtaaataacttgtctgtaaaaaaaaaaaaaaaaaaaaaaa

SEQ ID NO: 201 - protein, 437 aa, Homo sapien
MTQLFLWEYGDLHLFGPNQRPAPCYDPCEAVLVESIPEGLDFPNASTGNPSTSQAWLGLLAGAHSSLDIASFYWTLTNNDTHTQEPSAQQGEEVLRQLQTLAPKGVNVRIAVSKPSGPQPQADLQALLQSGAQVRMVDMQKLTHGVLHTKFWVVDQTHFYLGSANMDWRSLTQVKELGVVMYNCSCLARDLTKIFEAYWFLGQAGSSIPSTWPRFYDTRYNQETPMEICLNGTPALAYLASAPPPLCPSGRTPDLKALLNVVDNARSFIYVAVMNYLPTLEFSHPHRFWPAIDDGLRRATYERGVKVRLLISCWGHSEPSMRAFLLSLAALRDNHTHSDIQVKLFVVPADEAQARIPYARVNHNKYMVTERATYIGTSNWSGNYFTETAGTSLLVTQNGRGGLRSQLEAIFLRDWDSPYIHDLDTSADSVGNACRLL

SEQ ID NO: 202 - DNA, 2470 bp, Homo sapien
cgcctccacggcgatcaggttagtgtgcgccgcgggtgctgggggctcgagaaccgagcggagctggttgagccttcaaagtcctaaaacgcgcggccgtgggttcggggtttattgattgaattccgccggcgcgggagcctctgcagagagagagcgcgagagatggagatgggcagacggattcatttagagctgcggaacaggacgccctctgatgtgaaagaacttgtcctggacaacagtcggtcgaatgaaggcaaactcgaaggcctcacagatgaatttgaagaactggaattcttaagtacaatcaacgtaggcctcacctcaatcgcaaacttaccaaagttaaacaaacttaagaagcttgaactaagcgataacagagtctcagggggcctggaagtattggcagaaaagtgtccgaacctcacgcatctaaatttaagtggcaacaaaattaaagacctcagcacaatagagccactgaaaaagttagaaaacctcaagagcttagaccttttcaattgcgaggtaaccaacctgaacgactaccgagaaaatgtgttcaagctcctcccgcaactcacatatctcgacggctatgaccgggacgacaaggaggcccctgactcggatgctgagggctacgtggagggcctggatgatgaggaggaggatgaggatgaggaggagtatgatgaagatgctcaggtagtggaagacgaggaggacgaggatgaggaggaggaaggtgaagaggaggacgtgagtggagatgacgaggaggatgaagaaggttataacgatggagaggtagatgacgaggaagatgaagaagagcttggtgaagaagaaaggggtcagaagcgaaaacgagaacctgaagatgagggagaagatgatgactaagtggaataacctattttgaaaaattcctattgtgatttgactgtttttacccatatcccctctcccccccccctccaatcctgccccctgaaacttatttttttctgattgtaacgttgctgtgggaacgagaggggaagagtgtactgggggttgcggggggagggatggcgggtgggggtggaataaaatactatttttactgccactctttatttttttcccctactttttctttgtgtccggtttttgtccctgtaaatgcgatagctaagtacacactaagtgagcatttgttcctgactctcaaagaggatggtttggagttctcttacgtttcctggtatttcccaagtctcttgggttggttggaaggctgtggctggtctcagtttggttactcaatgcccaggaggggctgagcaccagccatatcttttgctttggttcacatgatgatacctgcttttctcaggcctgctagaggcatccaacgccctggtttgtaaatagcaacctaaaggcgtattttggcactggtctggggacattccccatctctcatcccttttcccccttcacagatggtggtgggcttcgctctacaaagaggactctgatgttactcttgagcttatgagccagagagctgaaaaccgcaggcttgttgtgttaagttacaaggaaaatggatttggtaattaaaattagaagaaacacaccttcaaacttcaacttctttaaaagaaaaaaaaaactgtcctatcttgttctgtaaaatattagaacgctttgttttacaaaaaatgatgagagaattcttccacatgtacttctgtgcttagaacatttttacggacctaagcgctggagacgttgctgcatgtcggctgggttttttttttcatacacccgagcacggaaaaactaacgcaaaattgtattttcttacctagtggaaatctgaaatgactgcaaattcctagtgaatgtacaggtttgctttcgtgtccctcttctggttgctttagaagtgacgtgtaatttctgaacccatgtttcatctgtataaaagaacatctgcaccagtttttctcctgcccctcagaagagccaaactttgagttttatgtctgtttgtcattgataaatttcaataaatctttttatacaatttttttggggatggcttctttgagtccaacaggccattgatcttttcaagatgcattccagatgaactgctaggtgagggggaagcttcatttttgttacctgatagaatagcttttcttatgagatatatataatgtgatactatgtttggatatttttggtcttaaagcaagactcagtggtgtatcttcattaaaagcttcctttaaaaaagttacagagttactaaaaaaacaagtacccaaacaatcaagttgggccaaccttggaaccttgttttgaatatctttcattgttttgtttgtcgtattgtaaaaagaatgtatggttgaaaactcaggaatgtttataaaacaaattatttcacaaacccaaaaaa

SEQ ID NO: 203 - protein, 304 aa, Homo sapien
ASTAIRLVCAAGAGGSRTERSWLSLQSPKNARPWVRGLLIEFRRRGSLCRERAREMEMGRRIHLELRNRTPSDVKELVLDNSRSNEGKLEGLTDEFEELEFLSTINVGLTSIANLPKLNKLKKLELSDNRVSGGLEVLAEKCPNLTHLNLSGNKIKDLSTIEPLKKLENLKSLDLFNCEVTNLNDYRENVFKLLPQLTYLDGYDRDDKEAPDSDAEGYVEGLDDEEEDEDEEEYDEDAQVVEDEEDEDEEEEGEEEDVSGDDEEDEEGYNDGEVDDEEDEEELGEEERGQKRKREPEDEGEDDD

SEQ ID NO: 204 - DNA, 1692 bp, Homo sapien
caactacaagcaaacagcacaattaatgcaacattcagcaactccagaccagcttttcttacccccatgaagaacgatcaatttaaaaaacacagatctcaggtttcctcccaagctgtcagcgagcgctgctaccggtctagattgccatgtcccaacaacagcaaagccaccctccctcctgcttcttccaggattgctctttaaagggaccagagtgacatactgatgcctggggaataaaggtggagcgtgtggaaattaaggatgtgaaactacctgtgcagctccagagagctatggctgcagaagcagaagcgtcccgcgaggcccgcgccaaggttattgcagccgaaggagaaatgaatgcatccagggctctgaaagaagcctccatggtcatcactgaatctcctgcagcccttcagctccgatacctgcagacactgaccaccattgctgctgagaaaaactcaacaattgtcttccctctgcccatagatatgctgcaaggaatcataggggcaaaacacagccatctaggctagtgtagagatgagcgctagccttccaagcatgaagtcggggaccaaattagcctttaactcataaagagagggtagggcttttctttttccatatgtcaattgtggtgttcccagaatgtatagcagttataaaaataggtgaaagaattgttagcttgtaaatactgagagattggtgatttatataaggtaatctgttagtcttaaaatagttaaaagtttgtatttttagattattatgtagtaggttagatccctcttgttttgacttccactgactcattctgaaccccctaagcacccaggccagaggcaagaacctgggctgtaactgccacctgacaccgctgactggctaaatgctttgcagaaagtgatgaccttacaccacaaccagcttctccaggtcatatgtgccttacctccagagagtctttttttttttttttctgagatggagtttcactcttgttgcccaggctggagtgcaatagcatgatctcggctcactgcaacctccgcctcctgggttcaagagattctcctgcctcagcctccccagtagctgggattacaggctcataccaccatgcccagctaatttttgtattattattattgttttttagtagagacggggtttcaccatgttggccaggctagtcacgaactcctaacctcaggtgatccacccacctctgcctcccaaagtgctgggattacaggcatgagctaccacacctggtttggagagtcttaattaaggaaatttccctaatgttcatttattttctaaatccagaccgtgtttcagaataatccttacttgagagtagccattttcttgcctgtacttgtcagaactagaggaaatagccaagactaatgaaaaagattactctaacccttaaaagacttttaaattcactactagagtggtcattttaaaaatacatccatgttttaacttatttgagccttctttatgagtaaatgattcctccttgttctgtctttcaaaccagctaaatatttgtcacaaaagtgcttttttctcactgttgcctattttcatatatcaggttttaaatagttttaattttttaataaaattttctctacgttctataaaaaaaaaaaaaaa

SEQ ID NO: 205 - DNA, 1478 bp, Homo sapien
ccattgtgctctaaagggaaggtgctgtgtaatcattaaggagcggaggcttttggagctgctaaaatgccggattacctcggtgccgatcagcggaagaccaaagaggatgagaaggacgacaagcccatccgagctctggatgagggggatattgccttgttgaaaacttatggtcagagcacttactctaggcagatcaagcaagttgaagatgacattcagcaacttctcaagaaaattaatgagctcactggtattaaagaatctgacactggcctggccccaccagcactctgggatttggctgcagataagcagacactccagagtgaacagcctttacaggttgccaggtgtacaaagataatcaatgctgattcggaggacccaaaatacattatcaacgtaaagcagtttgccaagtttgtggtggaccttagtgatcaggtggcacctactgacattgaagaagggatgagagtgggcgtggatagaaataaatatcaaattcacattccattgcctcctaagattgacccaacagttaccatgatgcaggtggaagagaaacctgatgtcacatacagtgatgttggtggctgtaaggaacagattgagaaactgcgagaagtagttgaaaccccattacttcatccagagaggtttgtgaaccttggcattgagcctcccaagggcgtgctgctctttggtccacccggtacaggcaagacactctgtgcgcgggcagttgctaatcggactgatgcgtgcttcattcgagttattggatctgagcttgtacagaaatacgtcggtgagggggctcgaatggttcgtgaactctttgaaatggccagaacaaaaaaagcctgccttatcttctttgatgaaattgatgctattggaggggctcgttttgatgatggtgctggaggtgacaatgaagtgcagagaacaatgttggaactgatcaatcagcttgatggttttgatcctcgaggcaatattaaagtgctgatggccactaacagacctgatactttggatccagcactgatgaggccagggagattggatagaaaaattgaatttagcttgcccgatctagagggtcggacccacatatttaagattcacgctcgttcaatgagtgttgaaagagatatcagatttgaactgttagcacgactgtgtccaaatagcactggtgctgagattagaagcgtctgcacagaggctggtatgtttgccatcagagcacggcgaaaaattgctaccgagaaggatttcttggaagctgtaaataaggtcattaagtcttatgccaaattcagtgctactcctcgttacatgacatacaactgaaccctgaaggctttcaagtgaaaactttaaattggaatcctaaccttatatagacttgttaataaccaattcataaacaaataaatggcttcaactttagagcacaatgg

SEQ ID NO: 206 - protein, 433 aa, Homo sapien
MPDYLGADQRKTKEDEKDDKPIRALDEGDIALLKTYGQSTYSRQIKQVEDDIQQLLKKINELTGIKESDTGLAPPALWDLAADKQTLQSEQPLQVARCTKIINADSEDPKYIINVKQFAKFVVDLSDQVAPTDIEEGMRVGVDRNKYQIHIPLPPKIDPTVTMMQVEEKPDVTYSDVGGCKEQIEKLREVVETPLLHPERFVNLGIEPPKGVLLFGPPGTGKTLCARAVANRTDACFIRVIGSELVQKYVGEGARMVRELFEMARTKKACLIFFDEIDAIGGARFDDGAGGDNEVQRTMLELINQLDGFDPRGNIKVLMATNRPDTLDPALMRPGRLDRKIEFSLPDLEGRTHIFKIHARSMSVERDIRFELLARLCPNSTGAEIRSVCTEAGMFAIRARRKIATEKDFLEAVNKVIKSYAKFSATPRYMTYN

SEQ ID NO: 207 - DNA, 1610 bp, Homo sapien
ccgcgccagtcgcctagcaggtcctctaccggcttattcctgtgccggatcttcatcggcacaggggccactgagacgtttctgcctccctctttcttcctccgctctttctcttccctctcgtttagtttgcctggagcttgaaaggagaaagcacggggtcgccccaaaccccttctgcttctgcccatcacaagtgccactaccgccatgggcctcactatctcctccctcttctcccgactatttggcaagaagcagatgcgcattttgatggttggattggatgctgctggcaagacaaccattctgtataaactgaagttaggggagatagtcaccaccattcctaccattggttttaatgtggaaacagtagaatataagaacatttgtttcacagtatgggatgttggtggtcaagatagaattaggcctctctggaagcattacttccagaatacccagggtcttatttttgtggtagatagcaacgatcgtgaaagaattcaggaagtagcagatgagctgcagaaaatgcttctggtagatgaattgagagatgcagtgctgctactttttgcaaacaaacaggatttgccaaatgctatggccatcagtgaaatgacagataaactagggcttcagtctcttcgtaacagaacatggtatgttcaagccacttgtgcaacacaaggaactggtctgtatgaaggacttgactggctgtcaaatgagctttcaaaacgttaaatgaaattggatatctaaccaaggacatgtttgataaaattggtctaggcttgttacaacaaaattagtttgtatcttggttattaaacagtatctgggactggtttgggcagaatattaaacttattttgttgccaattattgtttaccgagtataatgttgctatttagcaatgtgcttggttttaaagaaattctccttgggaaaaaagtatcctcttttaattttacttcccataagcgtaaatgcctggacatagctcttgtgaacctttaaataaattgtttgagtgtttttgagccccagacaaataatgttttaaagttatcccttgctactttactgatacctttatcattcctgagacagtttgctaatttaaaaatgtagcattccatttgtatttatttctctcccttgccaaaaagattttctaatactgcttgtaccagccagagaaagatccaaaacactactcagctctcttgcactgaggaaatttttccccctacattgactcctggcctacatcagccaaacttaaccttggtggggtttggatttgatagccaattagttctgtgctggttgcaaagaattgatatttagatggtttttaatactcagcagattgtcttcccatattgtgtcttttttatgttgcatgttgcttttgttatcagcctgattttttgctcagtatatgatagttctgctgatgttttgtttattgggcagacatatcttcattaagagtttttggaaaactcatcaaattcgatgaatacattttcttcataacccatttggaattattcctaataaaatgataaaatacgtaaaaaaaaaggaattc

SEQ ID NO: 208 - protein, 180 aa, Homo sapien
MGLTISSLFSRLFGKKQMRILMVGLDAAGKTTILYKLKLGEIVTTIPTIGFNVETVEYKNICFTVWDVGGQDRIRPLWKHYFQNTQGLIFVVDSNDRERIQEVADELQKMLLVDELRDAVLLLFANKQDLPNAMAISEMTDKLGLQSLRNRTWYVQATCATQGTGLYEGLDWLSNELSKR

SEQ ID NO: 209 - DNA, 1892 bp, Homo sapien
gagaaattgaaaagaaggggaaggggaagaaaagaaggggaagaagatcaaagaagaaaagaagaaggggaagaaaagaaggggaagaagatcaaaacccaccatgccccaggctcaacagcgtgctgatggaagtggaagagcctgaagtcttgcaggactcactggatagatgttattcgactccatcaatgtactttgaactacctgactcattccagcactacagaagtgtgttttactcatttgaggaacagcacatcacctttgcccttgacatggacaatagcttttttactttgacggtgacaagtcttcacctggtcttccagatgggagtcatattcccacaataagcagcccttactaagccgagaggtttcattcctgcaggcaggacctataggcacctgaagatttgaatgaaactatagttccatttggaagcccagacataggatgggtcagtgggcatggctctattcctattctcagagcatgccagtggcaacctgtgctcagtctgaagacaatggacccacgttaggtgtgacacgttcacataactgtgcagcacatgccgggagtgatcagccggacattttaatttgaaccatgtatctctgggtagctacaaaattcctcagggatttcattttgcaggcatgtctctgagcttctatacctactcaaggtcagtgtcatctttgtgtttagttcatccaaaggtgttaccctggtttcaatgaacctaacctcattatttgtgtcttcagtgttggcttgttttagctgatccatctgtaacacaggagggatccttggctgaggattgtatttcagaaccaccaactgctcttgacaattgttaacccactaggctcctttggttagagaagccacagtccttcagcctccaattggtgtcagtacttaggaagaccacagctagatggacaaacagcattgggaggccttagccctgctcctctcaattccatcctgtagagaacaggagtcaggagccgctggcaggagacagcatgtcacccaggactctgccggtgcagaatatgagcaatgccatgttcttgcagaaaacgcttagcctgagtttcataggaggtaatcaccagacaactgcagagtgtggaacactgagcaggacaactgacctgtctccttcacatagtccatgtcaccacaaatcacacaacaaaaaggagaagagatattttgggttgaaaaaaagtaaaaagataatgtagctgcatttctttagttgttttgaaccccaaatatttcctcatctttttgttgttgtcattgatggtggtgacatggacttgtttatagaggacaggtcagctctctggctcggtgatctacattctgaagttgtctgaaaatgtcttcatgattaaattcagcctaaactttttgctgggaacactgcagagacaatgctgtgagtttccaacctcagcccatctgcgggcagagaaggtctagtttgtccatcaccattatgatatcaggactggttacttggttaaggaggggtctaggagatctgtcccttttagagacaccttacttataatgaagtacttgggaaagcggttttcaagagtataaatatcctgtattctaatgatcatcctctaaacattttatcatttattaatcctccctgcctgtgtctattattatatacatatctctacgctgcaaattttgggtctcaatttttactgtgcctttgtttttactagtgtctgctgttgcaaaaagaagaaaacattctctgcctgagttttaatttttgtccaaagttaattttaatctatacaattaaaaccttttgcctatcaaaaaaaaaaaaaaaaaaa

SEQ ID NO: 210 - DNA, 3689 bp, Homo sapien
aagatctcataaaatctatgctgaggaatgagcgacagttcaaggaggagaagcttgcagagcagctcaagcaagctgaggagctcaggcaatataaagtcctggttcacgctcaggaacgagagctgacccagttaagggagaagttgcgggaagggagagatgcctcccgctcattgaatgagcatctccaggccctcctcactccggatgagccggacaagtcccaggggcaggacctccaagaacagctggctgaggggtgtagactggcacagcaccttgtccaaaagctcagcccagaaaatgacaacgatgacgatgaagatgttcaagttgaggtggctgagaaagtgcagaaatcgtctgcccccagggagatgcagaaggctgaagaaaaggaagtccctgaggactcactggaggaatgtgccatcacttgttcaaatagccatggcccttatgactccaaccagccacataggaaaaccaaaatcacatttgaggaagacaaagtcgactcaactctcattggctcatcctctcatgttgaatgggaggatgctgtacacattattccagaaaatgaaagtgatgatgaggaagaggaagaaaaaggaccagtgtctcccaggaatctgcaggagtctgaagaggaggaagtcccccaggagtcctgggatgaaggttattcgactctctcaattcctcctgaaatgttggcctcgtacaagtcttacagcagcacatttcactcattagaggaacagcaagtctgcatggctgttgacataggcagacatcggtgggatcaagtgaaaaaggaggaccacgaggcaacaggtcccaggctcagcagagagctgctggatgagaaagggcctgaagtcttgcaggactcactggatagatgttattcaactccttcaggttgtcttgaactgactgactcatgccagccctacagaagtgccttttacgtattggagcaacagcgtgttggcttggctgttaacatggatgaaattgaaaagtaccaagaagtggaagaagaccaagacccatcatgccccaggctcagcagggagctgctggatgagaaagagcctgaagtcttgcaggactcactgggtagatgttattcgactccttcaggttatcttgaactgcctgacttaggccagccctacagcagtgctgtttactcattggaggaacagtaccttggcttggctcttgacgtggacagaattaaaaaggaccaagaagaggaagaagaccaaggcccaccatgccccaggctcagcagggagctgctggaggtagtagagcctgaagtcttgcaggactcactggatagatgttattcaactccttccagttgtcttgaacagcctgactcctgccagccctatggaagttccttttatgcattggaggaaaagcatgttggcttttctcttgacgtgggagaaattgaaaagaaggggaaggggaagaaaagaaggggaagaagatcaaagaaggaaagaagaaggggaagaaaagaaggggaagaagatcaaaacccaccatgccccaggctcagcagggagctgctggatgagaaagggcctgaagtcttgcaggactcactggatagatgttattcaactccttcaggttgtcttgaactgactgactcatgccagccctacagaagtgccttttacatattggagcaacagcgtgttggcttggctgttgacatggatgaaattgaaaagtaccaagaagtggaagaagaccaagacccatcatgccccaggctcagcggggagctgttggatgagaaagagcctgaagtcttgcaggagtcactggatagatgctattcaactccttcaggttgtcttgaactgactgactcatgccagccctacagaagtgccttttacatattggagcaacagcgtgttggcttggctgttgacatggatgaaattgaaaagtaccaagaagtggaagaagaccaagacccatcatgccccaggctcagcagggagctgctggatgagaaagagcctgaagtcttgcaggactcactgggtagatgttattcgactccttcaggttatcttgaactgcctgacttaggccagccctacagcagtgctgtttactcattggaggaacagtaccttggcttggctcttgacgtggacagaattaaaaaggaccaagaagaggaagaagaccaaggcccaccatgccccaggctcagcagggagctgctggaggtagtagagcctgaagtcttgcaggactcactggatagatgttattcaactccttccagttgtcttgaacagcctgactcctgccagccctatggaagttccttttatgcattggaggaaaaacatgttggcttttctcttgacgtgggagaaattgaaaagaaggggaaggggaagaaaagaaggggaagaagatcaaagaaggaaagaagaaggggaagaaaagaaggggaagaagatcaaaacccaccatgccccaggctcaacagcatgctgatggaagtggaagagcctgaagtcttgcaggactcactggatatatgttattcgactccgtcaatgtactttgaactacctgactcattccagcactacagaagtgtgttttactcatttgaggaagagcatatcagcttcgccctttacgtggacaataggttttttactttgacggtgacaagtctccacctggtgttccagatgggagtcatattcccacaataagcagcccttactaagccgagaggtgtcattcctgcaggcaggacctataggcacgtgaagatttgaatgaaagtacagttccatttggaagcccagacataggatgggtcagtgggcatggctctattcctattctcaaaccatgccagtggcaacctgtgctcagtctgaagacaatggacccacgttaggtgtgacacgttcacataactgtgcagcacatgccgggagtgatcagtcagacattttaatttgaaccacgtatctctgggtagctacaaaattcctcagggatgtcattttgcaggcatgtctctgagcttctatacctgctcaaggtcattgtcatctttgtgtttagctcatccaaaggtgttaccctggtttcaatgaacctaacctcattctttgtgtcttcagtgttggcttgttttagctgatccatctgtaacacaggagggatccttggctgaggattgtatttcagaaccaccaactgctcttgacaattgttaacccgctaggctcctttggttagagaagccacagtccttcagcctccaattggtgtcagtacttaggaagaccacagctagatggacaaacagcattgggaggccttagccctgctcctctcaattccatcctgtagagaacaggagtcaggagccgctggcaggagacagcatgtcacccaggactctgccggtgcagaatatgagcaatgccatgttcttgcagaaaacgcttaacctgagtttcataggaggtaatcaccagacaactgcagaatgtagaacactgagcaggacaactgacctgtctccttcacatagtccatatcaccacaaatcacacaacaaaaaggagaagagatattttcggttgaaaaaaagtaaaaagata

SEQ ID NO: 211 - protein, 921 aa, Homo sapien
MLRNERQFKEEKLAEQLKQAEELRQYKVLVHAQERELTQLREKLREGRDASRSLNEHLQALLTPDEPDKSQGQDLQEQLAEGCRLAQHLVQKLSPENDNDDDEDVQVEVAEKVQKSSAPREMQKAEEKEVPEDSLEECAITCSNSHGPYDSNQPHRKTKITFEEDKVDSTLIGSSSHVEWEDAVHIIPENESDDEEEEEKGPVSPRNLQESEEEEVPQESWDEGYSTLSIPPEMLASYKSYSSTFHSLEEQQVCMAVDIGRHRWDQVKKEDHEATGPRLSRELLDEKGPEVLQDSLDRCYSTPSGCLELTDSCQPYRSAFYVLEQQRVGLAVNMDEIEKYQEVEEDQDPSCPRLSRELLDEKEPEVLQDSLGRCYSTPSGYLELPDLGQPYSSAVYSLEEQYLGLALDVDRIKKDQEEEEDQGPPCPRLSRELLEVVEPEVLQDSLDRCYSTPSSCLEQPDSCQPYGSSFYALEEKHVGFSLDVGEIEKKGKGKKRRGRRSKKERRRGRKEGEEDQNPPCPRLSRELLDEKGPEVLQDSLDRCYSTPSGCLELTDSCQPYRSAFYILEQQRVGLAVDMDEIEKYQEVEEDQDPSCPRLSGELLDEKEPEVLQESLDRCYSTPSGCLELTDSCQPYRSAFYILEQQRVGLAVDMDEIEKYQEVEEDQDPSCPRLSRELLDEKEPEVLQDSLGRCYSTPSGYLELPDLGQPYSSAVYSLEEQYLGLALDVDRIKKDQEEEEDQGPPCPRLSRELLEVVEPEVLQDSLDRCYSTPSSCLEQPDSCQPYGSSFYALEEKHVGFSLDVGEIEKKGKGKKRRGRRSKKERRRGRKEGEEDQNPPCPRLNSMLMEVEEPEVLQDSLDICYSTPSMYFELPDSFQHYRSVFYSFEEEHISFALYVDNRFFTLTVTSLHLVFQMGVIFPQ

SEQ ID NO: 212 - DNA, 896 bp, Homo sapien
cggggaggcgcggaaagccgacgcgcgtccattggtcggctggacgaggggaggagccgctggctcccagccccgccgcgatgagcctcggccgcctttgccgcctactgaagccggcgctgctctgtggggctctggccgcgcctggcctggccgggaccatgtgcgcgtcccgggacgactggcgctgtgcgcgctccatgcacgagttttccgccaaggacatcgacgggcacatggttaacctggacaagtaccggggcttcgtgtgcatcgtcaccaacgtggcctcccagtgaggcaagaccgaagtaaactacactcagctcgtcgacctgcacgcccgatacgctgagtgtggtttgcggatcctggccttcccgtgtaaccagttcgggaagcaggagccagggagtaacgaagagatcaaagagttcgccgcgggctacaacgtcaaattcgatatgttcagcaagatctgcgtgaacggggacgacgcccacccgctgtggaagtggatgaagatccaacccaagggcaagggcatcctgggaaatgccatcaagtggaacttcaccaagttcctcatcgacaagaacggctgcgtggtgaagcgctacggacccatggaggagcccctggtgatagagaaggacctgccccactatttctagctccacaagtgtgtggccccgcccgagcccctgcccacgcccttggagccttccaccggcactcatgacggcctgcctgcaaacctgctggtggggcagacccgaaaatccagcgtgcaccccgccggaggaaggtcccatggcctgctgggcttggctcggcgcccccacccctggctaccttgtgggaataaacagacaaattagaaaaaaaaaaaaaaa

SEQ ID NO: 213 - protein, 197 aa, Homo sapien
  unsure 73: unknown amino acid
MSLGRLCRLLKPALLCGALAAPGLAGTMCASRDDWRCARSMHEFSAKDIDGHMVNLDKYRGFVCIVTNVASQXGKTEVNYTQLVDLHARYAECGLRILAFPCNQFGKQEPGSNEEIKEFAAGYNVKFDMFSKICVNGDDAHPLWKWMKIQPKGKGILGNAIKWNFTKFLIDKNGCVVKRYGPMEEPLVIEKDLPHYF

SEQ ID NO: 214 - DNA, 1536 bp, Homo sapien
gccgccatggcccaagctgacatcgcgctgatcggattggccgtcatgggccagaacttaattctgaacatgaatgaccacggctttgtggtctgtgcttttaataggactgtctccaaagttgacgatttcttggccaatgaggcaaagggaaccaaagtggtgggtgcccagtccctgaaagagatggtctccaagctgaagaagccccggcggatcatcctcctggtgaaggctgggcaagctgtggatgatttcatcgagaaattggtaccattgttggatactggtgacatcatcattgacggaggaaattctgaatatagggacaccacaagacggtgccgagacctcaaaggcaagggaattttatttgtggggagcggagtcagtggtggagaggaagggccccggtatggcccatcgctcatgccaggagggaacaaagaagcgtggccccacatcaagaccatcttccaaggcattgctgcaaaagtgggaactggagaaccctgctgtgactgggtgggagatgagggagcaggccactttgtgaagatggtgcacaacgggatagagtatggggacatgcagctgatctgtgaggcataccacctgatgaaagacgtgctgggcatggcgcaggacgagatggcccaggcctttgaggattggaataagacagagctagactcattcctgattgaaatcacagccaatattctcaagttccaagacaccgatggcaaacacctgctgccaaagatcagggacagcgcggggcagaagggcacagggaagtggaccgccatctccgccctggaatacggcgtacccgtcaccctcattggagaagctgtctttgctcggtgcttatcatctctgaaggatgagagaattcaagctagcaaaaagctgaagggtccccagaagttccagtttgatggtgataagaaatcattcctggaggacattcggaaggcactctacgcttccaagatcatctcttacgctcaaggctttatgctgctaaggcaggcagccaccgagtttggctggactctcaattatggtggcatcgccctgatgtggagagggggctgcatcattagaagtgtattcctaggaaagataaaggatgcatttgatcgaaacccggaacttcagaacctcctactggacgacttctttaagtcagctgttgaaaactgccaggactcctggcggcgggcagtcagcactggggtccaggctggcattcccatgccctgttttaccactgccctctccttctatgacgggtacagacatgagatgcttccagccagcctcatccaggctcagcgggattacttcggggctcacacctatgaactcttggccaaaccagggcagtttatccacaccaactggacaggccatggtggcaccgtgtcatcctcgtcatacaatgcctgatgggctcctgtcaccctccacgtctccacagaccaggacattccatgtgcctcatggcactgccacctgggcctttgg

SEQ ID NO: 215 - protein, 483 aa, Homo sapien
MAQADIALIGLAVMGQNLILNMNDHGFVVCAFNRTVSKVDDFLANEAKGTKVVGAQSLKEMVSKLKKPRRIILLVKAGQAVDDFIEKLVPLLDTGDIIIDGGNSEYRDTTRRCRDLKGKGILFVGSGVSGGEEGPRYGPSLMPGGNKEAWPHIKTIFQGIAAKVGTGEPCCDWVGDEGAGHFVKMVHNGIEYGDMQLICEAYHLMKDVLGMAQDEMAQAFEDWNKTELDSFLIEITANILKFQDTDGKHLLPKIRDSAGQKGTGKWTAISALEYGVPVTLIGEAVFARCLSSLKDERIQASKKLKGPQKFQFDGDKKSFLEDIRKALYASKIISYAQGFMLLRQAATEFGWTLNYGGIALMWRGGCIIRSVFLGKIKDAFDRNPELQNLLLDDFFKSAVENCQDSWRRAVSTGVQAGIPMPCFTTALSFYDGYRHEMLPASLIQAQRDYFGAHTYELLAKPGQFIHTNWTGHGGTVSSSSYNA

SEQ ID NO: 216 - DNA, 3401 bp, Homo sapien
ggcacgagggcggagccagcccctcccctacccggagcagcccgctggggccgtcccgagcggcgacacactaggagtcccggccggccagccagggcagccgcggtcccgggactcggccgtgagtgctgcgggacggatggtggcggcggggcgcgggccagcgcgggcgccgtgagccggagctgcgcgcggggcatgcggctgcggcccccggccctcggcccccgcgctccggccccagccccggccgccggcccccgcggagtgcagcgaccgcgccgccgctgagggaggcgccccaccatgccgcgggccccggcgccgctgtacgcctgcctcctggggctctgcgcgctcctgccccggctcgcaggtctcaacatatgcactagtggaagtgccacctcatgtgaagaatgtctgctaatccacccaaaatgtgcctggtgctccaaagaggacttcggaagcccacggtccatcacctctcggtgtgatctgagggcaaaccttgtcaaaaatggctgtggaggtgagatagagagcccagccagcagcttccatgtcctgaggagcctgcccctcagcagcaagggttcgggctctgcaggctgggacgtcattcagatgacaccacaggagattgccgtgaacctccggcccggtgacaagaccaccttccagctacaggttcgccaggtggaggactatcctgtggacctgtactacctgatggacctctccctgtccatgaaggatgacttggacaatatccggagcctgggcaccaaactcgcggaggagatgaggaagctcaccagcaacttccggttgggatttgggtcttttgttgataaggacatctctcctttctcctacacggcaccgaggtaccagaccaatccgtgcattggttacaagttgtttccaaattgcgtcccctcctttgggttccgccatctgctgcctctcacagacagagtggacagcttcaatgaggaagttcggaaacagagggtgtcccggaaccgagatgcccctgaggggggctttgatgcagtactccaggcagccgtctgcaaggagaagattggctggcgaaaggatgcactgcatttgctggtgttcacaacagatgatgtgccccacatcgcattggatggaaaattgggaggcctggtgcagccacacgatggccagtgccacctgaacgaggccaacgagtacactgcatccaaccagatggactatccatcccttgccttgcttggagagaaattggcagagaacaacatcaacctcatctttgcagtgacaaaaaaccattatatgctgtacaagaattttacagccctgatacctggaacaacggtggagattttagatggagactccaaaaatattattcaactgattattaatgcatacaatagtatccggtctaaagtggagttgtcagtctgggatcagcctgaggatcttaatctcttctttactgctacctgccaagatggggtatcctatcctggtcagaggaagtgtgagggtctgaagattggggacacggcatcttttgaagtatcattggaggcccgaagctgtcccagcagacacacggagcatgtgtttgccctgcggccggtgggattccgggacagcctggaggtgggggtcacctacaactgcacgtgcggctgcagcgtggggctggaacccaacagtgccaggtgcaacgggagcgggacctatgtctgcggcctgtgtgagtgcagccccggctacctgggcaccaggtgcgagtgccaggatggggagaaccagagcgtgtaccagaacctgtgccgggaggcagagggcaagccactgtgcagcgggcgtggggactgcagctgcaaccagtgctcctgcttcgagagcgagttcggcaagatctatgggcctttctgtgagtgcgacaacttctcctgtgccaggaacaagggagtcctctgctcaggccatggcgagtgtcactgcggggaatgcaagtgccatgcaggttacatcggggacaactgtaactgctcgacagacatcagcacatgccggggcagagatggccagatctgcagcgagcgtgggcactgtctctgtgggcagtgccaatgcacggagccgggggcctttggggagatgtgtgagaagtgccccacctgcccggatgcatgcagcaccaagagagattgcgtcgagtgcctgctgctccactctgggaaacctgacaaccagacctgccacagcctatgcagggatgaggtgatcacatgggtggacaccatcgtgaaagatgaccaggaggctgtgctatgtttctacaaaaccgccaaggactgcgtcatgatgttcacctatgtggagctccccagtgggaagtccaacctgaccgtcctcagggagccagagtgtggaaacacccccaacgccatgaccatcctcctggctgtggtcggtagcatcctccttgttgggcttgcactcctggctatctggaagctgcttgtcaccatccacgaccggagggagtttgcaaagtttcagagcgagcgatccagggcccgctatgaaatggcttcaaatccattatacagaaagcctatctccacgcacactgtggacttcaccttcaacaagttcaacaaatcctacaatggcactgtggactgatgtttccttctccgaggggctggagcggggatctgatgaaaaggtcagactgaaacgccttgcacggctgctcggcttgatcacagctccctaggtaggcaccacagagaagaccttctagtgagcctgggccaggagcccacagtgcctgtacaggaaggtgcctggccatgtcacctggctgctaggccagagccatgccaggctgcgtccctccgagcttgggataaagcaaggggaccttggcactctcagctttccctgccacatccagcttgttgtcccaatgaaatactgagatgctgggctgtctctcccttccaggaatgctgggcccccagcctggccagacaagacgactgtcaggaagggtcggagtctgtaaaaccagcatacagtttggcttttttcacattgatcatttttatatgaaataaaaagatcctgcatttatggtgtagttctgagtcctgagacttttccgcgtgatggctatgccttgcacacaggtgttggtgatggggctgttgagatgcctgttgaaggtacatcgtttgcaaatgtcagtttcctctcctgtccgtgtttgtttagtacttttataatgaaaagaaacaagattgtttgggattggaagtaaagattaaaaccaaaagaatttgtgtttgtctgataaaaaaaaaaaaaaaaaaaaa

SEQ ID NO: 217 - protein, 796 aa, Homo sapien
MPRAPAPLYACLLGLCALLPRLAGLNICTSGSATSCEECLLIHPKCAWCSKEDFGSPRSITSRCDLRANLVKNGCGGEIESPASSFHVLRSLPLSSKGSGSAGWDVIQMTPQEIAVNLRPGDKTTFQLQVRQVEDYPVDLYYLMDLSLSMKDDLDNIRSLGTKLAEEMRKLTSNFRLGFGSFVDKDISPFSYAAPRYQTNPCIGYKLFPNCVPSFGFRHLLPLTDRVDSFNEEVRKQRVSRNRDAPEGGFDAVLQAAVCKEKIGWRKDALHLLVFTTDDVPHIALDGKLGGLVQPHDGQCHLNEANEYTASNQMDYPSLALLGEKLAENNINLIFAVTKNHYMLYKNFTALIPGTTVEILDGDSKNIIQLIINAYNSIRSKVELSVWDQPEDLNLFFTATCQDGVSYPGQRKCEGLKIGDTASFEVSLEARSCPSRHTEHVFALRPVGFRDSLEVGVTYNCTCGCSVGLEPNSARCNGSGTYVCGLCECSPGYLGTRCECQDGENQSVYQNLCREAEGKPLCSGRGDCSCNQCSCFESEFGKIYGPFCECDNFSCARNKGVLCSGHGECHCGECKCHAGYIGDNCNCSTDISTCRGRDGQICSERGHCLCGQCQCTEPGAFGEMCEKCPTCPDACSTKRDCVECLLLHSGKPDNQTCHSLCRDEVITWVDTIVKDDQEAVLCFYKTAKDCVMMFTYVELPSGKSNLTVLREPECGNTPNAMTILLAVVGSILLVGLALLAIWKLLVTIHDRREFAKFQSERSRARYEMASNPLYRKPISTHTVDFTFNKSYNGTVD

SEQ ID NO: 218 - DNA, 1326 bp, Homo sapien
gcggagcgagccctgaaaggctataggcgagggggcggctccgcggggccgggcgaggagtccagagagccatggccgccctgcgtgtcctgctgtcctgcgcccgcggcccgctgaggcccccggttcgctgtcccgcctggcgtcccttcgcctcgggtgctaactttgagtacatcatcgcagaaaaaagagggaagaataacaccgtggggttgatccaactgaaccgccccaaggccctcaatgcactttgcgatggcctgattgacgagctcaaccaggccctgaagatcttcgaggaggacccggccgtgggggccattgtcctcaccggcggggataaggcctttgcagctggagctgatatcaaggaaatgcagaacctgagtttccaggactgttactccagcaagttcttgaagcactgggaccacctcacccaggtcaagaagccagtcatcgctgctgtcaatggctatgcctttggcgggggctgtgagcttgccatgatgtgtgatatcatctatgccggtgagaaggcccagtttgcacagccggagatcttaataggaaccatcccaggtgcgggcggcacccagagactcacccgtgctgttgggaagtcgctggcgatggagatggtcctcaccggtgaccggatctcagcccaggacgccaagcaagcaggtcttgtcagcaagatttgtcctgttgagacactggtggaagaagccatccagtgtgcagaaaaaattgccagcaattctaaaattgtagtagcgatggccaaagaatcagtgaatgcagcttttgaaatgacattaacagaaggaagtaagttggagaagaaactcttttattcaacctttgccactgatgaccggaaagaagggatgaccgcgtttgtggaaaagagaaaggccaacttcaaagaccagtgagaaccagctgcccctgcttcacacctctgcttggagaggacaagtgcagcctgtcagttttagaagcaagtaaatcatcctcttttcaagagcagtgtccgtggtgtgcagttcctctccaattgctgcgtggtcgtggcccgacctctcacggcatgacagccttcgtcacccagcctgtgagggtcctgactggagcaccttctaaatctaagattctgctgaggagcccccgctggtccctctgggcatgctgtgctcggacggaaagcggggcctgcgggtccttgtgtccctgccgctgaagaatggggctgctctgagggaaacgctgtctgctgccttcatacagatgctgattaaagtgatagcgattcagatt

SEQ ID NO: 219 - protein, 290 aa, Homo sapien
MAALRVLLSCARGPLRPPVRCPAWRPFASGANFEYIIAEKRGKNNTVGLIQLNRPKALNALCDGLIDELNQALKIFEEDPAVGAIVLTGGDKAFAAGADIKEMQNLSFQDCYSSKFLKHWDHLTQVKKPVIAAVNGYAFGGGCELAMMCDIIYAGEKAQFAQPEILIGTIPGAGGTQRLTRAVGKSLAMEMVLTGDRISAQDAKQAGLVSKICPVETLVEEAIQCAEKIASNSKIVVAMAKESVNAAFEMTLTEGSKLEKKLFYSTFATDDRKEGMTAFVEKRKANFKDQ

SEQ ID NO: 220 - DNA, 2669 bp, Homo sapien
cagatgccagaagaacactgttgctcttggtggacgggcccagaggaattcagagttaaaccttgagtgcctgcgtccgtgagaattcagcatggaatgtctctactatttcctgggatttctgctcctggctgcaagattgccacttgatgccgccaaacgatttcatgatgtgctgggcaatgaaagaccttctgcttacatgagggagcacaatcaattaaatggctggtcttctgatgaaaatgactggaatgaaaaactctacccagtgtggaagcggggagacatgaggtggaaaaactcctggaagggaggccgtgtgcaggcggtcctgaccagtgactcaccagccctcgtgggctcaaatataacatttgcggtgaacctgatattccctagatgccaaaaggaagatgccaatggcaacatagtctatgagaagaactgcagaaatgaggctggtttatctgctgatccatatgtttacaactggacagcatggtcagaggacagtgacggggaaaatggcaccggccaaagccatcataacgtcttccctgatgggaaaccttttcctcaccaccccggatggagaagatggaatttcatctacgtcttccacacacttggtcagtatttccagaaattgggacgatgttcagtgagagtttctgtgaacacagccaatgtgacacttgggcctcaactcatggaagtgactgtctacagaagacatggacgggcatatgttcccatcgcacaagtgaaagatgtgtacgtggtaacagatcagattcctgtgtttgtgactatgttccagaagaacgatcgaaattcatccgacgaaaccttcctcaaagatctccccattatgtttgatgtcctgattcatgatcctagccacttcctcaattattctaccattaactacaagtggagcttcggggataatactggcctgtttgtttccaccaatcatactgtgaatcacacgtatgtgctcaatggaaccttcagccttaacctcactgtgaaagctgcagcaccaggaccttgtccgccaccgccaccaccacccagaccttcaaaacccaccccttctttaggacctgctggtgacaaccccctggagctgagtaggattcctgatgaaaactgccagattaacagatatggccactttcaagccaccatcacaattgtagagggaatcttagaggttaacatcatccagatgacagacgtcctgatgccggtgccatggcctgaaagctccctaatagactttgtcgtgacctgccaagggagcattcccacggaggtctgtaccatcatttctgaccccacctgcgagatcacccagaacacagtctgcagccctgtggatgtggatgagatgtgtctgctgactgtgagacgaaccttcaatgggtctgggacgtactgtgtgaacctcaccctgggggatgacacaagcctggctctcacgagcaccctgatttctgttcctgacagagacccagcctcgcctttaaggatggcaaacagtgccctgatctccgttggctgcttggccatatttgtcactgtgatctccctcttggtgtacaaaaaacacaaggaatacaacccaatagaaaatagtcctgggaatgtggtcagaagcaaaggcctgagtgtctttctcaaccgtgcaaaagccgtgttcttcccgggaaaccaggaaaaggatccgctactcaaaaaccaagaatttaaaggagtttcttaaatttcgaccttgtttctgaagctcacttttcagtgccattgatgtgagatgtgctggagtggctattaacctttttttcctaaagattattgttaaatagatattgtggtttggggaagttgaattttttataggttaaatgtcattttagagatggggagagggattatactgcaggcagcttcagccatgttgtgaaactgataaaagcaacttagcaaggcttcttttcattattttttatgtttcacttataaagtcttaggtaactagtaggatagaaacactgtgtcccgagagtaaggagagaagctactattgattagagcctaacccaggttaactgcaagaagaggcgggatactttcagctttccatgtaactgtatgcataaagccaatgtagtccagtttctaagatcatgttccaagctaactgaatcccacttcaatacacactcatgaactcctgatggaacaataacaggcccaagcctgtggtatgatgtgcacacttgctagactcagaaaaaatactactctcataaatgggtgggagtattttggtgacaacctactttgcttggctgagtgaaggaatgatattcatatattcatttattccatggacatttagttagtgctttttatataccaggcatgatgctgagtgacactcttgtgtatatttccaaatttttgtatagtcgctgcacatatttgaaatcatatattaagactttccaaagatgaggtccctggtttttcatggcaacttgatcagtaaggatttcacctctgtttgtaactaaaaccatctactatatgttagacatgacattctttttctctccttcctgaaaaataaagtgtgggaagagacaaaaaaaaaaaaa

SEQ ID NO: 221 - protein, 560 aa, Homo sapien
MECLYYFLGFLLLAARLPLDAAKRFHDVLGNERPSAYMREHNQLNGWSSDENDWNEKLYPVWKRGDMRWKNSWKGGRVQAVLTSDSPALVGSNITFAVNLIFPRCQKEDANGNIVYEKNCRNEAGLSADPYVYNWTAWSEDSDGENGTGQSHHNVFPDGKPFPHHPGWRRWNFIYVFHTLGQYFQKLGRCSVRVSVNTANVTLGPQLMEVTVYRRHGRAYVPIAQVKDVYVVTDQIPVFVTMFQKNDRNSSDETFLKDLPIMFDVLIHDPSHFLNYSTINYKWSFGDNTGLFVSTNHTVNHTYVLNGTFSLNLTVKAAAPGPCPPPPPPPRPSKPTPSLGPAGDNPLELSRIPDENCQINRYGHFQATITIVEGILEVNIIQMTDVLMPVPWPESSLIDFVVTCQGSIPTEVCTIISDPTCEITQNTVCSPVDVDEMCLLTVRRTFNGSGTYCVNLTLGDDTSLALTSTLISVPDRDPASPLRMANSALISVGCLAIFVTVISLLVYKKHKEYNPIENSPGNVVRSKGLSVFLNRAKAVFFPGNQEKDPLLKNQEFKGVS

SEQ ID NO: 222 - DNA, 1124 bp, Homo sapien
gccgctgccaccgcaccccgccatggagcggccgtcgctgcgcgccctgctcctcggcgccgctgggctgctgctcctgctcctgcccctctcctcttcctcctcttcggacacctgcggcccctgcgagccggcctcctgcccgcccctgcccccgctgggctgcctgctgggcgagacccgcgacgcgtgcggctgctgccctatgtgcgcccgcggcgagggcgagccgtgcgggggtggcggcgccggcagggggtactgcgcgccgggcatggagtgcgtgaagagccgcaagaggcggaagggtaaagccggggcagcagccggcggtccgggtgtaagcggcgtgtgcgtgtgcaagagccgctacccggtgtgcggcagcgacggcaccacctacccgagcggctgccagctgcgcgccgccagccagagggccgagagccgcggggagaaggccatcacccaggtcagcaagggcacctgcgagcaaggtccttccatagtgacgccccccaaggacatctggaatgtcactggtgcccaggtgtacttgagctgtgaggtcatcggaatcccgacacctgtcctcatctggaacaaggtaaaaaggggtcactatggagttcaaaggacagaactcctgcctggtgaccgggacaacctggccattcagacccggggtggcccagaaaagcatgaagtaactggctgggtgctggtatctcctctaagtaaggaagatgctggagaatatgagtgccatgcatccaattcccaaggacaggcttcagcatcagcaaaaattacagtggttgatgccttacatgaaataccagtgaaaaaaggtgaaggtgccgagctataaacctccagaatattattagtctgcatggttaaaagtagtcatggataactacattacctgttcttgcctaataagtttcttttaatccaatccactaacactttagttatattcactggttttacacagagaaatacaaaataaagatcacacatcaagactatctacaaaaatttattatatatttacagaagaaaagcatgcatatcattaaacaaataaaatactttttatcacaaaaaaaaaaaaaaaa

SEQ ID NO: 223 - protein, 282 aa, Homo sapien
MERPSLRALLLGAAGLLLLLLPLSSSSSSDTCGPCEPASCPPLPPLGCLLGETRDACGCCPMCARGEGEPCGGGGAGRGYCAPGMECVKSRKRRKGKAGAAAGGPGVSGVCVCKSRYPVCGSDGTTYPSGCQLRAASQRAESRGEKAITQVSKGTCEQGPSIVTPPKDIWNVTGAQVYLSCEVIGIPTPVLIWNKVKRGHYGVQRTELLPGDRDNLAIQTRGGPEKHEVTGWVLVSPLSKEDAGEYECHASNSQGQASASAKITVVDALHEIPVKKGEGAEL

SEQ ID NO: 224 - DNA, 2922 bp, Homo sapien
ggacaccgggccatgcacgcccccaactgaagctgcatctcaaagccgaagattccagcagcccaggggatttcaaagagctcagactcagaggaacatctgcggagagacccccgaagccctctccagggcagtcctcatccagacgctccgctagtgcagacaggagcgcgcagtggccccggctcgccgcgccatggagcggatccccagcgcgcaaccaccccccgcctgcctgcccaaagcaccgggactggagcacggagacctaccagggatgtaccctgcccacatgtaccaagtgtacaagtcaagacggggaataaagcggagcgaggacagcaaggagacctacaaattgccgcaccggctcatcgagaaaaagagacgtgaccggattaacgagtgcatcgcccagctgaaggatctcctacccgaacatctcaaacttacaactttgggtcacttggaaaaagcagtggttcttgaacttaccttgaagcatgtgaaagcactaacaaacctaattgatcagcagcagcagaaaatcattgccctgcagagtggtttacaagctggtgagctgtcagggagaaatgtcgaaacaggtcaagagatgttctgctcaggtttccagacatgtgcccgggaggtgcttcagtatctggccaagcacgagaacactcgggacctgaagtcttcgcagcttgtcacccacctccaccgggtggtctcggagctgctgcagggtggtacctccaggaagccatcagacccagctcccaaagtgatggacttcaaggaaaaacccagctctccggccaaaggttcggaaggtcctgggaaaaactgcgtgccagtcatccagcggactttcgctcactcgagtggggagcagagcggcagcgacacggacacagacagtggctatggaggagaatcggagaagggcgacttgcgcagtgagcagccgtgcttcaaaagtgaccacggacgcaggttcacgatgggagaaaggatcggcgcaattaagcaagagtccgaagaaccccccacaaaaaagaaccggatgcagctttcggatgatgaaggccatttcactagcagtgacctgatcagctccccgttcctgggcccacacccacaccagcctcctttctgcctgcccttctacctgatcccaccttcagcgactgcctacctgcccatgctggagaagtgctggtatcccacctcagtgccagtgctatacccaggcctcaacgcctctgccgcagccctctctagcttcatgaacccagacaagatctcggctcccttgctcatgccccagagactcccttctcccttgccagctcatccgtccgtcgactcttctgtcttgctccaagctctgaagccaatcccccctttaaacttagaaaccaaagactaaactctctaggggatcctgctgctttgctttccttcctcgctacttcctaaaaagcaacaaaaaagtttttgtgaatgctgcaagattgttgcattgtgtatactgagataatctgaggcatggagagcagattcagggtgtgtgtgtgtgtgtgtgtgtgtgtgtgtatgtgcgtgtgcgtgcacatgtgtgcctgcgtgttggtataggactttaaagctccttttggcatagggaagtcacgaaggattgcttgacatcaggagacttgggggggattgtagcagacgtctgggcttttccccacccagagaatagcccccttcgatacacatcagctggattttcaaaagcttcaaagtcttggtctgtgagtcactcttcagtttgggagctgggtctgtggctttgatcagaaggtactttcaaaagagggctttccagggctcagctcccaaccagctgttaggaccccacccttttgcctttattgtcgacgtgactcaccagacgtcggggagagagagcagtcagaccgagctttctgctaacatggggaggtagcaggcactggcatagcacggtagtggtttggggaggtttccgcaggtctgctccccacccctgcctcggaagaataaagagaatgtagttccctactcaggctttcgtagtgattagcttactaaggaactgaaaatgggccccttgtacaagctgagctgccccggagggagggaggagttccctgggcttctggcacctgtttctaggcctaaccattagtacttactgtgcagggaaccaaaccaaggtctgagaaatgcggacaccccgagcgagcaccccaaagtgcacaaagctgagtaaaaagctgcccccttcaaacagaactagactcagttttcaattccatcctaaaactccttttaaccaagcttagcttctcaaaggcctaaccaagccttggcaccgccagatcctttctgtaggctaattcctcttgcccaacggcatatggagtgtccttattgctaaaaaggattccgtctccttcaaagaagttttatttttggtccagagtacttgttttcccgatgtgtccagccagctccgcagcagcttttcaagatgcactatgcctgattgctgatcgtgttttaactttttcttttcctgtttttattttggtattaagtcgttgcctttatttgtaaagctgttataaatatatattatataaatatattaaaaaggaaaatgtttcagatgtttatttgtataattacttgattcacacagtgagaaaaaatgaatgtattcctgtttttgaagagaagaataatttttttttctctagggagaggtacagtgtttatattttggagccttcctgaaggtgtaaaattgtaaatatttttatctatgagtaaatgttaagtagttgttttaaaatacttaataaaataattcttttcctgtggaag

SEQ ID NO: 225 - protein, 412 aa, Homo sapien
MERIPSAQPPPACLPKAPGLEHGDLPGMYPAHMYQVYKSRRGIKRSEDSKETYKLPHRLIEKKRRDRINECIAQLKDLLPEHLKLTTLGHLEKAVVLELTLKHVKALTNLIDQQQQKIIALQSGLQAGELSGRNVETGQEMFCSGFQTCAREVLQYLAKHENTRDLKSSQLVTHLHRVVSELLQGGTSRKPSDPAPKVMDFKEKPSSPAKGSEGPGKNCVPVIQRTFAHSSGEQSGSDTDTDSGYGGESEKGDLRSEQPCFKSDHGRRFTMGERIGAIKQESEEPPTKKNRMQLSDDEGHFTSSDLISSPFLGPHPHQPPFCLPFYLIPPSATAYLPMLEKCWYPTSVPVLYPGLNASAAALSSFMNPDKISAPLLMPQRLPSPLPAHPSVDSSVLLQALKPIPPLNLETKD

SEQ ID NO: 226 - DNA, 1669 bp, Homo sapien
ggggcgagacctacgacgccggcgagcagtggccgttacgcctaaaaagatggcggtcttggcacctctaattgctctcgtgtattcggtgccgcgactttcacgatggctcgcccaaccttactaccttctgtcggccctgctctctgctgccttcctactcgtgaggaaactgccgccgctctgccacggtctgcccacccaacgcgaagacggtaacccgtgtgactttgactggagagaagtggagatcctgatgtttctcagtgccattgtgatgatgaagaaccgcagatccatcactgtggagcaacatataggcaacattttcatgtttagtaaagtggccaacacaattcttttcttccgcttggatattcgcatgggcctactttacatcacactctgcatagtgttcctgatgacgtgcaaaccccccctatatatgggccctgagtatatcaagtacttcaatgataaaaccattgatgaggaactagaacgggacaagagggtcacttggattgtggagttctttgccaattggtctaatgactgccaatcatttgcccctatctatgctgacctctcccttaaatacaactgtacagggctaaattttgggaaggtggatgttggacgctatactgatgttagtacgcggtacaaagtgagcacatcacccctcaccaagcaactccctaccctgatcctgttccaaggtggcaaggaggcaatgcggcggccacagattgacaagaaaggacgggctgtctcatggaccttctctgaggagaatgtgatccgagaatttaacttaaatgagctataccagcgggccaagaaactatcaaaggctggagacaatatccctgaggagcagcctgtggcttcaacccccaccacagtgtcagatggggaaaacaagaaggataaataagatcctcactttggcagtgcttcctctcctgtcaattccaggctctttccataaccacaagcctgaggtgcagcttttatttatgttttccctttggctgtgactgggtggggcagcatgcagcttctgattttaaagaggcatctagggaattgtcaggcaccctacaggaaggcctgccatgcttgtggccaactgtttcactggagcaaagaaagagatctcataggacggagggggaaaatggttttccctccaagcttgggtcagtgtgttaactgcttatcagctattcagacatctccatggtttctccatgaaactctgtggtttcatcattccttcttagttgacctgcacagcttggttagacctagatttaaccctaaggtaagatgctggggtatagaacgctaagaattttcccccaaggactcttgcttcctcaagcccttctggcttcgtttatggtcttcattaaaagtataagcctaactttgtcgctagtcctaaggagaaacctttaaccacaaagtttttatcattgaagacaatattgaacaaccccctattttgtggggattgagaaggggtgaatagaggcttgagactttcctttgtgtggtaggacttggaggagaaatcccctggactttcactaaccctctgacatactccccacacccagttgatggctttccgtaataaaaagattgggatttccttttg

SEQ ID NO: 227 - protein, 296 aa, Homo sapien
MAVLAPLIALVYSVPRLSRWLAQPYYLLSALLSAAFLLVRKLPPLCHGLPTQREDGNPCDFDWREVEILMFLSAIVMMKNRRSITVEQHIGNIFMFSKVANTILFFRLDIRMGLLYITLCIVFLMTCKPPLYMGPEYIKYFNDKTIDEELERDKRVTWIVEFFANWSNDCQSFAPIYADLSLKYNCTGLNFGKVDVGRYTDVSTRYKVSTSPLTKQLPTLILFQGGKEAMRRPQIDKKGRAVSWTFSEENVIREFNLNELYQRAKKLSKAGDNIPEEQPVASTPTTVSDGENKKDK

SEQ ID NO: 228 - DNA, 1493 bp, Homo sapien
tgagcgggggatgatggcgccgcggagggtcaggtcgtttctgcgcgggctcccggcgctgctactgctgctgctcttcctcgggccctggcccgctgcgagccacggcggcaagtactcgcgggagaagaaccagcccaagccgtccccgaaacgcgagtccggagaggagttccgcatggagaagttgaaccagctgtgggagaaggcccagcgactgcatcttcctcccgtgaggctggccgagctccacgctgatctgaagatacaggagagggacgaactcgcctggaagaaactaaagcttgacggcttggacgaagatggggagaaggaagcgagactcatacgcaacctcaatgtcatcttggccaagtatggtctggacggaaagaaggacgctcggcaggtgaccagcaactccctcagtggcacccaggaagacgggctggatgaccccaggctggaaaagctgtggcacaaggcgaagacctctgggaaattctccggcgaagaactggacaagctctggcgggagttcctgcatcacaaagagaaagttcacgagtacaacgtcctgctggagaccctgagcaggaccgaagaaatccacgagaacgtcattagcccctcggacctgagcgacatcaagggcagcgtcctgcacagcaggcacacggagctgaaggagaagctgcgcagcatcaaccagggcctggaccgcctgcgcagggtcagccaccagggctacagcactgaggctgagttcgaggagcccagggtgattgacctgtgggacctggcgcagtccgccaacctcacggacaaggagctggaggcgttccgggaggagctcaagcacttcgaagccaaaatcgagaagcacaaccactaccagaagcagctggagattgcgcacgagaagctgaggcacgcagagagcgtgggcgacggcgagcgtgtgagccgcagccgcgagaagcacgccctgctggaggggcggaccaaggagctgggctacacggtgaagaagcatctgcaggacctgtccggcaggatctccagagctcggcacaacgaactctgaaggcactggggagcccagcccggcagggaagaggccagcgtgaaggacctgggctcttggccgtggcatttccgtggacagcccgccgtcagggtggctggggctggcacgggtgtcgaggcaggaaggattgtttctggtgactgcagccgctgccgtcgcgacacagggcttggtggtggtagcatttgggtctgagatcggcccagctctgactgaaggggcttggcttccactcagcatcagcgtggcagtcaccaccccagtgaggacctcgatgtccagctgctgtcaggtctgatagtcctctgctaaaacaacacgatttacataaaaaatcttacacatctgccaccggaaataccatgcacagagtccttaaaaaatagagtgcagtatttaaacc

SEQ ID NO: 229 - protein, 357 aa, Homo sapien
MAPRRVRSFLRGLPALLLLLLFLGPWPAASHGGKYSREKNQPKPSPKRESGEEFRMEKLNQLWEKAQRLHLPPVRLAELHADLKIQERDELAWKKLKLDGLDEDGEKEARLIRNLNVILAKYGLDGKKDARQVTSNSLSGTQEDGLDDPRLEKLWHKAKTSGKFSGEELDKLWREFLHHKEKVHEYNVLLETLSRTEEIHENVISPSDLSDIKGSVLHSRHTELKEKLRSINQGLDRLRRVSHQGYSTEAEFEEPRVIDLWDLAQSANLTDKELEAFREELKHFEAKIEKHNHYQKQLEIAHEKLRHAESVGDGERVSRSREKHALLEGRTKELGYTVKKHLQDLSGRISRARHNEL

SEQ ID NO: 230 - DNA, 2354 bp, Homo sapien
cgcggccgcgtcggacctgtggtcccgggtttctgcagagtctacttcagaagcggaggcactgggagtccggtttgggattgccaggctgtggttgtgagtctgagcttgtgagcggctgtggcgccccaactcttcgccagcatatcatcccggcaggcgataaactacattcagttgagtctgcaagactgggaggaactggggtgataagaaatctattcactgtcaaggtttattgaagtcaaaatgtccaaaaaaatcagtggcggttctgtggtagagatgcaaggagatgaaatgacacgaatcatttgggaattgattaaagagaaactcatttttccctacgtggaattggatctacatagctatgatttaggcatagagaatcgtgatgccaccaacgaccaagtcaccaaggatgctgcagaagctataaagaagcataatgttggcgtcaaatgtgccactatcactcctgatgagaagagggttgaggagttcaagttgaaacaaatgtggaaatcaccaaatggcaccatacgaaatattctgggtggcacggtcttcagagaagccattatctgcaaaaatatcccccggcttgtgagtggatgggtaaaacctatcatcataggtcgtcatgcttatggggatcaatacagagcaactgattttgttgttcctgggcctggaaaagtagagataacctacacaccaagtgacggaacccaaaaggtgacatacctggtacataactttgaagaaggtggtggtgttgccatggggatgtataatcaagataagtcaattgaagattttgcacacagttccttccagatggctctgtctaagggttggcctttgtatctgagcaccaaaaacactattctgaagatatatgatgggcgttttaaagacatctttcaggagatatatgacaagcagtacaagtcccagtttgaagctcaaaagatctggtatgagcataggctcatcgacgacatggtggcccaagctatgaaatcagagggaggcttcatctgggcctgtaaaaactatgatggtgacgtgcagtcggactctgtggcccaagggtatggctctctcggcatgatgaccagcgtgctggtttgtccagatggcaagacagtagaagcagaggctgcccacgggactgtaacccgtcactaccgcatgtaccagaaaggacaggagacgtccaccaacctcattgcttccatttttgcctggaccagagggttagcccacagagcaaagcttgataacaataaagagcttgccttctttgcaaatgctttggaagaagtctctattgagacaattgaggctggcttcatgaccaaggacttggctgcttgcattagaggtttacccaatgtgcaacgttctgactacttgaatacatttgagttcatggataaacttggagaaaacttgaagatcaaactagctcaggccaaactttaagttcatacctgagctaagaaggataattgtcttttggtaactaggtctacaggtttacatttttctgtgttacactcaaggataaaggcaaaatcaattttgtaatttgtttagaagccagagtttatcttttctataagtttacagcctttttcttatatatacagttattgccacctttgtgaacatggcaagggacttttttacaatttttattttattttctagtaccagcctaggaattcggttagtactcatttgtattcactgtcactttttctcatgttctaattataaatgaccaaaatcaagattgctcaaaagggtaaatgatagccacagtattgctccctaaaatatgcataaagtagaaattcactgccttcccctcctgtccatgaccttgggcacagggaagttctggtgtcatagatatcccgttttgtgaggtagagctgtgcattaaacttgcacatgactggaacgaagtatgagtgcaactcaaatgtgttgaagatactgcagtcatttttgtaaagaccttgctgaatgtttccaatagactaaatactgtttaggccgcaggagagtttggaatccggaataaatactacctggagtcttgtcctctccatttttctctttctcctcctggcctggcctgaatattatactactctaaatagcatatttcatccaagtgcaataatgtaagctgaatcttttttggacttctgctggcctgttttatttcttttatataaatgtgatttctcagaaattgatattaaacactatcttatcttctcctgaactgttgattttaattaaaattaagtgctaattaccaaaaaaaaaaa

SEQ ID NO: 231 - protein, 414 aa, Homo sapien [sequence omitted]

SEQ ID NO: 232 - DNA, 758 bp, Homo sapien
caggtgggaggttagtgtggcccgggcgtccgctcctcagcggatgtggcagccccgagccatggctctcgccgtccgagtcgtttattgtggcgcttgaggctacaagtccaagtatcttcagctcaagaagaagttagaagatgagttccccggccgcctggacatctgcggcgagggaactccccaggccaccgggttctttgaagtgatggtagccgggaagttgattcactctaagaagaaaggcgatggctacgtggacacagaaagcaagtttctgaagttggtggccgccatcaaagccgccttggctcagggctaatgcgccctgaaggcagagtccagggaccttgacccagcccctctcagcagacgcttcatgataggaaggactgaaaagtcttgtggacacctggtctttccctgatgttctcgtggctgctgttgggggcagagattgacgcccccggtctttgcctctgagcgggagagtctgtgtgtatgtgtcttccccggaatccacaccaccccaccctcctcctgtcccgtggtttcatcatatctctttgcataccccatgtcttccccagttgtcccctggagtttggggggacatcccgcctcaggcatccttctcaaggggaagccaagagaggcatcaggatgggtgggtttctgattgtggcaacgtttgcaaccgttcacgattcaataaatattggatgaaattaaccggaaaaaaaaaaaaaaaaaaa

SEQ ID NO: 233 - protein, 87 aa, Homo sapien
  unsure 13: unknown amino acid
MALAVRVVYCGAXGYKSKYLQLKKKLEDEFPGRLDICGEGTPQATGFFEVMVAGKLIHSKKKGDGYVDTESKFLKLVAAIKAALAQG

SEQ ID NO: 234 - DNA, 3984 bp, Homo sapien
gtcctttcacgcgtgtcttcgtgttggtgcgcttttcactggtcataaagtgctgctcacggccgtgaactgctacagcgtgaaggccgccacccgggtccaggatgcttttgccgccgccaagctcctggccctggccctgatcatcctgctgggcttcgtccagatcgggaagggtgatgtgtccaatctagatcccaagttctcatttgaaggcaccaaactggatgtggggaacattgtgctggcattatacagcggcctctttgcctatggaggatggaattacttgaatttcgtcacagaggaaatgatcaacccctacagaaacctgcccctggccatcatcatctccctgcccatcgtgacgctggtgtacgtgctgaccaacctggcctacttcaccaccctgtccaccgagcagatgctgtcgtccgaggccgtggccgtggacttcgggaactatcacctgggcgtcatgtcctggatcatccccgtcttcgtgggcctgtcctgctttggctccgtcaatgggtccctgttcacatcctccaggctcttcttcgtggggtcccgggaaggccacctgccctccatcctctccatgatccacccacagctcctcacccccgtgccgtccctcgtgttcacgtgtgtgatgacgctgctctacgccttctccaaggacatcttctccgtcatcaacttcttcagcttcttcaactggctctgcgtggccctggccatcatcggcatgatctggctgcgccacagaaagcctgagcttgagcggcccatcaaggtgaacctggccctgcctgtgttcttcatcctggcctgcctcttcctgatcgccgtctccttctggaagacacccgtggagtgtggcatcggcttcaccatcatcctcagcgggctgcccgtctacttcttcggggtctggtggaaaaacaagcccaagtggctcctccagggcatcttctccacgaccgtcctgtgtcagaagctcatgcaggtggtcccccaggagacatagccaggaggccgagtggctgccggaggagcatgcgcagaggccagttaaagtagatcacctcctcgaacccactccggttccccgcaacccacagctcagctgcccatcccagtcctcgccgtccctcccaggtcgggcagtggaggctgctgtgaaaactctggtacgaatctcatccctcaactgagggccagggacccaggtgtgcctgtgctcctgcccaggagcagcttttggtctccttgggccctttttcccttccctcctttgtttacttatatatatattttttttaaacttaaattttgggtcaacttgacaccactaagatgattttttaaggagctgggggaaggcaggagccttcctttctcctgccccaagggcccagaccctgggcaaacagagctactgagacttggaacctcattgctaccacagacttgcactgaagccagacagctgcccagacacatgggcttgtgacattcgtgaaaaccaaccctgtgggcttatgtctctgccttagggtttgcagagtggaaactcagccgtagggtggcactgggagggggtgggggatctgggcaaggtgggtgattcctcccaggaggtgcttgaggccccgatggactcctgaccataatcctagccccgagacaccatcctgagccagggaacagccccagggttggggggtgccggcatctcccctagctcaccaggcctggcctctgggcagtgtggcctcttggctatttctgttccagttttggaggctgagttctggttcatgcagacaaagccctgtccttcagtcttctagaaacagagacaagaaaggcagacacaccgcggccaggcacccatgtgggcgcccaccctgggctccacacagcagtgtcccctgccccagaggtcgcagctaccctcagcctccaatgcattggcctctgtaccgcccggcagccccttctggccggtgctgggttcccactcccggcctaggcacctccccgctctccctgtcacgctcatgtcctgtcctggtcctgatgcccgttgtctaggagacagagccaagcactgctcacgtctctgccgcctgcgtttggaggcccctgggctctcacccagtccccacccgcctgcagagagggaactagggcaccccttgtttctgttgttcccgtgaatttttttcgctatgggaggcagccgaggcctggccaatgcggcccactttcctgagctgtcgctgcctccatggcagcagccaaggacccccagaacaagaagacccccccgcaggatccctcctgagctcggggggctctgccttctcaggccccgggcttcccttctccccagccagaggtggagccaagtggtccagcgtcactccagtgctcagctgtggctggaggagctggcctgtggcacagccctgagtgtcccaagccgggagccaacgaagccggacacggcttcactgaccagcggctgctcaagccgcaagctctcagcaagtgcccagtggagcctgccgcccccacctgggcaccgggaccccctcaccatccagtgggcccggagaaacctgatgaacagtttggggactcaggaccagatgtccgtctctcttgcttgaggaatgaagacctttattcacccctgccccgttgcttcccgctgcacatggacagacttcacagcgtctgctcataggacctgcatccttcctggggacgaattccactcgtccaagggacagcccacggtctggaggccgaggaccaccagcaggcaggtggactgactgtgttgggcaagacctcttccctctgggcctgttctcttggctgcaaataaggacagcagctggtgccccacctgcctggtgcattgctgtgtgaatccaggaggcagtggacatcgtaggcagccacggccccaggtccaggagaagtgctccctggaggcacggaccactgcttcccactggggccggcggggcccacgcacgacgtcagcctcttaccttcccgcctcggctaggggtcctcgggatgccgttctgttccaacctcctgttctgggaggtggacatgcctcaaggatacagggagccggcggcctctcgacggcacgcacttcctgttggctgctgcggctgtgggcgagcatgggggctgccagcgtctgttgtggaaagtagctgctagtgaaatggctggggccgctggggtccgtcttcacactgcgcaggtctcttctgggcgtctgagctggggtgggagctcctccgcagaaggttggtggggggtccagtctgtgatccttggtgctgtgtgccccactccagcctggggaccccacttcagaaggtaggggccgtgtcccgcggtgctgactgaggcctgcttccccctccccctcctgctgtgctggaattccacagggaccagggccaccgcaggggactgtctcagaagacttgatttttccgtccctttttctccacactccactgacaaacgtccccagcggtttccacttgtgggcttcaggtgttttcaagcacaacccaccacaacaagcaagtgcattttcagtcgttgtgcttttttgttttgtgctaacgtcttactaatttaaagatgctgtcggcaccatgtttatttatttccagtggtcatgctcagccttgctgctctgcgtggcgcaggtgccatgcctgctccctgtctgtgtcccagccacgcagggccatccactgtgacgtcggccgaccaggctggacaccctctgccgagtaatgacgtgtgtggctgggaccttctttattctgtgttaatggctaacctgttacactgggctgggttgggtagggtgttctggcttttttgtggggtttttatttttaaagaaacactcaatcatcctag

SEQ ID NO: 235 - protein, 241 aa, Homo sapien
MINPYRNLPLAIIISLPIVTLVYVLTNLAYFTTLSTEQMLSSEAVAVDFGNYHLGVMSWIIPVFVGLSCFGSVNGSLFTSSRLFFVGSREGHLPSILSMIHPQLLTPVPSLVFTCVMTLLYAFSKDIFSVINFFSFFNWLCVALAIIGMIWLRHRKPELERPIKVNLALPVFFILACLFLIAVSFWKTPVECGIGFTIILSGLPVYFFGVWWKNKPKWLLQGIFSTTVLCQKLMQVVPQET

SEQ ID NO: 236 - DNA, 1989 bp, Homo sapien
gcggccgccgggactcttcctggagacaccgccatggccgggctatcccgcgggtccgcgcgcgcactgctcgccgccctgctggcgtcgacgctgttggcgctgctcgtgtcgcccgcgcggggtcgcggcggccgggaccacggggactgggacgaggcctcccggctgccgccgctaccaccccgcgaggacgcggcgcgcgtggcccgcttcgtgacgcacgtctccgactggggcgctctggccaccatctccacgctggaggcggtgcgcggccggcccttcgccgacgtcctctcgctcagcgacgggcccccgggcgcgggcagcggcgtgccctatttctacctgagcccgctgcagctctccgtgagcaacctgcaggagaatccatatgctacactgaccatgactttggcacagaccaacttctgcaagaaacatggatttgatccacaaagtcccctttgtgttcacataatgctgtcaggaactgtgaccaaggtgaatgaaacagaaatggatattgcaaagcattcgttattcattcgacaccctgagatgaaaacctggccttccagccataattggttctttgctaagttgaatataaccaatatctgggtcctggactactttggtggaccaaaaatcgtgacaccagaagaatattataatgtcacagttcagtgaagcagactgtggtgaatttagcaacacttatgaagtttcttaaagtggctcatacacacttaaaaggcttaatgtttctctggaaagcgtcccagaatattagccagttttctgtcacatgctggtttgtttgcttgcttgtttacttgcttgtttaccaatagagttgacctgttattggatttcctggaagatgtggtagctacttttttcctattttgaagccattttcgtagagaaatatccttcactataatcaaataagttttgtcccatcaattccaaagatgtttccagtggtgctcttgaagaggaatgagtaccagttttaaattgcccattggcatttgaaggtagttgagtatgtgttctttattcctagaagccactgtgcttggtagagtgcatcactcaccacagctgcctcctgagctgcctgagcctggtgcaaaaggattggcccccattatggtgcttctgaataaatcttgccaagatagacaaacaatgatgaaactcagatggagcttcctactcatgttgatttatgtctcacaatcctgggtattgttaattcaacatagggtgaaactatttctgataaagaacttttgaaaaactttttatactctaaagtgatactcagaacaaaagaaagtcataaaactcctgaatttaatttccccacctaagtcgagacagtattatcaaaacacatgtgcacacagattattttttggctccaaaactggattgcaaaagaaagaggagaagaatattttgtgtgttcctggtattcttttataagtaaagtttacccaggcatggaccagcttcagccagggacaaaatcccctcccaaaccactctccacagctttttaaaaatacttctactcttaacaattacctaaggcttcctcaactgccccaaatctcttaatagcttctagtgctgctacaatctaagtcaggtcaccagagggaagagaacatggcattaaaagaatcacatcttcagaagagaagacactaatattattacccatatacatgatttcagaagatgacataagattcctcttaaagaggaaatgtcaggaatcaagccactgaatccttaaagagaaaagttgaatatgagtcattgtgtctgaaaactgcaaagtgaacttaactgagatccagcaaacaggttctgtttaagaaaaataatttatactaaatttagtaaaatggacttcttattcaaagcatcaataattaaaagaattattttaaaaaaaaaaaaaaa

SEQ ID NO: 237 - protein, 220 aa, Homo sapien
MAGLSRGSARALLAALLASTLLALLVSPARGRGGRDHGDWDEASRLPPLPPREDAARVARFVTHVSDWGALATISTLEAVRGRPFADVLSLSDGPPGAGSGVPYFYLSPLQLSVSNLQENPYATLTMTLAQTNFCKKHGFDPQSPLCVHIMLSGTVTKVNETEMDIAKHSLFIRHPEMKTWPSSHNWFFAKLNITNIWVLDYFGGPKIVTPEEYYNVTVQ

SEQ ID NO: 238 - DNA, 674 bp, Homo sapien
ccccttggttccgcccgcgcgtcacgtgaccccagcgcctacttgggctgaggagccgccgcgtcccctcgccgagtcccctcgccagattccctccgtcgccgccaagatgatgtgcggggcgccctccgccacgcagccggccaccgccgagacccagcacatcgccgaccaggtgaggtcccagcttgaagagaaagaaaacaagaagttccctgtgtttaaggccgtgtcattcaagagccaggtggtcgcggggacaaactacttcatcaaggtgcacgtcggcgacgaggacttcgtacacctgcgagtgttccaatctctccctcatgaaaacaagcccttgaccttatctaactaccagaccaacaaagccaagcatgatgagctgacctatttctgatcctgactttggacaaggcccttcagccagaagactgacaaagtcatcctccgtctaccagagcgtgcacttgtgatcctaaaataagcttcatctccgggctgtgccccttggggtggaaggggcaggattctgcagctgcttttgcatttctcttcctaaatttcattgtgttgatttctttccttcccaataggtgatcttaattactttcagaatattttcaaaatagatatatttttaaaatccttaaaaaaaaaaaaaaaaa

SEQ ID NO: 239 - protein, 98 aa, Homo sapien
MMCGAPSATQPATAETQHIADQVRSQLEEKENKKFPVFKAVSFKSQVVAGTNYFIKVHVGDEDFVHLRVFQSLPHENKPLTLSNYQTNKAKHDELTYF

SEQ ID NO: 240 - DNA, 1231 bp, Homo sapien
aggtctcagccggtcgtcgcgacgttcgcccgctcgctctgaggctcctgaagccgaaactagctagactttcctccttcccgcctgcctgtagcggcgttgttgccactccgccaccatgttcgaggcgcgcctggtccagggctccatcctcaagaaggtgttggaggcactcaaggacctcatcaacgaggcctgctgggatattagctccagcggtgtaaacctgcagagcatggactcgtcccacgtctctttggtgcagctcaccctgcggtctgagggcttcgacacctaccgctgcgaccgcaacctggccatgggcgtgaacctcaccagtatgtccaaaatactaaaatgcgccggcaatgaagatatcattacactaagggccgaagataacgcggataccttggcgctagtatttgaagcaccaaaccaggagaaagtttcagactatgaaatgaagttgatggatttagatgttgaacaacttggaattccagaacaggagtacagctgtgtagtaaagatgccttctggtgaatttgcacgtatatgccgagatctcagccatattggagatgctgttgtaatttcctgtgcaaaagacggagtgaaattttctgcaagtggagaacttggaaatggaaacattaaattgtcacagacaagtaatgtcgataaagaggaggaagctgttaccatagagatgaatgaaccagttcaactaacttttgcactgaggtacctgaacttctttacaaaagccactccactctcttcaacggtgacactcagtatgtctgcagatgtaccccttgttgtagagtataaaattgcggatatgggacacttaaaatactacttggctcccaagatcgaggatgaagaaggatcttaggcattcttaaaattcaagaaaataaaactaagctctttgagaactgcttctaagatgccagcatatactgaagtcttttctgtcaccaaatttgtacctctaagtacatatgtagatattgttttctgtaaataacctattttttttctctattctctccaatttgtttaaagaataaagtccaaagtctgatctggtctagttaacctagaagtatttttgtctcttagaaatacttgtgatttttataatacaaaagggtcttgactctaaatgcagttttaagaagtgtttttgaatttaaataaagttacttgaatttcaaac

SEQ ID NO: 241 - protein, 261 aa, Homo sapien
MFEARLVQGSILKKVLEALKDLINEACWDISSSGVNLQSMDSSHVSLVQLTLRSEGFDTYRCDRNLAMGVNLTSMSKILKCAGNEDIITLRAEDNADTLALVFEAPNQEKVSDYEMKLMDLDVEQLGIPEQEYSCVVKMPSGEFARICRDLSHIGDAVVISCAKDGVKFSASGELGNGNIKLSQTSNVDKEEEAVTIEMNEPVQLTFALRYLNFFTKATPLSSTVTLSMSADVPLVVEYKIADMGHLKYYLAPKIEDEEGS

SEQ ID NO: 242 - DNA, 1048 bp, Homo sapien
catgcagtatggaaacaaaacaatctccaccatgaaagtgatgcagtttcagggtatgaaacgcaaagccagttctcccgtccccctacctccagtcacacaccttgacctcacccccagccctgatgtgcctctcaccatcatgaaaaggaaactgatgaacaccaatgatctggaggagtccaggcagctcacggaggagatccagcggcatctggatgccaggcacctcattgagaagtcagtgcgtaagatcgtctccttgctggcagcgtccgaggctgaggtggagcagctcctgtccgagagagccccgctcacggggcacagctgctacccagaggccctgctgcacttccggacccactgcttcaactggcactcccccacgtacgagtatgcgttgagacatttgtacgtgctggtcaacctttgtgagaagccgtatccgcttcacaggataaaattgtccatggaccacgtgtgccttggtcactactgaagagctgcctcctggaagcttttccaagtgtgagcgccccaccgactgtgtgctgatcagagactggagaggtggagtgagaagtctccgctgctcgggccctcctggggagcccccgctccagggctcgctccaggaccttcttcacaagatgacttgctcgctgttacctgcttccccagtcttttctgaaaaactacaaattagggtgggaaaagctctgtattgagaagggtcatatttgctttctaggaggtttgttgttttgcctgttagttttgaggagcaggaagctcatgggggcttctgtagcccctctcaaaaggagtctttattctgagaatttgaagctgaaacctctttaaatcttcagaatgattttattgaagagggccgcaagccccaaatggaaaactgtttttagaaaatatgatgatttttgattgcttttgtatttaattctgcaggtgttcaagtcttaaaaaataaagatttataacagaccccaaaaaaaaaaaaaaaaaaaaaaaaaaaaaaaaaaaaaaa

SEQ ID NO: 243 - DNA, 3780 bp, Homo sapien
cgattaatcctccagttggttgtccctgccgtctcggaagggttagcacacagccaggtctgtttttgatgtatgtaattgaagatttataaagaaaagcttctcctctgcctcatccacagtcattttttttccaatgccagttcccagcaggcatataaatattggtcgttctcagagctgggatgctgctgggtggtacgagggcccctgggagaacgccgagtccctgcggcctctggggaggagaagctccctgacgtatggcacagcagaggggacttggtttgagccaaaccaccgaccacaggacgctgccctgcccgtggccgccgagccctacctgtaccgggaggccgtttataactcagtggctgcaagaaaggggtctactcctgacttcaccttctacgacagcagacaggcagtgatgtctggtcgcagccccctgctgccacgggagtactacagtgatccgtctggagctgctagggtacccaaagagcctcccctctatcgggacccaggagtcagccggccggtccccagctacggagtgcttggcagcagaacgtcatgggatccaatgcaaggccggtcacctgccctgcaggacgccggtcacctgtaccgggatcctggaggtaaaatgatccctcaggggcggcagacacagagcagggctgcatctcccgggcggtatggacgggagcagcccgacaccaggtatggggcggaggtgcctgcctaccccctcagccaggtcttcagcgacatcagcgaaagacccattgaccctgcccctgccagacaggtggccccgacgtgcctggttgtggaccccagttcagctgctgcccccgaaggcagcacaggggtggccccaggggccctgaatcgtggctacgggcctgcccgggaaagcatcccatccaagatggcttacgagacttacgaagctgacctgtccaccttccagggtcctggtggcaagaggaccgtgctccctgagttcctggcctttctgcgggcggaggggctggcagaggccacgctgggagccctactgcagcagggctttgactccccggccgtcctggctaccctggaggacgcggatatcaagtctgtcgcacccaacctgggccaggcccgtgttctgagccgcctggccaatagctgcaggaccgaaatgcagctgcggaggcaggaccgggggggcccgctgccccgggcgcggtccagcagcttcagccaccgaagcgaactgctccatggtgacttggcttctctgggcgctgcggctcctctgcagacagcatccccccgagctggagacccggctcgccgtccctccagcgcaccatctcagcacctcctggagacggcagccacctattctgcccctggcgtgggcacccatgccccacacttcccctccaactccgggtacagctctcccaccccttgcgccctgacagcgcgtctgagccccacgcaccccctgcaggcaggggtggccttgactaacccgggcccctcaaacccccttcacccaggccccagaacagcttactccacggcatacacggtgcccatggagctgctaaagagggagcgcaacgtggccgcctctccgctgcccagccctcacggcagcccccaggtcttgcggaagccaggtgcacccctggggccatccaccctgccgccggccagccagagcctccacacgcctcactcaccgtacgagaaggtggcccggcgcacaggggcacccatcatcgtgtccaccatgcttgcaccagaaccaagtatccgcccccagatcatgaacggccccctgcacccccgccccctggtggcgctgctggacggccgcgactgcactgtggagatgcccatcctgaaggacctggccactgtggccttctgtgacgcgcagtcgacgcaggaaatccacgagaaggttctaaacgaagccgtgggcgccatgatgtaccacaccatcaccttcaacagggaggacctggagaagttcaaggccctgagagtgatcgtgcggataggcagtggctatgacaacgtgaacatcaaggctgccggcgagctcggaattgccgtgtgcaacatcccgtctgcagccgtggaagagacagcggactctaccatctgccacatcctcaacctgtaccggaggaacacgtggctgtaccaggcactgcgggaaggcacgcgggttcagagcgtggagcagatccgcgaggtggcctcgggagcggcccgcatccgtggggagacgctgggcctcattggctttggtcgcacggggcaggcggttgcagttcgagccaaggcctttggattcagcgtcatattttatgacccctacttgcaggatgggatcgagcggtccctgggcgtgcagagggtctacaccctgcaggatttgctgtatcagagcgactgcgtctccttgcactgcaatctcaacgaacataaccaccacctcatcaatgactttaccataaagcagatgaggcagggagcattccttgtgaacgcagcccgtggcggcctggtggacgagaaagccttagcacaagccctcaaggagggcaggatacgaggggcagccctcgacgtgcatgagtcagagcccttcagctttgctcagggtccgttgaaagatgccccgaatctcatctgcactcctcacactgcctggtacagtgagcaggcgtcactggagatgagggaggcagctgccaccgagatccgccgagccatcacaggtcgcatcccagaaagcttaagaaattgtgtgaacaaggaattctttgtcacatcagcgccttggtcagtaatagaccagcaagcaattcatcctgagctcaatggtgccacatacagatatccgccaggcatcgtgggtgtggctccaggaggacttcctgcagccatggaagggatcatccctggaggcatcccagtgactcacaacctcccgacagtggcacatccttcccaagcgccctctcccaaccagcccacaaaacacggggacaatcgagagcaccccaacgagcaatagcagagaatgccagaaggtaatcactcagatacacttgggaccaagagacagtgaaaaatagatgaactaagagaaaaagaatcggatggtctttgtaactgattctggacatatgcatcattgatgttgcagtgttgaaactacaagagctagaaaactgaagatgtcgtctgcttacggaagcgctgaaagactaggatgtgatttattaacgaccaacttctgttattgtgtgttaagtttttcatctgtgcatcaaatcacaaaaagaataaatagagctttttcctttatcagtcccttgggcacagcaggtcctgaacaccctgctctacaatgttgcatcaagagttcaaacaacaaaataaaaaatattaagaggaaatccccatcctgtgacttgagtcccttaagtctacaggggctgggtgacctctttttgctaataggaaaatcacattactacaaaatggggaaaaaactgtttgcctgtggtagacacctgcacgcataggattgaagacagtacaggctgctgtacagagaagcgcctctcacatctgaactgcatactgagcgggcaagtcggttgtaagttcagtaaaaccctctgatgatgcaaaaaaaaaaaaaaagtattaagtttcacaagctgtttgtactcaaatatattttctcagtttcag

SEQ ID NO: 244 - protein, 985 aa, Homo sapien
MPVPSRHINIGRSQSWDAAGWYEGPWENAESLRPLGRRSSLTYGTAEGTWFEPNHRPQDAALPVAAEPYLYREAVYNSVAARKGSTPDFTFYDSRQAVMSGRSPLLPREYYSDPSGAARVPKEPPLYRDPGVSRPVPSYGVLGSRTSWDPMQGRSPALQDAGHLYRDPGGKMIPQGRQTQSRAASPGRYGREQPDTRYGAEVPAYPLSQVFSDISERPIDPAPARQVAPTCLVVDPSSAAAPEGSTGVAPGALNRGYGPARESIPSKMAYETYEADLSTFQGPGGKRTVLPEFLAFLRAEGLAEATLGALLQQGFDSPAVLATLEDADIKSVAPNLGQARVLSRLANSCRTEMQLRRQDRGGPLPRARSSSFSHRSELLHGDLASLGAAAPLQTASPRAGDPARRPSSAPSQHLLETAATYSAPGVGTHAPHFPSNSGYSSPTPCALTARLSPTHPLQAGVALTNPGPSNPLHPGPRTAYSTAYTVPMELLKRERNVAASPLPSPHGSPQVLRKPGAPLGPSTLPPASQSLHTPHSPYEKVARRTGAPIIVSTMLAPEPSIRPQIMNGPLHPRPLVALLDGRDCTVEMPILKDLATVAFCDAQSTQEIHEKVLNEAVGAMMYHTITFNREDLEKFKALRVIVRIGSGYDNVNIKAAGELGIAVCNIPSAAVEETADSTICHILNLYRRNTWLYQALREGTRVQSVEQIREVASGAARIRGETLGLIGFGRTGQAVAVRAKAFGFSVIFYDPYLQDGIERSLGVQRVYTLQDLLYQSDCVSLHCNLNEHNHHLINDFTIKQMRQGAFLVNAARGGLVDEKALAQALKEGRIRGAALDVHESEPFSFAQGPLKDAPNLICTPHTAWYSEQASLEMREAAATEIRRAITGRIPESLRNCVNKEFFVTSAPWSVIDQQAIHPELNGATYRYPPGIVGVAPGGLPAAMEGIIPGGIPVTHNLPTVAHPSQAPSPNQPTKHGDNREHPNEQ

SEQ ID NO: 245 - DNA, 689 bp, Homo sapien
cggcatgtggaagaaggtgaagatggcggtggccagggccggggtcttgggagtccagtggctgcaaagggcatcccggaacgtgatgccgctgggcgcacggacagcctcccacatgaccaaggacatgttcccggggccctatcctaggaccccagaagaacgggccgccgccgccaagaagtataatatgcgtgtggaagactacgaaccttacccggatgatggcatggggtatggcgactacccgaagctccctgaccgctcacagcatgagagagatccatggtatagctgggaccagccgggcctgaggttgaactggggtgaaccgatgcactggcacctagacatgtacaacaggaaccgtgtggatacatcccccacacctgtttcttggcatgtcatgtgtatgcagctcttcggtttcctggctttcatgatattcatgtgctgggtgggggacgtgtaccctgtctaccagcctgtgggaccaaagcagtatccttacaataatctgtacctggaacgaggcggtgatccctccaaagaaccagagcgggtggttcactatgagatctgaggaggcttcgtgggcttttgggtcctctaactaggactccctcattcctagaaatttaaccttaatgaaatccctaataaaactcagtgctgtgttaaaaaaaaaa

SEQ ID NO: 246 - protein, 186 aa, Homo sapien
MAVARAGVLGVQWLQRASRNVMPLGARTASHMTKDMFPGPYPRTPEERAAAAKKYNMRVEDYEPYPDDGMGYGDYPKLPDRSQHERDPWYSWDQPGLRLNWGEPMHWHLDMYNRNRVDTSPTPVSWHVMCMQLFGFLAFMIFMCWVGDVYPVYQPVGPKQYPYNNLYLERGGDPSKEPERVVHYEI

SEQ ID NO: 247 - DNA, 2208 bp, Homo sapien
gaattcatgctaaattgctggaaggctgcgtctctgctgtggtgtcagttccggatgcctcatcgccaggggcgcgccgcagccacccaccctccggaccgcggcagctgctgacccgccatcgccatggcccgcgggaaagccaaggaggagggcagctggaagaaattcatctggaactcagagaagaaggagtttctgggcaggaccggtggcagttggtttaagatccttctattctacgtaatattttatggctgcctggctggcatcttcatcggaaccatccaagtgatgctgctcaccatcagtgaatttaagcccacatatcaggaccgagtggccccgccaggattaacacagattcctcagatccagaagactgaaatttcctttcgtcctaatgatcccaagagctatgaggcatatgtactgaacatagttaggttcctggaaaagtacaaagattcagcccagagggatgacatgatttttgaagattgtggcgatgtgcccagtgaaccgaaagaacgaggagactttaatcatgaacgaggagagcgaaaggtctgcagattcaagcttgaatggctgggaaattgctctggattaaatgatgaaacttatggctacaaagagggcaaaccgtgcattattataaagctcaaccgagttctaggcttcaaacctaagcctcccaagaatgagtccttggagacttacccagtgatgaagtataacccaaatgtccttcccgttcagtgcactggcaagcgagatgaagataaggataaagttggaaatgtggagtattttggactgggcaactcccctggttttcctctgcagtattatccgtactatggcaaactcctgcagcccaaatacctgcagcccctgctggccgtacagttcaccaatcttaccatggacactgaaattcgcatagagtgtaaggcgtacggtgagaacattgggtacagtgagaaagaccgttttcagggacgttttgatgtaaaaattgaagttaagagctgatcacaagcacaaatctttcccactagccatttaataagttaaaaaaagatacaaaaacaaaaacctactagtcttgaacaaactgtcatacgtatgggacctacacttaatctatatgctttacactagctttctgcatttaataggttagaatgtaaattaaagtgtagcaatagcaacaaaatatttattctactgtaaatgacaaaagaaaaagaaaaattgagccttgggacgtgcccatttttactgtaaattatgattccgtaactgaccttgtagtaagcagtgtttctggcccctaagtattgctgccttgtgtattttatttagtgtacagtactacaggtgcatactctggtcatttttcaagccatgttttattgtatctgttttctactttatgtgagcaaggtttgctgtccaaggtgtaaatattcaacgggaataaaactggcatggtaattttttttttttgtttgttttttgttttttggctctttcaaaggtaatggcccatcgatgagcatttttaacatactccatagtcttttcctgtggtgttaggtctttatttttatttttttcctgggggctggggtgggggtttgtcatgggggaactgccctttaaattttaagtgacactacagaaaaacacaaaaaggtgatgggttgtgttatgcttgtattgaatgctgtcttgacatctcttgccttgtcctccggtatgttctaaagctgtgtctgagatctggatctgcccatcactttggcctagggacagggctaattaatttgctttatacattttcttttactttccttttttcctttctggaggcatcacatgctggtgctgtgtctttatgaatgttttaaccattttcatggtggaagaattttatatttatgcagttgtacaattttatttttttctgcaagaaaaagtgtaatgtatgaaataaaccaaagtcacttgtttgaaaataaatctttattttgaactttataaaagcaatgcagtaccccatagactggtgttaaatgttgtctacagtgcaaaatccatgttctaacatatgtaataattgccaggagtacagtgctcttgttgatcttgtattcagtcaggttaaaacaacggacaataaaagaatgaaccgaattc

SEQ ID NO: 248 - protein, 303 aa, Homo sapien
MARGKAKEEGSWKKFIWNSEKKEFLGRTGGSWFKILLFYVIFYGCLAGIFIGTIQVMLLTISEFKPTYQDRVAPPGLTQIPQIQKTEISFRPNDPKSYEAYVLNIVRFLEKYKDSAQRDDMIFEDCGDVPSEPKERGDFNHERGERKVCRFKLEWLGNCSGLNDETYGYKEGKPCIIIKLNRVLGFKPKPPKNESLETYPVMKYNPNVLPVQCTGKRDEDKDKVGNVEYFGLGNSPGFPLQYYPYYGKLLQPKYLQPLLAVQFTNLTMDTEIRIECKAYGENIGYSEKDRFQGRFDVKIEVKS

SEQ ID NO: 249 - DNA, 1475 bp, Homo sapien
gctttgttgcctgagtaaccgtatgatggtggtggtggtggtgtcttcctgtctcaacgatacctattttctagtgctgagatcctgagacaatgaatcatagtgaaagattcgttttcattgcagagtggtatgatccaaatgcttcacttcttcgacgttatgagcttttattttacccaggggatggatctgttgaaatgcatgatgtaaagaatcatcgcacctttttaaagcggaccaaatatgataacctgcacttggaagatttatttataggcaacaaagtgaatgtcttttctcgacaactggtattaattgactatggggatcaatatacagctcgccagctgggcagtaggaaagaaaaaacgctagccctaattaaaccagatgcaatatcaaaggctggagaaataattgaaataataaacaaagctggatttactataaccaaactcaaaatgatgatgctttcaaggaaagaagcattggattttcatgtagatcaccagtcaagaccctttttcaatgagctgatccagtttattacaactggtcctattattgccatggagattttaagagatgatgctatatgtgaatggaaaagactgctgggacctgcaaactctggagtggcacgcacagatgcttctgaaagcattagagccctctttggaacagatggcataagaaatgcagcgcatggccctgattcttttgcttctgcggccagagaaatggagttgttttttccttcaagtggaggttgtgggccggcaaacactgctaaatttactaattgtacctgttgcattgttaaaccccatgctgtcagtgaaggactgttgggaaagatcctgatggctatccgagatgcaggttttgaaatctcagctatgcagatgttcaatatggatcgggttaatgttgaggaattctatgaagtttataaaggagtagtgaccgaatatcatgacatggtgacagaaatgtattctggcccttgtgtagcaatggagattcaacagaataatgctacaaagacatttcgagaattttgtggacctgctgatcctgaaattgcccggcatttacgccctggaactctcagagcaatctttggtaaaactaagatccagaatgctgttcactgtactgatctgccagaggatggcctattagaggttcaatacttcttcaagatcttggataattagtggtgtggaaagtaaagaagtcacaggttgggacatttagacaagagtgaatcacacacgaggaatgtgttcattcttttattgtccgttgttttaacctgactgaatacaagatcaacaagagcactgtactcctggcaattattacatatgttagaacatggattttgcactgtagacaacatttaacaccagtctatggggtactgcattgctttttataaagttcaaaataaagatttattttcaaac

SEQ ID NO: 250 - protein, 376 aa, Homo sapien
MNHSERFVFIAEWYDPNASLLRRYELLFYPGDGSVEMHDVKNHRTFLKRTKYDNLHLEDLFIGNKVNVFSRQLVLIDYGDQYTARQLGSRKEKTLALIKPDAISKAGEIIEIINKAGFTITKLKMMMLSRKEALDFHVDHQSRPFFNELIQFITTGPIIAMEILRDDAICEWKRLLGPANSGVARTDASESIRALFGTDGIRNAAHGPDSFASAAREMELFFPSSGGCGPANTAKFTNCTCCIVKPHAVSEGLLGKILMAIRDAGFEISAMQMFNMDRVNVEEFYEVYKGVVTEYHDMVTEMYSGPCVAMEIQQNNATKTFREFCGPADPEIARHLRPGTLRAIFGKTKIQNAVHCTDLPEDGLLEVQYFFKILDN

SEQ ID NO: 251 - DNA, 2644 bp, Homo sapien
ccgaggccaagtcccgggcgctagcccacctcccacccgcctcttggctcctctcctctaggccgtcgctttcgggttctctcatcgcttcgtcgttcgccaatgtttgaggagaaggccagcagtccttcagggaagatgggaggcgaggagaagccgattggtgctggtgaagagaagcaaaaggaaggaggcaaaaagaagaacaaagaaggatctggagatggaggtcgagctgagttgaatccttggcctgaatatatttacacacgtcttgagatgtataatatactaaaagcagaacatgattccattctggcagaaaaggcagaaaaagatagcaagccaattaaagtcactttgcctgatggtaaacaggttgatgcggaatcttggaaaactacaccatatcaaattgcctgtggaattagtcaaggcctggccgacaacaccgttattgctaaagtaaataatgttgtgtgggacctggaccgccctctggaagaagattgtaccttggagcttctcaagtttgaggatgaggaagctcaggcagtgtattggcactctagtgctcacataatgggtgaaggcatggaaagagtctatggtggatgtttatgctacggtccgccaatagaaaatggattctattatgacatgtacctcgaagaagggggtgtgtctagcaatgatttctcttctctggaggctttgtgtaagaaaatcattaaagaaaaacaagcttttgaaagactggaagttaagaaagaaactttactggcaatgtttaagtacaacaagttcaaatgccggatattgaatgaaaaggtgaatactccaactaccacagtctatagatgtggccctttgatagatctctgccggggtcctcatgttagacacacgggcaaaattaaggctttaaaaatacacaaaaattcctccacgtactgggaaggcaaagcagatatggagactctccagagaatttatggcatttcattcccagatcctaaaatgttgaaagagtgggagaagttccaagaggaagctaaaaaccgagatcataggaaaattggcagggaccaagaactatatttctttcatgaactcagccctggaagttgcttttttctgccaaaaggagtctatatttataatgcacttattgaattcattaggagcgaatataggaaaagaggattccaggaggtagtcaccccaaacatcttcaacagccgactctggatgacctcgggccactggcagcactacagcgagaacatgttctcctttgaggtggagaaggagctgtttgccctgaaacccatgaactgcccaggacactcccttatgtttgatcatcggccaaggtcctggcgagaactgcctctgcggctagctgattttgggggtcttcataggaacgagctgtctggagcactcacaggactcacccgggtacgaagattccaacaggatgatgctcacatattctgtgccatggagcagattgaagatgaaataaaaggttgtttggattttctacgtacggtatatagcgtatttggattttcttttaaactaaacctttctactcgcccggaaaaattccttggagatatcgaagtatgggatcaagctgagaaacaacttgaaaacagtctgaatgaatttggtgaaaagtgggagttaaactctggagatggagctttctatggcccaaagattgacatacagattaaagatgcgattgggcggtaccaccagtgtgcaaccatccagctggatttccagttgcccatcagatttaatcttacttatgtaagccatgatggtgaggataagaaaaggccagtgattgttcatcgagccatcttgggatcagtggaaagaatgattgctatcctcacagaaaactatgggggcaaattggcccccttttggctgtcccctcgccaggtaatggtagttccagtgggaccaacctgtgatgaatatgcccaaaacgtacgacaacaattccacgatgccaaattcatggcagacattgatctggatccaggctgtacattgaataaaaagattcgaaatgcacagttagcacagtataacttcattttagttgttggtgaaaaagagaaaatcactggcactgttaatatccgcacaagagacaataaggtccacggggaacgcaccatttctgaaactatcgagcggctacagcagctcaaagagttccgcagcaaacaggcagaagaagaattttaatgaaaaaattacccagattggctccatggaaaaggaggaacagcgtttccgtaaaattgactttgtactcgaaaacgtcaatttatattgaacttggaggaggagtttggcaaagtctgaaataggtcaacctgcaggcgtaactatttttgacctagtcagtttttaaacaatgtgcatttgaaggagttaattaaaagagagccaataaaatgattttactcattcagtatctgagtactggaagtgaaacatgaggaatgctttagtgtaatgtgggagaacttttttgtaaatttaatgcaattgaaaaagttttcaaattcaattaagataactagaattggttatggtgtaacccgaattc

SEQ ID NO: 252 - protein, 712 aa, Homo sapien
MGGEEKPIGAGEEKQKEGGKKKNKEGSGDGGRAELNPWPEYIYTRLEMYNILKAEHDSILAEKAEKDSKPIKVTLPDGKQVDAESWKTTPYQIACGISQGLADNTVIAKVNNVVWDLDRPLEEDCTLELLKFEDEEAQAVYWHSSAHIMGEGMERVYGGCLCYGPPIENGFYYDMYLEEGGVSSNDFSSLEALCKKIIKEKQAFERLEVKKETLLAMFKYNKFKCRILNEKVNTPTTTVYRCGPLIDLCRGPHVRHTGKIKALKIHKNSSTYWEGKADMETLQRIYGISFPDPKMLKEWEKFQEEAKNRDHRKIGRDQELYFFHELSPGSCFFLPKGVYIYNALIEFIRSEYRKRGFQEVVTPNIFNSRLWMTSGHWQHYSENMFSFEVEKELFALKPMNCPGHSLMFDHRPRSWRELPLRLADFGGLHRNELSGALTGLTRVRRFQQDDAHIFCAMEQIEDEIKGCLDFLRTVYSVFGFSFKLNLSTRPEKFLGDIEVWDQAEKQLENSLNEFGEKWELNSGDGAFYGPKIDIQIKDAIGRYHQCATIQLDFQLPIRFNLTYVSHDGEDKKRPVIVHRAILGSVERMIAILTENYGGKLAPFWLSPRQVMVVPVGPTCDEYAQNVRQQFHDAKFMADIDLDPGCTLNKKIRNAQLAQYNFILVVGEKEKITGTVNIRTRDNKVHGERTISETIERLQQLKEFRSKQAEEEF

SEQ ID NO: 253 - DNA, 3826 bp, Homo sapien
gaattcgggtggagtcctgaaggagggcctgatgtcttcatcattctcaaattcttgtaagctctgcgtcgggtgaaaccagacaaagccgcgagcccagggatgggagcacgcgggggacggcctgccggcggggacgacagcattgcgcctgggtgcagcagtgtgcgtctcggggaagggaagatattttaaggcgtgtctgagcagacggggaggcttttccaaacccaggcagcttcgtggcgtgtgcggtttcgacccggtcacacaaagcttcagcatgtcatgtgaggacggtcgggccctgaaaggaacgctctcggaattggccgcggaaaccgatctgcccgttgtgtttgtgaaacagagaaagataggcggccatggtccaaccttgaaggcttatcaggagggcagacttcaaaagctactaaaaatgaacggccctgaagatcttcccaagtcctatgactatgaccttatcatcattggaggtggctcaggaggtctggcagctgctaaggaggcagcccaatatggcaagaaggtgatggtcctggactttgtcactcccacccctcttggaactagatggggtcttggaggaacatgtgtgaatgtgggttgcatacctaaaaaactgatgcatcaagcagctttgttaggacaagccctgcaagactctcgaaattatggatggaaagtcgaggagacagttaagcatgattgggacagaatgatagaagctgtacagaatcacattggctctttgaattggggctaccgagtagctctgcgggagaaaaaagtcgtctatgagaatgcttatgggcaatttattggtcctcacaggattaaggcaacaaataataaaggcaaagaaaaaatttattcagcagagagttttctcattgccactggtgaaagaccacgttacttgggcatccctggtgacaaagaatactgcatcagcagtgatgatcttttctccttgccttactgcccgggtaagaccctggttgttggagcatcctatgtcgctttggagtgcgctggatttcttgctggtattggtttaggcgtcactgttatggttaggtccattcttcttagaggatttgaccaggacatggccaacaaaattggtgaacacatggaagaacatggcatcaagtttataagacagttcgtaccaattaaagttgaacaaattgaagcagggacaccaggccgactcagagtagtagctcagtccaccaatagtgaggaaatcattgaaggagaatataatacggtgatgctggcaataggaagagatgcttgcacaagaaaaattggcttagaaaccgtaggggtgaagataaatgaaaagactggaaaaatacctgtcacagatgaagaacagaccaatgtgccttacatctatgccattggcgatatattggaggataaggtggagctcaccccagttgcaatccaggcaggaagattgctggctcagaggctctatgcaggttccactgtcaagtgtgactatgaaaatgttccaaccactgtatttactcctttggaatatggtgcttgtggcctttctgaggagaaagctgtggagaagtttggggaagaaaatattgaggtttaccatagttacttttggccattggaatggacgattccgtcaagagataacaacaaatgttatgcaaaaataatctgtaatactaaagacaatgaacgtgttgtgggctttcacgtactgggtccaaatgctggagaagttacacaaggctttgcagctgcgctcaaatgtggactgaccaaaaagcagctggacagcacaattggaatccaccctgtctgtgcagaggtattcacaacattgtctgtgaccaagcgctctggggcaagcatcctccaggctggctgctgaggttaagccccagtgtggatgctgttgccaagactgcaaaccactggctcgtttccgtgcccaaatccaaggcgaagttttctagagggttcttgggctcttggcacctgcgtgtcctgtgcttaccaccgcccaaggcccccttggatctcttggataggagttggtgaatagaaggcaggcagcatcacactggggtcactgacagacttgaagctgacatttggcagggcatcgaagggatgcatccatgaagtcaccagtctcaagcccatgtggtaggcggtgatggaacaactgtcaaatcagttttagcatgacctttccttgtggattttcttattctcgttgtcaagttttctagggttgaatttttttcttttttctccatggtgttaatgatattagagatgaaaaacgttagcagttgatttttgtccaaaagcaagtcatggctagagtatccatgcaaggtgtcttgttgcatggaagggatagtttggctcccttggaggctatgtaggcttgtcccgggaaagagaactgtcctgcagctgaaatggactgttctttactgacctgctcagcagtttcttctctcatatattcccaaaacaagtacatctgcgatcaactctagccaaatttgcccctgtgtgctacatgatggatgattattattttaaggtctgtttaggaagggaaatggctacttggccagccattgcctggcatttggtagtatagtatgattctcaccattatttgtcatggaggcagacatacaccagaaatgggggagaaacagtacatatctttctgtctttagtttattgtgtgctggtctaagcaagctgagatcatttgcaatggaaaacacgtaacttgtttaaaagtttttctggtagctttagctttatgctaaaaaaaataatgacattgggtatctatttctttctaagacatacattagtaggaaaataagtcttttcatgcttatgatttagctgttttgtggtaattgctttttaaaggaagttattaatatcataagttattattaatattttgaacacaggtggatgtgaaggattttcatttaaaaaccaagtggttttgactttttctgttgaatgaacaactgtgccttgtggaatttttgcagaagtgtttatgctttgttagcatttcaacttgcattattataaagaggtattaatgcctcagttatgtgtttgtcaatgtactggctgaggattctatctcagctgtcttttctaactgtgtaggttgagttttgaacacgtgcttgtggacatcagcctcctgccagcagttcttgaagcttctttttcattcctgctactctacctgtatttctcagttgcagcactgagtggtcaaaatacatttctgggccacctcagggaacccatgcatctgcctggcatttaggcagcagagcccctgaccgtcccccacaggctctgcctcacgtcctcatctcatttggctgtgtaaagaaatgggaaaagggaaaaggagagagcaattgaggcagttgaccatattcagttttatttatttatttttaatttgtttttttctccaagtccaccagtctctgaaattagaacagtaggcggtatgagataatcaggcctaatcatgttgtgattctcttttcttagtggagtggaatgttctatccccacaagaaggattatatcttatagacttgtcttgttcagattctgtatttacccattttattgaaacatatactaagttccatgtatttttgttacaaatcttctgaaaaaaaacaaaacaatgtgaaacattaaaattaaaaggcattaataataaaaaaaaaaaaaaaaacccgaattc

SEQ ID NO: 254 - protein, 497 aa, Homo sapien [sequence omitted]

SEQ ID NO: 255 - DNA, 670 bp, Homo sapien
cggccacgaggcggaatcccttctgctctcccagcgcagcgccgccgcccggcccctccagcttcccggaccatggccaacctggagcgcaccttcatcgccatcaagccggacggcgtgcagcgcggcctggtgggcgagatcatcaagcgcttcgagcagaagggattccgcctcgtggccatgaagttcctccgggcctctgaagaacacctgaagcagcactacattgacctgaaagaccgaccattcttccctgggctggtgaagtacatgaactcagggccggttgtggccatggtctgggaggggctgaacgtggtgaagacaggccgagtgatgcttggggagaccaatccagcagattcaaagccaggcaccattcgtggggacttctgcattcaggttggcaggaacatcattcatggcagtgattcagtaaaaagtgctgaaaaagaaatcagcctatggtttaagcctgaagaactggttgactacaagtcttgtgctcatgactgggtctatgaataagaggtggacacaacagcagtctccttcagcacggcgtggtgtgtccctggacacagctcttcattccattgacttagaggcaacaggattgatcattcttttatagagcatatttgccaataaagcttttggaagccgg

SEQ ID NO: 256 - protein, 152 aa, Homo sapien
MANLERTFIAIKPDGVQRGLVGEIIKRFEQKGFRLVAMKFLRASEEHLKQHYIDLKDRPFFPGLVKYMNSGPVVAMVWEGLNVVKTGRVMLGETNPADSKPGTIRGDFCIQVGRNIIHGSDSVKSAEKEISLWFKPEELVDYKSCAHDWVYE

SEQ ID NO: 257 - DNA, 1367 bp, Homo sapien
gaaggccgcaccgtactgggcgggggtctggggagcgcagcagccatggcaagccgtctcctgctcaacaacggcgccaagatgcccatcctggggttgggtacctggaagtcccctccagggcaggtgactgaggccgtgaaggtggccattgacgtcgggtaccgccacatcgactgtgcccatgtgtaccagaatgagaatgaggtgggggtggccattcaggagaagctcagggagcaggtggtgaagcgtgaggagctcttcatcgtcagcaagctgtggtgcacgtaccatgagaagggcctggtgaaaggagcctgccagaagacactcagcgacctgaagctggactacctggacctctaccttattcactggccgactggctttaagcctgggaaggaatttttcccattggatgagtcgggcaatgtggttcccagtgacaccaacattctggacacgtgggcggccatggaagagctggtggatgaagggctggtgaaagctattggcatctccaacttcaaccatctccaggtggagatgatcttaaacaaacctggcttgaagtataagcctgcagttaaccagattgagtgccacccatatctcactcaggagaagttaatccagtactgccagtccaaaggcatcgtggtgaccgcctacagccccctcggctctcctgacaggccctgggccaagcccgaggacccttctctcctggaggatcccaggatcaaggcgatcgcagccaagcacaataaaactacagcccaggtcctgatccggttccccatgcagaggaacttggtggtgatccccaagtctgtgacaccagaacgcattgctgagaactttaaggtctttgactttgaactgagcagccaggatatgaccaccttactcagctacaacaggaactggagggtctgtgccttgttgagctgtacctcccacaaggattaccccttccatgaagagttttgaagctgtggttgcctgctcgtccccaagtgacctatacctgtgtttcttgcctcatttttttccttgcaaatgtagtatggcctgtgtcactcagcagtgggacagcaacctgtagagtggccagcgagggcgtgtctagcttgatgttggatctcaagagccctgtcagtagagtagaagtctcttccagtttgctttgcccttctttctaccctgctggggaaagtacaacctgaatacccttttctgaccaaagagaagcaaaatctaccaggtcaaaatagtgccactaacggttgagttttgactgcttggaactggaatcctttcagcaagacttctctttgcctcaaataaaaagtgcttttgtg

SEQ ID NO: 258 - protein, 316 aa, Homo sapien
MASRLLLNNGAKMPILGLGTWKSPPGQVTEAVKVAIDVGYRHIDCAHVYQNENEVGVAIQEKLREQVVKREELFIVSKLWCTYHEKGLVKGACQKTLSDLKLDYLDLYLIHWPTGFKPGKEFFPLDESGNVVPSDTNILDTWAAMEELVDEGLVKAIGISNFNHLQVEMILNKPGLKYKPAVNQIECHPYLTQEKLIQYCQSKGIVVTAYSPLGSPDRPWAKPEDPSLLEDPRIKAIAAKHNKTTAQVLIRFPMQRNLVVIPKSVTPERIAENFKVFDFELSSQDMTTLLSYNRNWRVCALLSCTSHKDYPFHEEF

SEQ ID NO: 259 - DNA, 1793 bp, Homo sapien
ggcaccgcgcgggacggagcttggctgttggtcggtgggttcccgtgcggcggcggccaaggaggaggagacacagttggagcagctccgtgggctgactggggcgaggcctcagcagcgcgagcttgagtgcggccgagcctgcggcgccttcccctgcgggtggggacgagcgggccccgcggcgtcatcggcggcgaggagccgccgcgcctcggcctagcatgtcggaagcgggcgaggagcagcccatggagacgacgggcgccaccgagaacggacatgaggccgtccccgaagcgagtcgcggccggggctggacgggcgccgcggcggggctggaggcgcgaccgccgcgcccccgagcgggaatcagaacggcgccgagggaccagatcaacgccagcaagaacgaggaggacgcgggaaaaatgttcgttggtggcctgagctgggatactagcaaaaaagatttaaaagactattttactaaatttggagaggtcgttgactgtacaataaaaatggatcccaacactggacggtcaagagggtttgggtttatcctgttcaaagatgcagccagtgtggagaaggtcctagaccagaaggagcacaggctggatggccgtgtcattgaccctaaaaaggccatggctatgaagaaggacccggtcaagaaaatcttcgttgggggtctgaatcctgaaagtcccactgaggaaaagatcagggagtactttggcgagtttggggagattgaggccattgaattgccaatggatccaaagttgaacaaaagacgaggttttgtgtttatcacctttaaagaagaagaacccgtgaagaaggttctggagaaaaagttccatactgtcagtggaagcaagtgtgagatcaaggtggcccagcccaaagaagtctatcagcagcagcagtatggctctgggggccgtggaaaccgcaaccgagggaaccgaggcagcggaggtggtggtggaggtggaggtcagagtcagagttggaatcagggctacggcaactactggaaccagggctacggctaccagcagggctacgggcctggctatggcggctacgactactcgccctatggctattacggctacggccccggctacgactacagtcagggtagtacaaactacggcaagagccagcgacgtggtggccatcagaataactacaagccatactgaggcggccaagggagcgaccaactgatcgcacacatgctttgtttggatatggagtgaacacaattatgtaccaaatttaacttggcaaactttctattgcctgtcccatgtgcatcttatttaaaatttcccccatggaaatcactctcctgttgactatttccagagctctaggtgtttaggcagcgtgtggtgtctgagaggccatagcgccatcatgggctgatttttattaccaggtcccccagaagcaggtgagaggctctgcttcctgctgccgctctgcagcctggacctgtggaccctggttgtaaagagtaaattgtatcttaggaaaccagtgtcacctttttttcaccttttaattttatattatttgcgtcatacatttcctgtaacggaagtgttaattttactgtactttttggtaccccttttgggaatctaatgtattgtaaggtattttacacgtgtcctgattttgccacaacctggatattgaagctatccaagcttttgaaataaaatttaaaaaccccaagcctgggtgagtgtgggaaaaaaaaaaaaaaa

SEQ ID NO: 260 - protein, 331 aa, Homo sapien
MSEAGEEQPMETTGATENGHEAVPEASRGRGWTGAAAGLEARPPRPRAGIRTAPRDQINASKNEEDAGKMFVGGLSWDTSKKDLKDYFTKFGEVVDCTIKMDPNTGRSRGFGFILFKDAASVEKVLDQKEHRLDGRVIDPKKAMAMKKDPVKKIFVGGLNPESPTEEKIREYFGEFGEIEAIELPMDPKLNKRRGFVFITFKEEEPVKKVLEKKFHTVSGSKCEIKVAQPKEVYQQQQYGSGGRGNRNRGNRGSGGGGGGGGQSQSWNQGYGNYWNQGYGYQQGYGPGYGGYDYSPYGYYGYGPGYDYSQGSTNYGKSQRRGGHQNNYKPY

SEQ ID NO: 261 - DNA, 3268 bp, Homo sapien
gccggggaagtcatgctcgcttcacggaggcaatagctagccggtgtctgtgggaggttatgtttatttgagacttctccatcgggatcgcctggtgtcaccaagtgtccactggtactgaggtttgctgcctgccttcttgccatgtctaacgaagtagaaacaagtgcaaccaatggtcagcccgaccaacaggccgcaccaaaagcaccctcaaagaaggaaaaaaagaaaggccctgaaaagacagatgaatatctcctagcaaggttcaaaggcgatggcgtaaaatataaggccaagctgattggcattgatgatgtgccagatgcaagaggggataaaatgagccaagactctatgatgaaactaaagggaatggcggcacgtggtcggtctcagggacaacacaaacaaaggatctgggtcaacatttccctttctgggataaaaataattgatgagaaaactggggtaatagagcatgaacatccagtaaataagatttctttcattgcccgtgatgtgacagacaaccgggcatttggttacgtgtgtggaggagaaggccagcatcagttttttaccataaaaaccgggcaacaggctgaaccattagttgttgatcttaaagacctttttcaagttatctataatgtaaagaaaaaggaagaagaaaagaaaaagatagaggaagccagcaaagcagttgagaatgggagtgaggccctaaggattctagatgaccaaactaacaaactgaaatcgggtgttgaccagatggatttgtttggggacatgtctacacctcctgacctaaatagtccaacagaaagcaaagatatcctgttagtggatctaaactctgaaatcgacaccaatcagaattctttaagagaaaatccattcttaacaaacggcatcacctcctgttctcttcctcgaccaacgcctcaggcatccttcttgcctgaaaatgccttttctgccaatctcaacttctttcccacccctaatcctgatcctttccgtgacgatcctttcacacagccagaccaatcgacaccttcttcgtttgattctctcaaatctccagatcagaagaaagagaattcgagtagctcgtctactccgctgagtaatgggcccctgaatggtgatgttgactactttggtcagcaatttgaccagatctctaaccggactggcaaacaggaagctcaggcaggcccatggcccttttcaagttcgcaaacccagccagcagtgagaactcaaaatggggtatctgaaagagaacagaacggcttctctgtcaaatcctccccgaacccttttgtgggaagccctcccaaaggactgtccatacagaatggcgtaaagcaggacttggaaagctctgtccagtcctcaccacatgactccatagccattatcccacctccacaaagtaccaaaccaggaagaggcagaaggactgctaagtcttcagccaatgacttgcttgcatcagacatctttgctcctcccgtctcagaaccttcaggccaggcgtcacccacaggacaacctacagccctgcagcccaaccctctggatctcttcaaaacaagtgctcctgccccagtggggcccctggtgggtctaggtggtgtaactgtcacactccctcaggcaggaccatggaacacagcatctttggtcttcaatcagtccccttcaatggctccgggagccatgatgggtggtcaaccttcaggttttagtcagcccgtcatttttggtacaagtccagctgtttcaggttggaaccagccttcaccctttgcagcctcaactccccctccagtgcctgttgtctggggcccttctgcatctgtggcacccaatgcttggtcaacaacaagccctttggggaatccttttcagagcaatatttttccagctcctgctgtgtccactcagcccccatccatgcactcctctctcctggtcactcctcctcagccacctcccagagctggccctcccaaggacatctccagtgatgccttcactgccttagacccacttggggataaagagatcaaggatgtgaaagaaatgtttaaggatttccaactgcggcagccacctgctgtgcccgcgcggaagggagagcagacttcttctgggactttgagtgcctttgccagttatttcaacagcaaggttggcattcctcaggagaatgcagaccatgatgactttgatgctaatcaactattgaacaagatcaatgaaccaccaaagccagctcccagacaagtttccctgccagttaccaaatctactgacaatgcatttgagaaccctttctttaaagattcttttggttcatcacaagcctctgtggcttcttctcaacctgtatcttctgagatgtatagggatccatttggaaatccttttgcctaaattctgaacttggtctgcagaccatccagaggaataaaaaggttggccttagtagtcaaaaacaaagctgatagccagacacgttctgatttctgcccttgttccagctttgacgtattatctgttgccttatttctcattgcctcttctacttgtaaaatgcttttcactttctgtctaggttaaagctaaactgaatctatggctttaaataaattaagatcctaaactctctagcttaagtgtaaatgaagtacagtagtttccctactgaaccctacctcttgtgtccctggaaccttctagaacacctgccttctaccctctggttgggagatgcagccaccacatcccttcatatcatactgttttgaataaattttcaaatccttattgttcagagttgtttgggggttctgtttcagagcataaaacctaaaggttatagtagaacaaggcaccttcttaaaagaaatcttgcttcagaccatcagttacagagaatttcctaaagtaaaattgaagcaactacaacttctccttagacactttggaatctaaccacttaaggacctttttaaagagatagcttctcttctttctgaagatcaatttctcccaaggccaagattgtccttttctcccatttcttgctagctattgcaaatgagggaagaacattattcatctctcctccccttttttttctgattcttttttcagtcagttttgctcctgggttcaagtagtattaccaccctttcacaagcaacagactctcacagggcaaaaaaaaaaaaaaaaaaaaaaa

SEQ ID NO: 262 - protein, 770 aa, Homo sapien
MSNEVETSATNGQPDQQAAPKAPSKKEKKKGPEKTDEYLLARFKGDGVKYKAKLIGIDDVPDARGDKMSQDSMMKLKGMAARGRSQGQHKQRIWVNISLSGIKIIDEKTGVIEHEHPVNKISFIARDVTDNRAFGYVCGGEGQHQFFTIKTGQQAEPLVVDLKDLFQVIYNVKKKEEEKKKIEEASKAVENGSEALRILDDQTNKLKSGVDQMDLFGDMSTPPDLNSPTESKDILLVDLNSEIDTNQNSLRENPFLTNGITSCSLPRPTPQASFLPENAFSANLNFFPTPNPDPFRDDPFTQPDQSTPSSFDSLKSPDQKKENSSSSSTPLSNGPLNGDVDYFGQQFDQISNRTGKQEAQAGPWPFSSSQTQPAVRTQNGVSEREQNGFSVKSSPNPFVGSPPKGLSIQNGVKQDLESSVQSSPHDSIAIIPPPQSTKPGRGRRTAKSSANDLLASDIFAPPVSEPSGQASPTGQPTALQPNPLDLFKTSAPAPVGPLVGLGGVTVTLPQAGPWNTASLVFNQSPSMAPGAMMGGQPSGFSQPVIFGTSPAVSGWNQPSPFAASTPPPVPVVWGPSASVAPNAWSTTSPLGNPFQSNIFPAPAVSTQPPSMHSSLLVTPPQPPPRAGPPKDISSDAFTALDPLGDKEIKDVKEMFKDFQLRQPPAVPARKGEQTSSGTLSAFASYFNSKVGIPQENADHDDFDANQLLNKINEPPKPAPRQVSLPVTKSTDNAFENPFFKDSFGSSQASVASSQPVSSEMYRDPFGNPFA

SEQ ID NO: 263 - DNA, 2887 bp, Homo sapien
agatatctccggcgccgcccgccattttgactccagtgtctcgtttgcagtcggcgctttaggggaactgtcttcctccgcaggcgcgaggctgggtacagggtctattgtctgtggttgactccgtactttggtctgaggccttcgggagctttcccgaggcagttagcagaagccgcagcggccgcccccgcccgtctcctctgtccctgggcccgggagggaccaacttggcgtcacgcccctcagcggtcgccactctcttctctgttgttgggtccgcatcgtattcccggaatcagacggtgccccatagatggccagctttcccccgagggtcaacgagaaagagatcgtgagattacgtactataggtgaacttttagctcctgcagctccttttgacaagaaatgtggtcgtgaaaattggactgttgcttttgctccagatggttcatactttgcttggtcacaaggacatcgcacagtaaagcttgttccgtggtcccagtgccttcagaactttctcttgcatggcaccaagaatgttaccaattcaagcagtttaagattgccaagacaaaatagtgatggtggtcagaaaaataagcctcgtgaacatattatagactgtggagatatagtctggagtcttgcttttgggtcatcagttccagaaaaacagagtcgctgtgtaaatatagaatggcatcgcttcagatttggacaagatcagctacttcttgctacagggttgaacaatgggcgtatcaaaatatgggatgtatatacaggaaaactcctccttaacttggtagatcatactgaagtggtcagagatttaacttttgctccagatggaagcttgatcctggtgtcagcttcaagagacaaaactctcagagtatgggacctgaaagatgatggaaacatgatgaaagtattgagggggcatcagaattgggtgtacagctgtgcattctctcctgactcttctatgctgtgttcagtcggagccagtaaagcagttttcctttggaatatggataaatacaccatgatacggaaactagaaggacatcaccatgatgtggtagcttgtgacttttctcctgatggagcattactggctactgcatcttatgatactcgagtatatatctgggatccacataatggagacattctgatggaatttgggcacctgtttcccccacctactccaatatttgctggaggagcaaatgaccggtgggtacgatctgtatcttttagccatgatggactgcatgttgcaagccttgctgatgataaaatggtgaggttctggagaattgatgaggattatccagtgcaagttgcacctttgagcaatggtctttgctgtgccttctctactgatggcagtgttttagctgctgggacacatgacggaagtgtgtatttttgggccactccacggcaggtccctagcctgcaacatttatgtcgcatgtcaatccgaagagtgatgcccacccaagaagttcaggagctgccgattccttccaagcttttggagtttctctcgtatcgtatttagaagattctgccttccctagtagtagggactgacagaatacacttaacacaaacctcaagctttactgacttcaattatctgtttttaaagacgtagaagatttatttaatttgatatgttcttgtactgcattttgatcagttgagcttttaaaatattatttatagacaatagaagtatttctgaacatatcaaatataaatttttttaaagatctaactgtgaaaacatacatacctgtacatatttagatataagctgctatatgttgaatggacccttttgcttttctgatttttagttctgacatgtatatattgcttcagtagagccacaatatgtatctttgctgtaaagtgcaaggaaattttaaattctgggacactgagttagatggtaaatactgacttacgaaagttgaattgggtgaggcgggcaaatcacctgaggtcagcagtttgagactagcctggcaaacatgatgaaaccctgtctctactaaaaatacaaaaaaaaaaaaaattagccaggcgtggtggtgcacacctgtagtcctagctacttgggaggctgaggcaggagaattgcttgaacccaggaggtggaggttgcagtaagccaagatcacaccactgcactccaacctggacaacagagcgagactccatctcaaaaaaaaaaaaaaattgtgttgcctcatacgaaatgtatttggttttgttggagagtgtcagactgatctggaagtgaaacacagtttatgtacagggaaaaggattttattatccttaggaatgtcatccaagacgtagagcttgaatgtgacgttatttaaaaacaacaacaaagaaggcagagccaggatataactagaaaaaggatgtctttttttttttttttactccccctctaaacactgctgctgccttaattttagaaagcagcttactagtttacccttgtggtataaagtattataaattgttgtgaatttgaagaatccgtctactgtattattgctaaatattttgtttatactaagggacaattattttaagaccatggatttaaaaaaaaaaaaaaaaactctgtttctgcaggggatgatattggtgagttgccaaagaagcaatacagcatatctgcttttgccttctgttgtttatcttacctgcagatattaagaatgtatgcattatgtaaaatgctcaattatatatttttgttgagttttttaattaaagacttgtaaaaaaaaaaaaaaaaaaaaaaaaaaaaaaaaaaaaaaaaaaaaaaaaaaaaaaa

SEQ ID NO: 264 - protein, 421 aa, Homo sapien
MASFPPRVNEKEIVRLRTIGELLAPAAPFDKKCGRENWTVAFAPDGSYFAWSQGHRTVKLVPWSQCLQNFLLHGTKNVTNSSSLRLPRQNSDGGQKNKPREHIIDCGDIVWSLAFGSSVPEKQSRCVNIEWHRFRFGQDQLLLATGLNNGRIKIWDVYTGKLLLNLVDHTEVVRDLTFAPDGSLILVSASRDKTLRVWDLKDDGNMMKVLRGHQNWVYSCAFSPDSSMLCSVGASKAVFLWNMDKYTMIRKLEGHHHDVVACDFSPDGALLATASYDTRVYIWDPHNGDILMEFGHLFPPPTPIFAGGANDRWVRSVSFSHDGLHVASLADDKMVRFWRIDEDYPVQVAPLSNGLCCAFSTDGSVLAAGTHDGSVYFWATPRQVPSLQHLCRMSIRRVMPTQEVQELPIPSKLLEFLSYRI

SEQ ID NO: 265 - DNA, 2845 bp, Homo sapien
gcgcgagggaggcgagccggagcccgagcactagcagcagccggagtcggcggaaagcacccgggcgcagccggagccggtgccgcagctgcgatggccgtggccgtggggagaccgtctaatgaagagcttcgaaacttgtctttgtctggccatgtgggatttgacagcctccctgaccagctggtcaacaagtctacttctcaaggattctgtttcaacatcctttgtgttggtgagacaggcattggcaaatccacgttaatggacactttgttcaacaccaaatttgaaagtgacccagctactcacaatgaaccaggtgttcggttaaaagccagaagttatgagcttcaggaaagcaatgtacggctgaagttaaccattgttgacaccgtgggatttggagaccagataaataaagatgacagctataagccgatagtagaatatattgatgcccagttcgaggcctacctgcaagaggaattgaagattaaacgttctctcttcaactaccatgacacgaggatccatgcctgcctctactttattgcccctactggacattcactaaagtccctggatctggtcaccatgaaaaagctggacagtaaggtgaacatcattccaataattgcaaaagctgacaccattgccaagaatgaactgcacaaattcaagagtaagatcatgagtgaactggtcagcaatggggtccagatatatcagtttcccactgatgaagaaacggtggcagagattaacgcaacaatgagtgtccatctcccatttgcagtggttggcagcaccgaagaggtgaagattggcaacaagatggcaaaggccaggcagtacccctggggtgtggtgcaggttgagaatgaaaatcattgcgattttgtgaaacttcgagagatgctgatccgcgtgaacatggaggacttgcgagagcagactcacacccgccactatgaattgtaccgacgctgtaagcttgaagagatggggttcaaggacactgaccctgacagcaaacccttcagtcttcaggagacatatgaagcaaaaaggaatgaattcctgggagaactgcagaagaaagaagaagaaatgagacaaatgtttgttatgagagtgaaggagaaagaagctgaacttaaggaggcagagaaagagcttcacgagaagtttgaccttctaaagcggacacaccaagaagaaaagaagaaagtggaagacaagaagaaggagcttgaggaggaggtgaacaacttccagaagaagaaagcagcggctcagttactacagtcccaggcccagcaatctggggcccagcaaaccaagaaagacaaggataagaaaaatgcaagcttcacataaagcctggcaagccaaggatgttcccgcattcacctgcttttgcagtaatatcgtatctctgccatgtgtgttctttagttttattttattttattttatttttttacccttcctcaaacaccagtaactattattaactcgttttgctgaatgttgttgggtggtagaaaatgatagaacaagggaataaccgcgaatgctctgtgcagctggactctgtttccggaaagtaaatgatttgctttttatgcctgttctgaatggcagcacgaagcaggcctgttacttgtatgtcgctttggacagaggaaagtggggtaaaatgctacctgtacgtctgacatgaaaacttctcaccgcctcagcagctgaactaaaaacctgaatagccatgacaagagtttgcattttcttgatgattcatctccatgagtgcacaatccctgaactcactgtcttttctccacacttgtcctaagccaaggtagatttgtacgtagacagactggtgagcaagcattatattttatttttacccttgcatgacattttcattttaatcaataacattatttggcctgagcttgtgggtctgttcagactgtctcctctcatggtttgaaactgcatctgaatgcctgccttcaatcctggccaagttggagtagactggtatgagaaaactatgattagttcacatttactggtgcatccttgatcctctcacagatagaggtcttaaaggttggatcatgtaacattgcttagtagaagaatcttcttctaaggatgatgggctttctacagcctgcttaccactaacagtaaggaatctttcataaacacacctcagtttgttcccagtgggcttagagggaggacctgatgactgattccaggatacttgtacttctaataacatttttcatgaatcatgagaaaatttccacagatacttcccttagaaaatttgctataaactctgtatcattggtagcacaaatttgagcgaggccctgtcaattttaaggtggaaataggaaggaccacaacatgacccgtaagtcaagaaggtagacatttcatatccagcttccttgcttagtctcctttcagtatttggcaataaaagaaagaagaaatagaacagctgaagtctcaaatcattgtctggaattttcctcaccttggctagctccacctgctctttgtctaaggcccttgcctcatcagggattagaactggcccatatgccagaacctgtactaaatgcctaatttgtatggaagagtgcatatttaatctcttttctatactgctcctttctgatgcttatcctttcatctgtgtgattgttttttcccctctactaacaagatcctcccagctttctctctacatgtagaaaggataacatttctcatgaacccactgcccctctgcattttcctcactggttag

SEQ ID NO: 266 - protein, 429 aa, Homo sapien
MAVAVGRPSNEELRNLSLSGHVGFDSLPDQLVNKSTSQGFCFNILCVGETGIGKSTLMDTLFNTKFESDPATHNEPGVRLKARSYELQESNVRLKLTIVDTVGFGDQINKDDSYKPIVEYIDAQFEAYLQEELKIKRSLFNYHDTRIHACLYFIAPTGHSLKSLDLVTMKKLDSKVNIIPIIAKADTIAKNELHKFKSKIMSELVSNGVQIYQFPTDEETVAEINATMSVHLPFAVVGSTEEVKIGNKMAKARQYPWGVVQVENENHCDFVKLREMLIRVNMEDLREQTHTRHYELYRRCKLEEMGFKDTDPDSKPFSLQETYEAKRNEFLGELQKKEEEMRQMFVMRVKEKEAELKEAEKELHEKFDLLKRTHQEEKKKVEDKKKELEEEVNNFQKKKAAAQLLQSQAQQSGAQQTKKDKDKKNASFT

SEQ ID NO: 267 - DNA, 2423 bp, Homo sapien
acccgcgctcgtacgtgcgcctccgccggcagctcctgactcatcgggggctccgggtcacatgcgcccgcgcggccctataggcgcctcctccgcccgccgcccgggagccgcagccgccgccgccactgccactcccgctctctcagcgccgccgtcgccaccgccaccgccaccgccactaccaccgtctgagtctgcagtcccgagatcccagccatcatgtccatagagaagatctgggcccgggagatcctggactcccgcgggaaccccacagtggaggtggatctctatactgccaaaggtcttttccgggctgcagtgcccagtggagcctctacgggcatctatgaggccctggagctgagggatggagacaaacagcgttacttaggcaaaggtgtcctgaaggcagtggaccacatcaactccaccatcgcgccagccctcatcagctcaggtctctctgtggtggagcaagagaaactggacaacctgatgctggagttggatgggactgagaacaaatccaagtttggggccaatgccatcctgggtgtgtctctggccgtgtgtaaggcaggggcagctgagcgggaactgcccctgtatcgccacattgctcagctggccgggaactcagacctcatcctgcctgtgccggccttcaacgtgatcaatggtggctctcatgctggcaacaagctggccatgcaggagttcatgatcctcccagtgggagctgagagctttcgggatgccatgcgactaggtgcagaggtctaccatacactcaagggagtcatcaaggacaaatacggcaaggatgccaccaatgtgggggatgaaggtggctttgcccccaatatcctggagaacagtgaagccttggagctggtgaaggaagccatcgacaaggctggctacacggaaaagatcgttattggcatggatgttgctgcctcagagttttatcgtgatggcaaatatgacttggacttcaagtctcccactgatccttcccgatacatcactggggaccagctgggggcactctaccaggactttgtcagggactatcctgtggtctccattgaggacccatttgaccaggatgattgggctgcctggtccaagttcacagccaatgtagggatccagattgtgggtgatgacctgacagtgaccaacccaaaacgtattgagcgggcagtggaagaaaaggcctgcaactgtctgctgctcaaggtcaaccagatcggctcggtcactgaagccatccaagcgtgcaagctggcccaggagaatggctggggggtcatggtgagtcatcgctcaggagagactgaggacacattcattgctgacctggtggtggggctgtgcacaggccagatcaagactggtgccccgtgccgttctgaacgtctggctaaatacaaccagctcatgagaattgaggaagagctgggggatgaagctcgctttgccggacataacttccgtaatcccagtgtgctgtgattcctctgcttgcctggagacgtggaacctctgtctcatcctcctggaaccttgctgtcctgatctgtgatagttcaccccctgagatcccctgagccccagggtgcccagaacttccctgattgacctgctccgctgctccttggcttacctgacctcttgctgtctctgctcgccctcctttctgtgccctactcattggggttccgcactttccacttcttcctttctctttctctcttccctcagaaactagaaatgtgaatgaggattattataaaagggggtccgtggaagaatgatcagcatctgtgatgggagcgtcagggttggtgtgctgaggtgttagagagggaccatgtgtcacttgtgctttgctcttgtcccacgtgtcttccactttgcatatgagccgtgaactgtgcatagtgctgggatggaggggagtgttgggcatgtgatcacgcctggctaataaggctttagtgtatttatttatttatttattttatttgtttttcattcatcccattaatcatttccccataactcaatggcctaaaactggcctgacttgggggaacgatgtgtctgtatttcatgtggctgtagatcccaagatgactggggtgggaggtcttgctagaatgggaagggtcatagaaagggccttgacatcagttcctttgtgtgtactcactgaagcctgcgttggtccagagcggaggctgtgtgcctgggggagttttcctctatacatctctccccaaccctaggttccctgttcttcctccagctgcaccagagcaacctctcactccccatgccacgttccacagttgccaccacctctgtggcattgaaatgagcacctccattaaagtctgaatcagtgc

SEQ ID NO: 268 - protein, 434 aa, Homo sapien
MSIEKIWAREILDSRGNPTVEVDLYTAKGLFRAAVPSGASTGIYEALELRDGDKQRYLGKGVLKAVDHINSTIAPALISSGLSVVEQEKLDNLMLELDGTENKSKFGANAILGVSLAVCKAGAAERELPLYRHIAQLAGNSDLILPVPAFNVINGGSHAGNKLAMQEFMILPVGAESFRDAMRLGAEVYHTLKGVIKDKYGKDATNVGDEGGFAPNILENSEALELVKEAIDKAGYTEKIVIGMDVAASEFYRDGKYDLDFKSPTDPSRYITGDQLGALYQDFVRDYPVVSIEDPFDQDDWAAWSKFTANVGIQIVGDDLTVTNPKRIERAVEEKACNCLLLKVNQIGSVTEAIQACKLAQENGWGVMVSHRSGETEDTFIADLVVGLCTGQIKTGAPCRSERLAKYNQLMRIEEELGDEARFAGHNFRNPSVL

SEQ ID NO: 269 - DNA, 905 bp, Homo sapien
caacacaggggcagtctccaggacctccacaccattaacaagatgagccttgtgctcccttgggctctagagaggaagcccctctgagccctcagcccctctttcctccctctcctaaagtaatttgatcctcaggaatttgttctgccctcatctggccctggccagctctgcatttgacaaatgccaggaagaggaaactgttgagaaaacggaactactggggaaagggagggctcactgagaaccatcccggtaacccgaccgccgctggtcaccatgaaccacattgtgcaaaccttctctcctgtcaacagcggccagcctcccaactacgagatgctcaaggaggagcaggaagtggctatgctgggggggccccacaaccctgctcccccgacgtccaccgtgatccacatccgcagcgagacctccgtgcctgaccatgtcgtctggtccctgttcaacaccctcttcatgaacacctgctgcctgggcttcatagcattcgcctactccgtgaagtctagggacaggaagatggttggcgacgtgaccggggcccaggcctatgcctccaccgccaagtgcctgaacatctgggccctgattttgggcatcttcatgaccattctgctcgtcatcatcccagtgttggtcgtccaggcccagcgatagatcaggaggcatcattgaggccaggagctctgcccgtgacctgtatcccacgtactctatcttccattcctcgccctgcccccagaggccaggagctctgcccttgacctgtattccacttactccaccttccattcctcgccctgtccccacagccgagtcctgcatcagccctttatcctcacacgcttttctacaatggcattcaataaagtgtatatgtttct

SEQ ID NO: 270 - protein, 132 aa, Homo sapien
MNHIVQTFSPVNSGQPPNYEMLKEEQEVAMLGGPHNPAPPTSTVIHIRSETSVPDHVVWSLFNTLFMNTCCLGFIAFAYSVKSRDRKMVGDVTGAQAYASTAKCLNIWALILGIFMTILLVIIPVLVVQAQR

SEQ ID NO: 271 - DNA, 2786 bp, Homo sapien
agcactctccagcctctcaccgcaaaattacacaccccagtacaccagcagaggaaacttataacctcgggaggcgggtccttcccctcagtgcggtcacatacttccagaagagcggaccagggctgctgccagcacctgccactcagagcgcctctgtcgctgggacccttcagaactctctttgctcacaagttaccaaaaaaaaaagagccaacatgttggtattgctggctggtatctttgtggtccacatcgctactgttattatgctatttgttagcaccattgccaatgtctggttggtttccaatacggtagatgcatcagtaggtctttggaaaaactgtaccaacattagctgcagtgacagcctgtcatatgccagtgaagatgccctcaagacagtgcaggccttcatgattctctctatcatcttctgtgtcattgccctcctggtcttcgtgttccagctcttcaccatggagaagggaaaccggttcttcctctcaggggccaccacactggtgtgctggctgtgcattcttgtgggggtgtccatctacactagtcattatgcgaatcgtgatggaacgcagtatcaccacggctattcctacatcctgggctggatctgcttctgcttcagcttcatcatcggcgttctctatctggtcctgagaaagaaataaggccggacgagttcatggggatctggggggtggggaggaggaagccgttgaatctgggagggaagtggaggttgctgtacaggaaaaaccgagataggggaggggggagggggaagcaaaggggggaggtcaaatcccaaaccattactgaggggattctctactgccaagcccctgccctggggagaaagtagttggctagtactttgatgctcccttgatggggtccagagagcctccctgcagccaccagacttggcctccagctgttcttagtgacacacactgtctggggccccatcagctgccacaacaccagccccacttctgggtcatgcactgaggtccacagacctactgcactgagttaaaatagcggtacaagttctggcaagagcagatactgtctttgtgctgaatacgctaagcctggaagccatcctgcccttctgacccaaagcaaaacatcacattccagtctgaagtgcctactggggggctttggcctgtgagccattgtccctctttggaacagatatttagctctgtggaattcagtgacaaaatgggaggaggaaagagagtttgtaaggtcatgctggtgggttagctaaaccaagaaggagaccttttcacaatggaaaacctgggggatggtcagagcccagtcgagacctcacacacggctgtccctcatggagacctcatgccatggtctttgctaggcctcttgctgaaagccaaggcagctcttctggagtttctctaaagtcactagtgaacaattcggtggtaaaagtaccacacaaactatgggatccaaggggcagtcttgcaacagtgccatgttagggttatgtttttaggattcccctcaatgcagtcagtgtttcttttaagtatacaacaggagagagatggacatggctcattgtagcacaatcctattactcttcctctaacatttttgaggaagttttgtctaattatcaatattgaggatcagggctcctaggctcagtggtagctctggcttagacaccacctggagtgatcacctcttggggaccctgcctatcccacttcacaggtgaggcatggcaattctggaagctgattaaaacacacataaaccaaaaccaaacaacaggcccttgggtgaaaggtgctatataattgtgaagtattaagcctaccgtatttcagccatgataagaacagagtgcctgcattcccaggaaaatacgaaaatcccatgagataaataaaaatataggtgatgggcagatcttttctttaaaataaaaaagcaaaaactcttgtggtacctagtcagatggtagacgagctgtctgctgccgcaggagcacctctatacaggacttagaagtagtatgttattcctggttaagcaggcattgctttgccctggagcagctattttaagccatctcagattctgtctaaaggggttttttgggaagacgttttctttatcgccctgagaagatctaccccagggagaatctgagacatcttgcctacttttctttattagctttctcctcatccatttcttttatacctttcctttttggggagttgttatgccatgatttttggtatttatgtaaaaggattattactaattctatttctctatgtttattctagttaaggaaatgttgagggcaagccaccaaattacctaggctgaggttagagagattggccagcaaaaactgtgggaagatgaactttgtcattatgatttcattatcacatgattatagaaggctgtcttagtgcaaaaaacatacttacatttcagacatatccaaagggaatactcacattttgttaagaagttgaactatgactggagtaaaccatgtattcccttatcttttactttttttctgtgacatttatgtctcatgtaatttgcattactctggtggattgttctagtactgtattgggcttcttcgttaatagattatttcatatactataattgtaaatattttgatacaaatgtttataactctagggatataaaaacagattctgattcccttcaaaaaaaaaaaa

SEQ ID NO: 272 - protein, 157 aa, Homo sapien
MLVLLAGIFVVHIATVIMLFVSTIANVWLVSNTVDASVGLWKNCTNISCSDSLSYASEDALKTVQAFMILSIIFCVIALLVFVFQLFTMEKGNRFFLSGATTLVCWLCILVGVSIYTSHYANRDGTQYHHGYSYILGWICFCFSFIIGVLYLVLRKK

SEQ ID NO: 273 - DNA, 1856 bp, Homo sapien
agccaaaagaggaagggaccggcctcccacgtccacagggacctgacttccacctctctgcccagatttgcttatgtcactgtcgccccgggacggggaggtggggagctgagggcaagtcgcgcccgcccctgaaatcccagccgcctagcgattggctgcaagggtctcggcttggccgcggattaatcacacccgagggcttgaaaggtggctgggagcgccggacacctcagacggacggtggccagggatcaggcagcggctcaggcgaccctgagtgtgcccccaccccgccatggcccggctgctgcaggcgtcctgcctgctttccctgctcctggccggcttcgtctcgcagagccggggacaagagaagtcgaagatggactgccatggtggcataagtggcaccatttacgagtacggagccctcaccattgatggggaggagtacatccccttcaagcagtatgctggcaaatacgtcctctttgtcaacgtggccagctactgaggcctgacgggccagtacattgaactgaatgcactacaggaagagcttgcaccattcggtctggtcattctgggctttccctgcaaccaatttggaaaacaggaaccaggagagaactcagagatccttcctaccctcaagtatgtccgaccaggtggaggctttgtccctaatttccagctctttgagaaaggggatgtcaatggagagaaagagcagaaattctacactttcctaaagaactcctgtcctcccacctcggagctcctgggtacatctgaccgcctcttctgggaacccatgaaggttcacgacatccgctggaactttgagaagttcctggtggggccagatggtatacccatcatgcgctggcaccaccggaccacggtcagcaacgtcaagatggacatcctgtcctacatgaggcggcaggcagccctgggggtcaagaggaagtaactgaaggccgtctcatcccatgtccaccatgtaggggagggactttgttcaggaagaaatccgtgtctccaaccacactatctacccatcacagacccctttcctatcactcaaggccccagcctggcacaaatggatgcatacagttctgtgtactgccaggcatgtgggtgtgggtgcaatgtgggtgtttacacacatgcctacaggtatgcgtgattgtgtgtgtgtgcatgggtgtacagccacgtgtctacctatgtgtctttctgggaatgtgtaccatctgtgtgcctgcagctgtgtagtgctggacagtgacaaccctttctctccagttctccactccaatgataatagttcacttatacctaaacccaaaggaaaaaccagctctaggtccaattgttctgctctaactgatacctcaaccttggggccagcatctcccactgcctccaaatattagtaactatgactgacgtccccagaagtttctgggtctaccacactccccaaccccccactcctacttcctgaagggccctcccaaggctacatccccaccccacagttctccctgagagagatcaacctccctgagatcaaccaaggcagatgtgacagcaagggccacggaccccatggcaggggtggcgtcttcatgagggaggggcccaaagcccttgtgggcggacctcccctgagcctgtctgaggggccagcccttagtgcattcaggctaaggcccctgggcagggatgccacccctgctccttcggaggacgtgccctcacccctcactggtccactggcttgagactcaccccgtctgcccagtaaaagcctttctgcagcaaaaaaaaaaaaaaaaaaa

SEQ ID NO: 274 - protein, 226 aa, Homo sapien
  unsure 73: unknown amino acid
MARLLQASCLLSLLLAGFVSQSRGQEKSKMDCHGGISGTIYEYGALTIDGEEYIPFKQYAGKYVLFVNVASYXGLTGQYIELNALQEELAPFGLVILGFPCNQFGKQEPGENSEILPTLKYVRPGGGFVPNFQLFEKGDVNGEKEQKFYTFLKNSCPPTSELLGTSDRLFWEPMKVHDIRWNFEKFLVGPDGIPIMRWHHRTTVSNVKMDILSYMRRQAALGVKRK

SEQ ID NO: 275 - DNA, 1119 bp, Homo sapien
ggcacgaggcctgggcggctccgctagctgtttttcgtcttccctaggctatttctgccgggcgctccgcgaagatgcagctcaagccgatggagatcaaccccgagatgctgaacaaagtgctgtcccggctgggggtcgccggccagtggcgcttcgtggacgtgctggggctggaagaggagtctctgggctcggtgccagcgcctgcctgcgcgctgctgctgctgtttcccctcacggcccagcatgagaacttcaggaaaaagcagattgaagagctgaagggacaagaagttagtcctaaagtgtacttcatgaagcagaccattgggaattcctgtggcacaatcggacttattcacgcagtggccaataatcaagacaaactgggatttgaggatggatcagttctgaaacagtttctttctgaaacagagaaaatgtcccctgaagacagagcaaaatgctttgaaaagaatgaggccatacaggcagcccatgatgccgtggcacaggaaggccaatgtcgggtagatgacaaggtgaatttccattttattctgtttaacaacgtggatggccacctctatgaacttgatggacgaatgccttttccggtgaaccatggcgccagttcagaggacaccctgctgaaggacgctgccaaggtctgcagagaattcaccgagcgtgagcaaggagaagtccgcttctctgccgtggctctctgcaaggcagcctaatgctctgtgggagggactttgctgatttcccctcttcccttcaacatgaaaatatatacccccccatgcagtctaaaatgcttcagtacttgtgaaacacagctgttcttctgttctgcagacacgccttcccctcagccacacccaggcacttaagcacaagcagagtgcacagctgtccactgggccattgtggtgtgagcttcagatggtgaagcattctccccagtgtatgtcttgtatccgatatctaacgctttaaatggctactttggtttctgtctgtaagttaagaccttggatgtggtttaattgtttgtcctcaaaaggaataaaacttttctgctgataagataaaaaaaaaaaaaaaaaa

SEQ ID NO: 276 - protein, 223 aa, Homo sapien [sequence omitted]

SEQ ID NO: 277 - DNA, 3135 bp, Homo sapien
ggccgtcggcggaggcgccattttgtgtagccgccgaaccttgttggaggttctggggcgcagaaccgctactgctgcttcggtctctccttgggaaaaaataaaatttgaaccttttggagctgtgtgctaaatcttcagtgggacaatgggttcagacaaaagagtgagtagaacagagcgtagtggaagatacggttccatcatagacagggatgaccgtgatgagcgtgaatcccgaagcaggcggagggactcagattacaaaagatctagtgatgatcggaggggtgatagatatgatgactaccgagactatgacagtccagagagagagcgtgaaagaaggaacagtgaccgatccgaagatggctaccattcagatggtgactatggtgagcacgactataggcatgacatcagtgacgagagggagagcaagaccatcatgctgcgcggccttcccatcaccatcacagagagcgatattcgagaaatgatggagtccttcgaaggccctcagcctgcggatgtgaggctgatgaagaggaaaacaggtgtaagccgtggtttcgccttcgtggagttttatcacttgcaagatgctaccagctggatggaagccaatcagaaaaagttggtgattcaaggaaagcacattgcaatgcattatagcaatcccagacctaagtttgaagattggctttgtaacaagtgctgccttaacaatttcaggaaaagactaaaatgcttccgatgtggagcagacaagtttgactctgaacaggaagtgcctcctggaaccacagagtcggttcagtctgtggattactactgtgatacgatcattcttcggaacatagctccgcacactgtggtggattccatcatgacagcactgtctccttacgcgtctttagctgtcaataacatccgcctcataaaagacaaacagacccagcagaacagaggcttcgcatttgtgcagctgtcctctgcaatggatgcttctcagctgcttcagatattacagagtctccatcctcctttgaaaattgatggcaaaactattggggttgattttgcaaaaagtgccagaaaagacttggtcctctcagatggtaaccgcgtcagcgccttctctgtagctagtacggctattgctgctgctcagtggtcatccacccagtctcaaagtggtgaaggaggcagtgttgactacagttatctgcaaccaggtcaagatggctatgcccaatatgctcagtattcacaggattatcagcagttttatcaacaacaagctggaggattggaatctgatgcatcatctgcatcaggcacagcagtgaccaccacctcagcggctgtagtgtcccagagtcctcagctgtataatcaaacctccaatccacctggctctccgactgaggaagcacagcctagcactagcacaagtacacaggccccagccgcttcccctactggtgtagttcctggtaccaaatatgcagtacctgacacgtccacttaccagtatgatgaatcttcaggatattactatgatccgacaacagggctctattatgaccccaactcgcaatactactataattccttgacccagcagtacctttactgggatggggaaaaagagacctacgtgccagctgcagagtctagctcccaccagcagtcgggcctgcctcctgcaaaagaggggaaagagaagaaggagaaacccaagagcaaaacagcccagcagattgccaaagacatggaacgctgggctaagagtttgaataagcagaaagaaaactttaaaaatagctttcagcctgtcaattccttgagggaagaagaaaggagagaatctgctgcagcagacgctggctttgctctctttgagaagaagggagccttagctgaaaggcagcagctcatcccagaattggtgcgaaatggagatgaggagaatcccctcaaaaggggtctggttgctgcttacagtggtgacagtgacaatgaggaggagctggtggagagacttgagagtgaggaagagaagctagctgactggaagaagatggcctgtctgctctgccggcgccagttcccgaacaaagatgccctagtcaggcaccagcaactctcagaccttcacaagcaaaacatggacatctaccgacgatccaggctgagcgagcaggagctggaagccttggagctaagggagagagagatgaaataccgagaccgagctgcagaaagacgggagaagtacggcattccagaacctccagagcccaagcgcaagaagcagtttgatgccggcactgtgaattacgagcaacccaccaaagatggcattgaccacagtaacattggcaacaagatgctgcaggccatgggctggcgggaaggctctggcttgggacgaaagtgtcaaggcattacggctcccattgaggctcaagttcggctaaagggagctggcctaggagccaaaggcagcgcatatggtttgtcgggcgccgattcctacaaagatgctgtccggaaagccatgtttgcccggttcactgagatggagtgagagagagagagagagagagatgacaaggagcacaagaagtggtccatctcccgaattcgctgttaccgcctgtctctttaagggcatgccttgtgctgttaatagatcttagggtgaaccacttcattctgcagggttctccctcccaccttaaagaagttccccttatgtgggttgcctggtgaatggccttccttcccgccagagggcttgtgaacagaccggagaggacagtggattgtttatactccagtgtacatagtgtaatgtagcgtgtttacatgtgtagcctatgttgtggtccatcagcccctcacattcctaggggtttgagatgctgtaggtggtatgtgacaccaaagccacctctgtcatttgttgtgatgtcttttcttggcaaaagccttgtgtatatttgtatattacacatttgtacagaattttggaagattttcagtctagttgccaaatctggctcctttacaaaagaaataccttgagaaaaaaaaaaaaaaaaaaaaaaaaaaaaaaaaaaaaaa

SEQ ID NO: 278 - protein, 815 aa, Homo sapien
MGSDKRVSRTERSGRYGSIIDRDDRDERESRSRRRDSDYKRSSDDRRGDRYDDYRDYDSPERERERRNSDRSEDGYHSDGDYGEHDYRHDISDERESKTIMLRGLPITITESDIREMMESFEGPQPADVRLMKRKTGVSRGFAFVEFYHLQDATSWMEANQKKLVIQGKHIAMHYSNPRPKFEDWLCNKCCLNNFRKRLKCFRCGADKFDSEQEVPPGTTESVQSVDYYCDTIILRNIAPHTVVDSIMTALSPYASLAVNNIRLIKDKQTQQNRGFAFVQLSSAMDASQLLQILQSLHPPLKIDGKTIGVDFAKSARKDLVLSDGNRVSAFSVASTAIAAAQWSSTQSQSGEGGSVDYSYLQPGQDGYAQYAQYSQDYQQFYQQQAGGLESDASSASGTAVTTTSAAVVSQSPQLYNQTSNPPGSPTEEAQPSTSTSTQAPAASPTGVVPGTKYAVPDTSTYQYDESSGYYYDPTTGLYYDPNSQYYYNSLTQQYLYWDGEKETYVPAAESSSHQQSGLPPAKEGKEKKEKPKSKTAQQIAKDMERWAKSLNKQKENFKNSFQPVNSLREEERRESAAADAGFALFEKKGALAERQQLIPELVRNGDEENPLKRGLVAAYSGDSDNEEELVERLESEEEKLADWKKMACLLCRRQFPNKDALVRHQQLSDLHKQNMDIYRRSRLSEQELEALELREREMKYRDRAAERREKYGIPEPPEPKRKKQFDAGTVNYEQPTKDGIDHSNIGNKMLQAMGWREGSGLGRKCQGITAPIEAQVRLKGAGLGAKGSAYGLSGADSYKDAVRKAMFARFTEME

SEQ ID NO: 279 - DNA, 688 bp, Homo sapien
agccccgccccaggcgagggcgccgcacccacaccgcgctgcgcagttttgttctgctccagctgttcgaaggtgatccagacgcaagatggctgtcctctctaaggaatatggttttgtgcttctaactggtgctgccagctttataatggtggcccacctagccatcaatgtttccaaggcccgcaagaagtacaaagtggagtatcctatcatgtacagcacggaccctgaaaatgggcacatcttcaactgcattcagcgagcccaccagaacacgttggaagtgtatcctcccttcttattttttctagctgttggaggtgtttaccacccgcgtatagcttctggcctgggcttggcctggattgttggacgagttctttatgcttatggctattacacgggagaacccagcaagcgtagtcgaggagccctggggtccatcgccctcctgggcttggtgggcacaactgtgtgctctgctttccagcatcttggttgggttaaaagtggcttgggcagtggacccaaatgctgccattaaagaattataggggtttaaaaactctcattcattttaaatgacttacctttatttccagttacattttttttctaaatataataaaaacttacctggcatcagcctcatacctaaaaaaaaaaaaaaaaaaaaaaaaaaaaa

SEQ ID NO: 280 - protein, 152 aa, Homo sapien
MAVLSKEYGFVLLTGAASFIMVAHLAINVSKARKKYKVEYPIMYSTDPENGHIFNCIQRAHQNTLEVYPPFLFFLAVGGVYHPRIASGLGLAWIVGRVLYAYGYYTGEPSKRSRGALGSIALLGLVGTTVCSAFQHLGWVKSGLGSGPKCCH

SEQ ID NO: 281 - DNA, 4886 bp, Homo sapien
ggcctgggtctgacgcggccctgttcgagggggcctctcttgtttatttatttattttccgtgggtgcctccgagtgtgcgcgcgctctcgctacccggcggggagggggtggggggagggcccgggaaaagggggagttggagccggggtcgaaacgccgcgtgacttgtaggtgagagaacgccgagccgtcgccgcagcctccgccgccgagaagcccttgttcccgctgctgggaaggagagtctgtgccgacaagatggcggacggggagctgaacgtggacagcctcatcacccggctgctggaggtacgaggatgtcgtccaggaaagattgtgcagatgactgaagcagaagttcgaggcttatgtatcaagtctcgggagatctttctcagccagcctattcttttggaattggaagcaccgctgaaaatttgtggagatattcatggacagtatacagatttactgagattatttgaatatggaggtttcccaccagaagccaactatcttttcttaggagattatgtggacagaggaaagcagtctttggaaaccatttgtttgctattggcttataaaatcaaatatccagagaacttctttctcttaagaggaaaccatgagtgtgctagcatcaatcgcatttatggattctatgatgaatgcaaacgaagatttaatattaaattgtggaagaccttcactgattgttttaactgtctgcctatagcagccattgtggatgagaagatcttctgttgtcatggaggattgtcaccagacctgcaatctatggagcagattcggagaattatgagacctactgatgtccctgatacaggtttgctctgtgatttgctatggtctgatccagataaggatgtgcaaggctggggagaaaatgatcgtggtgtttcctttacttttggagctgatgtagtcagtaaatttctgaatcgtcatgatttagatttgatttgtcgagctcatcaggtggtggaagatggatatgaattttttgctaaacgacagttggtaaccttattttcagccccaaattactgtggcgagtttgataatgctggtggaatgatgagtgtggatgaaactttgatgtgttcatttcagatattgaaaccatctgaaaagaaagctaaataccagtatggtggactgaattctggacgtcctgtcactccacctcgaacagctaatccgccgaagaaaaggtgaagaaaggaattctgtaaagaaaccatcagatttgttaaggacatacttcataatatataagtgtgcactgtaaaaccatccagccatttgacaccctttatgatgtcacacctttaacttaaggagacgggtaaaggatcttaaatttttttctaatagaaagatgtgctacactgtattgtaataagtatactctgttatagtcaacaaagttaaatccaaattcaaaattatccattaaagttacatcttcatgtatcacaatttttaaagttgaaaagcatcccagttaaactagatgtgatagttaaaccagatgaaagcatgatgatccatctgtgtaatgtggttttagtgttgcttggttgtttaattattttgagcttgttttgtttttgtttgttttcactagaataatggcaaatacttctaatttttttccctaaacatttttaaaagtgaaatatgggaagagctttacagacattcaccaactattattttcccttgtttatctacttagatatctgtttaatcttactaagaaaactttcgcctcattacattaaaaaggaattttagagattgattgttttaaaaaaaaatacgcacattgtccaatccagtgattttaatcatacagtttgactgggcaaactttacagctgatagtgaatattttgctttatacaggaattgacactgatttggatttgtgcactctaatttttaacttattgatgctctattgtgcagtagcatttcatttaagataaggctcatatagtattacccaactagttggtaatgtgattatgtggtaccttggctttaggttttcattcgcacggaacaccttttggcatgcttaacttcctggtaacaccttcacctgcattggttttctttttcttttttctttctttttggtgttgtattttttgagttgttgtttgtttttagatccacagtacatgagaatccttttttgacaagccttggaaagctgacactgtctctttttcctccctctatacgaaggatgtatttaaatgaatgctggtcagtgggacattttgtcaactatgggtattgggtgcttaactgtctaatattgccatgtgaatgttgtatacgattgtaaggcttatgtcactaaagatttttattctgattttttcataatcaaaggtcatatgatactgtatagacaagctttgtagtgaagtatagtagcaataatttctgtacctgatcaagtttattgcagcctttcttttcctatttcttttttttaagggttagtattaacaaatggcaatgagtagaaaagttaacatgaagattttagaaggagagaacttacaggacacagatttgtgattctttgactgtgacactattggatgtgattctaaaagcttttattgagcattgtcaaatttgtaagcttcatagggatggacatcatatctataatgcccttctatatgtgctaccatagatgtgacatttttgaccttaatatcgtctttgaaaatgttaaattgagaaacctgttaacttacattttatgaattggcacattgtattacttactgcaagagatatttcattttcagcacagtgcaaaagttctttaaaatgcatatgtctttttttctaattccgttttgttttaaagcacattttaaatgtagttttctcatttagtaaaagttgtctaattgatatgaagcctgactgattttttttttccttacagtgagacatttaagcacacattttattcacatagatactatgtccttgacatattgaaatgattcttttctgaaagtattcatgatctgcatatgatgtattaggttaggtcacaaaggttttatctgaggtgatttaaataacttcctgattggagtgtgtaagctgagcgatttctaataaaattttagttgtacacttttagtagtcatagtgaagcaggtctagaaaataagcctttggcagggaaaaagggcaatgttgattaatctcagtattaaaccacattaatctgtatcccattgtctggcttttgtaaattcatccaggtcaagactaagtatgttggttaataggaatccttttttttttttttgttaaagactaaatgtgaaaaaataatcactacttaagctaattaatattggtcattaaatttaaaggatggaaatttatcatgtttaaaaattattcaagcactcttaaaaccacttaaacagcctccagtcataaaaatgtgttctttacaaatatttgcttggcaacacgacttgaaataaataaaactttgtttcttaggagaaaatgattctgtaattccagtgtcactaatttatattgttctttcctctgatttttttcaggttagtgatttttttgtatacaatttaatccaaatgttatgacattcagaaatcatgaaacacagtagatatctgttataatgtggtgtatcacatggattataaagcaaagttatggtcgatttctattcttgaaagaatcaactacagtgaatcctttgcatttgaagccttaacatgcattgctttaattttgcccagggacaaattttaataatcagcaagactggtttgtgcaaagcgttgagtcatcaggtatttagagcctagccagctacccagtatccatgctgccatatcccttcattgtaaaaagtacctaaacattcgtgaaatgattttttttagctgaaaaatgctggcaagaagaattttaaagcttaaaataggtggtaaatttgaagtatgagtgtgttcacgagaaacataggcttttcaaaaaaatttttattcaaggcaaagcaaggaacatcttgagatatgtctcaagaatataaagatgtattattttaagccaaggagctgaaatatatctcagtttataaattcaggtatattctttttgtctccatggcaaccataacttttgaaccaaaaaaaattgtttttacatctttatgctgaaaatgtgtttagattaggaatatggtcgggctgaatttgctgttgctccctaaccaaatccacctcttgttttccttgtgagtccatggctaaatcaaagctgcccctgagaagagacttaatccaagcctgattgtactagtggcatcacttagaagtaggctttccctcttcctagtagatctcaatgttttataattccttaaaacagctgaaaattgggacaacatactttacgcaatgaacagtagttaaataggaaataaactagttccatgtaagtatacacctagagttttaattacctttataatgtttcttaaaagtgaaacttagatacaattgtgattggatacttagatactaagtgaaacttagtgtaacaattttgatctgttaaattggattttacatgtacatttgaatgccagaatttctaaataaatcccctggttaggaaattttaaaagtcaaagcttgttttcttcaaccactaccttctacattggttgacttagaccgtaagctttttaagtttctcattgtaatttaccttctcatgcagattgctgatgttttattaaaccttatttttacaaaaatgaaaaaa

SEQ ID NO: 282 - protein, 413 aa, Homo sapien
GLGLTRPCSRGPLLFIYLFSVGASECARALATRRGGGGGRAREKGELEPGSKRRVTCRRERRAVAAASAAEKPLFPLLGRRVCADKMADGELNVDSLITRLLEVRGCRPGKIVQMTEAEVRGLCIKSREIFLSQPILLELEAPLKICGDIHGQYTDLLRLFEYGGFPPEANYLFLGDYVDRGKQSLETICLLLAYKIKYPENFFLLRGNHECASINRIYGFYDECKRRFNIKLWKTFTDCFNCLPIAAIVDEKIFCCHGGLSPDLQSMEQIRRIMRPTDVPDTGLLCDLLWSDPDKDVQGWGENDRGVSFTFGADVVSKFLNRHDLDLICRAHQVVEDGYEFFAKRQLVTLFSAPNYCGEFDNAGGMMSVDETLMCSFQILKPSEKKAKYQYGGLNSGRPVTPPRTANPPKKR

SEQ ID NO: 283 - DNA, 1778 bp, Homo sapien
agttgcaggcgagcaggcgaggaatcgccgtggcgtcttggtgttctccacgctggttcgcaggtgaagagatggcgtttgtgaagagtggctggttgctgcgacagagtactattttgaagcgctggaagaagaactggtttgatctgtggtcggatggtcacctgatctattatgatgaccagactcggcagaatatcgaggataaggtccacatgccaatggactgcatcaacatccgcacggggcaggaatgtcgggatactcagcccccggatggaaagtcaaaagactgcatgctccagattgtttgtcgagatgggaaaacaattagtctttgtgcagaaagcacagatgattgcttggcctggaaatttacactccaagattctaggacaaacacagcgtatgtgggctctgcagtcatgaccgatgagacatccgtggtttcctcacctccaccatacacggcctatgctgcaccggcccctgaggcttatggctatgggccatacggtggtgcgtacccgccaggaactcaagttgtctacgctgcgaatgggcaggcgtatgccgtgccccaccagtacccatatgcaggactttatggacagcagcctgctaaccaagtcatcattcgagagcgctatcgagacaacgacagcgacctggcactgggcatgctggcaggagcagccacgggcatggccttagggtctctattttgggtcttctaggggcctcaaggtcttgatgtgcatagcttctgataaccctgtgtgcaataatatgatttgcagggcatttctgtttgtgacaaaagtttttaataatagttttaatcattcctttgaaagtagtgatgtcataattgtactaatccacataagtaccacagagaagggtttgaactgtgctattttgttcaaatgttgactctccgggggcactggctcattccaagactgttcttgtgcaactctcagaataccttatttgagcatacctgttttgaaaggcattttctttttagagttaggtgtagtgcttaagggttaatttattttcatgttatgccagtaatatagtgttgtatgcctattgagtgattgtggcaagaaaagctacagcttctttgcgtttaactttttcaaaccacagaccagaactggttgcatgttactttaggagttgtgggttggtaagctcccaggtacttcccgaggctatggtgtgagagcccccgtcctgccctctggggctccacaggcccctggcaaggccgatggctcaggatgatggggcacagcccgcctttgaacaatcatgcttcagaaatctgcctgaccctagctgctgctgctgctcactttattcttgtatggctttggtaggcatacttggagaacatatcccacattaggaattgatttaagcctgagagtttgagggctttaatcctttaaaacttggagaagctggctgggcgcggtggctcacgcctgtaatcccagcactttgagagaccgaggcgggcggatcacgaggtcaggagatcgagaccatcctggctaacacggtgaaaccccatctctactaaaaatacaaaaaattagctgggcgtggtggcaggcgcctgtggtcccagctactcgggaggctgaggcaggagaatagtgtgaacccaggaggcggagcttgcagtgagccaagatagtgccactgcacttcagcctgggtgacagagtgagactctgtctcaaaaaaaaaaaaaaaaa

SEQ ID NO: 284 - protein, 221 aa, Homo sapien
MAFVKSGWLLRQSTILKRWKKNWFDLWSDGHLIYYDDQTRQNIEDKVHMPMDCINIRTGQECRDTQPPDGKSKDCMLQIVCRDGKTISLCAESTDDCLAWKFTLQDSRTNTAYVGSAVMTDETSVVSSPPPYTAYAAPAPEAYGYGPYGGAYPPGTQVVYAANGQAYAVPHQYPYAGLYGQQPANQVIIRERYRDNDSDLALGMLAGAATGMALGSLFWVF

SEQ ID NO: 285 - DNA, 1856 bp, Homo sapien
gggagaaccgttcgcggaggaaaggcgaactagtgttgggatggccaccaactgggggagcctcttgcaggataaacagcagctagaggagctggcacggcaggccgtggaccgggccctggctgagggagtattgctgaggacctcacaggagcccacttcctcggaggtggtgagctatgccccattcacgctcttcccctcactggtccccagtgccctgctggagcaagcctatgctgtgcagatggacttcaacctgctagtggatgctgtcagccagaacgctgccttcctggagcaaactctttccagcaccatcaaacaggatgactttaccgctcgtctctttgacatccacaagcaagtcctaaaagagggcattgcccagactgtgttcctgggcctgaatcgctcagactacatgttccagcgcagcgcagatggctccccagccctgaaacagatcgaaatcaacaccatctctgccagctttgggggcctggcctcccggaccccagctgtgcaccgacatgttctcagtgtcctgagtaagaccaaagaagctggcaagatcctctctaataatcccagcaagggactggccctgggaattgccaaagcctgggagctctacggctcacccaatgctctggtgctactgattgctcaagagaaggaaagaaacatatttgaccagcgtgccatagagaatgagctactggccaggaacatccatgtgatccgacgaacatttgaagatatctctgaaaaggggtctctggaccaagaccgaaggctgtttgtggatggccaggaaattgctgtggtttacttccgggatggctacatgcctcgtcagtacagtctacagaattgggaagcacgtctactgctggagaggtcacatgctgccaagtgcccagacattgccacccagctggctgggactaagaaggtgcagcaggagctaagcaggccgggcatgctggagatgttgctccctggccagcctgaggctgtggcccgcctccgcgccacctttgctggcctctactcactggatgtgggtgaagaaggggaccaggccatcgccgaggcccttgctgcccctagccggtttgtgctaaagccccagagagagggtggaggtaacaacctatatggggaggaaatggtacaggccctgaaacagctgaaggacagtgaggagagggcctcctacatcctcatggagaagatcgaacctgagccttttgagaattgcctgctacggcctggcagccctgcccgagtggtccagtgcatttcagagctgggcatctttggggtctatgtcaggcaggaaaagacactcgtgatgaacaagcacgtggggcatctacttcgaaccaaagccatcgagcatgcagatggtggtgtggcagcgggagtggcagtcctggacaacccataccctgtgtgagggcacaaccaggccacgggaccttctatcctctgtatttgtcattcctctcctagccctcctgaggggtatcctcctaaagacctccaaagtttttatggaagggtaaatactggtaccttcccccagctttccatctgaggaccagaaaagttgtgtctcccttagatgagatctagacgcccccaaatccttgagatgtgggtatagctcagggtaagctgctctgaggtaaaggtccatgaaccctgccccactcctgtcagcccctcatcagccttttcagcaggttccagtgcctgacttgggataggactgagtggtaggaggagggggagtggaggggcatagcctttccctaattctgccttaaataaaactgcattgctgt

SEQ ID NO: 286 - protein, 474 aa, Homo sapien
MATNWGSLLQDKQQLEELARQAVDRALAEGVLLRTSQEPTSSEVVSYAPFTLFPSLVPSALLEQAYAVQMDFNLLVDAVSQNAAFLEQTLSSTIKQDDFTARLFDIHKQVLKEGIAQTVFLGLNRSDYMFQRSADGSPALKQIEINTISASFGGLASRTPAVHRHVLSVLSKTKEAGKILSNNPSKGLALGIAKAWELYGSPNALVLLIAQEKERNIFDQRAIENELLARNIHVIRRTFEDISEKGSLDQDRRLFVDGQEIAVVYFRDGYMPRQYSLQNWEARLLLERSHAAKCPDIATQLAGTKKVQQELSRPGMLEMLLPGQPEAVARLRATFAGLYSLDVGEEGDQAIAEALAAPSRFVLKPQREGGGNNLYGEEMVQALKQLKDSEERASYILMEKIEPEPFENCLLRPGSPARVVQCISELGIFGVYVRQEKTLVMNKHVGHLLRTKAIEHADGGVAAGVAVLDNPYPV

SEQ ID NO: 287 - DNA, 1842 bp, Homo sapien
cgatcagatcgatctaagatggcgactgtcgaaccggaaaccacccctactcctaatcccccgactacagaagaggagaaaacggaatctaatcaggaggttgctaacccagaacactatattaaacatcccctacagaacagatgggcactctggttttttaaaaatgataaaagcaaaacttggcaagcaaacctgcggctgatctccaagtttgatactgttgaagacttttgggctctgtacaaccatatccagttgtctagtaatttaatgcctggctgtgactactcactttttaaggatggtattgagcctatgtgggaagatgagaaaaacaaacggggaggacgatggctaattacattgaacaaacagcagagacgaagtgacctcgatcgcttttggctagagacacttctgtgccttattggagaatcttttgatgactacagtgatgatgtatgtggcgctgttgttaatgttagagctaaaggtgataagatagcaatatggactactgaatgtgaaaacagagaagctgttacacatatagggagggtatacaaggaaaggttaggacttcctccaaagatagtgattggttatcagtcccacgcagacacagctactaagagcggctccaccactaaaaataggtttgttgtttaagaagacaccttctgagtattctcataggagactgcgtcaagcaatcgagatttgggagctgaaccaaagcctcttcaaaaagcagagtggactgcatttaaatttgatttccatcttaatgttactcagatataagagaagtctcattcgcctttgtcttgtacttctgtgttcattttttttttttttttttggctagagtttccactatcccaatcaaagaattacagtacacatccccagaatccataaatgtgttcctggcccactctgtaatagttcagtagaattaccattaattacatacagattttacctatccacaatagtcagaaaacaacttggcatttctatactttacaggaaaaaaaattctgttgttccattttatgcagaagcatattttgctggtttgaaagattatgatgcatacagttttctagcaattttctttgtttctttttacagcattgtctttgctgtactcttgctgatggctgctagattttaatttatttgtttccctacttgataatattagtgattctgatttcagtttttcatttgttttgcttaaattttttttttttttttcctcatgtaacattggtgaaggatccaggaatatgacacaaaggtggaataaacattaattttgtgcattctttggtaattttttttgttttttgtaactacaaagctttgctacaaatttatgcatttcattcaaatcagtgatctatgtttgtgtgatttcctaaacataattgtggattataaaaaatgtaacatcataattacattcctaactagaattagtatgtctgtttttgtatctttatgctgtattttaacactttgtattacttaggttattttgctttggttaaaaatggctcaagtagaaaagcagtcccattcatattaagacagtgtacaaaactgtaaataaaatgtgtacagtgaattgtcttttagacaactagatttgtccttttatttctccatctttatagaaggaatttgtacttcttattgcaggcaagtctctatattatgtcctcttttgtggtgtcttccatgtgaacagcataagtttggagcactagtttgattattatgtttattacaatttttaataaattgaataggtagtatcatatatatgga

SEQ ID NO: 288 - protein, 217 aa, Homo sapien [sequence omitted]

SEQ ID NO: 289 - DNA, 253 bp, Homo sapien
ggcagttggtaagaactagattgcatgtacaaagacaggtttactaagtgctgtacagtggtcctgaggttacagttgaattagaaaaacgaaatgtacttacaggaaataagaaagcaaacctttcaaatgagagtgatgatttctttaaaaaaaatcagtttttttctctcaaataatgttctttatttcacgaaatcgtcaatcttaagcatgagcagggataaacaactcctagaaggaactcaattca

SEQ ID NO: 290 - DNA, 1396 bp, Homo sapien
gcgtaattaaaaggcggcggaagaaggtgggagggtcatgacgcagcgagtttcagtcgtgacttttctgggggcatcgcggcgtccccttttttttgcctttaaagtaaaacgtcgccccgacgcaccccccgcgtatttcggggggcggaggcggcgggccacggcgcgaagaggggcggtgctgacgccggccggtcacgtgggcgtgttgtgggggggaggggcgccgccgcgcggtcggttccgggcggttgggagcgcgcgagctagcgagcgagaggcagccgcgcccgccgccgcccctgctctgtatgccgctctctcccggcgcggccgccgccgatcacagcagcaggagccaccgccgccgcggttgatgtggttgggccggggctgaggaggccgccaagatgccgcagtccaagtcccggaagatcgcgatcctgggctaccggtctgtggggaaatcctcattgacgattcaatttgttgaaggccaatttgtggactcctacgatccaaccatagaaaacacttttacaaagttgatcacagtaaatggacaagaatatcatcttcaacttgtagacacagccgggcaagatgaatattctatctttcctcagacatactccatagatattaatggctatattcttgtgtattctgttacatcaatcaaaagttttgaagtgattaaagttatccatggcaaattgttggatatggtggggaaagtacaaatacctattatgttggttgggaataagaaagacctgcatatggaaagggtgatcagttatgaagaagggaaagctttggcagaatcttggaatgcagcttttttggaatcttctgctaaagaaaatcagactgctgtggatgtttttcgaaggataattttggaggcagaaaaaatggacggggcagcttcacaaggcaagtcttcatgctcggtgatgtgattctgctgcaaagcctgaggacactgggaatatattctacctgaagaagcaaactgcccgttctccttgaagataaactatgcttcttttttcttctgttaacctgaaagatatcatttgggtcagagctcccctcccttcagattatgttaactctgagtctgtccaaatgagttcacttccattttcaaattttaagcaatcatattttcaatttatatattgtatttcttaatattatgaccaagaattttatcggcattaatttttcagtgtagtttgttgtttaaaataatgtaatcatcaaaatgatgcatattgttacactactattaactaggcttcagtatatcagtgtttatttcattgtgttaaatgtatacttgtaaataaaatagctgcaaacctcaaaaaaaaaaaaaaaaaaa

SEQ ID NO: 291 - protein, 184 aa, Homo sapien
MPQSKSRKIAILGYRSVGKSSLTIQFVEGQFVDSYDPTIENTFTKLITVNGQEYHLQLVDTAGQDEYSIFPQTYSIDINGYILVYSVTSIKSFEVIKVIHGKLLDMVGKVQIPIMLVGNKKDLHMERVISYEEGKALAESWNAAFLESSAKENQTAVDVFRRIILEAEKMDGAASQGKSSCSVM

SEQ ID NO: 292 - DNA, 2447 bp, Homo sapien
cccggcaaccacgagcccagccaatcagcgccccggactgcaccagagccatggtcggcagaagagcactgatcgtactggctcactcagagaggacctccttcaactatgccatgaaggaggctgctgcagcggctttgaagaagaaaggatgggaggtggtggagtcggacctctatgccatgaacttcaatcccatcatttccagaaaggacatcacaggtaaactgaaggaccctgcgaactttcagtatcctgccgagtctgttctggcttataaagaaggccatctgagcccagatattgtggctgaacaaaagaagctggaagccgcagaccttgtgatattccagttccccctgcagtggtttggagtccctgccattctgaaaggctggtttgagcgagtgttcataggagagtttgcttacacttacgctgccatgtatgacaaaggacccttccggagtaagaaggcagtgctttccatcaccactggtggcagtggctccatgtactctctgcaagggatccacggggacatgaatgtcattctctggccaattcagagtggcattctgcatttctgtggcttccaagtcttagaacctcaactgacatatagcattgggcacactccagcagacgcccgaattcaaatcctggaaggatggaagaaacgcctggagaatatttgggatgagacaccactgtattttgctccaagcagcctctttgacctaaacttccaggcaggattcttaatgaaaaaagaggtacaggatgaggagaaaaacaagaaatttggcctttctgtgggccatcacttgggcaagtccatcccaactgacaaccagatcaaagctagaaaatgagattccttagcctggatttccttctaacatgttatcaaatctgggtatctttccaggcttccctgacttgctttagtttttaagatttgtgtttttctttttccacaaggaataaatgagagggaatcgaccgtattcgtgcatttttggatgcatttttaactgattcttatgattactatcatggcatataaccaaaatccgactgggctcaagaggccacttagggaaagatgtagaaagatgctagaaaaatgttctttaaaggcatctacacaatttaattcctctttttagggtcaaagtttagggtacagttggctaggtatcattcaactctccaatgttctattaatcacctctctgtagtttatggtcagaagggaattgctcagagaaggtaaaagactgaatctacctgcctaagggacttaacttgtttggtagttagccatctaatgcttgtttatgatatttcttgctttcaattacaaagcagttactaatatgcctagcacaagtaccactcttggtcagcttttgttgtttatatacagtacacagataccttgaaaggaagagctaataaatctcttctttgctgcagtcatctactttttttttaattaaaaaaaattttttttgaagcagtcttgctctgttacccaggctggagtgcagtggtgtgatctcggctcactgcaacctctgcctcccaggttccagcaattctcctgcctcagcctccctagtagctgggatgacaggcgcctgccatcatgcctgactaatttttgtatttttagtagagacggcgtttcaccatgttggccaggctggtctcaaactcctgacctcaggtgatccgcctacctcagcctcccaaagtgctgggattacaggcgtgatccaccacacctggcccttgcaatcttctactttaaggtttgcagagataaaccaataaatccacaccgtacatctgcaatatgaattccaagaaaggaaatagtaccttcaatacttaaaaatagtcttccacaaaaaatactttatttctgatctatacaaattttcagaaggttattttctttatcattgctaaactgatgacttaccatgggatggggtccagtcccatgaccttggggtacaattgtaaacctagagttttatcaactttggtgaacagttttggcataatagtcaatttctacttctggaagtcatctcattccactgttggtattatataattcaaggagaatatgataaaacactgccctcttgtggtgcattgaaagaagagatgagaaatgatgaaaaggttgcctgaaaaatgggagacagcctcttacttgccaagaaaatgaagggattggaccgagctggaaaacctcctttaccagatgctgactggcactggtggtttttgctctcgacatatccacaatagctgacggctgggtgtttcagtttgcaaaatattttgttgccttcatcttcactgcaattttgtgtaaatttctcaaagatctaattaaataaataaaattcatttctacagactca

SEQ ID NO: 293 - protein, 274 aa, Homo sapien
MVGRRALIVLAHSERTSFNYAMKEAAAAALKKKGWEVVESDLYAMNFNPIISRKDITGKLKDPANFQYPAESVLAYKEGHLSPDIVAEQKKLEAADLVIFQFPLQWFGVPAILKGWFERVFIGEFAYTYAAMYDKGPFRSKKAVLSITTGGSGSMYSLQGIHGDMNVILWPIQSGILHFCGFQVLEPQLTYSIGHTPADARIQILEGWKKRLENIWDETPLYFAPSSLFDLNFQAGFLMKKEVQDEEKNKKFGLSVGHHLGKSIPTDNQIKARK

SEQ ID NO: 294 - DNA, 793 bp, Homo sapien
tgcgccacgatgtccggggagtcagccaggagcttggggaagggaagcgcgcccccggggccggtcccggagggctcgatccgcatctacagcatgaggttctgcccgtttgctgagaggacgcgtctagtcctgaaggccaagggaatcaggcatgaagtcatcaatatcaacctgaaaaataagcctgagtggttctttaagaaaaatccctttggtctggtgccagttctggaaaacagtcagggtcagctgatctacgagtctgccatcacctgtgagtacctggatgaagcatacccagggaagaagctgttgccggatgacccctatgagaaagcttgccagaagatgatcttagagttgttttctaaggtgccatccttggtaggaagctttattagaagccaaaataaagaagactatgctggcctaaaagaagaatttcgtaaagaatttaccaagctagaggaggttctgactaataagaagacgaccttctttggtggcaattctatctctatgattgattacctcatctggccctggtttgaacggctggaagcaatgaagttaaatgagtgtgtagaccacactccaaaactgaaactgtggatggcagccatgaaggaagatcccacagtctcagccctgcttactagtgagaaagactggcaaggtttcctagagctctacttacagaacagccctgaggcctgtgactatgggctctgaagggggcaggagtcagcaataaagctatgtctgatattttccttcagtaaaaaaaaaa

SEQ ID NO: 295 - protein, 241 aa, Homo sapien
MSGESARSLGKGSAPPGPVPEGSIRIYSMRFCPFAERTRLVLKAKGIRHEVININLKNKPEWFFKKNPFGLVPVLENSQGQLIYESAITCEYLDEAYPGKKLLPDDPYEKACQKMILELFSKVPSLVGSFIRSQNKEDYAGLKEEFRKEFTKLEEVLTNKKTTFFGGNSISMIDYLIWPWFERLEAMKLNECVDHTPKLKLWMAAMKEDPTVSALLTSEKDWQGFLELYLQNSPEACDYGL

SEQ ID NO: 296 - DNA, 2870 bp, Homo sapien
ggcctgggtggcgaattcggcacgaggctcgccgctcgctatggcgtcgctcaccgtgaaggcctaccttctgggcaaggaggacgcggcgcgcgagattcgccgcttcagcttctgctgcagccccgagcctgaggcggaagccgaggctgcggcgggtccgggaccctgcgagcggctgctgagccgggtggccgccctgttccccgcgctgcggcctggcggcttccaggcgcactaccgcgatgaggacggggacttggttgccttttccagtgacgaggaattgacaatggccatgtcctacgtgaaggatgacatcttccgaatctacattaaagagaaaaaagagtgccggcgggaccaccgcccaccgtgtgctcaggaggcgccccgcaacatggtgcaccccaatgtgatctgcgatggctgcaatgggcctgtggtaggaacccgctacaagtgcagcgtctgcccagactacgacttgtgtagcgtctgcgagggaaagggcttgcaccgggggcacaccaagctcgcattccccagccccttcgggcacctgtctgagggcttctcgcacagccgctggctccggaaggtgaaacacggacacttcgggtggccaggatgggaaatgggtccaccaggaaactggagcccacgtcctcctcgtgcaggggaggcccgccctggccccacggcagaatcagcttctggtccatcggaggatccgagtgtgaatttcctgaagaacgttggggagagtgtggcagctgcccttagccctctgggcattgaagttgatatcgatgtggagcacggagggaaaagaagccgcctgacccccgtctctccagagagttccagcacagaggagaagagcagctcacagccaagcagctgctgctctgatcccagcaagccgggtgggaatgttgagggcgccacgcagtctctggcggagcagatgagaaagatcgccttggagtccgaggggcgccctgaggaacagatggagtcggataactgttcaggaggagatgatgactggacccatctgtcttcaaaagaagtggacccgtctacaggtgaactccagtccctacagatgccagaatccgaagggccaagctctctggacccctcccaggagggacccacagggctgaaggaagctgccttgtacccacatctcccgccagaggctgacccgcggctgattgagtccctctcccagatgctgtccatgggcttctctgatgaaggcggctggctcaccaggctcctgcagaccaagaactatgacatcggagcggctctggacaccatccagtattcaaagcatcccccgccgttgtgaccacttttgcccacctcttctgcgtgcccctcttctgtctcatagttgtgttaagcttgcgtagaattgcaggtctctgtacaggccagtttctctgccttcttccaggatcaggggttagggtgcaagaagccatttagggcagcaaaacaagtgacatgaagggagggtccctgtgtgtgtgtgtgtgctgatgtttcctgggtgccctggctccttgcagcagggctgggcctgcgagacccaaggctcactgcagcgcgctcctgacccctccctgcaggggctacgttagcagcccagcacatagcttgcctaatggctttcactttctcttttgttttaaatgactcataggtccctgacatttagttgattattttctgctacagacctggtacactctgattttagataaagtaagcctaggtgttgtcagcaggcaggctggggaggccagtgttgtgggcttcctgctgggactgagaaggctcacgaagggcatccgcaatgttggtttcactgagagctgcctcctggtctcttcaccactgtagttctctcatttccaaaccatcagctgcttttaaaataagatctctttgtagccatcctgttaaatttgtaaacaatctaattaaatggcatcagcactttaaccaatgacgtttgcatagagagaaatgattgacagtaagtttattgttaatggttcttacagagtatctttaaaagtgccttaggggaaccctgtccctcctaacaagtgtatctcgattaataacctgccagtcccagatcacacatcatcatcgaagtcttccccagttataaagaggtcacatagtcgtgtgggtcgaggattctgtgcctccaggaccaggggcccaccctctgcccagggagtccttgcgtcccatgaggtcttcccgcaaggcctctcagacccagatgtgacggggtgtgtggcccgaggaagctggacagcggcagtgggcctgctgaggccttctcttgaggcctgtgctctgggggtcccttgcttagcctgtgctggaccagctggcctggggtccctctgaagagaccttggctgctcactgtccacatgtgaactttttctaggtggcaggacaaatcgcgcccatttagaggatgtggctgtaacctgctggatgggactccatagctccttcccaggacccctcagctccccggcactgcagtctgcagagttctcctggaggcaggggctgctgccttgtttcaccttccatgtcaggccagcctgtccctgaaagagaagatggccatgccctccatttgtaagaacaatgccagggcccaggaggaccgcctgccctgcctgggccttggctgggcctctggttctgacactttctgctggaagctgtcaggctgggacaggctttgattttgagggttagcaagacaaagcaaataaatgccttccacctcaccgcaaaaaaaaaaaaaaaaaaaaaaa

SEQ ID NO: 297 - protein, 440 aa, Homo sapien
MASLTVKAYLLGKEDAAREIRRFSFCCSPEPEAEAEAAAGPGPCERLLSRVAALFPALRPGGFQAHYRDEDGDLVAFSSDEELTMAMSYVKDDIFRIYIKEKKECRRDHRPPCAQEAPRNMVHPNVICDGCNGPVVGTRYKCSVCPDYDLCSVCEGKGLHRGHTKLAFPSPFGHLSEGFSHSRWLRKVKHGHFGWPGWEMGPPGNWSPRPPRAGEARPGPTAESASGPSEDPSVNFLKNVGESVAAALSPLGIEVDIDVEHGGKRSRLTPVSPESSSTEEKSSSQPSSCCSDPSKPGGNVEGATQSLAEQMRKIALESEGRPEEQMESDNCSGGDDDWTHLSSKEVDPSTGELQSLQMPESEGPSSLDPSQEGPTGLKEAALYPHLPPEADPRLIESLSQMLSMGFSDEGGWLTRLLQTKNYDIGAALDTIQYSKHPPPL

SEQ ID NO: 298 - DNA, 1797 bp, Homo sapien
ccagcagggagctgggagctgggggaaacgacgccaggaaagctatcgcgccagagagggcgacgggggctcgggaagcctgacagggcttttgcgcacagctgccggctggctgctacccgcccgcgccagcccccgagaacgcgcgaccaggcacccagtccggtcaccgcagcggagagctcgccgctcgctgcagcgaggcccggagcggccccgcagggaccctccccagaccgcctgggccgcccggatgtgcactaaaatggaacagcccttctaccacgacgactcatacacagctacgggatacggccgggcccctggtggcctctctctacacgactacaaactcctgaaaccgagcctggcggtcaacctggccgacccctaccggagtctcaaagcgcctggggctcgcggacccggcccagagggcggcggtggcggcagctacttttctggtcagggctcggacaccggcgcgtctctcaagctcgcctcttcggagctggaacgcctgattgtccccaacagcaacggcgtgatcacgacgacgcctacacccccgggacagtacttttacccccgcgggggtggcagcggtggaggtgcagggggcgcagggggcggcgtcaccgaggagcaggagggcttcgccgacggctttgtcaaagccctggacgatctgcacaagatgaaccacgtgacaccccccaacgtgtccctgggcgctaccggggggcccccggctgggcccgggggcgtctacgccggcccggagccacctcccgtttacaccaacctcagcagctactccccagcctctgcgtcctcgggaggcgccggggctgccgtcgggaccgggagctcgtacccgacgaccaccatcagctacctcccacacgcgccgcccttcgccggtggccacccggcgcagctgggcttgggccgcggcgcctccaccttcaaggaggaaccgcagaccgtgccggaggcgcgcagccgggacgccacgccgccggtgtcccccatcaacatggaagaccaagagcgcatcaaagtggagcgcaagcggctgcggaaccggctggcggccaccaagtgccggaagcggaagctggagcgcatcgcgcgcctggaggacaaggtgaagacgctcaaggccgagaacgcggggctgtcgagtaccgccggcctcctccgggagcaggtggcccagctcaaacagaaggtcatgacccacgtcagcaacggctgtcagctgctgcttggggtcaagggacacgccttctgaacgtcccctgcccctttacggacaccccctcgcttggacggctgggcacacgcctcccactggggtccagggagcaggcggtgggcacccaccctgggacctaggggcgccgcaaaccacactggactccggcccccctaccctgcgcccagtccttccacctcgacgtttacaagcccccccttccacttttttttgtatgttttttttctgctggaaacagactcgattcatattgaatataatatatttgtgtatttaacagggaggggaagagggggcgatcgcggcggagctggccccgccgcctggtactcaagcccgcggggacattgggaaggggacccccgccccctgccctcccctctctgcaccgtactgtggaaaagaaacacgcacttagtctctaaagagtttattttaagacgtgtttgtgtttgtgtgtgtttgttctttttattgaatctatttaagtaaaaaaaaaattggttctttattaa

SEQ ID NO: 299 - protein, 347 aa, Homo sapien
MCTKMEQPFYHDDSYTATGYGRAPGGLSLHDYKLLKPSLAVNLADPYRSLKAPGARGPGPEGGGGGSYFSGQGSDTGASLKLASSELERLIVPNSNGVITTTPTPPGQYFYPRGGGSGGGAGGAGGGVTEEQEGFADGFVKALDDLHKMNHVTPPNVSLGATGGPPAGPGGVYAGPEPPPVYTNLSSYSPASASSGGAGAAVGTGSSYPTTTISYLPHAPPFAGGHPAQLGLGRGASTFKEEPQTVPEARSRDATPPVSPINMEDQERIKVERKRLRNRLAATKCRKRKLERIARLEDKVKTLKAENAGLSSTAGLLREQVAQLKQKVMTHVSNGCQLLLGVKGHAF

SEQ ID NO: 300 - DNA, 1700 bp, Homo sapien
gcagccgcccgggcccccgccagcctccctcctcgcgtccctcggtgtcctccgcgggccggcgcgatgcggctgggcccgaggaccgcggcgttggggctgctgctgctgtgcgccgccgcggccggcgccggcaaggccgaggagctgcactacccgctgggcgagcgccgcagcgactacgaccgcgaggcgctgctgggcgtccaggaagatgtggatgaatatgttaaactcggccacgaagagcagcaaaaaagactgcaggcgatcataaagaaaatcgacttggactcagatggctttctcactgaaagtgaactcagttcatggattcagatgtcttttaagcattatgctatgcaagaagcaaaacaacagtttgttgaatatgataaaaacagtgatgatactgtgacttgggatgaatataacattcagatgtatgatcgtgtgattgactttgatgagaacactgctctggatgatgcagaagaggagtcctttaggaagcttcacttaaaggacaagaagcgatttgaaaaagctaaccaggattcaggtcccggtttgagtcttgaagaatttattgcttttgagcatcctgaagaagttgattatatgacggaatttgtcattcaagaagctttagaagaacatgacaaaaatggtgatggatttgttagtttggaagaatttcttggtgattacaggtgggatccaactgcaaatgaagatccagaatggatacttgttgagaaagacagattcgtgaatgattatgacaaagataacgatggcaggcttgatccccaagagctgttaccttgggtagtacctaataatcagggcattgcacaagaggaggcgcttcatctaattgatgaaatggatttgaatggtgacaaaaagctctctgaagaagagattctggaaaacccggacttgtttctcaccagtgaagccacagattatggcagacagctccatgatgactatttctatcatgatgagctttaatctccgagcctgtctcagtagagtactggctccttttataatttgttaccagctttacttttgtgataaaatattgatgttgtattttacactcttaagtcttaaccacagtcagaattatcttaatgtagaattataattttggctcttttaggaaaaaacaaaatctgatatttttccaaacgtattgagcaacaaaatattaatattgtgccatatgacaacaaagtctttcctaaatactccatctgtttagtactgtattgtggaatatttgagttctatttccagacttgaaaacatggaggattttagagatgcctgaacaatattatttaagtagtatgtgaccgagctataaattttttgtttttgttctaagtagatttaatttgggaactgacaggacaatgtttttaggtttagcattttgtttaaaaacctttaaagaaacctttagaaggacttagacctcacatattaatgttgagaagttctgcttaattttaaaatggtttctataaagggttttattgtatgaaatagaactttatatttttgcatatgtatagaggataattatatttaatgtataactatagcattatggtgagtggaatttgacattgtccaaacctttttcatttttgagtgattaaaaatgaaatgtcctttgtaaa

SEQ ID NO: 301 - protein, 317 aa, Homo sapien
MRLGPRTAALGLLLLCAAAAGAGKAEELHYPLGERRSDYDREALLGVQEDVDEYVKLGHEEQQKRLQAIIKKIDLDSDGFLTESELSSWIQMSFKHYAMQEAKQQFVEYDKNSDDTVTWDEYNIQMYDRVIDFDENTALDDAEEESFRKLHLKDKKRFEKANQDSGPGLSLEEFIAFEHPEEVDYMTEFVIQEALEEHDKNGDGFVSLEEFLGDYRWDPTANEDPEWILVEKDRFVNDYDKDNDGRLDPQELLPWVVPNNQGIAQEEALHLIDEMDLNGDKKLSEEEILENPDLFLTSEATDYGRQLHDDYFYHDEL

SEQ ID NO: 302 - DNA, 1591 bp, Homo sapien
tctgggcgcgcgcgacgtcagtttgagttctgtgttctccccgcccgtgtcccgcccgacccgcgcccgcgatgctggcgctgcgctgcggctcccgctggctcggcctgctctccgtcccgcgctccgtgccgctgcgcctccccgcggcccgcgcctgcagcaagggctccggcgacccgtcctcttcctcctcctccgggaacccgctcgtgtacctggacgtggacgccaacgggaagccgctcggccgcgtggtgctggagctgaaggcagatgtcgtcccaaagacagctgagaacttcagagccctgtgcactggtgagaagggcttcggctacaaaggctccaccttccacagggtgatcccttccttcatgtgccaggcgggcgacttcaccaaccacaatggcacaggcgggaagtccatctacggaagccgctttcctgacgagaactttacactgaagcacgtggggccaggtgtcctgtccatggctaatgctggtcctaacaccaacggctcccagttcttcatctgcaccataaagacagactggttggatggcaagcatgttgtgttcggtcacgtcaaagagggcatggacgtcgtgaagaaaatagaatctttcggctctaagagtgggaggacatccaagaagattgtcatcacagactgtggccagttgagctaatctgtggccagggtgctggcatggtggcagctgcaaatgtccatgcacccaggtggccgcgttgggctgtcagccaaggtgcctgaaacgatacgtgtgcccactccactgtcacagtgtgcctgaggaaggctgctagggatgttagacctcggccaggacccaccacattgcttcctaatacccacccttcctcacgacctcatttctgggcatctttgtggacatgatgtcacccaccccttgtcaagcattgcctgtgattgcccagcccagattcatctgtgccttggacatggtgatggtgatgggttgccatccaagtgaaagtcttttccttgaccaagggggacagtcagttttgcaaaaggactctaatacctgtttaatattgtcttcctaattgggataatttaattaacaagattgactagaagtgaaactgcaacactaacttccccgtgctgtggtgtgacctgagttggtgacacaggccacagaccccagagcttggcttttgaaacacaactcagggcttttgtgaaggttcccccgctgagatctttcctcctggttactgtgaagcctgttggtttgctgctgtcgtttttgaggagggcccatgggggtaggagcagttgaacctgggaacaaacctcacttgagctgtgcctagacaatgtgaattcctgtgttgctaacagaagtggcctgtaagctcctgtgctccggagggaagcatttcctggtaggctttgatttttctgtgtgttaaagaaattcaatctactcatgatgtgttatgcataaaacatttctggaacatggatttgtgttcaccttaaatgtgaaaataaatcctattttctatggaaaaaaaaaaaaaaaaaaaaaaa

SEQ ID NO: 303 - protein, 207 aa, Homo sapien
MLALRCGSRWLGLLSVPRSVPLRLPAARACSKGSGDPSSSSSSGNPLVYLDVDANGKPLGRVVLELKADVVPKTAENFRALCTGEKGFGYKGSTFHRVIPSFMCQAGDFTNHNGTGGKSIYGSRFPDENFTLKHVGPGVLSMANAGPNTNGSQFFICTIKTDWLDGKHVVFGHVKEGMDVVKKIESFGSKSGRTSKKIVITDCGQLS

SEQ ID NO: 304 - DNA, 1591 bp, Homo sapien; identical to SEQ ID NO: 302

SEQ ID NO: 305 - protein, 207 aa, Homo sapien; identical to SEQ ID NO: 303

SEQ ID NO: 306 - DNA, 1550 bp, Homo sapien
tgccgccgtcccgcccgccagcgccccagcgaggaagcagcgcgcagcccgcggcccagcgcacccgcagcagcgcccgcagctcgtccgcgccatgttccaggcggccgagcgcccccaggagtgggccatggagggcccccgcgacgggctgaagaaggagcggctactggacgaccgccacgacagcggcctggactccatgaaagacgaggagtacgagcagatggtcaaggagctgcaggagatccgcctcgagccgcaggaggtgccgcgcggctcggagccctggaagcagcagctcaccgaggacggggactcgttcctgcacttggccatcatccatgaagaaaaggcactgaccatggaagtgatccgccaggtgaagggagacctggctttcctcaacttccagaacaacctgcagcagactccactccacttggctgtgatcaccaaccagccagaaattgctgaggcacttctgggagctggctgtgatcctgagctccgagactttcgaggaaatacccccctacaccttgcctgtgagcagggctgcctggccagcgtgggagtcctgactcagtcctgcaccaccccgcacctccactccatcctgaaggctaccaactacaatggccacacgtgtctacacttagcctctatccatggctacctgggcatcgtggagcttttggtgtccttgggtgctgatgtcaatgctcaggagccctgtaatggccggactgcccttcacctcgcagtggacctgcaaaatcctgacctggtgtcactcctgttgaagtgtggggctgatgtcaacagagttacctaccagggctattctccctaccagctcacctggggccgcccaagcacccggatacagcagcagctgggccagctgacactagaaaaccttcagatgctgccagagagtgaggatgaggagagctatgacacagagtcagagttcacggagttcacagaggacgagctgccctatgatgactgtgtgtttggaggccagcgtctgacgttatgagtgcaaaggggctgaaagaacatggacttgtatatttgtacaaaaaaaaagttttatttttctaaaaaaagaaaaaagaagaaaaaatttaaagggtgtacttatatccacactgcacactgcctagcccaaaacgtcttattgtggtaggatcagccctcattttgttgcttttgtgaactttttgtaggggacgagaaagatcattgaaattctgagaaaacttcttttaaacctcacctttgtggggtttttggagaaggttatcaaaaatttcatggaaggaccacattttatatttattgtgcttcgagtgactgaccccagtggtatcctgtgacatgtaacagccaggagtgttaagcgttcagtgatgtggggtgaaaagttactacctgtcaaggtttgtgttaccctcctgtaaatggtgtacataatgtattgttggtaattattttggtacttttatgatgtatatttattaaagagatttttacaaatg

SEQ ID NO: 307 - protein, 317 aa, Homo sapien
MFQAAERPQEWAMEGPRDGLKKERLLDDRHDSGLDSMKDEEYEQMVKELQEIRLEPQEVPRGSEPWKQQLTEDGDSFLHLAIIHEEKALTMEVIRQVKGDLAFLNFQNNLQQTPLHLAVITNQPEIAEALLGAGCDPELRDFRGNTPLHLACEQGCLASVGVLTQSCTTPHLHSILKATNYNGHTCLHLASIHGYLGIVELLVSLGADVNAQEPCNGRTALHLAVDLQNPDLVSLLLKCGADVNRVTYQGYSPYQLTWGRPSTRIQQQLGQLTLENLQMLPESEDEESYDTESEFTEFTEDELPYDDCVFGGQRLTL

SEQ ID NO: 308 - DNA, 2826 bp, Homo sapien
gtgtgcggacgcagttgcgtgaggggtttgtgctatcctcggtgctgtggtgcagagctagttcctctccagctcagccgcgtaggtttggacatatttgactcttttccccccaggttgaattgaccaaagcaatggtgatggagaagcctagtcccctgctggtcgggcgggaatttgtgagacagtattacacactgctgaaccaggccccagacatgctgcatagattttatggaaagaactcttcttatgtccatgggggattggattcaaatggaaagccagcagatgcagtctacggacagaaagaaatccacaggaaagtgatgtcacaaaacttcaccaactgccacaccaagattcgccatgttgatgctcatgccacgctaaatgatggtgtggtagtccaggtgatggggcttctctctaacaacaaccaggctttgaggagattcatgcaaacgtttgtccttgctcctgaggggtctgttgcaaataaattctatgttcacaatgatatcttcagataccaagatgaggtctttggtgggtttgtcactgagcctcaggaggagtctgaagaagaagtagaggaacctgaagaaagacagcaaacacctgaggtggtacctgatgattctggaactttctatgatcaggcagttgtcagtaatgacatggaagaacatttagaggagcctgttgctgaaccagagcctgatcctgaaccagaaccagaacaagaacctgtatctgaaatccaagaggaaaagcctgagccagtattagaagaaactgcccctgaggatgctcagaagagttcttctccagcacctgcagacatagctcagacagtacaggaagacttgaggacattttcttgggcatctgtgaccagtaagaatcttccacccagtggagctgttccagttactgggataccacctcatgttgttaaagtaccagcttcacagccccgtccagagtctaagcctgaatctcagattccaccacaaagacctcagcgggatcaaagagtgcgagaacaacgaataaatattcctccccaaaggggacccagaccaatccgtgaggctggtgagcaaggtgacattgaaccccgaagaatggtgagacaccctgacagtcaccaactcttcattggcaacctgcctcatgaagtggacaaatcagagcttaaagatttctttcaaagttatggaaacgtggtggagttgcgcattaacagtggtgggaaattacccaattttggttttgttgtgtttgatgattctgagcctgttcagaaagtccttagcaacaggcccatcatgttcagaggtgaggtccgtctgaatgtcgaagagaagaagactcgagctgccagggaaggcgaccgacgagataatcgccttcggggacctggaggccctcgaggtgggctgggtggtggaatgagaggccctccccgtggaggcatggtgcagaaaccaggatttggagtgggaagggggcttgcgccacggcagtgaatcttcatggatcttcatgcagccatacaaaccctggttccaacagaatggtgaattttcgacagcctttggtatcttggagtatgaccccagtctgttataaactgcttaagtttgtataattttactttttttgtgtgttaatggtgtgtgctccctctccctctcttccctttcctgacctttagtctttcacttccaattttgtggaatgatattttaggaataacggacttttaaagaagcaaaaaaaaaagactgaatttccttgcttactttgcatatacagactggattttttttttttttttacagccatttccccaaaggaatgtcttgcatattactgacatttggtatgtttcattcattggaatatttcttattttctacgtgtttgaaaagcctgtaagaaatacaggatttgataatattttgaaggcaggaaaaacccaaattgtttcttctttgagagtcatgactaccttctggtgtggagaaattgccattggaaaatttgacaattttgattctcactggtatgtttaaaaactgaataaaaggaatagaatttttttttgataaaggatcacaaaacaattctaaaacctaactgtttttaccattgaaatttaaattgtgataataggttttaaatgtctagaatgcaactgataggcttttcttgaactgttagtttttttgaagtagttttttcatgtttaatttgtatttgtaaaaaaacaaaaagcaaaaaaattcccaaaacccagataacaaccagagcaaaactgttgtgccttctatttatctttgatttcagtcttggcaattgtttaaaaaaaaaatctagatttgttttattaggttcagagtatgtggggaattatagaatccctctttcatcactttgtgtatgtcttttgttaacatatttgttatgccttattctaaaattgagtctcaaactggaatgcctttgaagacagatgcttctatagaggttctttgacctaaatagttcagcatttgtatttttattctggtatctaatcagattcctaatcatagcccgtaagaaggaatgttactttaatattggactttgctcatgtgctcgtgtccgcatttttttttttcttaaaatcatagccatatggtaaattttctattttgttatggttctcttttattgatgggcatgcagtgggtgttacttggaaatggccaatttttattaaaatatttctggaagaaaatccaaaaaaaaaaaaaaaaaaaaaaaaaaaaa

SEQ ID NO: 309 - protein, 466 aa, Homo sapien
MVMEKPSPLLVGREFVRQYYTLLNQAPDMLHRFYGKNSSYVHGGLDSNGKPADAVYGQKEIHRKVMSQNFTNCHTKIRHVDAHATLNDGVVVQVMGLLSNNNQALRRFMQTFVLAPEGSVANKFYVHNDIFRYQDEVFGGFVTEPQEESEEEVEEPEERQQTPEVVPDDSGTFYDQAVVSNDMEEHLEEPVAEPEPDPEPEPEQEPVSEIQEEKPEPVLEETAPEDAQKSSSPAPADIAQTVQEDLRTFSWASVTSKNLPPSGAVPVTGIPPHVVKVPASQPRPESKPESQIPPQRPQRDQRVREQRINIPPQRGPRPIREAGEQGDIEPRRMVRHPDSHQLFIGNLPHEVDKSELKDFFQSYGNVVELRINSGGKLPNFGFVVFDDSEPVQKVLSNRPIMFRGEVRLNVEEKKTRAAREGDRRDNRLRGPGGPRGGLGGGMRGPPRGGMVQKPGFGVGRGLAPRQ

SEQ ID NO: 310 - DNA, 1296 bp, Homo sapien
ccaagatggccgcccccgtggatctagagctgaagaaggccttcacagagcttcaagccaaagttattgacactcaacagaaggtgaagctcgcagacatacagattgaacagctaaacagaacgaaaaagcatgcacatcttacagatacagagatcatgactttggtagatgagactaacatgtatgaaggtgtaggaagaatgtttattcttcagtccaaggaagcaattcacagtcagctgttagagaagcagaaaatagcagaagaaaaaattaaagaactagaacagaaaaagtcctacctggagcgaagcgttaaggaagctgaggacaacatccgggagatgctgatggcacgaagggcccagtagggagcctctctgggaagctcttcctcctgcccctcccattcctggtgggggcagaggagtgtctgcagggaaacagcttctcctctgccccgatggatgctttatttggatggcctggcaacatcacattttctgcatcaccctgagccccatttgcttcccagccctggagtttttacccggctttgcctgccacctctgcccaggacactcttccctctcgggatgtgtgatgaactcccaggagagggaagatgggagccagggcaagataggaagctctgcctgagctttccactaggcacgccagccagaccaataaaaagcgtctgtcccactctgctaagcctggttttcttgagcagagggatggaacagagggtgagagaggcagtggccgtctccacctcagctcctgctccctctgcatcagagcccttcctttcttgggggatgggccttgccctcttctcttttcccttcctgtacctttgactaacgctcagcttccgggcctgcatgcagtagacagaagaggaagaaagaacagatgttcacagctgaatctcagtgaacagaatagcagtccctggatggcagtctgcctaaagattcctttccctgccttctcccatacattccaaaaggaagttcaacagtaagcagcacctccaagactgtctccttttggccaatatcataagatggacgccataatcctgaggcctcctagaggctgagggggcaacggtgtgatccagctggctcatcccagcccaggtgggccaattattcaattttcaagaattttgttgcaagccagttgtcaaacacagccattataattatgtaaatttgcaaattatgttaaaaacaaggacaataaatattcaaaatgcatccctaaaaaaaaaaaaaaaaa

SEQ ID NO: 311 - protein, 122 aa, Homo sapien
MAAPVDLELKKAFTELQAKVIDTQQKVKLADIQIEQLNRTKKHAHLTDTEIMTLVDETNMYEGVGRMFILQSKEAIHSQLLEKQKIAEEKIKELEQKKSYLERSVKEAEDNIREMLMARRAQ

SEQ ID NO: 312 - DNA, 1769 bp, Homo sapien
gaattcgggcggggtttgtactatcctcggtgctgtggtgcagagctagttcctctccagctcagccgcgtaggtttggacatatttactcttttccccccaggttgaattgaccaaagcaatggtgatggagaagcctagtcccctgctggtcgggcgggaatttgtgagacagtattacacactgctgaaccaggccccagacatgctgcatagattttatggaaagaactcttcttatgtccatgggggattggattcaaatggaaagccagcagatgcagtctacggacagaaagaaatccacaggaaagtgatgtcacaaaacttcaccaactgccacaccaagattcgccatgttgatgctcatgccacgctaaatgatggtgtggtagtccaggtgatggggcttctctctaacaacaaccaggctttgaggagattcatgcaaacgtttgtccttgctcctgaggggtctgttgcaaataaattctatgttcacaatgatatcttcagataccaagatgaggtctttggtgggtttgtcactgagcctcaggaggagtctgaagaagaagtagaggaacctgaagaaagacagcaaacacctgaggtggtacctgatgattctggaactttctatgatcaggcagttgtcagtaatgacatggaagaacatttagaggagcctgttgctgaaccagagcctgatcctgaaccagaaccagaacaagaacctgtatctgaaatccaagaggaaaagcctgagccagtattagaagaaactgcccctgaggatgctcagaagagttcttctccagcacctgcagacatagctcagacagtacaggaagacttgaggacattttcttgggcatctgtgaccagtaagaatcttccacccagtggagctgttccagttactgggataccacctcatgttgttaaagtaccagcttcacagccccgtccagagtctaagcctgaatctcagattccaccacaaagacctcagcgggatcaaagagtgcgagaacaacgaataaatattcctccccaaaggggacccagaccaatccgtgaggctggtgagcaaggtgacattgaaccccgaagaatggtgagacaccctgacagtcaccaactcttcattggcaacctgcctcatgaagtggacaaatcagagcttaaagatttctttcaaagttatggaaacgtggtggagttgcgcattaacagtggtgggaaattacccaattttggttttgttgtgtttgatgattctgagcctgttcagaaagtccttagcaacaggcccatcatgttcagaggtgaggtccgtctgaatgtcgaagagaagaagactcgagctgccagggaaggcgaccgacgagataatcgccttcggggacctggaggccctcgaggtgggctgggtggtggaatgagaggccctccccgtggaggcatggtgcagaaaccaggatttggagtgggaagggggcttgcgccacggcagtaatcttcatggatcttcatgcagccatacaaaccctggttccaacagaatggtgaattttcgacagcctttggtatcttggagtatgaccccagtctgttataaactgcttaagtttgtataattttactttttttgtgtgttaatggtgtgtgctccctctccctctcttccctttcctgacctttagtctttcacttccaattttgtggaatgatattttaggaataacggacttttacccgaattc

SEQ ID NO: 313 - protein, 466 aa, Homo sapien; identical to SEQ ID NO: 309

SEQ ID NO: 314 - DNA, 4017 bp, Homo sapien
tttccttccctccctcggtcttccttcgcacgctgtttggtgattgtggcgctcgcgacagacagggaggcggtggcagaggacacttgtcatggccgcctctaaacctgtggaggcagcggtggtcgcagccgctgtaccgagctccgggagtggggtgggcggcggcgggactgcgggcccgggcacgggggggctgccgcgatggcagctggctctggcggtcggggcacccctgctgctgggcgcgggtgccatatacctgtggagtcggcagcaacggcgccgggaggccagaggccggggcgacgccagcggcctgaagcgcaacagcgaacggaagaccccggagggcagggccagtccggccccgggcagcggacaccctgaaggtcccggtgctcacttggacatgaactctcttgatagagcccaagcagccaagaataaaggcaataaatattttaaagcaggaaaatatgaacaagctattcagtgctatactgaggctattagcttgtgccctacagagaagaatgttgacctttctacattttatcaaaacagagctgctgcctttgaacagttgcaaaaatggaaagaagtggcacaagactgtacaaaagctgttgaacttaatcccaaatatgtgaaagctctctttagacgtgcaaaagcccatgagaagctagacaataagaaggaatgtttagaagatgtcactgctgtgtgtatattagaagggttccaaaatcaacaaagcatgctgttagccgataaagttcttaaactccttggaaaagagaaagccaaagaaaaatataagaatcgtgaacctctgatgccatctccacagtttatcaaatcttacttcagttctttcacggatgatatcatttcccagcccatgcttaaaggagagaaatctgatgaagataaagacaaggaaggggaggctttagaagtgaaagaaaattctggatacttaaaggccaaacagtatatggaagaagaaaactacgataaaatcataagtgaatgctcaaaagaaatagatgctgaaggcaaatacatggcagaagcattgctactacgagctaccttctacctgcttattggcaatgccaatgcagccaaaccagatttagataaagtcatcagtttgaaagaagctaatgtgaagcttcgagcaaatgctctcatcaaaagaggcagcatgtacatgcaacagcagcagcctttgctgtccactcaagattttaacatggctgctgacatcgatcctcagaatgcagatgtttatcaccaccgaggacagctgaaaatactccttgatcaagttgaagaagcagtggcagattttgatgaatgtattaggttaagacctgagtctgctctggcacaagcacagaaatgttttgcattgtaccgccaggcatatacgggaaacaactcttcacaaatccaagcagctatgaaaggttttgaagaggtcataaagaaatttccaaggtgtgccgaaggctatgcactatacgcccaggcattaacagatcaacaacagtttggtaaagctgatgaaatgtatgataaatgtattgatttggaaccagataatgctacaacatatgttcataaaggtttacttcaacttcagtggaagcaagatctggatagaggtttggaacttatcagcaaggctattgaaattgacaataaatgtgattttgcctatgaaaccatgggaactattgaagtacaaagaggaaacatggagaaagccattgacatgttcaacaaagctattaacctggccaaatcggaaatggagatggcccatctgtattcactttgcgatgccgcccatgcccagacagaagttgcaaagaaatacggattaaaaccaccaacattataaaacagggggaaagcagactgaccctctttttaaaagtttaccccctcttcaactgaaccctaaagacactgtcatgaactgtgttgaatggtggaaatcagtatttctgtttgtggtgttgttatttgttacatctgtttcatgtctaggtgttgtgggtgtggctgttgaaggaagtttgcagtcttgcagcttttattccctgtgcaacaaaagattagaacatgttaaagggatttttaaataaagttgcaaagagtacaaatgataattggccatgcaaataaaaactgatttgttgattttttttttaaggggggttggcagttgattatgttctggatgattccgtctatatatgtgtgaataatgtaagtattttacagcatgttgatttttaaattaacgtagtaaatgctgtaaaatagatttatattcagttaaccgctttcagttgattttttgaaagaaacaaaggttaaatgggggattaaagtaaaattgagagaccctttaaaccattgtcagcatgcacaatgcctctgattctgcagttttagaaacttggtggcacttattaatcctcttggcccctttccactctaatggatagtgtacattcttcttaaagtccacaacagcagattttcttgcagtaaattatgcagatgcaaaatattctaattgatatatgtgttggaagactgagtattgatgggggagtggaccagacaaagaggtaagatgaaacagtagtgtgtttataattgtctgtgactattttctataataattagtactatttaatggtgagcttttaaaaatgtaggatagagggtacagtggcactgtatatactatttatagtctcagctactagggaggctgaggcaagaggcttgagaccaggagctcgaggctgtaatgtgccatgatgattgcacctgcgaatagccactgcactccagcctgggcaatatagcaagaccccatcctttaaaaaattttagaacttttttaaaatcaaagtgcagattgcttgtatgtaaaacccaaataaaggtagagtaagtgtgatatatgggagtattaaaatagcttaaaatttctcgtgaaggacatgtggctaaagggtcaaaaaggatgtaagacttggagccagagcatagtatttcctgaaataacaagtttagtgctttaactatggctacatgtgcttaaggaattttgagccacttatttttgaagatgctgaggacatgtagagtgctttttgtagtgagctaaccttgatctctaaggactaactacccaggtccaggtcttcactaggggtactgacagtgtttaagctttactccacctccttacttagaaatcactttacgatttatttccattttccacttttatagaccatccttttgcttatatgctagatttttctggtgagggaagggttgtgttcttcaggggtcttttgttttgaaatactcaggatggggagaggtttatttaagaacgaattataattatggtttacactgttgggagtaaaggagcatttttacaccccttaagggtgcttaattctgttgaaaccaaaaagatttgtctacaaatgctatcttttttagaaactattagaaatgactccctttcaaagtcaatctttggaaaatattgaggaggtcactaattagttggtgcagttaatataattcaagatgatttggatgatgggaagtttgagaccgctgcattttgtttttaaattatgcaccttctgataacccccaaatacagaaatgttctacatctctgaatgacctctgactttaaaaaagtttttatttgcatggctgtatttacattaacactgacattttcttctactcttctcccttctttcatcttggggttgggtagagaaacacaaaggaaactgaagcatgtgccattctatactgtcattccaaattctcatggactattgcctgttgtgaaaatgtttgaaactgcactgaaagctgcatctgtctgtatctttcttttgtaaatgacctcacatgtaaattcaccaaataaatattacattc

SEQ ID NO: 315 - protein, 608 aa, Homo sapien
MAASKPVEAAVVAAAVPSSGSGVGGGGTAGPGTGGLPRWQLALAVGAPLLLGAGAIYLWSRQQRRREARGRGDASGLKRNSERKTPEGRASPAPGSGHPEGPGAHLDMNSLDRAQAAKNKGNKYFKAGKYEQAIQCYTEAISLCPTEKNVDLSTFYQNRAAAFEQLQKWKEVAQDCTKAVELNPKYVKALFRRAKAHEKLDNKKECLEDVTAVCILEGFQNQQSMLLADKVLKLLGKEKAKEKYKNREPLMPSPQFIKSYFSSFTDDIISQPMLKGEKSDEDKDKEGEALEVKENSGYLKAKQYMEEENYDKIISECSKEIDAEGKYMAEALLLRATFYLLIGNANAAKPDLDKVISLKEANVKLRANALIKRGSMYMQQQQPLLSTQDFNMAADIDPQNADVYHHRGQLKILLDQVEEAVADFDECIRLRPESALAQAQKCFALYRQAYTGNNSSQIQAAMKGFEEVIKKFPRCAEGYALYAQALTDQQQFGKADEMYDKCIDLEPDNATTYVHKGLLQLQWKQDLDRGLELISKAIEIDNKCDFAYETMGTIEVQRGNMEKAIDMFNKAINLAKSEMEMAHLYSLCDAAHAQTEVAKKYGLKPPTL

SEQ ID NO: 316 - DNA, 691 bp, Homo sapien
ggcggaggcggggtttcagtggcttctggtgctctagggtgagctctgcccggctgcagggatggcggggaggggtaagctcatcgcagtgatcggagacgaggacacggtgactggtttcctgctgggcggcataggggagcttaacaagaaccgccatcccaatttcctggtggtggagaaggatacaaccatcaatgagatcgaagacactttccggcaatttctaaaccgggatgacattggcatcatcctcatcaaccagtacatcgcagagatggtgcggcatgccctggacgcccaccagcagtccatccccgctgtcctggagatcccctccaaggagcacccatatgacgccgccaaggactccatcctgcgcagggccaggggcatgttcactgccgaagacctgcgctaggggactcctcatagccctcagcccttccctcgtttccaggcctctccccaggcttgccatcagccttctttactttttgagcctctgatttccaattccctgctccttcccactccattaagaggctaggtgaggcgcttctaggttgctggggctctgctggttaaggaacaggaagcctgaccatctccctccactacctcttccctgtgctgttacacagtgtcattgttgatgttaaattaaagtcatattcttgcttctctccag

SEQ ID NO: 317 - protein, 119 aa, Homo sapien
MAGRGKLIAVIGDEDTVTGFLLGGIGELNKNRHPNFLVVEKDTTINEIEDTFRQFLNRDDIGIILINQYIAEMVRHALDAHQQSIPAVLEIPSKEHPYDAAKDSILRRARGMFTAEDLR

SEQ ID NO: 318 - DNA, 1746 bp, Homo sapien
gagcctgacttcagcgctcccactctcggccgacacccctcatggccaaccgttacaccatggatctgactgccatctacgagagcctcctgtcgctgagccctgacgtgcccgtgccatccgaccatggagggactgagtccagcccaggctggggctcctcgggaccctggagcctgagcccctccgactccagcccgtctggggtcacctcccgcctgcctggccgctccaccagcctagtggagggccgcagctgtggctgggtgcccccaccccctggcttcgcaccgctggctccccgcctgggccctgagctgtcaccctcacccacttcgcccactgcaacctccaccaccccctcgcgctacaagactgagctatgtcggaccttctcagagagtgggcgctgccgctacggggccaagtgccagtttgcccatggcctgggcgagctgcgccaggccaatcgccaccccaaatacaagacggaactctgtcacaagttctacctccagggccgctgcccctacggctctcgctgccacttcatccacaaccctagcgaagacctggcggccccgggccaccctcctgtgcttcgccagagcatcagcttctccggcctgccctctggccgccggacctcaccaccaccaccaggcctggccggcccttccctgtcctccagctccttctcgccctccagctccccaccaccacctggggaccttccactgtcaccctctgccttctctgctgcccctggcacccccctggctcgaagagaccccaccccagtctgttgcccctcctgccgaagggccactcctatcagcgtctgggggcccttgggtggcctggttcggaccccctctgtacagtccctgggatccgaccctgatgaatatgccagcagcggcagcagcctggggggctctgactctcccgtcttcgaggcgggagtttttgcaccaccccagcccgtggcagccccccggcgactccccatcttcaatcgcatctctgtttctgagtgacaaagtgactgcccggtcagatcagctggatctcagcggggagccacgtctcttgcactgtggtctctgcatggaccccagggctgtggggacttgggggacagtaatcaagtaatccccttttccagaatgcattaacccactcccctgacctcacgctggggcaggtccccaagtgtgcaagctcagtattcatgatggtgggggatggagtgtcttccgaggttcttgggggaaaaaaaattgtagcatatttaagggaggcaatgaaccctctcccccacctcttccctgcccaaatctgtctcctagaatcttatgtgctgtgaataataggccttcactgcccctccagtttttatagacctgaggttccagtgtctcctggtaactggaacctctcctgagggggaatcctggtgctcaaattaccctccaaaagcaagtagccaaagccgttgccaaaccccacccataaatcaatgggccctttatttatgacgactttatttattctaatatgattttatagtatttatatatattgggtcgtctgcttcccttgtatttttcttcctttttttgtaatattgaaaacgacgatataattattataagtagactataatatatttagtaatatatattattaccttaaaagtctatttttgtgttttgggcatttttaaataaacaatctgagtgt

SEQ ID NO: 319 - protein, 326 aa, Homo sapien
MDLTAIYESLLSLSPDVPVPSDHGGTESSPGWGSSGPWSLSPSDSSPSGVTSRLPGRSTSLVEGRSCGWVPPPPGFAPLAPRLGPELSPSPTSPTATSTTPSRYKTELCRTFSESGRCRYGAKCQFAHGLGELRQANRHPKYKTELCHKFYLQGRCPYGSRCHFIHNPSEDLAAPGHPPVLRQSISFSGLPSGRRTSPPPPGLAGPSLSSSSFSPSSSPPPPGDLPLSPSAFSAAPGTPLARRDPTPVCCPSCRRATPISVWGPLGGLVRTPSVQSLGSDPDEYASSGSSLGGSDSPVFEAGVFAPPQPVAAPRRLPIFNRISVSE

SEQ ID NO: 320 - DNA, 838 bp, Homo sapien
gcacgatgagctcaatcggcactgggtatgacctgtcagcctctacattctctcctgacggaagagtttttcaagttgaatatgctatgaaggctgtggaaaatagtagtacagctattggaatcagatgcaaagatggtgttgtctttggggtagaaaaattagtcctttctaaactttatgaagaaggttccaacaaaagactttttaatgttgatcggcatgttggaatggcagtagcaggtttgttggcagatgctcgttctttagcagacatagcaagagaagaagcttccaacttcagatctaactttggctacaacattccactaaaacatcttgcagacagagtggccatgtatgtgcatgcatatacactctacagtgctgttagaccttttggctgcagtttcatgttagggtcttacagtgtgaatgacggtgcgcaactctacatgattgacccatcaggtgtttcatacggttattggggctgtgccatcggcaaagccaggcaagctgcaaagacggaaatagagaagcttcagatgaaagaaatgacctgccgtgatatcgttaaagaagttgcaaaaataatttacatagtacatgacgaagttaaggataaagcttttgaactagaactcagctgggttggtgaattaactaatggaagacatgaaattgttccaaaagatataagagaagaagcagagaaatatgctaaggaatctctgaaggaagaagatgaatcagatgatgataatatgtaacatttactccagcatctattgtattttaaatttctactccagtccaatgtaactatttagccctg

SEQ ID NO: 321 - protein, 255 aa, Homo sapien
MSSIGTGYDLSASTFSPDGRVFQVEYAMKAVENSSTAIGIRCKDGVVFGVEKLVLSKLYEEGSNKRLFNVDRHVGMAVAGLLADARSLADIAREEASNFRSNFGYNIPLKHLADRVAMYVHAYTLYSAVRPFGCSFMLGSYSVNDGAQLYMIDPSGVSYGYWGCAIGKARQAAKTEIEKLQMKEMTCRDIVKEVAKIIYIVHDEVKDKAFELELSWVGELTNGRHEIVPKDIREEAEKYAKESLKEEDESDDDNM

SEQ ID NO: 322 - DNA, 1930 bp, Homo sapien
gcacgaggctccgcctcgcttgctcctgccgggcgtgcagggccccgccgccgccatgtcgggctcgttcgagctctcggtgcaggatctcaacgacctgctctcggacggcagcggctgctacagcctcccgagccagccctgcaacgaggtcaccccgcggatctacgtgggcaacgcgtctgtggctcaggacatccccaagctgcagaaactaggcatcacccatgtgctgaacgcggctgagggcaggtccttcatgcacgtcaacaccaatgccaacttctacaaggactccggcatcacatacctgggcatcaaggccaacgacacacaggagttcaacctcagcgcttactttgaaagggctgccgacttcattgaccaggctttggctcaaaagaatggccgggtgctcgtccactgccgggaaggttatagccgctccccaacgctagttatcgcctacctcatgatgcggcagaagatggacgtcaagtctgccctgagcatcgtgaggcagaaccgtgagatcggccccaacgatggcttcctggcccagctctgccagctcaatgacagactagccaaggaggggaagttgaaaccctagggcacccccaccgcctctgctcgagaggtccgtgggggaggccgtgggcaaaggtgtcccgagctgccatgtttaggaaacacactgtaccctgctcccagcatcacaaggcacttgtctacaagtgtgtcccaacacagtcctgggccactttccccaccctggggagcacataaagaagcttgccaaggggggcgtccttgctccccagttgtcctgtttctgtaacttatgatgtcttttccctgagatgggggctcagagggggaaggcctgtggcctgcatgcttcccgatggcccacggcaggaggtgtgtggaagtgtaaggcctaagatgctcacagaggtccctcatgacctcccttccccaactcccgaatcctctcttgagtgtggacctcaacaccttgagccctagtaaaggaactatgcaaatgcaggccactctccccaccacgtctgtgccccgcactgtccccacagccttccacaccctgtgcataggcagccctctcacgtcttgaggtccgaagctggggtgggggtgtccgtcagttattagtggatggagattcccacagcaaggctgcatttgaatgatttccttaggatgaatggtccctacacaaagaggccttgtgggcaaacctggagaaccctcctaaatccatagagttttcaaaatgtgaatctttggaagccttgagttcagaatctgctgctctggaatatttcccttcgatcttatctcagtcacttcgtttttgagaagagtgatgccttgggtatgctttttttttttcttttttagaaaacagggagttgaagtccaacctatttaaaaaccccaccatttggagaattacaagggttttgtcctgaattgtagtgttggcaagcccaagccactcgtgctaactgctttttgtctcggttgctattccaagaacagaaggaggaagttggccaattacagcgtgtgtgcatggatgtgtgtggggggcgtgcctctcagaaacgcggccagaagacaagcagggaagtgaaaggtcccaggcacacaccctgcccattgcaggtggctcttacagctctctggtgccagcacgggatccctgaagtgactcagccaggcagacatgagacatggcggagtgtccaaatggatcctttattggtggtagagcaaaaaaacccaaacacgataaacctttcaaaagactttctaaggatgatattggaatgcaccagccctcacatgtgtatgcacatttgccagaatataagagttttgttttaaaaaaaaaaaaaaaaaa

SEQ ID NO: 323 - protein, 185 aa, Homo sapien
MSGSFELSVQDLNDLLSDGSGCYSLPSQPCNEVTPRIYVGNASVAQDIPKLQKLGITHVLNAAEGRSFMHVNTNANFYKDSGITYLGIKANDTQEFNLSAYFERAADFIDQALAQKNGRVLVHCREGYSRSPTLVIAYLMMRQKMDVKSALSIVRQNREIGPNDGFLAQLCQLNDRLAKEGKLKP

SEQ ID NO: 324 - DNA, 2455 bp, Homo sapien
gaattcgggcgggcttcttcgctgccgacgtacgacgagtggccgggctcttgcgtctggtaacgcgctgtctctaacgccagcgccgtctcgcgcgcactgcgcacagaccacccgcagacgcccggcagtccgcaggcccaaacgcgcacgcgaccccgctctccgcaccgtacccggccgcctcggcatggcgccccgcagcgcccggcgacccctgctgctgctactgcctgttgctgctgctcggcctcatgcattgtcgtcagcagccatgtttatggtgaaaaatggcaacgggaccgcgtgcataatggccaacttctctgctgccttctcagtgaactacgacaccaagagtggccccaagaacatgacctttgacctgccatcagatgccacagtggtgctcaaccgcagctcctgtggaaaagagaacacttctgaccccagtctcgtgattgcttttggaagaggacatacactcactctcaatttcacgagaaatgcaacacgttacagcgttcagctcatgagttttgtttataacttgtcagacacacaccttttccccaatgcgagctccaaagaaatcaagactgtggaatctataactgacatcagggcagatatagataaaaaatacagatgtgttagtggcacccaggtccacatgaacaacgtgaccgtaacgctccatgatgccaccatccaggcgtacctttccaacagcagcttcagcaggggagagacacgctgtgaacaagacaggccttccccaaccacagcgccccctgcgccacccagcccctcgccctcacccgtgcccaagagcccctctgtggacaagtacaacgtgagcggcaccaacgggacctgcctgctggccagcatggggctgcagctgaacctcacctatgagaggaaggacaacacgacggtgacaaggcttctcaacatcaaccccaacaagacctcggccagcgggagctgcggcgcccacctggtgactctggagctgcacagcgagggcaccaccgtcctgctcttccagttcgggatgaatgcaagttctagccggtttttcctacaaggaatccagttgaatacaattcttcctgacgccagagaccctgcctttaaagctgccaacggctccctgcgagcgctgcaggccacagtcggcaattcctacaagtgcaacgcggaggagcacgtccgtgtcacgaaggcgttttcagtcaatatattcaaagtgtgggtccaggctttcaaggtggaaggtggccagtttggctctgtggaggagtgtctgctggacgagaacagcacgctgatccccatcgctgtgggtggtgccctggcggggctggtcctcatcgtcctcatcgcctacctcgtcggcaggaagaggagtcacgcaggctaccagactatctagcctggtgcacgcaggcacagcagctgcaggggcctctgttcctttctctgggcttagggtcctgtcgaaggggaggcacactttctgcaaacgtttctcaaatctgcttcatccaatgtgaagttcatcttgcagcatttactatgcacaacagagtaactatcgaaatgacggtgttaattttgctaactgggttaaatattttgctaactggttaaacattaatatttaccaaagtaggattttgagggtgggggtgctctctctgagggggtgggggtgccgctgtctctgaggggtgggggtgccgctgtctgaggggtgggggtgccgctctctctgagggggtgggggtgccgctttctctgagggggtgggggtgccgctctctctgagggggtgggggtgctgctctctccgaggggtggaatgccgctgtctctgaggggtgggggtgccgctctaaattggctccatatcattgagtttagggttctggtgtttggtttcttcattctttactgcactcagatttaagccttacaaagggaaacctctggccgtcacacgtaggacgcatgaaggtcactcgtgtgaggctgacatgctcacacattacaacagtagagagggaaaatcctaagacagaggaactccagagatgagtgtctggagcggcttcagttcagctttaaaggccaggacgcgcgacacgtggctggcggcctcgttccagtggcggcacgtccttggcgtctctaatgtctgcagctcaagggctggcacttttttaaatataaaaatggtgttatttttatttttttttgtaaagtgatttttggtcttctgttgacattcgggtgatcctgttctgcgctgtgtacaatgtgagatcggtgcgttctcctgatgttttgccgtggcttggggattgtacacgggaccagctcacgtaatgcattgcctgtaacaatgtaataaaaagcctctttctttcaaaaaaaccccgaattc

SEQ ID NO: 325 - protein, 416 aa, Homo sapien
MAPRSARRPLLLLLPVAAARPHALSSAAMFMVKNGNGTACIMANFSAAFSVNYDTKSGPKNMTFDLPSDATVVLNRSSCGKENTSDPSLVIAFGRGHTLTLNFTRNATRYSVQLMSFVYNLSDTHLFPNASSKEIKTVESITDIRADIDKKYRCVSGTQVHMNNVTVTLHDATIQAYLSNSSFSRGETRCEQDRPSPTTAPPAPPSPSPSPVPKSPSVDKYNVSGTNGTCLLASMGLQLNLTYERKDNTTVTRLLNINPNKTSASGSCGAHLVTLELHSEGTTVLLFQFGMNASSSRFFLQGIQLNTILPDARDPAFKAANGSLRALQATVGNSYKCNAEEHVRVTKAFSVNIFKVWVQAFKVEGGQFGSVEECLLDENSTLIPIAVGGALAGLVLIVLIAYLVGRKRSHAGYQTI

SEQ ID NO: 326 - DNA, 4318 bp, Homo sapien
aagcggctcgggctgcggctggctcagagtgccgcggggggcgtggggcggtgctgaggagctgaagccgtggccagctcgactccggacagtccagcgagcagcacggcgggaaccggcagccggagcagtcccggagcagaagcagcagcagcagcagcagccctcgccgttcgcggagcgcagccgagccggccatggcgttgtcgatgccgctgaatgggctgaaggaggaggacaaagagcccctcatcgagctcttcgtcaaggctggcagtgatggtgaaagcataggaaactgccccttttcccagaggctcttcatgattctttggctcaaaggagttgtatttagtgtgacgactgttgacctgaaaaggaagccagcagacctgcagaacttggctcccgggacccacccaccatttataactttcaacagtgaagtcaaaacggatgtaaataagattgaggaatttcttgaagaggtcttatgccctcccaagtacttaaagctttcaccaaaacacccagaatcaaatactgctggaatggacatctttgccaaattctctgcatatatcaagaattcaaggccagaggctaatgaagcactggagaggggtctcctgaaaaccctgcagaaactggatgaatatctgaattctcctctccctgatgaaattgatgaaaatagtatggaggacataaagttttctacacgtaaatttctggatggcaatgaaatgacattagctgattgcaacctgctgcccaaactgcatattgtcaaggtggtggccaaaaaatatcgcaactttgatattccaaaagaaatgactggcatctggagatacctaactaatgcatacagtagggacgagttcaccaatacctgtcccagtgataaggaggttgaaatagcatatagtgatgtagccaaaagactcaccaagtaaaatcgcgtttgtaaaagagatgtcttcatgtcttcccctaagaatacgcttttcctaacaggctactccttcctgtagagcagaaattgtattttgcacgaacatgcagttattgaagattaggatcaaggatagacaaggtatagtagttatcttaaaatatacactcctaagcagtattattttaaaatcctttaccctggctacctcccctacccgggttcccctctctttaatttggagacactccaccacaaacttttcactttagaggtagcttgccatctctcaggagccctcaccattgtgtccattcactgtgtatagatggcagaacttttgaggtgcaatgtttaattgttaaaaatagtagccacgactttatcaggcagccccaaactggtgcataatgcatggtacaagaaatatttatgtattttttggaattttgtaatatttagtaggagtatatgaaaggattgctactgtatcagaaatattgtttcaatttagtctatcctggatatgtactaacgaatattaccaccagagaagagagctttctacaaaagtcactacagattttgctatattgctttgtagatagatttttacttttgcctaaaagcatttatccttcataccaattgtaacatctgacaccatgtagaagctaaaagtttagagggagtgagcgttttctcaagaccttcctcaagcattttatctttagaagagaaactgatgggcacctgatactctgtctaaatacgtttgttatatgtgttttgccctgtgccattcatttggaactttattgcattctttattttaaaaagcttgtttttacgtaatcatagagcttgctatttgtacatctgttgagcaacactacataactgatttttagttgacttagctatagcagtacaatgattagtaatgtaaaaattaacacagaaattaacctaaggaatgaagggtgggtttgtcaaaatatcaagtaaatttttgtttctaaagtacatttaatgtagatgacctaaagaatgcgttatccatcctatataaaagaaagataaaacacaggtcaccaattttctcatttcaccccatttaccttgtatagaggattgttcattcctttgggactaagttatagttatggtgagtgtgtatttactgtagttttgcctgatctcactcattgcacttcctggagttaaattttccaacagccatgttgaggaatagcactctgcatgtttttgttttgtttttcggggttttttttaattgaagccctaaaccaggaattatttgtgttctaacaggaggatgaacttgctgaaaataaaactttgctatgtatttactcttttttaaaagacaaaagcaaaaccagactttctacgtactactccaaagactgtgattgtgactataatacatttttggtaatttttttatacctaatttgtataggaagtgctatttctcataggctgtttcttgaaattttaagtttattgctttaaaatggcagtgtttctcccactttgatatgctaacatttagtaagcactggctttatgaaagcggctttttataagtatactgcattttttgagcctatcattaattagcttagtatgaaagataagaaaatctccatgttgtatccatttggctcaggaagattctttgccttacctttcttagaactctttattgcttatcaaaagtttgagtacccgcttggtttttttttggtaattaaatattgtatgatttatctggttcaaggaagatgcactattcagttatctattgagaaattattttgcagtggttttagtgggtgaaaatgtcccatctgcaccagtacacaggcaggcattatcattcttcacctactttttaaatagtggcaacttgggattctttctggtgattctgaaccttgcctcatagcttaaagtataaaaaaagattcaagagcagtgaggtttgttctttccagtgaatggtggactgagtggtgcgaggtggagggctaacaagaggaaagaactacattcttcagaatacagtgatgaaaattcattttgaaactcaaatattttcattttggatattctcctgtttttattaaaccagtgattacacctggccatccctctaaatgttctaggaaggcatgtctattgtgattttgatgaagacagaattatttttctctgtagaaacacagataccactttatcagggaagttagtcaaatgaaatggaaattggtaaatggacaaaagctagctagtaaaaaggacgacccagcaacatgctttaaccccattgtatgtttgtggaaagagcatagtttaacatcttgagaaatttgggacataaagttttcatggtagacagttcatgcagtatatgaattgacataatggaaataatctgattttatttttacaactaacatccattccccttcatttaaacaccttttgtgttttacttcagtgaggagattggagtctgaatggatctgttttccaagagattctgagaaatttttgtattcagcagttggaaagctctctattctagttgataaaacttcccttttttgatgtagatgcagatattctatacagttctgttgtcttttactaggactgtaaacttttgtgataaaattcaaataagattttatttctttgtaattttggctttcacaatttatctttaaatccttgagcaatctgtatacaattaagagatttctgacatttattcttacactaaatggatcaactctaggatttaggcatgttaacttctgttgtgttttgaatctctccagagttgcatgtagatagcatttatttctgtgcccttaaacccatttagaaaataactacaaagtaaaaatgtagaggaaatagaaatgtattttttcatgaacattttgatacaaatttcatcatttaatgattcaccaatttcttgcattaatttgaatttaagcatttaattcaaagagaggggagcatccattattggtacatgtgggcttttaaaaactccatcctttataaatagtcaaggtttgggccacacaaagtatatttttatcatggaaaaatttcaactcctcaagccgtaatgttgaacagaattggagtattttctttataatttcttgaacaggcaaatgaaagcttattatagaatgcatgtattttcttttatctttggaacatcagcaccagtatattgctggcagctattgtattaaaaaataaagtatattttcactatcaaaaaaaaaaaaaaaaaaaaaaaaaaaa

SEQ ID NO: 327 - protein, 253 aa, Homo sapien
MALSMPLNGLKEEDKEPLIELFVKAGSDGESIGNCPFSQRLFMILWLKGVVFSVTTVDLKRKPADLQNLAPGTHPPFITFNSEVKTDVNKIEEFLEEVLCPPKYLKLSPKHPESNTAGMDIFAKFSAYIKNSRPEANEALERGLLKTLQKLDEYLNSPLPDEIDENSMEDIKFSTRKFLDGNEMTLADCNLLPKLHIVKVVAKKYRNFDIPKEMTGIWRYLTNAYSRDEFTNTCPSDKEVEIAYSDVAKRLTK

SEQ ID NO: 328 - DNA, 732 bp, Homo sapien
tgctgcgaaccacgtgggtcccgggcgcgtttcgggtgctggcggctgcagccggagttcaaacctaagcagctggaaggaaccatggccaactgtgagcgtaccttcattgcgatcaaaccagatggggtccagcggggtcttgtgggagagattatcaagcgttttgagcagaaaggattccgccttgttggtctgaaattcatgcaagcttccgaagatcttctcaaggaacactacgttgacctgaaggaccgtccattctttgccggcctggtgaaatacatgcactcagggccggtagttgccatggtctgggaggggctgaatgtggtgaagacgggccgagtcatgctcggggagaccaaccctgcagactccaagcctgggaccatccgtggagacttctgcatacaagttggcaggaacattatacatggcagtgattctgtggagagtgcagagaaggagatcggcttgtggtttcaccctgaggaactggtagattacacgagctgtgctcagaactggatctatgaatgacaggagggcagaccacattgcttttcacatccatttcccctccttcccatgggcagaggaccaggctgtaggaaatctagttatttacaggaacttcatcataatttggagggaagctcttggagctgtgagttctccctgtacagtgttaccatccccgaccatctgattaaaatgcttcctcccagc

SEQ ID NO: 329 - protein, 152 aa, Homo sapien
MANCERTFIAIKPDGVQRGLVGEIIKRFEQKGFRLVGLKFMQASEDLLKEHYVDLKDRPFFAGLVKYMHSGPVVAMVWEGLNVVKTGRVMLGETNPADSKPGTIRGDFCIQVGRNIIHGSDSVESAEKEIGLWFHPEELVDYTSCAQNWIYE

SEQ ID NO: 330 - DNA, 5132 bp, Homo sapien
gcggcggtggcggcggagacccgaacatggcgaccgcgcgcaccttcgggcccgagcgggaagccgagccggccaaggaagcgcgcgtcgtgggctcggagcttgtggacacttatacggtttacatcatccaggtcactgatggcagccatgagtggacagtaaagcaccgctacagcgacttccatgacctgcatgaaaagctcgttgcagagagaaagattgataaaaacctgcttccgcccaaaaagataattgggaaaaactcaagaagcttggtggagaagagggagaaggatctggaggtctacctccagaagctcctggctgccttccctggcgtgacccccagagtactggcccacttcttgcattttcacttctatgagataaatggcatcaccgcggcactggctgaagagctctttgagaaaggagaacagctcctgggggccggcgaggtctttgccattggacccctgcagctgtatgccgtcacggagcagctgcagcagggaaagcccacgtgcgccagtggggatgccaagaccgacctcgggcacatcctggacttcacctgtcgccttaagtaccttaaggtttctggcacagaaggaccttttgggaccagcaacattcaggagcagctcctgccgttcgacctatcaatattcaagtccctgcatcaggtggagataagtcactgtgatgctaagcacatcagagggctggtcgcatcgaagcccaccttagccacgctgagtgtccgcttctcagcaacctcgatgaaggaagtccttgttcctgaagcctcagaatttgatgagtgggagcctgaaggcacaaccctagaaggccctgtgactgccgtcatccccacttggcaggcattgaccacgcttgacctgagccacaacagcatctccgagatcgacgagtctgtgaaactgatcccaaagattgagttcctggacctgagtcacaatggattgctggttgtggacaatctgcagcacctgtataaccttgtgcatctggacctgtcctacaacaagctctcctccttggaagggcttcacaccaagctggggaacatcaagaccttaaacctggcaggcaacctcctagagagtctgagtggcctgcacaagctctactcactggtcaacctggatctccgggacaacaggatcgaacagatggaggaggtccggagcataggcagcctcccgtgtctggagcacgtgtctctgctgaacaaccctctgagcatcatccccgactaccggaccaaggtgctggctcagttcggagagagggcctcagaggtctgtctggatgacacagtgaccacagagaaggagctggacactgtggaagtgctgaaagcaattcagaaagccaaggaggtcaagtccaaactgagcaacccagagaagaagggtggtgaagactcccggctctcagctgccccctgcatcagacccagcagctcccctcccactgtggctcccgcatctgcctccctgccccagcccatcctctctaaccaaggaatcatgttcgttcaggaggaggccctggccagcagcctctcgtccactgacagtctgactcccgagcaccagcccattgcccagggatgttctgattccttggagtccatccctgcgggacaggcagcttccgatgatttaagggacgtgccaggagctgttggtggtgcaagcccagaacatgccgagccggaggtccaggtggtgccggggtctggccagatcatcttcctgcccttcacctgcattggctacacggccaccaatcaggacttcatccagcgcctgagcacactgatccggcaggccatcgagcggcagctgcctgcctggatcgaggctgccaaccagcgggaggagggccagggtgaacagggcgaggaggaggatgaggaggaggaagaagaggaggacgtggctgagaaccgctactttgaaatggggcccccagacgtggaggaggaggagggaggaggccagggggaggaagaggaggaggaagaggaggatgaagaggccgaggaggagcgcctggctctggaatgggccctgggcgcggacgaggacttcctgctggagcacatccgcatcctcaaggtgctgtggtgcttcctgatccatgtgcagggcagtatccgccagttcgccgcctgccttgtgctcaccgacttcggcatcgcagtcttcgagatcccgcaccaggagtctcggggcagcagccagcacatcctctcctccctgcgctttgtcttttgcttcccgcatggcgacctcaccgagtttggcttcctcatgccggagctgtgtctggtgctcaaggtacggcacagtgagaacacgctcttcattatctcggacgccgccaacctgcacgagttccacgcggacctgcgctcatgctttgcaccccagcacatggccatgctgtgtagccccatcctctacggcagccacaccagcctgcaggagttcctgcgccagctgctcaccttctacaaggtggctggcggctgccaggagcgcagccagggctgcttccccgtctacctggtctacagtgacaagcgcatggtgcagacggccgccggggactactcaggcaacatcgagtgggccagctgcacactctgttcagccgtgcggcgctcctgctgcgcgccctctgaggccgtcaagtccgccgccatcccctactggctgttgctcacgccccagcacctcaacgtcatcaaggccgacttcaaccccatgcccaaccgtggcacccacaactgtcgcaaccgcaacagcttcaagctcagccgtgtgccgctctccaccgtgctgctggaccccacacgcagctgtacccagcctcggggcgcctttgctgatggccacgtgctagagctgctcgtggggtaccgctttgtcactgccatcttcgtgctgccccacgagaagttccacttcctgcgcgtctacaaccagctgcgggcctcgctgcaggacctgaagactgtggtcatcgccaagacccccgggacgggaggcagcccccagggctcctttgcggatggccagcctgccgagcgcagggccagcaatgaccagcgtccccaggaggtcccagcagaggctctggccccggccccagtggaagtcccagctccagcccctgcagcagcctcagcctcaggcccagcgaagactccggccccagcagaggcctcaacttcagctttggtcccagaggagacgccagtggaagctccagccccacccccagccgaggcccctgcccagtacccgagtgagcacctcatccaggccacctcggaggagaatcagatcccctcgcacttgcctgcctgcccgtcgctccggcacgtcgccagcctgcggggcagcgccatcatcgagctcttccacagcagcattgctgaggttgaaaacgaggagctgaggcacctcatgtggtcctcggtggtgttctaccagaccccagggctggaggtgactgcctgcgtgctgctctccaccaaggctgtgtactttgtgctccacgacggcctccgccgctacttctcagagccactgcaggatttctggcatcagaaaaacaccgactacaacaacagccctttccacatctcccagtgcttcgtgctaaagcttagtgacctgcagtcagtcaatgtggggcttttcgaccagcatttccggctgacgggttccaccccgatgcaggtggtcacgtgcttgacgcgggacagctacctgacgcactgcttcctccagcacctcatggtcgtgctgtcctctctggaacgcacgccctcgccggagcctgttgacaaggacttctactccgagtttgggaacaagaccacagggaagatggagaactacgagctgatccactctagtcgcgtcaagtttacctaccccagtgaggaggagattggggacctgacgttcactgtggcccaaaagatggctgagccagagaaggccccagccctcagcatcctgctgtacgtgcaggccttccaggtgggcatgccaccccctgggtgctgcaggggccccctgcgccccaagacactcctgctcaccagctccgagatcttcctcctggatgaggactgtgtccactacccactgcccgagtttgccaaagagccgccgcagagagacaggtaccggctggacgatggccgccgcgtccgggacctggaccgagtgctcatgggctaccagacctacccgcaggccctcaccctcgtcttcgatgacgtgcaaggtcatgacctcatgggcagtgtcaccctggaccactttggggaggtgccaggtggcccggctagagccagccagggccgtgaagtccagtggcaggtgtttgtccccagtgctgagagcagagagaagctcatctcgctgttggctcgccagtgggaggccctgtgtggccgtgagctgcctgtcgagctcaccggctagcccaggccacagccagcctgtcgtgtccagcctgacgcctactggggcagggcagcaggcttttgtgttctctaaaaatgttttatcctccctttggtaccttaatttgactgtcctcgcagagaatgtgaacatgtgtgtgtgttgtgttaattctttctcatgttgggagtgagaatgccgggcccctcagggctgtcggtgtgctgtcagcctcccacaggtggtacagccgtgcacaccagtgtcgtgtctgctgttgtgggaccgttgttaacacgtgacactgtgggtctgactttctcttctacacgtcctttcctgaagtgtcgagtccagtcctttgttgctgttgctgttgctgttgctgttgctgttggcatcttgctgctaatcctgaggctggtagcagaatgcacattggaagctcccaccccatattgttcttcaaagtggaggtctcccctgatccagacaagtgggagagcccgtgggggcaggggacctggagctgccagcaccaagcgtgattcctgctgcctgtattctctattccaataaagcagagtttgacaccgtcttaaaaaaaaa

SEQ ID NO: 331 - protein, 1504 aa, Homo sapien
MATARTFGPEREAEPAKEARVVGSELVDTYTVYIIQVTDGSHEWTVKHRYSDFHDLHEKLVAERKIDKNLLPPKKIIGKNSRSLVEKREKDLEVYLQKLLAAFPGVTPRVLAHFLHFHFYEINGITAALAEELFEKGEQLLGAGEVFAIGPLQLYAVTEQLQQGKPTCASGDAKTDLGHILDFTCRLKYLKVSGTEGPFGTSNIQEQLLPFDLSIFKSLHQVEISHCDAKHIRGLVASKPTLATLSVRFSATSMKEVLVPEASEFDEWEPEGTTLEGPVTAVIPTWQALTTLDLSHNSISEIDESVKLIPKIEFLDLSHNGLLVVDNLQHLYNLVHLDLSYNKLSSLEGLHTKLGNIKTLNLAGNLLESLSGLHKLYSLVNLDLRDNRIEQMEEVRSIGSLPCLEHVSLLNNPLSIIPDYRTKVLAQFGERASEVCLDDTVTTEKELDTVEVLKAIQKAKEVKSKLSNPEKKGGEDSRLSAAPCIRPSSSPPTVAPASASLPQPILSNQGIMFVQEEALASSLSSTDSLTPEHQPIAQGCSDSLESIPAGQAASDDLRDVPGAVGGASPEHAEPEVQVVPGSGQIIFLPFTCIGYTATNQDFIQRLSTLIRQAIERQLPAWIEAANQREEGQGEQGEEEDEEEEEEEDVAENRYFEMGPPDVEEEEGGGQGEEEEEEEEDEEAEEERLALEWALGADEDFLLEHIRILKVLWCFLIHVQGSIRQFAACLVLTDFGIAVFEIPHQESRGSSQHILSSLRFVFCFPHGDLTEFGFLMPELCLVLKVRHSENTLFIISDAANLHEFHADLRSCFAPQHMAMLCSPILYGSHTSLQEFLRQLLTFYKVAGGCQERSQGCFPVYLVYSDKRMVQTAAGDYSGNIEWASCTLCSAVRRSCCAPSEAVKSAAIPYWLLLTPQHLNVIKADFNPMPNRGTHNCRNRNSFKLSRVPLSTVLLDPTRSCTQPRGAFADGHVLELLVGYRFVTAIFVLPHEKFHFLRVYNQLRASLQDLKTVVIAKTPGTGGSPQGSFADGQPAERRASNDQRPQEVPAEALAPAPVEVPAPAPAAASASGPAKTPAPAEASTSALVPEETPVEAPAPPPAEAPAQYPSEHLIQATSEENQIPSHLPACPSLRHVASLRGSAIIELFHSSIAEVENEELRHLMWSSVVFYQTPGLEVTACVLLSTKAVYFVLHDGLRRYFSEPLQDFWHQKNTDYNNSPFHISQCFVLKLSDLQSVNVGLFDQHFRLTGSTPMQVVTCLTRDSYLTHCFLQHLMVVLSSLERTPSPEPVDKDFYSEFGNKTTGKMENYELIHSSRVKFTYPSEEEIGDLTFTVAQKMAEPEKAPALSILLYVQAFQVGMPPPGCCRGPLRPKTLLLTSSEIFLLDEDCVHYPLPEFAKEPPQRDRYRLDDGRRVRDLDRVLMGYQTYPQALTLVFDDVQGHDLMGSVTLDHFGEVPGGPARASQGREVQWQVFVPSAESREKLISLLARQWEALCGRELPVELTG

SEQ ID NO: 332 - DNA, 2587 bp, Homo sapien
aggcgctgcggccgtcccgggccgtgactcctcctttcccccgccccgcctccgttcggagagccggcgggcgggcgcctctcggccaggtacgcggccggctgggataggggtcgcgggcgggctttggtcgcgcagcagccggtcctccccggaggtaggcgggcgcgggccctgttgggtctttgggacgcgggtcccgctggggccggggatgctcctctctgtgagcgcggtcccgtccccccctgtccccgggcgggcgcacgggggtctaaccttggggggcggcgctcccgcctgtcccgggtgccggggttcgcgtcccgcggggccttcctcgctctttgtctcttctgagtgaacttgatgacccccttcttccaggaagcgcctcttggacgcgtgtgaccgatgcccagattgcacgaccacttctggagctgctcctgtgcgcacagcgcgaggcgccgaggccccccgcgagccagcaccgcggggctgccgcccaaggttggggagatgatcaacgtttccgtgtccgggccctccctgctggcggcccacggtgccccggacgctgaccccgcgcccaggggccgcagtgctgcgatgagcggccccgagcccggcagcccctaccccaacacctggcatcatcgcctgttgcagaggagcctcgtgctcttctcggttggggtggtcctaaccctggtgctcaacctgctgcagatccagaggaatgtcactctcttccccgaggaggtgatcgccaccatcttttcctccgcctggtgggtccctccctgctgcgggacagcagctgctgttgttggcctactgtacccctgtatcgacagtcacctcggagaaccccacaaatttaagagagaatgggccagtgtcatgcgctgcatagcaggttttggtggcattaaccacgccagtgctaaattggattttgccaataatgtccagctgtccttgactttagcagccctatctttgggcctttggtggacatttgatcgttccagaagtggccttgggctggggatcaccatagcttttctagctacgctgatcacgcagtttctcgtgtataatggtgtctatcagtatacgtccccagatttcctctatattcgttcttggctcccttgtatatttttctcaggaggcgtcacggtggggaacataggacgacagttagctatgggtgttcctgaaaagccccatagtgattgagtcttcaaaaccaccgattctgagagcaaggaagattttggaagaaaatctgactgtggattatgacaaagattatcttttttcttaagtaatctatttagatcgggctgactgtacaaatgactcctggaaaaaactcgtcacctatctagaaaagtcaagaatagggaggtggagaatgatgacttaccctgaagtcttcccttgctacccacactggcgcctgtctgtgccctggagcattctgcccagcctacgtgggttcagtcaggtgccaccttcccaagtattcgatttcattcatgtgattaaaacaagttgccatatttcaaagccttgagctaagactcaattaccaacccgcagttttgtgtcagtgcccaaaggagggaggttgatggtgcttaacaaacatgaagtatggtgtaataggaataatatttatccaaaagatttttaaaaatagggctgtgtttaaagaaggaatcaaaacaagaaaagcagcagtgattatagagaggtcacactctaagtggggtcgcggcgtggccacgcttcacggtcacgctcgtccgtcctgcagtggcgtgtttacatggtcacacgtgtgtgtatcaccagtgggtcaactgcttgtcattcctcccgcggcagtgttgtgtagacaatcttactgagcaaaaggcaatgaaaagtcttgggctcccacactgcgatatattggaattcccacctcagtttatgaagtttatttcgaaatccatagtcatctaagaatgaatacctgtctgccatgtatttcaatcttagtgagccaaaattgtttgtttgttactacagaatagagatgactgttttttggcacagccctatggaatttgcaatctgtgattgccttgtaaaaaggagagtgcatatggcactgcattaaacgtgtggtgtttctagtcaatgatattggtgagcacaatgtattcatttaatggcatagaccataccagacctaatttgcaagtattgggtcttcaaacttcaagtgcaatgtattatgaaaaccaatctgagccttgtatctcttaaatatttattccttctaacgtgtgagatgtcccgagagaagggttctccattcatttcagtgctgcctggaggaaactcggcaatgatttcttcagttgtgaagttcctttcgggttacaacctccactggaaccctcaaccttcgaaatactccagttttgggggttggggccatttacttataaatttaccgccgggtttttggaatctacatgtcttgggggcgggctcaaattcttcgaaagtggttggattaaaa

SEQ ID NO: 333 - protein, 277 aa, Homo sapien
MPRLHDHFWSCSCAHSARRRGPPRASTAGLPPKVGEMINVSVSGPSLLAAHGAPDADPAPRGRSAAMSGPEPGSPYPNTWHHRLLQRSLVLFSVGVVLTLVLNLLQIQRNVTLFPEEVIATIFSSAWWVPPCCGTAAAVVGLLYPCIDSHLGEPHKFKREWASVMRCIAGFGGINHASAKLDFANNVQLSLTLAALSLGLWWTFDRSRSGLGLGITIAFLATLITQFLVYNGVYQYTSPDFLYIRSWLPCIFFSGGVTVGNIGRQLAMGVPEKPHSD

SEQ ID NO: 334 - DNA, 3791 bp, Homo sapien
ggcgagcccggcccgcgaacgtcacgtcctgcgcgctccctgcactctcccgagctgcgctaggcgggcgccacggctgcccggcgaaggaaaccgaaaccgagtccgggcccgtccctccgcggccccatccgcccggtgcacccggggtcgcgctcgccaggccgcggagcccagagctgcgcgcacgaaccgtgcgccgggagggcgtgggcgtggcgccgaagggtcccgggtcttcgacgcctctgcggcggctcctccctccttgcagttggatccctggcgggtgcggcccggcccggcccgtgagcggcgcacagaatgggccgatgctgcttctacacggcggggacgttgtccctgctcctgctggtgaccagcgtcacgctgctggtggcccgggtcttccagaaggctgtagaccagagtatcgagaagaaaattgtgttaaggaatggtactgaggcatttgactcctgggagaagccccctctgcctgtgtatactcagttctatttcttcaatgtcaccaatccagaggagatcctcagaggggagacccctcgggtggaagaagtggggccatacacctacagggaactcagaaacaaagcaaatattcaatttggagataatggaacaacaatatctgctgttagcaacaaggcctatgtttttgaacgagaccaatctgttggagaccctaaaattgacttaattagaacattaaatattcctgtattgactgtcatagagtggtcccaggtgcacttcctcagggagatcatcgaggccatgttgaaagcctatcagcagaagctctttgtgactcacacagttgacgaattgctctggggctacaaagatgaaatcttgtcccttatccatgttttcaggcccgatatctctccctattttggcctattctatgagaaaaatgggactaatgatggagactatgtttttctaactggagaagacagttaccttaactttacaaaaattgtggaatggaatgggaaaacgtcacttgactggtggataacagacaagtgcaatatgattaatggaacagatggagattcttttcacccactaataaccaaagatgaggtcctttatgtcttcccatctgacttttgcaggtcagtgtatattactttcagtgactatgagagtgtacagggactgcctgcctttcggtataaagttcctgcagaaatattagccaatacgtcagacaatgccggcttctgtatacctgagggaaactgcctgggctcaggagttctgaatgtcagcatctgcaagaatggtgcacccatcattatgtctttcccacacttttaccaagcagatgagaggtttgtttctgccatagaaggcatgcacccaaatcaggaagaccatgagacatttgtggacattaatcctttgactggaataatcctaaaagcagccaagaggttccaaatcaacatttatgtcaaaaaattagatgactttgttgaaacgggagacattagaaccatggttttcccagtgatgtacctcaatgagagtgttcacattgataaagagacggcgagtcgactgaagtctatgattaacactactttgatcatcaccaacataccctacatcatcatggcgctgggtgtgttctttggtttggtttttacctggcttgcatgcaaaggacagggatccatggatgagggaacagcggatgaaagagcacccctcattcgaacctaaacattgcctttgcttggtgaagaaactgtgtgagctgtcctgacctggacgatgacgtggggaaaccctccacctccttgcaggcttgttgcctgttgaaagaaggaaaaagacacggcgctggcaagtgataggaacattctggccagaggttaaagagcaggctgacatggctggccattaagctttataaaatcatgtgggctctgaaattgttcttttatgtgtctagcaagtatttaataaacccttgtatagtaattttgttgttgttgggtgctggtagctccagaattttgtgaccactattgtgggtaaaatgtctctgcatcacttgttaatgctactggtctaacttcattcagtatgcttcattcaccgaactttgtgctcaaaatgcgtatataccattttatgttgtattcctccatttcacttgcaaaacagaagtaaataagagttcgggacccagggtaaaatggtagcttcatccaatatatcattcaaatgcatctgatttctaaaacatattacattttatgctgatcttcagttcataattcttccaggaaaactcagtcttccaactgcaataaaatactgggtagaatcaaatgggaaaggggttgggtggggcaatacccatgagttgatagtgataagctcctaaggatttttaacttgtacttttgtgaacgaagagaatgcataaataatgttggtgaggataaagtacagatatttcatgtagaattaattgctagttatgatgcttgtggatagttaactgttttttttttagtcaaaatgatcatgctacgaaaagatgcttctgagagaatgtaatgagtaactgatttttcttcctgagtcgcccttgccaaatatgttactgtattaattaatctaatattgagtgattatttgtaaaattatgaatatgggaaatccatctatctacagcctaagttacacataagtttcagaaagtctgattagactaaagagatatttcttctgggacagccgccttcttggtaattttgaagttctttttacaagttccttcctcagtttcagttctttccagtgttttgtagctcactgtcactcactgaatagagaaacgtgtgccctatacttcctgtgacaatcattttgctgacagaatgatggatgtttaaaatattgcacaaagtactttaaagaaaggtctgttaggaccagaagcagagacaccacttttcaaaggacttcttggtttcagcataacctaagacagggaattgggagccatcatatgtcacagtgttcagaattcaagcatatttaagggcattttctttgattctcaaagttcagcattcattttgaattgagaagcctatacatttagctgacaaagtgcttatagaatttcttaacaactgaaccattcaaaaggattttttttgtttaaaactggatttcaatgtaagcaaatgaagaaaaaaatatagatttcatttccatagcttcttatccctgtattgaggtaataaattgttttactgacaatttttcctttttctacactaaaacaatatgtgatatatttcccctcttgaagaggcaattcattaaactctcaaattttctatagaatcaagatagaacctttagatactccaactcaccaaaatgtaaaaaaactaacaaaaatatttggtcttcaataatgctaaatatctacatttttagaatttatcaacatttaactagataattgggcatgtcttaattatgcatgtacttatccatactaataaaattgacaatgctagtgcatacttattggtttagtcctattatcaggatataatcatctgtgaggaggatattttaaatactgtaaatgataacagttaatgatatacacatttagactgagttgcacactggcagggagaccaaaaacattacttccatacttgtgtcatgattcttttttttttgagagagtctcactctgtcgccaggctggagtacag

SEQ ID NO: 335 - protein, 478 aa, Homo sapien
MGRCCFYTAGTLSLLLLVTSVTLLVARVFQKAVDQSIEKKIVLRNGTEAFDSWEKPPLPVYTQFYFFNVTNPEEILRGETPRVEEVGPYTYRELRNKANIQFGDNGTTISAVSNKAYVFERDQSVGDPKIDLIRTLNIPVLTVIEWSQVHFLREIIEAMLKAYQQKLFVTHTVDELLWGYKDEILSLIHVFRPDISPYFGLFYEKNGTNDGDYVFLTGEDSYLNFTKIVEWNGKTSLDWWITDKCNMINGTDGDSFHPLITKDEVLYVFPSDFCRSVYITFSDYESVQGLPAFRYKVPAEILANTSDNAGFCIPEGNCLGSGVLNVSICKNGAPIIMSFPHFYQADERFVSAIEGMHPNQEDHETFVDINPLTGIILKAAKRFQINIYVKKLDDFVETGDIRTMVFPVMYLNESVHIDKETASRLKSMINTTLIITNIPYIIMALGVFFGLVFTWLACKGQGSMDEGTADERAPLIRT

SEQ ID NO: 336 - DNA, 5611 bp, Homo sapien
gcgcgaccgtcccgggggtggggccgggcgcagcggcgagaggaggcgaaggtggctgcggtagcagcagcgcggcagcctcggacccagcccggagcgcagggcggccgctgcaggtccccgctcccctccccgtgcgtccgcccatggccgccgccgggcagctgtgcttgctctacctgtcggcggggctcctgtcccggctcggcgcagccttcaacttggacactcgggaggacaacgtgatccggaaatatggagaccccgggagcctcttcggcttctcgctggccatgcactggcaactgcagcccgaggacaagcggctgttgctcgtgggggccccgcgcggagaagcgcttccactgcagagagccaacagaacgggagggctgtacagctgcgacatcaccgcccgggggccatgcacgcggatcgagtttgataacgatgctgaccccacgtcagaaagcaaggaagatcagtggatgggggtcaccgtccagagccaaggtccagggggcaaggtcgtgacatgtgctcaccgatatgaaaaaaggcagcatgttaatacgaagcaggaatcccgagacatctttgggcggtgttatgtcctgagtcagaatctcaggattgaagacgatatggatgggggagattggagcttttgtgatgggcgattgagaggccatgagaaatttggctcttgccagcaaggtgtagcagctacttttactaaagactttcattacattgtatttggagccccgggtacttataactggaaagggattgttcgtgtagagcaaaagaataacactttttttgacatgaacatctttgaagatgggccttatgaagttggtggagagactgagcatgatgaaagtctcgttcctgttcctgctaacagttacttaggtttttctttggactcagggaaaggtattgtttctaaagatgagatcacttttgtatctggtgctcccagagccaatcacagtggagccgtggttttgctgaagagagacatgaagtctgcacatctcctccctgagcacatattcgatggagaaggtctggcctcttcatttggctatgatgtggcggtggtggacctcaacaaggatgggtggcaagatatagttattggagccccacagtattttgatagagatggagaagttggaggtgcagtgtatgtctacatgaaccagcaaggcagatggaataatgtgaagccaattcgtcttaatggaaccaaagattctatgtttggcattgcagtaaaaaatattggagatattaatcaagatggctacccagatattgcagttggagctccgtatgatgacttgggaaaggtttttatctatcatggatctgcaaatggaataaataccaaaccaacacaggttctcaagggtatatcaccttattttggatattcaattgctggaaacatggaccttgatcgaaattcctaccctgatgttgctgttggttccctctcagattcagtaactattttcagatcccggcctgtgattaatattcagaaaaccatcacagtaactcctaacagaattgacctccgccagaaaacagcgtgtggggcgcctagtgggatatgcctccaggttaaatcctgttttgaatatactgctaaccccgctggttataatccttcaatatcaattgtgggcacacttgaagctgaaaaagaaagaagaaaatctgggctatcctcaagagttcagtttcgaaaccaaggttctgagcccaaatatactcaagaactaactctgaagaggcagaaacagaaagtgtgcatggaggaaaccctgtggctacaggataatatcagagataaactgcgtcccattcccataactgcctcagtggagatccaagagccaagctctcgtaggcgagtgaattcacttccagaagttcttccaattctgaattcagatgaacccaagacagctcatattgatgttcacttcttaaaagagggatgtggagacgacaatgtatgtaacagcaaccttaaactagaatataaattttgcacccgagaaggaaatcaagacaaattttcttatttaccaattcaaaaaggtgtaccagaactagttctaaaagatcagaaggatattgctttagaaataacagtgacaaacagcccttccaacccaaggaatcccacaaaagatggcgatgacgcccatgaggctaaactgattgcaacgtttccagacactttaacctattctgcatatagagaactgagggctttccctgagaaacagttgagttgtgttgccaaccagaatggctcgcaagctgactgtgagctcggaaatccttttaaaagaaattcaaatgtcactttttatttggttttaagtacaactgaagtcacctttgacaccccatatctggatattaatctgaagttagaaacaacaagcaatcaagataatttggctccaattacagctaaagcaaaagtggttattgaactgcttttatcggtctcgggagttgctaaaccttcccaggtgtattttggaggtacagttgttggcgagcaagctatgaaatctgaagatgaagtgggaagtttaatagagtatgaattcagggtaataaacttaggtaaacctcttacaaacctcggcacagcaaccttgaacattcagtggccaaaagaaattagcaatgggaaatggttgctttatttggtgaaagtagaatccaaaggattggaaaaggtaacttgtgagccacaaaaggagataaactccctgaacctaacggagtctcacaactcaagaaagaaacgggaaattactgaaaaacagatagatgataacagaaaattttctttatttgctgaaagaaaataccagactcttaactgtagcgtgaacgtgaactgtgtgaacatcagatgcccgctgcgggggctggacagcaaggcgtctcttattttgcgctcgaggttatggaacagcacatttctagaggaatattccaaactgaactacttggacattctcatgcgagccttcattgatgtgactgctgctgccgaaaatatcaggctgccaaatgcaggcactcaggttcgagtgactgtgtttccctcaaagactgtagctcagtattcgggagtaccttggtggatcatcctagtggctattctcgctgggatcttgatgcttgctttattagtgtttatactatggaagtgtggtttcttcaagagaaataagaaagatcattatgatgccacatatcacaaggctgagatccatgctcagccatctgataaagagaggcttacttctgatgcatagtattgatctacttctgtaattgtgtggattctttaaacgctctaggtacgatgacagtgttccccgataccatgctgtaaggatccggaaagaagagcgagagatcaaagatgaaaagtatattgataaccttgaaaaaaaacagtggatcacaaagtggaacagaaatgaaagctactcatagcgggggcctaaaaaaaaaaaagcttcacagtacccaaactgctttttccaactcagaaattcaatttggatttaaaagcctgctcaatccctgaggactgatttcagagtgactacacacagtacgaacctacagttttaactgtggatattgttacgtagcctaaggctcctgttttgcacagccaaatttaaaactgttggaatggatttttctttaactgccgtaatttaactttctgggttgcctttgtttttggcgtggctgacttacatcatgtgttggggaagggcctgcccagttgcactcaggtgacatcctccagatagtgtagctgaggaggcacctacactcacctgcactaacagagtggccgtcctaacctcgggcctgctgcgcagacgtccatcacgttagctgtcccacatcacaagactatgccattggggtagttgtgtttcaacggaaagtgctgtcttaaactaaatgtgcaatagaaggtgatgttgccatcctaccgtcttttcctgtttcctagctgtgtgaatacctgctcacgtcaaatgcatacaagtttcattctccctttcactaaaaacacacaggtgcaacagacttgaatgctagttatacttatttgtatatggtatttattttttcttttctttacaaaccattttgttattgactaacaggccaaagagtctccagtttacccttcaggttggtttaatcaatcagaattagaattagagcatgggagggtcatcactatgacctaaattatttactgcaaaaagaaaatctttataaatgtaccagagagagttgttttaataacttatctataaactataacctctccttcatgacagcctccaccccacaacccaaaaggtttaagaaatagaattataactgtaaagatgtttatttcaggcattggatattttttactttagaagcctgcataatgtttctggatttacatactgtaacattcaggaattcttggagaagatgggtttattcactgaactctagtgcggtttactcactgctgcaaatactgtatattcaggacttgaaagaaatggtgaatgcctatggaactagtggatccaaactgatccagtataagactactgaatctgctaccaaaacagttaatcagtgagtcgagtgttctattttttgttttgtttcctcccctatctgtattcccaaaaattactttggggctaatttaacaagaactttaaattgtgttttaattgtaaaaatggcagggggtggaattattactctatacattcaacagagactgaatagatatgaaagctgattttttttaattaccatgcttcacaatgttaagttatatggggagcaacagcaaacaggtgctaatttgttttggatatagtataagcagtgtctgtgttttgaaagaatagaacacagtttgtagtgccactgttgttttggggggggctttttttctttttccggaaaatccttaaaccttaagatactaaggacgttgttttggttgtacttggaattcttagtcacaaaatatattttgtttacaaaaatttctgtaaaacaggttataacagtgtttaaagtctcagtttcttgcttggggaacttgtgtccctaatgtgttagattgctagattgctaaggagctgatacttgacagttttttagacctgtgttactaaaaaaaagatgaatgtcggaaaagggtgttgggagggtggtcaacaaagaaacaaagatgttatggtgtttagacttatggttgttaaaaatgtcatctcaagtcaagtcactggtctgtttgcatttgatacatttttgtactaactagcattgtaaaattatttcatgattagaaattacctgtggatatttgtataaaagtgtgaaataaattttttataaaagtgttcattgtttcgtaacacagcattgtatatgtgaagcaaactctaaaattataaatgacaacctgaattatctatttcatcaaaaaaaaaaaaaaaaaaaa

SEQ ID NO: 337 - protein, 1073 aa, Homo sapien
MAAAGQLCLLYLSAGLLSRLGAAFNLDTREDNVIRKYGDPGSLFGFSLAMHWQLQPEDKRLLLVGAPRGEALPLQRANRTGGLYSCDITARGPCTRIEFDNDADPTSESKEDQWMGVTVQSQGPGGKVVTCAHRYEKRQHVNTKQESRDIFGRCYVLSQNLRIEDDMDGGDWSFCDGRLRGHEKFGSCQQGVAATFTKDFHYIVFGAPGTYNWKGIVRVEQKNNTFFDMNIFEDGPYEVGGETEHDESLVPVPANSYLGFSLDSGKGIVSKDEITFVSGAPRANHSGAVVLLKRDMKSAHLLPEHIFDGEGLASSFGYDVAVVDLNKDGWQDIVIGAPQYFDRDGEVGGAVYVYMNQQGRWNNVKPIRLNGTKDSMFGIAVKNIGDINQDGYPDIAVGAPYDDLGKVFIYHGSANGINTKPTQVLKGISPYFGYSIAGNMDLDRNSYPDVAVGSLSDSVTIFRSRPVINIQKTITVTPNRIDLRQKTACGAPSGICLQVKSCFEYTANPAGYNPSISIVGTLEAEKERRKSGLSSRVQFRNQGSEPKYTQELTLKRQKQKVCMEETLWLQDNIRDKLRPIPITASVEIQEPSSRRRVNSLPEVLPILNSDEPKTAHIDVHFLKEGCGDDNVCNSNLKLEYKFCTREGNQDKFSYLPIQKGVPELVLKDQKDIALEITVTNSPSNPRNPTKDGDDAHEAKLIATFPDTLTYSAYRELRAFPEKQLSCVANQNGSQADCELGNPFKRNSNVTFYLVLSTTEVTFDTPYLDINLKLETTSNQDNLAPITAKAKVVIELLLSVSGVAKPSQVYFGGTVVGEQAMKSEDEVGSLIEYEFRVINLGKPLTNLGTATLNIQWPKEISNGKWLLYLVKVESKGLEKVTCEPQKEINSLNLTESHNSRKKREITEKQIDDNRKFSLFAERKYQTLNCSVNVNCVNIRCPLRGLDSKASLILRSRLWNSTFLEEYSKLNYLDILMRAFIDVTAAAENIRLPNAGTQVRVTVFPSKTVAQYSGVPWWIILVAILAGILMLALLVFILWKCGFFKRNKKDHYDATYHKAEIHAQPSDKERLTSDA

SEQ ID NO: 338 - DNA, 968 bp, Homo sapien
gggggaagttgctggctgactgggcttgcgaggaaaccgcctcggagctgcagcgaaggccaaggaatcactgaagatcggcgagggaggacagggggttcatcatgggtggctttttctcaagtatattttccagtctgtttggaactcgggaaatgagaattttaattttgggattagatggagcaggaaaaaccacaattttgtacagattacaagtgggagaagttgttactactatacctaccattggatttaatgtagagacggtgacgtacaaaaaccttaaattccaagtctgggatttaggaggacagacaagtatcaggccatactggagatgttactattcaaacacagatgcagtcatttatgtagtagacagttgtgaccgagaccgaattggcatttccaaatcagagttagttgccatgttggaggaagaagagctgagaaaagccattttagtggtgtttgcaaataaacaggacatggaacaggccatgacttcctcagagatggcaaattcacttgggttacctgccttgaaggaccgaaaatggcagatattcaaaacgtcagcaaccaaaggcaccggccttgatgaggcaatggaatggttagttgaaacattaaaaagcagacagtaattcagtccattcttctcccctgaaatgaagactacatcacctctctccctttggaaacagtcaagtgtacttcacactactagatgttaaaactatatgattattggcatatactgactgactgcaatatttgtagtaaatagggaaaataagtatttagttggagggataatttgatcgaatcacctgaatgttctatgtaatgtaaaatattcttttcttgctttcttgtgttaaggtatatattctatttgtatggaattcttattcaaatacagttgtattaaagagtatactcctattggatgaaaaaaacct

SEQ ID NO: 339 - protein, 181 aa, Homo sapien
MGGFFSSIFSSLFGTREMRILILGLDGAGKTTILYRLQVGEVVTTIPTIGFNVETVTYKNLKFQVWDLGGQTSIRPYWRCYYSNTDAVIYVVDSCDRDRIGISKSELVAMLEEEELRKAILVVFANKQDMEQAMTSSEMANSLGLPALKDRKWQIFKTSATKGTGLDEAMEWLVETLKSRQ

SEQ ID NO: 340 - DNA, 3741 bp, Homo sapien
gaattcgttgttgggaaggactggggaaacagctgtaacatttgccaccctcagaagctgctggtcctgtgtcacaccaccttagcctcttgatcgaggaagattctcgctgaagtctgttaattctactttttgagtacttatgaataaccacgtgtcttcaaaaccatctaccatgaagctaaaacataccatcaaccctattcttttatattttatacattttctaatatcactttatactattttaacatacattccgttttattttttctccgagtcaagacaagaaaaatcaaaccgaattaaagcaaagcctgtaaattcaaaacctgattctgcatacagatctgttaatagtttggatggtttggcttcagtattataccctggatgtgatactttagataaagtttttacatatgcaaaaaacaaatttaagaacaaaagactcttgggaacacgtgaagttttaaatgaggaagatgaagtacaaccaaatggaaaaatttttaaaaaggttattcttggacagtataattggctttcctatgaagatgtctttgttcgagcctttaattttggaaatggattacagatgttgggtcagaaaccaaagaccaacatcgccatcttctgtgagaccagggccgagtggatgatagctgcacaggcgtgttttatgtataattttcagcttgttacattatatgccactctaggaggtccagccattgttcatgcattaaatgaaacagaggtgaccaacatcattactagtaaagaactcttacaaacaaagttgaaggatatagtttctttggtcccacgcctgcggcacatcatcactgttgatggaaagccaccgacctggtccgacttccccaagggcatcattgtgcataccatggctgcagtggaggccctgggagccaaggccagcatggaaaaccaacctcatagcaaaccattgccctcagatattgcagtaatcatgtacacaagtggatccacaggacttccaaagggagtcatgatctcacatagtaacattattgctggtataactgggatggcagaaaggattccagaactaggagaggaagatgtctacattggatatttgcctctggcccatgttctagaattaagtgctgagcttgtctgtctttctcacggatgccgcattggttactcttcaccacagactttagcagatcagtcttcaaaaattaaaaaaggaagcaaaggggatacatccatgttgaaaccaacactgatggcagcagttccggaaatcatggatcggatctacaaaaatgtcatgaataaagtcagtgaaatgagtagttttcaacgtaatctgtttattctggcctataattacaaaatggaacagatttcaaaaggacgtaatactccactgtgcgacagctttgttttccggaaagttcgaagcttgctagggggaaatattcgtctcctgttgtgtggtggcgctccactttctgcaaccacgcagcgattcatgaacatctgtttctgctgtcctgttggtcagggatacgggctcactgaatctgctggggctggaacaatttccgaagtgtgggactacaatactggcagagtgggagcaccattagtttgctgtgaaatcaaattaaaaaactgggaggaaggtggatactttaatactgataagccacaccccaggggtgaaattcttattgggggccaaagtgtgacaatggggtactacaaaaatgaagcaaaaacaaaagctgatttctctgaagatgaaaatggacaaaggtggctctgtactggggatattggagagtttgaacccgatggatgcttaaagattattgatcgtaaaaaggaccttgtaaaactacaggcaggggaatatgtttctcttgggaaagtagaggcagctttgaagaatcttccactagtagataacatttgtgcatatgcaaacagttatcattcttatgtcattggatttgttgtgccaaatcaaaaggaactaactgaactagctcgaaagaaaggacttaaagggacttgggaggagctgtgtaacagttgtgaaatggaaaatgaggtacttaaagtgctttccgaagctgctatttcagcaagtctggaaaagtttgaaattccagtaaaaattcgtttgagtcctgaaccgtggacccctgaaactggtctggtgacagatgccttcaagctgaaacgcaaagagcttaaaacacattaccaggcggacattgagcgaatgtatggaagaaaataattattctcttctggcatcagtttgctacagtgagctcacatcaaataggaaaatacttgaaatgcatgtctcaagctgcaaggcaaactccattcctcatattaaactattacttctcatgacgtcaccatttttaactgacaggattagtaaaacattaagacagcaaacttgtgtctgtctcttctttcattttccccgccaccaacttactttaccacctatgactgtacttgtcagtatgagaatttttctgaatcatattggggaagcagtgattttaaaacctcaagtttttaaacatgatttatatgttctgtataatgttcagtttgtaactttttaaaagtttggatgtatagagggataaataggaaatataagaattggttatttgggggcttttttacttactgtatttaaaaatacaagggtattgatatgaaattatgtaaatttcaaatgcttatgaatcaaatcattgttgaacaaaagatttgttgctgtgtaattattgtcttgtatgcatttgagagaaataaatatacccatacttatgttttaagaagttgagatcttgtgaatatatgcctgtcagtgtcttctttatatatttattttttattagaaaaaatgaagtttggttggtgatgcatgaaacaaaatagcaagagagggttatagtttaatagtaagggagataacacagcatgtgtagcaccagttgataattggtctctagtagcttactgtcaaaatgttcaatgaagtcttctgttcatctgttgaaactaggaaaatacccaaacttaaatggaagaattctgaaagagaggatagaatttaaagaacaagagtatataaagttattctttgaatatttcgttgactatatgtacattgagttatctatatttgtaaacaaattagtcatggaaaattattctattccaaagtctccttttagtctagataatcattatttcattttaaaattagtgtttttcatagtttgcactgatgcgtgtatggatgtgtgtgagtcagtggtagcttatttaaaaagcaccttatcctttctcccataacctttgtacactaaaaaatgaaagaatttagaatgtatttgatgatagcattctcactaagacacatgagaatttaactttataaccgcgtgagttaagatttaattcataggttttgatgtcattgttgaagttatttgtaattcagaaaccttgcttgtgtgatacatagtaagtctcttcatttattactgcttgcctgttgttatatctggattatcaaaagcaatagtgcaccaattaagatgtgctcaaatcaggacttaaatcataggcaccacatttttcatgtcagactagttactttgttgattctcagttactgtaggcatcaaaaggcaaaaatca

SEQ ID NO: 341 - protein, 720 aa, Homo sapien
MNNHVSSKPSTMKLKHTINPILLYFIHFLISLYTILTYIPFYFFSESRQEKSNRIKAKPVNSKPDSAYRSVNSLDGLASVLYPGCDTLDKVFTYAKNKFKNKRLLGTREVLNEEDEVQPNGKIFKKVILGQYNWLSYEDVFVRAFNFGNGLQMLGQKPKTNIAIFCETRAEWMIAAQACFMYNFQLVTLYATLGGPAIVHALNETEVTNIITSKELLQTKLKDIVSLVPRLRHIITVDGKPPTWSDFPKGIIVHTMAAVEALGAKASMENQPHSKPLPSDIAVIMYTSGSTGLPKGVMISHSNIIAGITGMAERIPELGEEDVYIGYLPLAHVLELSAELVCLSHGCRIGYSSPQTLADQSSKIKKGSKGDTSMLKPTLMAAVPEIMDRIYKNVMNKVSEMSSFQRNLFILAYNYKMEQISKGRNTPLCDSFVFRKVRSLLGGNIRLLLCGGAPLSATTQRFMNICFCCPVGQGYGLTESAGAGTISEVWDYNTGRVGAPLVCCEIKLKNWEEGGYFNTDKPHPRGEILIGGQSVTMGYYKNEAKTKADFSEDENGQRWLCTGDIGEFEPDGCLKIIDRKKDLVKLQAGEYVSLGKVEAALKNLPLVDNICAYANSYHSYVIGFVVPNQKELTELARKKGLKGTWEELCNSCEMENEVLKVLSEAAISASLEKFEIPVKIRLSPEPWTPETGLVTDAFKLKRKELKTHYQADIERMYGRK

SEQ ID NO: 342 - DNA, 782 bp, Homo sapien
aggggccttagcgtgccgcatcgccgagatccagcgcccagagagacaccagagaacccaccatggccccctttgagcccctggcttctggcatcctgttgttgctgtggctgatagcccccagcagggcctgcacctgtgtcccaccccacccacagacggccttctgcaattccgacctcgtcatcagggccaagttcgtggggacaccagaagtcaaccagaccaccttataccagcgttatgagatcaagatgaccaagatgtataaagggttccaagccttaggggatgccgctgacatccggttcgtctacacccccgccatggagagtgtctgcggatacttccacaggtcccacaaccgcagcgaggagtttctcattgctggaaaactgcaggatggactcttgcacatcactacctgcagtttcgtggctccctggaacagcctgagcttagctcagcgccggggcttcaccaagacctacactgttggctgtgaggaatgcacagtgtttccctgtttatccatcccctgcaaactgcagagtggcactcattgcttgtggacggaccagctcctccaaggctctgaaaagggcttccagtcccgtcaccttgcctgcctgcctcgggagccagggctgtgcacctggcagtccctgcggtcccagatagcctgaatcctgcccggagtggaactgaagcctgcacagtgtccaccctgttcccactcccatctttcttccggacaatgaaataaagagttaccacccagc

SEQ ID NO: 343 - protein, 207 aa, Homo sapien
MAPFEPLASGILLLLWLIAPSRACTCVPPHPQTAFCNSDLVIRAKFVGTPEVNQTTLYQRYEIKMTKMYKGFQALGDAADIRFVYTPAMESVCGYFHRSHNRSEEFLIAGKLQDGLLHITTCSFVAPWNSLSLAQRRGFTKTYTVGCEECTVFPCLSIPCKLQSGTHCLWTDQLLQGSEKGFQSRHLACLPREPGLCTWQSLRSQIA

SEQ ID NO: 344 - DNA, 2589 bp, Homo sapien
caaccagggagatttctccattttcctcttgtctacagtgcggctacaaatctgggatttttttattacttctttttttttcgaactacacttgggctcctttttttgtgctcgacttttccaccctttttccctccctcctgtgctgctgctttttgatctcttcgactaaaatttttttatccggagtgtatttaatcggttctgttctgtcctctccaccacccccacccccctccctccggtgtgtgtgccgctgccgctgttgccgccgccgctgctgctgctgctcgccccgtcgttacaccaacccgaggctctttgtttcccctcttggatctgttgagtttctttgttgaagaagccagcatgggtgcccagttctccaagaccgcagcgaagggagaagccgccgcggagaggcctggggaggcggctgtggcctcgtcgccttccaaagcgaacggacaggagaatggccacgtgaaggtaaacggcgacgcttcgcccgcggccgccgagtcgggcgccaaggaggagctgcaggccaacggcagcgccccggccgccgacaaggaggagcccgcggccgccgggagcggggcggcgtcgccctcctcggccgagaaaggtgagccggccgccgccgctgcccccgaggccggggccagcccggtagagaaggaggcccccgcggaaggcgaggctgccgagcccggctcggccacggccgcggagggagaggccgcgtcggccgcctcctcgacttcttcgcccaaggccgaggacggggccacgccctcgcccagcaacgagaccccgaaaaaaaaaaagaagcgcttttccttcaagaagtctttcaagctgagcggcttctccttcaagaagaacaagaaggaggctggagaaggcggtgaggctgaggcgcccgctgccgaaggcggcaaggacgaggccgccgggggcgcagctgcggccgccgccgaggcgggcgcggcctccggggagcaggcagcggcgccgggcgaggaggcggcagcgggcgaggagggggcggcgggtggcgacccgcaggaggccaagccccaggaggccgctgtcgcgccagagaagccgcccgccagcgacgagaccaaggccgccgaggagcccagcaaggtggaggagaaaaaggccgaggaggccggggccagcgccgccgcctgcgaggccccctccgccgccgggcccggcgcgcccccggagcaggaggcagcccccgcggaggagcccgcggccgccgcagcctcgtcagcctgcgcagccccctcacaggaggcccagcccgagtgcagtccagaagcccccccagcggaggcggcagagtaaaagagcaagcttttgtgagataatcgaagaacttttctcccccgtttgtttgttggagtggtgccaggtactgttttggagaacttgtctacaaccagggattgattttaaagatgtctttttttattttacttttttttaagcaccaaattttgttgtttttttttttctcccctccccacagatcccatctcaaatcattctgttaaccaccattccaacaggtcgaggagagcttaaacaccttcttcctctgccttgtttctcttttattttttattttttcgcatcagtattaatgtttttgcatactttgcatctttattcaaaagtgtaaactttctttgtcaatctatggacatgcccatatatgaaggagatgggtgggtcaaaaagggatatcaaatgaagtgataggggtcacaatggggaaattgaagtggtgcataacattgccaaaatagtgtgccactagaaatggtgtaaaggctgtctttttttttttttttaaagaaaagttattaccatgtattttgtgaggcaggtttacaacactacaagtcttgagttaagaaggaaagaggaaaaaagaaaaaacaccaatacccagatttaaaaaaaaaaaaacgatcatagtcttaggagttcatttaaaccataggaacttttcacttatctcatgttagctgtaccagtcagtgattaagtagaactacaagttgtataggctttattgtttattgctggtttatgaccttaataaagtgtaattatgtattaccagcagggtgtttttaactgtgactattgtataaaaacaaatcttgatatccagaagcacatgaagtttgcaactttccaccctgcccatttttgtaaaactgcagtcatcttggaccttttaaaacacaaattttaaactcaaccaagctgtgataagtggaatggttactgtttatactgtggtatgtttttgattacagcagataatgctttcttttccagtcgtctttgagaataaaggaaaaaaaatcttcagatgcaatggttttgtgtagcatcttgtctatcatgttttgtaaatactggagaagctttgaccaatttgacttagagatggaatgtaactttgcttacaaaaattgctattaaactcctgcttaaggtgttctaattttctgtgagcacactaaaagcgaaaaataaatgtgaataaaatgt

SEQ ID NO: 345 - protein, 332 aa, Homo sapien
MGAQFSKTAAKGEAAAERPGEAAVASSPSKANGQENGHVKVNGDASPAAAESGAKEELQANGSAPAADKEEPAAAGSGAASPSSAEKGEPAAAAAPEAGASPVEKEAPAEGEAAEPGSATAAEGEAASAASSTSSPKAEDGATPSPSNETPKKKKKRFSFKKSFKLSGFSFKKNKKEAGEGGEAEAPAAEGGKDEAAGGAAAAAAEAGAASGEQAAAPGEEAAAGEEGAAGGDPQEAKPQEAAVAPEKPPASDETKAAEEPSKVEEKKAEEAGASAAACEAPSAAGPGAPPEQEAAPAEEPAAAAASSACAAPSQEAQPECSPEAPPAEAAE

SEQ ID NO: 346 - DNA, 2966 bp, Homo sapien
gtttgaatgagactcgtcgcaccgaagccgccgccaccaccgcgcctccgcctcggccgccgccgcagctgctcctggtccccgtccctttgccgccctcgtcaggcccagctctcctgcgccgccgcctcccgccgcgccccgccatgccgctctactccgttactgtaaaatggggaaaggagaaatttgaaggtgtagaattgaatacagatgaacctccaatggtattcaaggctcagctgtttgcgttgactggagtccagcctgccagacagaaagttatggtgaaaggaggaacgctaaaggatgatgattggggaaacatcaaaataaaaaatggaatgactctactaatgatggggtcagcagatgctcttccagaagaaccctcagccaaaactgtcttcgtagaagacatgacagaagaacagttagcatctgctatggagttaccatgtggattgacaaaccttggtaacacttgttacatgaatgccacagttcagtgtattcgttctgtgcctgaactcaaagatgcccttaaaaggtatgcaggtgccttgagagcttcaggggaaatggcttcagcgcagtatattactgcagcccttagagatttgtttgattccatggataaaacttcttccagtattccacctattattctactgcagtttttgcacatggctttcccacagtttgccgagaaaggtgaacaaggacagtatcttcaacaggatgctaatgaatgttggatacaaatgatgcgagtattgcaacagaaattggaagcaatagaggatgattctgttaaagagacagactcctcatctgcatcggcagcgacaccttctaaaaagaaaagtttaatcgatcagttcttcggtgttgagtttgaaactaccatgaaatgtacagaatctgaagaagaagaagtcaccaaaggaaaggaaaatcaacttcagcttagctgttttatcaatcaggaagtcaagtatctttttacaggacttaaattgcgacttcaggaagaaatcaccaaacagtctccaacgttgcaaagaaatgccttgtatatcaaatcttccaagatcagccggctgcctgcttacttgaccattcagatggttcgatttttttataaagagaaggaatctgtgaatgccaaagttcttaaggatgttaaatttcctcttatgttggatatgtatgaactgtgtacaccagaacttcaagagaaaatggtgtcttttcgatccaaattcaaggatctagaagataaaaaagtgaatcagcagccaaatacaagtgacaaaaagagtagtccccagaaagaagttaagtatgaacccttttcttttgctgatgatattggctccaataattgtggatactatgacttacaagcagtactaacacaccagggaaggtctagttcttcaggtcattatgtatcatgggtgaaaaggaaacaagatgaatggattaagtttgatgatgacaaagtcagcatcgtaacaccagaagatatcttacggctttctggtggtggagactggcatatcgcttacgttctactctatgggcctcgcagagttgaaataatggaagaggaaagtgaacagtaatcttcattttagtatttatgcttagatgtgaaaataaatgttatttgttgatcatttctataatccagagctttagaggaagacacataggtgggtttatgtttcacctcatttggaacaaaagaggacagaagcagaccactctgtgcaccaacctaaaaaattacagagaagagaaaattatctttggattgtgctgccctatataaaggtggcagaaagacatttttaaaaagcttattatttcttgcattattttaaaaagttcagagttgaaatgcctttcaaccatttccttctgtggtcatttttcttgctgcctttttcacccaagattcagcagtcagatgtttactgcacacctattacctattatttgctgttcttgcatggttcaaaccaccattctgtagccacccatcctttgccttatctaacaaacatttttccaggaaggtggaaaaggaagtgttgctctcattgtgtgactcagtgctgctgtccatcccatggaaacatgggcacaatcaagtatttgtccagcctattgcaggcttttcctgactttaaaataaattgtgatcaataatagtacctttgattatacatttattattgtgtctctctctgatgtactgtggattgtacatttaactttggaatggctttgtaataatcagtcttaagaaaatgttgacaagctctggttgcttatttttagaaaatgaggacatttaataataataaaaaaaaagggattaatagcttttgacctcaagtcttttgtcttctgagtgttggagcttggctgaagacatgtttaatactgtacaatttctgaagatggttattaacactgtgctgttaagcatccatttaaaaatatttgttatcttctttgcctgcctgtattttaaaaagaaatacaaagttgtaaaagtaatggatttctttggatgctgaatgcagtgatgttatcagtcagattctttccttggctcagttgtgtttgtatttcctttcttaattccccaaatcttggctgggcacggtggctcacgcctgtaatcccagcactttgggaggctgaggcaggtggttcactggaggttgagttcgagaccagcctggccacatggtgaaaccctgtctctactaaagatataaaaattagctggatgtggtggtgcacacctgtgatcccagctacttgggaggctgaggtgggagaattgcttgaacctggaaggcagaagttgcagtgagctgagatcacaccactgcactccagcctgggtgacagagagactctgtctcaaaaaaaaaaaaaaaaaa

SEQ ID NO: 347 - protein, 494 aa, Homo sapien
MPLYSVTVKWGKEKFEGVELNTDEPPMVFKAQLFALTGVQPARQKVMVKGGTLKDDDWGNIKIKNGMTLLMMGSADALPEEPSAKTVFVEDMTEEQLASAMELPCGLTNLGNTCYMNATVQCIRSVPELKDALKRYAGALRASGEMASAQYITAALRDLFDSMDKTSSSIPPIILLQFLHMAFPQFAEKGEQGQYLQQDANECWIQMMRVLQQKLEAIEDDSVKETDSSSASAATPSKKKSLIDQFFGVEFETTMKCTESEEEEVTKGKENQLQLSCFINQEVKYLFTGLKLRLQEEITKQSPTLQRNALYIKSSKISRLPAYLTIQMVRFFYKEKESVNAKVLKDVKFPLMLDMYELCTPELQEKMVSFRSKFKDLEDKKVNQQPNTSDKKSSPQKEVKYEPFSFADDIGSNNCGYYDLQAVLTHQGRSSSSGHYVSWVKRKQDEWIKFDDDKVSIVTPEDILRLSGGGDWHIAYVLLYGPRRVEIMEEESEQ

SEQ ID NO: 348 - DNA, 3247 bp, Homo sapien
gaggagctctgcgcggcgcggcgggcgatccgagccgggacgggctgcaggcgggggtgctgcagaggacacgaggcggcgggctggagacatggaccgcggcgagcaaggtctgctgagaacagacccagtccctgaggaaggagaagatgttgctgccacgatcagtgccacagagaccctctcggaagaggagcaggaagagctaagaagagaacttgcaaaggtagaagaagaaatccagactctgtctcaagtgttagcagcaaaagagaagcatctagcagagatcaagcggaaacttggaatcaattctctacaggaactaaaacagaacattgccaaagggtggcaagacgtgacagcaacatctgcttacaagaagacatctgaaaccttatcccaggctggacagaaggcctcagctgctttttcgtctgttggctcagtcatcaccaaaaagctggaagatgtaaaaaactccccaacttttaaatcatttgaagaaaaggtcgaaaacttaaagtctaaagtagggggaaccaagcctgctggtggtgattttggagaagtcttgaattcggctgcaaatgctagtgccaccaccacggagcctcttccagaaaagacacaggagagcctgtgagattcctacctttgttctgctacccactgccagatgctgcaagcgaggtccaagcacatcttgtcaacatgcattgccatgaatttctaccagatgtgcttttatttagctttacatattcctttgaccaaatagtttgtgggttaaacaaaatgaaaatatcttcacctctattcttgggaaacaccctttagtgtacatttatgttcctttatttaggaaacaccattataaaaacacttatagtaaatggggacattcactataatgatctaagaagctacagattgtcatagttgttttcctgctttacaaaattgctccagatctggaatgccagtttgacctttgtcttctataatatttcctttttttcccctctttgaatctctgtatatttgattcttaactaaaattgttctcttaaatattctgaatcctggtaattaaaagtttgggtgtattttctttacctccaaggaaagaactactagctacaaaaaatattttggaataagcattgttttggtataaggtacatattttggttgaagacaccagactgaagtaaacagctgtgcatccaatttattatagttttgtaagtaacaatatgtaatcaaacttctaggtgacttgagagtggaacctcctatatcattatttagcaccgtttgtgacagtaaccatttcagtgtattgtttattataccacttatatcaacttatttttcaccaggttaaaattttaatttctacaaaataacattctgaatcaagcacactgtatgttcagtaggttgaactatgaacactgtcatcaatgttcagttcaaaagcctgaaagtttagatctagaagctggtaaaaatgacaatatcaatcacattaggggaaccattgttgtcttcacttaatccatttagcactatttaaaataagcacaccaagttatatgactaatataacttgaaaattttttatactgaggggttggtgataactcttgaggatgtaatgcattaataaaaatcaactcatcattttctacttgttttcaatgtgttggaaactgtaaaatgatactgtagaacctgtctcctactttgaaaactgaatgtcagggctgagtgaatcaaagtgtctagacatatttgcatagaggccaaggtattctattctaataactgcttactcaacactaccaccttttccttatactgtatatgattatggcctacaatgttgtatttgttatttattaaattgtgattgttttattattgtttatgccaaatgttaactgccaagcttggagtgacctaaagcattttttaaaagcatggctagatttacttcagtataaattatcttatgaaaaccaaattttaaaagccacaggtgttgattgttataaaataacatgctgccattcttgattgctagagtttttgttagtactttggatgcaattaaaactatgtgctatcacatgtgaaaagcttaataaattccatctatcagtagtataggtctcaatatttattatgagaccagtggtctggaaacagcttgttgtaccgaatcaactggagtctatgcttaaaaaaaaaaatttttttttaaccatccttaaattattgcttaatggtatcatattaacatattctaaataagggctttaaggcacaggctgttgaagcattttctcagaggagtggatctgtagaagtctgtctttctatagaaatattgtgcttactcaagtgttaaattattttttctatgaactagtctacttcttaaaattcaaacatattcttttgatcacattgtttcttgagcatcctgccctgctactaacttttcaacaaggcaaaatggagtaaagtggcaatttctttagatgagtgaaataccctcaagtctcttttctgcccaaaaagggaaaagtgatagaaatgggggtggcaagtggggtgagtggatgaaggtgggtattgggggtggctgtgaaagaaaataatggagaatcacttttctagacatctacctatacttaatctaagaaacaaagtaatctactgtaaagtactctgccccttgaaagaagtattaaaaagagtgaggatggatttagaaaaaaacatgaatttagaaatattcaaaatggtttttgtggcagattcaatattatgaattcacagatatttaaagaatgagaaacatagtaattagtagaaatgccagaaacagttcctggttcctcttgtgtttgacactaagaaaatagcaagagtgtgaaatctcagatacttatgaaatctcacagatgtaaggactcaagtgtagaagaaaatatccccttcttacaaaaagaaatgtcaatttatggagtttgtgggaaatagggcaagaattcttatgcttatgagagccaagtagtcagtggaagagagtagagctcaaaactggattatcaccttagcaacttagaatagtttgaaatagaaaaaaagtatttaatttggatctggatctgttaagatatgcacagtctattttttgtatagtattggaaaataaaaatgctataatttg

SEQ ID NO: 349 - protein, 184 aa, Homo sapien
MDRGEQGLLRTDPVPEEGEDVAATISATETLSEEEQEELRRELAKVEEEIQTLSQVLAAKEKHLAEIKRKLGINSLQELKQNIAKGWQDVTATSAYKKTSETLSQAGQKASAAFSSVGSVITKKLEDVKNSPTFKSFEEKVENLKSKVGGTKPAGGDFGEVLNSAANASATTTEPLPEKTQESL

SEQ ID NO: 350 - DNA, 3662 bp, Homo sapien
aggtagcaagatggccgccgctgaggaaggctgtagtgtcggggccgaagcggacagggaattggaggagcttctggaaagtgctcttgatgatttcgataaagccaaaccctccccagcacccccttctaccaccacggcccctgatgcttcggggccccagaagagatcgccaggagacactgccaaagatgccctcttcgcttcccaagagaagtttttccaggaactattcgacagtgaactggcttcccaagccactgcggagttcgagaaggcaatgaaggagttggctgaggaagaaccccacctggtggagcagttccaaaagctctcagaggctgcagggagagtgggcagtgatatgacctcccaacaagaattcacttcttgcctaaaggaaacactaagtggattagccaaaaatgccactgaccttcagaactccagcatgtcggaagaagagctgaccaaggccatggaggggctaggcatggacgaaggggatggggaagggaacatcctccccatcatgcagagtattatgcagaacctactctccaaggatgtgctgtacccatcactgaaggagatcacagaaaagtatccagaatggttgcagagtcatcgggaatctctacctccagagcagtttgaaaaatatcaggagcagcacagcgtcatgtgcaaaatatgtgagcagtttgaggcagagacccccacagacagtgaaaccactcaaaaggctcgttttgagatggtgctggatcttatgcagcagctacaagatttaggccatcctccaaaagagctggctggagagatgcctcctggcctcaactttgacctggatgccctcaatctttcgggcccaccaggtgccagtggtgaacagtgtctgatcatgtgaaacacaacacgttttcctctctgagtcccagctatggggaacatctggagtcagcagaaccattgggacctgaggcaggagtgtcacctgcgggagaagtctgcccgctgccctctgtcatcccattcaagattgtgccataccagctgaggtttttcctctgtctctctaggaatagggtctgtttcacaggccatttctgtgaaccctactccattgtggtttctgccactatcaaagttccagctacctgcaaggtgaaggaaggcatcccttttggggcatgcactttctttcctttctcaaaataatgttatatgtggccacactgatgttcacctttacgtccagggtctttgtgccttgtctctactccctctcttggatctggggaggaggggcagagacctgggactctgtatttctatagttctcctggcagagcctttgagaatggggagaaacagcctgggctggggctacaggtctgtcactatgctctcttgccttcagacagaccattctgaattctctaaagggaaagggcttttgcatctaatcacaatagagttgaaagagaggccttaggattctcctctctctaggtgctgagccctcacctccctgttccaggctgagaactcaaatggttaccctgcttcttcctacaatgctgtgtgatatgggtgaacccagcccctgaccttcctctatcccctgcccatcctcccttttacctcctctcttttttaaacacctgtttatcccaacctttttgagctcaagctgtgataaagaagggcccatcctatttcccctcatctagtccatttacgattctcactgactccccgtcttcctggcagacacaaataaacccagtgtcaggtctaggaaattaatggctattcttccccagatacattctggcttatttgagatacatgattctcttagaatcctgtcccttggttcaggaaagtagcttggaaaaggagtaggggtatagcttgggtcccttttcctgcaaggccccatggggcagaatataataaatattctgagtgaggagtgtggtctttttctgatcttcctcagcttccgtaagttgcagagtgaggtatattaggagactagttctacacaatattgtaatgctgggttccatcaacacccaccttccacaactcagtctgcacctcagttggcaaaggagactggatggccatctttcctcatgttcccttgagtatttcaatgtagaaagcccttcaagtggtattatattttaaccttttacattattgttattaatgttagtaatatattgttatgttttctaaattatttttctttaagctgacgtggctttttttctgtggctcccagtgggtctacggaccttggctgacatatgttggtaggtactctggtcagctcagctggctgtcctggttcactcagaagataagtctctccaaagcaaattcacatgcattatgagtcgctttgagcttctgacatgtcacttgccccgaggttaaaacttttcaccccttgaagaccttacatgttttatggtattggtgaggaaggaaatgttctcaaggtctcaggctatttgggaaattccaactcctataccttaccagagcatggaagagcccagatctgaatgtaaaacgtctctgttctgccagagatggaaaaaatacaggtatacttgtgatatagtcatggggcttcagtgtcactattttctccttaaagctccagccaaaaactggacaaggatagagaggaggagggaagaacaaaagagcccttctctatgaaccttgtgccttctgtcctaccagttttcttttacagattctcacttctgctagcctagccagggcttactccaggaatctaaatagatgccctagtccactttatctttgttcccaaggcactcatttttattttgattttgattgaatgtgagcaggttgacctcaggtcacactttgttccaaaaacttttggaattattccaggacttgtggtggagttatggtactctagggcagtctttctcaaactatgtatggtaaaggaccaggttttttgttttccagtccttcacttatcaatatgcattcctattgccgatgacaggtatggagttcacactgtgtgctgccgacccggcaagtttgacagcacccaaactggccagactgttctgtaggttaagtccattgatcatgtacttggatatcacagcaacattgaaatgctaaaaagtttttaaacactctcaatttctaattcaccatgtcacagactggtgaaaaaaaaaaaaaggtgttcactgaccagcacaagtctgcagatcatctttgagtagcactgttttggggccctcggtctctctgaagaccctagcagaactgatacctacctgtatctcttgttctctcctatttgagtttcacttccagagaacttgttcttcagcaagaatgtgtcactagtaaggacatctctagcatttctctagccttccttttctgctgctcaaaaataatcgttacaaagcttaggtttaagctgtatatgaaatatttatgcgactctcaaactttaaaggagttgctcctttgttccaaaattaaatgtgttagataaatttgtgattgtatgggtggcttcatgaattaagaattgaattaatacagactttttgataataaaaaaaaaaaaa

SEQ ID NO: 351 - protein, 299 aa, Homo sapien
MAAAEEGCSVGAEADRELEELLESALDDFDKAKPSPAPPSTTTAPDASGPQKRSPGDTAKDALFASQEKFFQELFDSELASQATAEFEKAMKELAEEEPHLVEQFQKLSEAAGRVGSDMTSQQEFTSCLKETLSGLAKNATDLQNSSMSEEELTKAMEGLGMDEGDGEGNILPIMQSIMQNLLSKDVLYPSLKEITEKYPEWLQSHRESLPPEQFEKYQEQHSVMCKICEQFEAETPTDSETTQKARFEMVLDLMQQLQDLGHPPKELAGEMPPGLNFDLDALNLSGPPGASGEQCLIM

SEQ ID NO: 352 - DNA, 1568 bp, Homo sapien
cgcaacgccggtgcctgaggagcgatgccgagggaaatcatcaccctacagttgggccagtgcggcaatcagattgggttcgagttctggaaacagctgtgcgccgagcatggtatcagccccgaggcgatcgtggaggagttcgccaccgagggcactgaccgcaaggacgtctttttctaccaggcagacgatgagcactacatcccccgggccgtgctgctggacttggaaccccgggtgatccactccatcctcaactccccctatgccaagctctacaacccagagaacatctacctgtcggaacatggaggaggagctggcaacaactgggccagcggattctcccagggagaaaagatccatgaggacatttttgacatcatagaccgggaggcagatggtagtgacagtctagagggctttgtgctgtgtcactccattgctggggggacaggctctggactgggttcctacctcttagaacggctgaatgacaggtatcctaagaagctggtgcagacatactcagtgtttcccaaccaggacgagatgagcgatgtggtggtccagccttacaattcactcctcacactcaagaggctgacgcagaatgcagactgtctggtggtgctggacaacacagccctgaaccggattgccacagaccgcctgcacatccagaacccatccttctcccagatcaaccagctggtgtctaccatcatgtcagccagcaccaccaccctgcgctaccctggctacatgaacaatgacctcatcggcctcatcgcctcgctcattcccaccccacggctccacttcctcatgaccggctacacccctctcactacggaccagtcagtggccagcgtgaggaagaccacggtcctggatgtcatgaggcggctgctgcagcccaagaacgtgatggtgtccacaggccgagaccgccagaccaaccactgctacatcgccatcctcaacatcatccagggagaggtggaccccacccaggtccacaagagcttgcagaggatccgggaacgcaagttggccaacttcatcccgtggggccccgccagcatccaggtggccctgtcgaggaagtctccctacctgccctcggcccaccgggtcagcgggctcatgatggccaaccacaccagcatctcctcgctcttcgagagaacctgtcgccagtatgacaagctgcgtaagcgggaggccttcctggagcagttccgcaaggaggacatgttcaaggacaactttgatgagatggacacatccagggagattgtgcagcagctcatcgatgagtaccatgcggccacacggccagactacatctcctggggcacccaggagcagtgagtcccccaggacaggggaccctcatctgccttactggttggcccaagccctgcctgactgaccaccccctcagagcacagatcagggacctcacgcatctctttctcatatacatggactctctgttggcctgcaaacacatttacttctcctcttatgagactatttatctttaataaagcactggg

SEQ ID NO: 353 - protein, 451 aa, Homo sapien
MPREIITLQLGQCGNQIGFEFWKQLCAEHGISPEAIVEEFATEGTDRKDVFFYQADDEHYIPRAVLLDLEPRVIHSILNSPYAKLYNPENIYLSEHGGGAGNNWASGFSQGEKIHEDIFDIIDREADGSDSLEGFVLCHSIAGGTGSGLGSYLLERLNDRYPKKLVQTYSVFPNQDEMSDVVVQPYNSLLTLKRLTQNADCLVVLDNTALNRIATDRLHIQNPSFSQINQLVSTIMSASTTTLRYPGYMNNDLIGLIASLIPTPRLHFLMTGYTPLTTDQSVASVRKTTVLDVMRRLLQPKNVMVSTGRDRQTNHCYIAILNIIQGEVDPTQVHKSLQRIRERKLANFIPWGPASIQVALSRKSPYLPSAHRVSGLMMANHTSISSLFERTCRQYDKLRKREAFLEQFRKEDMFKDNFDEMDTSREIVQQLIDEYHAATRPDYISWGTQEQ

SEQ ID NO: 354 - DNA, 3778 bp, Homo sapien
tttttaaattttgcatttgacttaaagtgccatgagaaaatttgcatactgcaaggtggtcctagccacctccttgatttgggtactcttggatatgttcctgctgctttacttcagtgaatgcaacaaatgtgatgaaaaaaaggagagaggacttcctgctggagatgttctagagccagtacaaaagcctcatgaaggtcctggagaaatggggaaaccagtcgtcattcctaaagaggatcaagaaaagatgaaagagatgtttaaaatcaatcagttcaatttaatggcaagtgagatgattgcactcaacagatctttaccagatgttaggttagaagggtgtaaaacaaaggtgtatccagataatcttcctacaacaagtgtggtgattgttttccacaatgaggcttggagcacacttctgcgaactgtccatagtgtcattaatcgctcaccaagacacatgatagaagaaattgttctagtagatgatgccagtgaaagagactttttgaaaaggcctttagagagttatgtgaaaaaactaaaagtaccagttcatgtaattcgaatggaacaacgttctggattgatcagagctagattaaaaggagctgctgtgtctaaaggccaagtgatcaccttcctggatgcccattgtgagtgtacagtgggatggctggagcctctcttggccaggatcaaacatgacaggagaacagtggtgtgtcccatcatcgatgtgatcagtgatgatacttttgagtacatggcaggctctgatatgacctatggtgggttcaactggaagctcaattttcgctggtatcctgttccccaaagagaaatggacagaaggaaaggtgatcggactcttcctgtcaggacacctaccatggcaggaggccttttttcaatagacagagattactttcaggaaattggaacatatgatgctggaatggatatttggggaggagaaaacctagaaatttcctttaggatttggcagtgtggaggaactttggaaattgttacatgctcacatgttggacatgtgtttcggaaagctacaccttacacgtttccaggaggcacagggcagattatcaataaaaataacagacgacttgcagaagtgtggatggatgaattcaagaatttcttctatataatttctccaggtgttacaaaggtagattatggagatatatcgtcaagagttggtctaagacacaaactacaatgcaaacctttttcctggtacctagagaatatatatcctgattctcaaattccacgtcactatttctcattgggagagatacgaaatgtggaaacgaatcagtgtctagataacatggctagaaaagagaatgaaaaagttggaatttttaattgccatggtatggggggtaatcaggttttctcttatactgccaacaaagaaattagaacagatgacctttgcttggatgtttccaaacttaatggcccagttacaatgctcaaatgccaccacctaaaaggcaaccaactctgggagtatgacccagtgaaattaaccctgcagcatgtgaacagtaatcagtgcctggataaagccacagaagaggatagccaggtgcccagcattagagactgcaatggaagtcggtcccagcagtggcttcttcgaaacgtcaccctgccagaaatattctgagaccaaatttacaaaaaaacgaaaaaaataaggattgactgggctacctcagcatacatttctgccacattcttaagtagcaaaaaaggaaaagtgctttcctcctctgcaggatgtaaggtttatcagccattaaaacttagacttctctagcttttcactagctgtgaaccagccttcctgtccatggacgtgaaactgcatagtaatgagactgtgcacactgatgtttacaagattgaaagagtctttctccgaaaatcatggtaaagaatactgagacaatgaaaaaaaatcaacaaaatatgctttctggagaactgtaccttctatggtttgcttgcacatcagtagtttctgctgaacgtgctgtcataatgaagagatttccaagattttttttcctgattagaacgggtagccagtatattaaatattgatagaaaaataaaagaactggaaccagattcagaatcttgaaaacaacattttttacaacaaacaaaaaaactatattaaacagggtttaaaggaaaattaaaacagaactatgaagaagtacaatttgttatagtatagtatcaaatttctatatagattttatacctcagtggggaaaaataactgattccaatgacattcattttgttttcatctgtgatagtcatggatgcttttattttccttggggtgctgaaattgagctgaaaaaaaaaggctctttgaatatagttttaatttctctctacagttttttttgtttggtttgtgggctgttggaattgtaatttttaattgccttctaaaaaatggaaatttaacaatgtctgatctcagctgaacaaattagatgtttcagttgctcttgggtcaactggcttacagatttacatgtgcacacacacacaaatttcttatcacattttcgacttcttcacttgacctaactgattatgcgaaatacccaagattcatgctactgttccacatttgttttcacagcaataaatcttcagttctgttgtttatgattccacttaacaaggggcctgcaaatgtgatttattatttgggtatttggagataatacatttgagggttttttggaaaacctttttcactccatactcaaatatgcttcattgtcaaatgcatatttaaattaaattattgaattgtaatgtttatctgctgctttttttaaataaaatttgactgaaaatgtttaattggcattttttaatgacttacccaagaaaagtgcagctattattccatattaataggcttgcatttcttttcctaaatcttatttaggctaaatcagttttattgtcctctgattttttttaataccacagaaatcacctgagtgtcaattgaaaagttgtcaattaaaaggtaaccttttaactctcgtaggaggaatctcattaagacatttttcctgatatgtagagcagtctgttggcaaaaatgcatatattttctttcatatttgtaaaattatatttaatggaattcttttctttgattatcaaggactttcactgcaggcagtgctatttcttgtgcctaagaatgtttccaaaagtcgcatcgctaatgatatttgccaagttgagtgtacacaaagtttctcatatcctgttcaagttaatcaacatcaaacacatggggatgctttagggtgagtctataatacaaaatgcataaaccatgtccccaggaaatttgaaaggaagcaagtgctgaatggaatttttttccttttccatgagctgtgttaattctatctccagtaggcctaatgcttgaaataagcaagatgtctaatcaataaattattttcatgctcagaatttcaggtttttgtactccagcatagcttggtcttatttcttactgtatgaaagcttaacagcaatgtgatttaaggttttgttttaaatgggagatgtaagtgatttaattcatgggtacttttagaacctgatagataatcccattgcctttatttttctaattaaagaatcctaaatactttgaaaatacaaaatattcctg

SEQ ID NO: 355 - protein, 559 aa, Homo sapien
MRKFAYCKVVLATSLIWVLLDMFLLLYFSECNKCDEKKERGLPAGDVLEPVQKPHEGPGEMGKPVVIPKEDQEKMKEMFKINQFNLMASEMIALNRSLPDVRLEGCKTKVYPDNLPTTSVVIVFHNEAWSTLLRTVHSVINRSPRHMIEEIVLVDDASERDFLKRPLESYVKKLKVPVHVIRMEQRSGLIRARLKGAAVSKGQVITFLDAHCECTVGWLEPLLARIKHDRRTVVCPIIDVISDDTFEYMAGSDMTYGGFNWKLNFRWYPVPQREMDRRKGDRTLPVRTPTMAGGLFSIDRDYFQEIGTYDAGMDIWGGENLEISFRIWQCGGTLEIVTCSHVGHVFRKATPYTFPGGTGQIINKNNRRLAEVWMDEFKNFFYIISPGVTKVDYGDISSRVGLRHKLQCKPFSWYLENIYPDSQIPRHYFSLGEIRNVETNQCLDNMARKENEKVGIFNCHGMGGNQVFSYTANKEIRTDDLCLDVSKLNGPVTMLKCHHLKGNQLWEYDPVKLTLQHVNSNQCLDKATEEDSQVPSIRDCNGSRSQQWLLRNVTLPEIF

SEQ ID NO: 356 - DNA, 1367 bp, Homo sapien
ccggccggccgaagagttcacaagtgtgaagcctgaagccgccgggtgccgctgtgtagaaagaagctaaagcacttccagagcctgctgagctcagaggttcggaagacttatcgaccatggagcgcgcgtcctgcttgttgctgctgctgctgccgctggtgcacgtctctgcgaccacgccagaaccttgtgagctggacgatgaagatttccgctgcgtctgcaacttctccgaacctcagcccgactggtccgaagccttccagtgtgtgtctgcagtagaggtggagatccatgccggcggtctcaacctagagccgtttctaaagcgcgtcgatgcggacgccgacccgcggcagtatgctgacacggtcaaggctctccgcgtgcggcggctcacagtgggagccgcacaggttcctgctcagctactggtaggcgccctgcgtgtgctagcgtactcccgcctcaaggaactgacgctcgaggacctaaagataaccggcaccatgcctccgctgcctctggaagccacaggacttgcactttccagcttgcgcctacgcaacgtgtcgtgggcgacagggcgttcttggctcgccgagctgcagcagtggctcaagccaggcctcaaggtactgagcattgcccaagcacactcgcctgccttttcctgcgaacaggttcgcgccttcccggcccttaccagcctagacctgtctgacaatcctggactgggcgaacgcggactgatggcggctctctgtccccacaagttcccggccatccagaatctagcgctgcgcaacacaggaatggagacgcccacaggcgtgtgcgccgcactggcggcggcaggtgtgcagccccacagcctagacctcagccacaactcgctgcgcgccaccgtaaaccctagcgctccgagatgcatgtggtccagcgccctgaactccctcaatctgtcgttcgctgggctggaacaggtgcctaaaggactgccagccaagctcagagtgctcgatctcagctgcaacagactgaacagggcgccgcagcctgacgagctgcccgaggtggataacctgacactggacgggaatcccttcctggtccctggaactgccctcccccacgagggctcaatgaactccggcgtggtcccagcctgtgcacgttcgaccctgtcggtgggggtgtcgggaaccctggtgctgctccaaggggcccggggctttgcctaagatccaagacagaataatgaatggactcaaactgccttggcttcaggggagtcccgtcaggacgttgaggacttttcgaccaattcaaccctttgccccacctttattaaaatcttaaac

SEQ ID NO: 357 - protein, 375 aa, Homo sapien
MERASCLLLLLLPLVHVSATTPEPCELDDEDFRCVCNFSEPQPDWSEAFQCVSAVEVEIHAGGLNLEPFLKRVDADADPRQYADTVKALRVRRLTVGAAQVPAQLLVGALRVLAYSRLKELTLEDLKITGTMPPLPLEATGLALSSLRLRNVSWATGRSWLAELQQWLKPGLKVLSIAQAHSPAFSCEQVRAFPALTSLDLSDNPGLGERGLMAALCPHKFPAIQNLALRNTGMETPTGVCAALAAAGVQPHSLDLSHNSLRATVNPSAPRCMWSSALNSLNLSFAGLEQVPKGLPAKLRVLDLSCNRLNRAPQPDELPEVDNLTLDGNPFLVPGTALPHEGSMNSGVVPACARSTLSVGVSGTLVLLQGARGFA

SEQ ID NO: 358 - DNA, 3000 bp, Homo sapien
ccgccggccggggcgcctggctgcactcagcgccggagccgggagctagcggccgccgccatgtcccaccagaccggcatccaagcaagtgaagatgttaaagagatctttgccagagccagaaatggaaagtacagacttctgaaaatatctattgaaaatgagcaacttgtgattggatcatatagtcagccttcagattcctgggataaggattatgattcctttgttttacccctgttggaggacaaacaaccatgctatatattattcaggttagattctcagaatgcccagggatatgaatggatattcattgcatggtctccagatcattctcatgttcgtcaaaaaatgttgtatgcagcaacaagagcaactctgaagaaggaatttggaggtggccacattaaagatgaagtatttggaacagtaaaggaagatgtatcattacatggatataaaaaatacttgctgtcacaatcttcccctgccccactgactgcagctgaggaagaactacgacagattaaaatcaatgaggtacagactgacgtgggtgtggacactaagcatcaaacactacaaggagtagcatttcccatttctcgagaagcctttcaggctttggaaaaattgaataatagacagctcaactatgtgcagttggaaatagatataaaaaatgaaattataattttggccaacacaacaaatacagaactgaaagatttgccaaagaggattcccaaggattcagctcgttaccatttctttctgtataaacattcccatgaaggagactatttagagtccatagtttttatttattcaatgcctggatacacatgcagtataagagagcggatgctgtattctagctgcaagagccgtctgctagaaattgtagaaagacaactacaaatggatgtaattagaaagatcgagatagacaatggggatgagttgactgcagacttcctttatgaagaagtacatcccaagcagcatgcacacaagcaaagttttgcaaaaccaaaaggtcctgcaggaaaaagaggaattcgaagactaattaggggcccagcggaaactgaagctactactgattaaagtcatcacattaaacattgtaatactagttttttaaaagtccagcttttagtacaggagaactgaaatcattccatgttgatataaagtagggaaaaaaattgtactttttggaaaatagcacttttcacttctgtgtgtttttaaaattaatgttatagaagactcatgatttctatttttgagttaaagctagaaaagggttcaacataatgtttaattttgtcacactgttttcatagcgttgattccacacttcaaatacttcttaaaattttatacagttgggccagttctagaaagtctgatgtctcaaagggtaaacttactactttcttgtgggacagaaagaccttaaaatattcatattacttaatgaatatgttaaggaccaggctagagtattttctaagctggaaacttagtgtgccttggaaaagccgcaagttgcttactccgagtagctgtgctagctctgtcagactgtaggatcatgtctgcaacttttagaaatagtgctttatattgcagcagtcttttatatttgacttttttttaatagcattaaaattgcagatcagctcactctgaaactttaagggtaccagatattttctatactgcaggatttctgatgacattgaaagactttaaacagccttagtaaattatctttctaatgctctgtgaggccaaacatttatgttcagattgaaatttaaattaatatcattcaaaaggaaacaaaaaatgttgagttttaaaaatcaggattgacttttttctccaaaaccatacatttatgggcaaattgtgttctttatcacttccgagcaaatactcagatttaaaattactttaaagtcctggtacttaacaggctaacgtagataaacaccttaataatctcagttaatactgtatttcaaaacacatttaactgttttctaatgctttgcattatcagttacaacctagagagattttgagcctcatatttctttgatacttgaaatagagggagctagaacacttaatgtttaatctgttaaacctgctgcaagagccataactttgaggcattttctaaatgaactgtggggatccaggatttgtaatttcttgatctaaactttatgctgcataaatcacttatcggaaatgcacatttcatagtgtgaagcactcatttctaaaccttattatctaaggtaatatatgcacctttcagaaatttgtgttcgagtaagtaaagcatattagaataattgtgggttgacagatttttaaaatagaatttagagtatttggggttttgtttgtttacaaataatcagactataatatttaaacatgcaaaataactgacaataatgttgcacttgtttactaaagatataagttgttccatgggtgtacacgtagacagacacacatacacccaaattattgcattaagaatcctggagcagaccatagctgaagctgttattttcagtcaggaagactacctgtcatgaaggtataaaataatttagaagtgaatgtttttctgtaccatctatgtgcaattatactctaaattccactacactacattaaagtaaatggacattccagaatatagatgtgattatagtcttaaactaattattattaaaccaatgattgctgaaaatcagtgatgcatttgttatagagtataactcatcgtttacagtatgttttagttggcagtatcatacctagatggtgaataacatattcccagtaaatttatatagcagtgaagaattacatgccttctggtggacattttataagtgcattttatatcacaataaaaattttttctctttaaaaaaaaaaaacaagaaaaaaaaaaaa

SEQ ID NO: 359 - protein, 350 aa, Homo sapien
MSHQTGIQASEDVKEIFARARNGKYRLLKISIENEQLVIGSYSQPSDSWDKDYDSFVLPLLEDKQPCYILFRLDSQNAQGYEWIFIAWSPDHSHVRQKMLYAATRATLKKEFGGGHIKDEVFGTVKEDVSLHGYKKYLLSQSSPAPLTAAEEELRQIKINEVQTDVGVDTKHQTLQGVAFPISREAFQALEKLNNRQLNYVQLEIDIKNEIIILANTTNTELKDLPKRIPKDSARYHFFLYKHSHEGDYLESIVFIYSMPGYTCSIRERMLYSSCKSRLLEIVERQLQMDVIRKIEIDNGDELTADFLYEEVHPKQHAHKQSFAKPKGPAGKRGIRRLIRGPAETEATTD

SEQ ID NO: 360 - DNA, 540 bp, Homo sapien
gtccgcgtcgctagctagtcgttctgaagcggcggccagagaagagtcaagggcacgagcatcgggtagccatgcctttcttggacatccagaaaaggttcggccttaacatagatcgatggttgacaatccagagtggtgaacagccctacaagatggctggtcgatgccatgcttttgaaaaagaatggatagaatgtgcacatggaatcggttatactcgggcagagaaagagtgcaagatagaatatgatgatttcgtagagtgtttgcttcggcagaaaacgatgagacgtgcaggtaccatcaggaagcagcgggataagctgataaaggaaggaaagtacacccctccacctcaccacattggcaagggggagcctcggccctgaacagagcagctgctgatgtctggaggctgattttcctgttctctgttctccactggaaaggttgtttacgacaaacctccttgtcaaagtgtgtaaaaataaaggattgctccatcctaaaaaaaaaaaaaaaaaaaaaaaaaaaaaa

SEQ ID NO: 361 - protein, 106 aa, Homo sapien
MPFLDIQKRFGLNIDRWLTIQSGEQPYKMAGRCHAFEKEWIECAHGIGYTRAEKECKIEYDDFVECLLRQKTMRRAGTIRKQRDKLIKEGKYTPPPHHIGKGEPRP

SEQ ID NO: 362 - DNA, 2610 bp, Homo sapien
cggacgcgtggggcccggggggctgaggcgcccgccgcctgccgcgggggccgctcgcgtcctccatggaggccggagaggaaccgctgctgctggccgaactcaagcccgggcgcccccaccagtttgattggaagtccagctgtgaaacctggagcgtcgccttctccccagatggctcctggtttgcttggtctcaaggacactgcatcgtcaaactgatcccctggccgttggaggagcagttcatccctaaagggtttgaagccaaaagccgaagtagcaaaaatgagacgaaagggcggggcagcccaaaagagaagacgctggactgtggtcagattgtctgggggctggccttcagcccgtggccttccccacccagcaggaagctctgggcacgccaccacccccaagtgcccgatgtctcttgcctggttcttgctacgggactcaacgatgggcagatcaagatctgggaggtgcagacagggctcctgcttttgaatctttccggccaccaagatgtcgtgagagatctgagcttcacacccagtggcagtttgattttggtctccgcgtcacgggataagactcttcgcatctgggacctgaataaacacggtaaacagattcaagtgttatcgggccacctgcagtgggtttactgctgttccatctccccagactgcagcatgctgtgctctgcagctggagagaagtcggtctttctatggagcatgaggtcctacacgttaattcggaagctagagggccatcaaagcagtgttgtctcttgtgacttctcccccgactctgccctgcttgtcacggcttcttacgataccaatgtgattatgtgggacccctacaccggcgaaaggctgaggtcactccaccacacccaggttgaccccgccatggatgacagtgacgtccacattagctcactgagatctgtgtgcttctctccagaaggcttgtaccttgccacggtggcagatgacagactcctcaggatctgggccctggaactgaaaactcccattgcatttgctcctatgaccaatgggctttgctgcacattttttccacatggtggagtcattgccacagggacaagagatggccacgtccagttctggacagctcctagggtcctgtcctcactgaagcacttatgccggaaagcccttcgaagtttcctaacaacttaccaagtcctagcactgccaatccccaagaaaatgaaagagttcctcacatacaggactttttaagcaacaccacatcttgtgcttctttgtagcagggtaaatcgtcctgtcaaagggagttgctggaataatgggccaaacatctggtcttgcattgaaatagcatttctttgggattgtgaatagaatgtagcaaaaccagattccagtgtactagtcatggatctttctctccctggcatgtgaaagtcagtcttagaggaagagattccacttgcacggcaacagagccttacgttaaattttcagtccagttatgaacagcaagtgttgaactctttctgcttgttttgattcaaagtgcagttactgatgttgttttgattatgcaactaagtaggcctccagagcctctctagtggcagagcagctcacactccctccgctgggaacgatggcttctgcctagtacctatccttgtgtttctgatgcagtggtagcattggttcaagttctctcctgctgtggtcagagttgcttcgatgttggccaagtgcttttcttcttgggctcccttctgacctgcaggacagttttcctggagccatttggtatgaggtattaatttagcttaactaaattacaggggactcagaggccgtgctcctgaccgatccagacactattactggcttttttttttttttaacaatggtgtgcatgtgcaggaaatgacaaatttgtatgtcagattatacaaggatgtattcttaaaccgcatgactattcagatggctactgagttatcagtggccatttattagcatcatatttatttgtattttctcaacagatgttaaggtacaactgtgtttttctcgattatctaaaaaccatagtacttaaattgaacagttgcaaagatgtcttaattgtgtaaagaattggtgtagtcatgactttagctgatactcttatgtacgagatctgtctctgctgtttaacttcattggattaatcagctggtttcaactctactgcgaaacaaaaatagctccttaaaagtactgttctccttcagtggcatgtagttatctaatcaagacacctcattcaaacaaaacctgccttaggaaaatttaatatattttaaattattttaaaagaaatacaacatcttattctttagctttcttaatcggtgctttatggaggccagtgtaacgttacatgactcgttgagaaagttgaggaatttcctctaccacctttgttgcttgaagaaaaacatgtcttttcaaaatgagaggctttcattgaagaaaagaaaaaaacaacagttaaaaaaaaaaaaaaaaaaaaaaaaaaaaaaaaaaaaaaaaaaaaaaaaaa

SEQ ID NO: 363 - protein, 404 aa, Homo sapien
MEAGEEPLLLAELKPGRPHQFDWKSSCETWSVAFSPDGSWFAWSQGHCIVKLIPWPLEEQFIPKGFEAKSRSSKNETKGRGSPKEKTLDCGQIVWGLAFSPWPSPPSRKLWARHHPQVPDVSCLVLATGLNDGQIKIWEVQTGLLLLNLSGHQDVVRDLSFTPSGSLILVSASRDKTLRIWDLNKHGKQIQVLSGHLQWVYCCSISPDCSMLCSAAGEKSVFLWSMRSYTLIRKLEGHQSSVVSCDFSPDSALLVTASYDTNVIMWDPYTGERLRSLHHTQVDPAMDDSDVHISSLRSVCFSPEGLYLATVADDRLLRIWALELKTPIAFAPMTNGLCCTFFPHGGVIATGTRDGHVQFWTAPRVLSSLKHLCRKALRSFLTTYQVLALPIPKKMKEFLTYRTF

SEQ ID NO: 364 - DNA, 2154 bp, Homo sapien
atataaccgcgtggcccgcgcgcgcgcttccctcccggcgcagtcaccggcgcggtctatggctgcgacttctctaatgtctgctttggctgcccggctgctgcagcccgcgcacagctgctcccttcgccttcgccctttccacctcgcggcagttcgaaatgaagctgttgtcatttctggaaggaaactggcccagcagatcaagcaggaagtgcggcaggaggtagaagagtgggtggcctcaggcaacaaacggccacacctgagtgtgatcctggttggcgagaatcctgcaagtcactcctatgtcctcaacaaaaccagggcagctgcagttgtgggaatcaacagtgagacaattatgaaaccagcttcaatttcagaggaagaattgttgaatttaatcaataaactgaataatgatgataatgtagatggcctccttgttcagttgcctcttccagagcatattgatgagagaaggatctgcaatgctgtttctccagacaaggatgttgatggctttcatgtaattaatgtaggacgaatgtgtttggatcagtattccatgttaccggctactccatggggtgtgtgggaaataatcaagcgaactggcattccaaccctagggaagaatgtggttgtggctggaaggtcaaaaaacgttggaatgcccattgcaatgttactgcacacagatggggcgcatgaacgtcccggaggtgatgccactgttacaatatctcatcgatatactcccaaagagcagttgaagaaacatacaattcttgcagatattgtaatatctgctgcaggtattccaaatctgatcacagcagatatgatcaaggaaggagcagcagtcattgatgtgggaataaatagagttcacgatcctgtaactgccaaacccaagttggttggagatgtggattttgaaggagtcagacaaaaagctgggtatatcactccagttcctggaggtgttggccccatgacagtggcaatgctaatgaagaataccattattgctgcaaaaaaggtgctgaggcttgaagagcgagaagtgctgaagtctaaagagcttggggtagccactaattaactactgtgtcttctgtgtcacaaacagcactccaggccagctcaagaagcaaagcaggccaatagaaatgcaatatttttaatttattctactgaaatggtttaaaatgatgccttgtatttattgaaagcttaaatgggtgggtgtttctgcacatacctctgcagtacctcaccagggagcattccagtatcatgcagggtcctgtgatctagccaggagcagccattaacctagtgattaatatgggagacattaccatatggaggatggatgcttcactttgtcaagcacctcagttacacattcgccttttctaggattgcatttcccaagtgctattgcaataacagttgatactcattttaggtaccagaccttttgagttcaactgatcaaaccaaaggaaaagtgttgctagagaaaattggggaaaaggtgaaaaagaaaaaatggtagtaattgagcagaaaaaaattaatttatatatgtattgattggcaaccagatttatctaagtagaactgaattggctaggaaaaaagaaaaactgcatgttaatcattttcctaagctgtccttttgaggcttagtcagtttattgggaaaatgtttaggattattccttgctattagtactcattttatgtatgttacccttcagtaagttctccccattttagttttctaggactgaaaggattcttttctacattatacatgtgtgttgtcatatttggcttttgctatatactttaacttcattgttaaatttttgtattgtatagtttctttggtgtatcttaaaacctatttttgaaaaacaaacttggcttgataatcatttgggcagcttgggtaagtacgcaacttacttttccaccaaagaactgtcagcagctgcctgcttttctgtgatgtatgtatcctgttgacttttccagaaattttttaagagtttgagttactattgaatttaatcagactttctgattaaagggttttctttcttttttaataaaacacatctgtctggtatggta

SEQ ID NO: 365 - protein, 344 aa, Homo sapien
MSALAARLLQPAHSCSLRLRPFHLAAVRNEAVVISGRKLAQQIKQEVRQEVEEWVASGNKRPHLSVILVGENPASHSYVLNKTRAAAVVGINSETIMKPASISEEELLNLINKLNNDDNVDGLLVQLPLPEHIDERRICNAVSPDKDVDGFHVINVGRMCLDQYSMLPATPWGVWEIIKRTGIPTLGKNVVVAGRSKNVGMPIAMLLHTDGAHERPGGDATVTISHRYTPKEQLKKHTILADIVISAAGIPNLITADMIKEGAAVIDVGINRVHDPVTAKPKLVGDVDFEGVRQKAGYITPVPGGVGPMTVAMLMKNTIIAAKKVLRLEEREVLKSKELGVATN

SEQ ID NO: 366 - DNA, 1614 bp, Homo sapien
ggtagttggttgtgggcactgggttagaggtatcacgtgggggcactttcgtcttagcttttggacaagacgcaggcgcaacccacggctgctgcggggatccttgtggcccttccggtcggtggaaccaatccgtgcacagagaagcggggcgaactgaggcgagtgaagtggactctgagggctaccgctaccgccactgctgcggcaggggcgtggagggcagagggccgcggaggccgcagttgcaaacatggctcagagcagagacggcggaaacccgttcgccgagcccagcgagcttgacaacccctttcaggacccagctgtgatccagcaccgacccagccggcagtatgccacgcttgacgtctacaacccttttgagacccgggagccaccaccagcctatgagcctccagcccctgccccattgcctccaccctcagctccctccttgcagccctcgagaaagctcagccccacagaacctaagaactatggctcatacagcactcaggcctcagctgcagcagccacagctgagctgctgaagaaacaggaggagctcaaccggaaggcagaggagttggaccgaagggagcgagagctgcagcatgctgccctggggggcacagctactcgacagaacaattggccccctctaccttctttttgtccagttcagccctgctttttccaggacatctccatggagatcccccaagaatttcagaagactgtatccaccatgtactacctctggatgtgcagcacgctggctcttctcctgaacttcctcgcctgcctggccagcttctgtgtggaaaccaacaatggcgcaggctttgggctttctatcctctgggtcctccttttcactccctgctcctttgtctgctggtaccgccccatgtataaggctttccggagtgacagttcattcaatttcttcgttttcttcttcattttcttcgtccaggatgtgctctttgtcctccaggccattggtatcccaggttggggattcagtggctggatctctgctctggtggtgccgaagggcaacacagcagtatccgtgctcatgctgctggtcgccctgctcttcactggcattgctgtgctaggaattgtcatgctgaaacggatccactccttataccgccgcacaggtgccagctttcagaaggcccagcaagaatttgctgctggtgtcttctccaaccctgcggtgcgaaccgcagctgccaatgcagccgctggggctgctgaaaatgccttccgggccccgtgacccctgactgggatgccctggccctgctacttgagggagctgacttagctcccgtccctaaggtctctgggacttggagagacatcactaactgatggctcctccgtagtgctcccaatcctatggccatgactgctgaacctgacaggcgtgtggggagttcactgtgacctagtccccccatcaggccacactgctgccacctctcacacgccccaacccagcttccctctgctgtgccacggctgttgcttcggttatttaaataaaaagaaagtggaactggaactgacaaaaaaaaaaaaaaaaaaaaaaaa

SEQ ID NO: 367 - protein, 347 aa, Homo sapien
MAQSRDGGNPFAEPSELDNPFQDPAVIQHRPSRQYATLDVYNPFETREPPPAYEPPAPAPLPPPSAPSLQPSRKLSPTEPKNYGSYSTQASAAAATAELLKKQEELNRKAEELDRRERELQHAALGGTATRQNNWPPLPSFCPVQPCFFQDISMEIPQEFQKTVSTMYYLWMCSTLALLLNFLACLASFCVETNNGAGFGLSILWVLLFTPCSFVCWYRPMYKAFRSDSSFNFFVFFFIFFVQDVLFVLQAIGIPGWGFSGWISALVVPKGNTAVSVLMLLVALLFTGIAVLGIVMLKRIHSLYRRTGASFQKAQQEFAAGVFSNPAVRTAAANAAAGAAENAFRAP

SEQ ID NO: 368 - DNA, 1620 bp, Homo sapien
gaattccgggtttgaaaaggagttctagggaagaagagagttagttagcacatcaatgggagcagggctcttaccccacgtggtgttacatatatattattttcatacatggtttctggctcataagttccttagcccttgctatagtcttttgtgttcggtcttaagggcaggactgtactcttccctcacctttctaattgtgcatcttaagaccttccccagagagggtggtgccctgtagttgtgggaaggaatgctggcatcatgaagcttccataaaaacccgagaaacgagcttctggatagctggacacatggaggtcctggagggtggagcccagggaggcatggaagctccacagcccttcccccataccttaccctatttcctctgtatcctttgtaatatcctttatgataaaccagcaaatgtgtgtaaatgtttccctaaggtctgtggccactccagcaaattaattgaacctaaagagggggtcgtgggaaccccaacttgaagccagtcagtcagaagttctggatgtccagacttcagactggtgtctgaaagggtggaggcagtcttggggaccgagcccccaatctatgggatctgacactatctccagtagtgttggaattgagtcaccagcgtgtccactggttagtgtgtgagaaactccctaccattggtcacagaagtcttcttctgtgttgatagttgtagtgtgacagcagaggaaaaacaaagtcagaaagagttttcccgaacacacccaatttctccattttactatccatttccacaaacactgactacaatagaagtataaaaattactccactgcatcattcagctttccatctctctcagacaccaagctgcagatccaggtcactttgtaggtcaccacctagaggggaggaagacctcgctttggagagtgggaataaaacgctcgtggaaaagggtacacgcttttctgggaaagtgaggccaccatggctctggagaagtctcttgtccggctccttctgcttgtcctgatactgctggtgctgggctgggtccagccttccctgggcaaggaatcccgggccaagaaattccagcggcagcatatggactcagacagttcccccagcagcagctccacctactgtaaccaaatgatgaggcgccggaatatgacacaggggcggtgcaaaccagtgaacacctttgtgcacgagcccctggtagatgtccagaatgtctgtttccaggaaaaggtcacctgcaagaacgggcagggcaactgctacaagagcaactccagcatgcacatcacagactgccgcctgacaaacggctccaggtaccccaactgtgcataccggaccagcccgaaggagagacacatcattgtggcctgtgaagggagcccatatgtgccagtccactttgatgcttctgtggaggactctacctaaggtcagagcagcgagataccccacctccctcaacctcatcctctccacagctgcctcttccctcttccttccctgctgtgaaagaagtaactacagttagggctcctattcaacacacacatgcttccctttcctgagccggaattc

SEQ ID NO: 369 - protein, 156 aa, Homo sapien
MALEKSLVRLLLLVLILLVLGWVQPSLGKESRAKKFQRQHMDSDSSPSSSSTYCNQMMRRRNMTQGRCKPVNTFVHEPLVDVQNVCFQEKVTCKNGQGNCYKSNSSMHITDCRLTNGSRYPNCAYRTSPKERHIIVACEGSPYVPVHFDASVEDST

SEQ ID NO: 370 - DNA, 6829 bp, Homo sapien
cttctctcccagggcggtgcgacccggagctccagcgcccgagtctccacttcgtttgctgaaacttgctttctaccagctaagaaccatgctgcgagtgattgtggaatctgccagcaatatccctaaaacgaaatttggcaagccggatcctattgtttctgtcatttttaaggatgagaaaaagaaaacaaagaaagttgataatgaattgaaccctgtctggaatgagattttggagtttgacttgaggggtataccactggacttttcatcttcccttgggattattgtgaaagattttgagacaattggacaaaataaattaattggcacggcgactgtagccctgaaggacctgactggtgaccagagcagatccctgccgtacaagctgatctccctgctaaatgaaaaagggcaagatactggggccaccattgacttggtgatcggctatgatccgccttctgctccacatccaaatgacctgagcgggcccagcgtgccaggcatgggaggagatggggaagaagatgaaggtgatgaagacaggttggacaatgcagtcaggggccctgggcccaaggggccagttgggacggtgtcggaagctcagcttgctcggaggctcaccaaagtaaagaacagccggcggatgctgtcaaataagccacaggacttccagatccgcgtccgagtgattgagggccgacagttaagtggtaacaacataaggcctgtggtcaaagttcacgtctgtggccagacacaccgaacaagaatcaagagaggaaacaaccctttttttgatgagttgtttttctacaatgtcaacatgaccccttctgaattgatggatgagatcatcagcatccgggtttataattctcactctctgcgggcagattgtctgatgggggaatttaagattgatgttggatttgtttatgatgaacctggccatgctgtcatgagaaagtggcttcttctcaatgacccggaagataccagttcaggttctaaaggttatatgaaagtcagcatgtttgtcctgggaaccggagatgagcctcctcctgagagacgagatcgtgataatgacagtgatgatgtggagagtaatttgttactccctgctggcattgccctccggtgggtgaccttcttgctgaaaatctaccgagctgaggacatcccccagatggatgatgccttctcacagacagtaaaggaaatatttggaggcaatgcagataagaaaaatctcgtggatccttttgtagaagtttcctttgctggaaaaaaggtttgtacaaacataattgagaaaaatgcaaacccagagtggaatcaggtcgtcaatcttcagatcaagtttccttcagtgtgtgaaaaaataaaactaacaatatatgactgggaccgtcttactaaaaatgatgtagttggaacaacatatctacacctctctaaaattgctgcctctggtggggaagtggaagatttctcatcttcgggaactggggctgcatcatatacagtaaacacaggagaaacagaggtaggctttgttccaacgtttggaccttgttacctgaatctttatggaagccccagggagtacacgggattcccagacccctatgatgagctgaatactggaaagggggaaggagttgcctacagaggcaggatcttggttgaattagccacttttcttgagaagacaccaccagataaaaagcttgagcccatttcaaatgatgacctgctggttgttgagaaataccagcgaaggcggaagtacagcctgtctgccgtgtttcattcagccaccatgttgcaagatgttggtgaggccattcagtttgaagtcagcattgggaactatggcaacaagtttgacaccacctgtaagcctttggcatcaacaactcagtacagccgtgctgtatttgatggcaactactattattacttgccttgggcccacaccaagccagttgttaccctgacttcatactgggaggatattagtcatcgcctggatgcggtgaacactctcctagctatggcagaacggctgcaaacaaatatagaagctctaaaatcagggatacaaggtaaaattcctgcaaaccagctggctgaattgtggctgaagctgatagatgaagttatagaagacacgagatacacgttgcctctcacagaaggaaaagccaacgtcacagttctcgatactcagatccgaaagctgcggtccaggtctctctcccaaatacatgaggcggctgtgaggatgaggtcggaagccacagatgtgaagtccacactggcagaaattgaggactggcttgataaattaatgcagctgactgaagagccacagaacagcatgcctgacatcatcatctggatgatccggggagagaagagactggcctatgcacgaattcccgcacatcaggtcttgtactccaccagtggtgagaatgcatctggaaaatactgtgggaaaacccaaaccatctttctgaagtatccacaggagaaaaacaacgggccaaaggtgcctgtggagttgcgagtgaacatctggctaggcttaagtgctgtggagaagaagtttaacagcttcgcagaaggaactttcaccgtctttgctgaaatgtatgaaaatcaagctctcatgtttggaaaatggggtacttctggattagtaggacgtcataagttttctgatgtcacaggaaaaataaaactcaagagggaattttttctgcctccaaaaggctgggaatgggaaggagagtggatagttgatcctgaaagaagcttgctgactgaggcagatgcaggtcacacggagttcactgatgaagtctatcagaacgagagccgctaccccgggggcgactggaagccggccgaggacacctacacggatgcgaacggcgataaagcagcatcacccagcgagttgacttgtcctccaggttgggaatgggaagatgatgcatggtcttatgacataaatcgagcggtggatgagaaaggctgggaatatggaatcaccattcctcctgatcataagcccaaatcctgggttgcagcagagaaaatgtaccacactcatagacggcgaaggctggtccgaaaacgcaagaaagatttaacacagactgcttcaagcaccgcaagggccatggaggaattgcaagaccaagagggctgggaatatgcttctctaattggctggaaatttcactggaaacaacgtagttcagataccttccgccgcagacgctggaggagaaaaatggctccttcagaaacacatggtgcagctgccatctttaaacttgaaggtgcccttggggcagacactaccgaagatggggatgagaagagcctggagaaacagaagcacagtgccaccactgtgttcggagcaaacacccccattgtttcctgcaattttgacagagtctacatctaccatctgcgctgctatgtctatcaagccagaaacctcttggctttagataaggatagcttttcagatccatatgctcatatctgtttcctccatcggagcaaaaccactgagatcatccattcaaccctgaatcccacgtgggaccaaacaattatattcgatgaagttgaaatctatggggaaccccaaacagttctacagaatccacccaaagttatcatggaactttttgacaatgaccaagtgggcaaagatgaatttttaggacgaagcattttctctcctgtggtgaaactgaactcagaaatggacatcacacccaaacttctctggcacccagtaatgaatggagacaaagcctgcggggatgttcttgtaactgcagagctgattctgaggggcaaggatggctccaaccttcccattcttccccctcaaagggcgccaaatctatacatggtcccccaggggatcaggcctgtggtccagctcactgccattgagattctagcttggggcttaagaaatatgaaaaacttccagatggcttctatcacatcccccagtcttgttgtggagtgtggaggagaaagggtggaatcggtggtgatcaaaaaccttaagaagacacccaactttccaagttctgttctcttcatgaaagtgttcttgcccaaggaggaattgtacatgcccccactggtgatcaaggtcatcgaccacaggcagtttgggcggaagcctgtcgtcggccagtgcaccatcgagcgcctggaccgctttcgctgtgacccttatgcagggaaagaggacatcgtcccacagctcaaagcctcccttctgtctgccccaccatgccgggacatcgttatcgaaatggaagacaccaaaccattactggcttctaagctgacagaaaaggaggaagaaatcgtggactggtggagtaaattttatgcttcctcaggggaacatgaaaaatgcggacagtatattcagaaaggctattccaagctcaagatatataattgtgaactagaaaatgtagcagaatttgagggcctgacagacttctcagatacgttcaagttgtaccgaggcaagtcggatgaaaatgaagatccttctgtggttggagagtttaagggctcctttcggatctaccctctgccggatgaccccagcgtgccagcccctcccagacagtttcgggaattacctgacagcgtcccacaggaatgcacggttaggatttacattgttcgaggcttagagctccagccccaggacaacaatggcctgtgtgacccttacataaaaataacactgggcaaaaaagtcattgaagaccgagatcactacattcccaacactctcaacccagtctttggcaggatgtacgaactgagctgctacttacctcaagaaaaagacctgaaaatttctgtctatgattatgacacctttacccgggatgaaaaagtaggagaaacaattattgatctggaaaaccgattcctttcccgctttgggtcccactgcggcataccagaggagtactgtgtttctggagtcaatacctggcgagatcaactgagaccaacacagctgcttcaaaatgtcgccagattcaaaggcttcccacaacccatcctttccgaagatgggagtagaatcagatatggaggacgagactacagcttggatgaatttgaagccaacaaaatcctgcaccagcacctcggggcccctgaagagcggcttgctcttcacatcctcaggactcaggggctggtccctgagcacgtggaaacaaggactttgcacagcaccttccagcccaacatttcccagggaaaacttcagatgtgggtggatgttttccccaagagtttggggccaccaggccctcctttcaacatcacaccccggaaagccaagaaatactacctgcgtgtgatcatctggaacaccaaggacgttatcttggacgagaaaagcatcacaggagaggaaatgagtgacatctacgtcaaaggctggattcctggcaatgaagaaaacaaacagaaaacagatgtccattacagatctttggatggtgaagggaattttaactggcgatttgttttcccgtttgactaccttccagccgaacaactctgtatcgttgcgaaaaaagagcatttctggagtattgaccaaacggaatttcgaatcccacccaggctgatcattcagatatgggacaatgacaagttttctctggatgactacttgggtttcctagaacttgacttgcgtcacacgatcattcctgcaaaatcaccagagaaatgcaggttggacatgattccggacctcaaagccatgaacccccttaaagccaagacagcctccctctttgagcagaagtccatgaaaggatggtggccatgctacgcagagaaagatggcgcccgcgtaatggctgggaaagtggagatgacattggaaatcctcaacgagaaggaggccgacgagaggccagccgggaaggggcgggacgaacccaacatgaaccccaagctggacttaccaaatcgaccagaaacctccttcctctggttcaccaacccatgcaagaccatgaagttcatcgtgtggcgccgctttaagtgggtcatcatcggcttgctgttcctgcttatcctgctgctcttcgtggccgtgctcctctactctttgccgaactatttgtcaatgaagattgtaaagccaaatgtgtaacaaaggcaaaggcttcatttcaagagtcatccagcaatgagagaatcctgcctctgtagaccaacatccagtgtgattttgtgtctgagaccacaccccagtagcaggttacgccatgtcaccgagccccattgattcccagagggtcttagtcctggaaagtcaggccaacaagcaacgtttgcatcatgttatctcttaagtattaaaagttttattttctaaagtttaaatcatgtttttcaaaatatttttcaaggtggctggttccatttaaaaatcatctttttatatgtgtcttcggttctagacttcagcttttggaaattgctaaatagaattcaaaaatctctgcatcctgaggtgatatacttcatatttgtaatcaactgaaagagctgtgcattataaaatcagttagaatagttagaacaattcttatttatgcccacaaccattgctatattttgtatggatgtcataaaagtctatttaacctctgtaatgaaactaaataaaaatgtttcacctttaaaaaaaaaaaaaaaaaaaaaa

SEQ ID NO: 371 - protein, 2000 aa, Homo sapien
MLRVIVESASNIPKTKFGKPDPIVSVIFKDEKKKTKKVDNELNPVWNEILEFDLRGIPLDFSSSLGIIVKDFETIGQNKLIGTATVALKDLTGDQSRSLPYKLISLLNEKGQDTGATIDLVIGYDPPSAPHPNDLSGPSVPGMGGDGEEDEGDEDRLDNAVRGPGPKGPVGTVSEAQLARRLTKVKNSRRMLSNKPQDFQIRVRVIEGRQLSGNNIRPVVKVHVCGQTHRTRIKRGNNPFFDELFFYNVNMTPSELMDEIISIRVYNSHSLRADCLMGEFKIDVGFVYDEPGHAVMRKWLLLNDPEDTSSGSKGYMKVSMFVLGTGDEPPPERRDRDNDSDDVESNLLLPAGIALRWVTFLLKIYRAEDIPQMDDAFSQTVKEIFGGNADKKNLVDPFVEVSFAGKKVCTNIIEKNANPEWNQVVNLQIKFPSVCEKIKLTIYDWDRLTKNDVVGTTYLHLSKIAASGGEVEDFSSSGTGAASYTVNTGETEVGFVPTFGPCYLNLYGSPREYTGFPDPYDELNTGKGEGVAYRGRILVELATFLEKTPPDKKLEPISNDDLLVVEKYQRRRKYSLSAVFHSATMLQDVGEAIQFEVSIGNYGNKFDTTCKPLASTTQYSRAVFDGNYYYYLPWAHTKPVVTLTSYWEDISHRLDAVNTLLAMAERLQTNIEALKSGIQGKIPANQLAELWLKLIDEVIEDTRYTLPLTEGKANVTVLDTQIRKLRSRSLSQIHEAAVRMRSEATDVKSTLAEIEDWLDKLMQLTEEPQNSMPDIIIWMIRGEKRLAYARIPAHQVLYSTSGENASGKYCGKTQTIFLKYPQEKNNGPKVPVELRVNIWLGLSAVEKKFNSFAEGTFTVFAEMYENQALMFGKWGTSGLVGRHKFSDVTGKIKLKREFFLPPKGWEWEGEWIVDPERSLLTEADAGHTEFTDEVYQNESRYPGGDWKPAEDTYTDANGDKAASPSELTCPPGWEWEDDAWSYDINRAVDEKGWEYGITIPPDHKPKSWVAAEKMYHTHRRRRLVRKRKKDLTQTASSTARAMEELQDQEGWEYASLIGWKFHWKQRSSDTFRRRRWRRKMAPSETHGAAAIFKLEGALGADTTEDGDEKSLEKQKHSATTVFGANTPIVSCNFDRVYIYHLRCYVYQARNLLALDKDSFSDPYAHICFLHRSKTTEIIHSTLNPTWDQTIIFDEVEIYGEPQTVLQNPPKVIMELFDNDQVGKDEFLGRSIFSPVVKLNSEMDITPKLLWHPVMNGDKACGDVLVTAELILRGKDGSNLPILPPQRAPNLYMVPQGIRPVVQLTAIEILAWGLRNMKNFQMASITSPSLVVECGGERVESVVIKNLKKTPNFPSSVLFMKVFLPKEELYMPPLVIKVIDHRQFGRKPVVGQCTIERLDRFRCDPYAGKEDIVPQLKASLLSAPPCRDIVIEMEDTKPLLASKLTEKEEEIVDWWSKFYASSGEHEKCGQYIQKGYSKLKIYNCELENVAEFEGLTDFSDTFKLYRGKSDENEDPSVVGEFKGSFRIYPLPDDPSVPAPPRQFRELPDSVPQECTVRIYIVRGLELQPQDNNGLCDPYIKITLGKKVIEDRDHYIPNTLNPVFGRMYELSCYLPQEKDLKISVYDYDTFTRDEKVGETIIDLENRFLSRFGSHCGIPEEYCVSGVNTWRDQLRPTQLLQNVARFKGFPQPILSEDGSRIRYGGRDYSLDEFEANKILHQHLGAPEERLALHILRTQGLVPEHVETRTLHSTFQPNISQGKLQMWVDVFPKSLGPPGPPFNITPRKAKKYYLRVIIWNTKDVILDEKSITGEEMSDIYVKGWIPGNEENKQKTDVHYRSLDGEGNFNWRFVFPFDYLPAEQLCIVAKKEHFWSIDQTEFRIPPRLIIQIWDNDKFSLDDYLGFLELDLRHTIIPAKSPEKCRLDMIPDLKAMNPLKAKTASLFEQKSMKGWWPCYAEKDGARVMAGKVEMTLEILNEKEADERPAGKGRDEPNMNPKLDLPN

SEQ ID NO: 372 - DNA, 2162 bp, Homo sapien
gggctgcgctgtccagctgtggctatggccccagccccgagatgaggagggagagaactaggggcccgcaggcctgggaatttccgtcccccaccaagtccggatgctcactccaaagtctcagcaggcccctgagggagggagctgtcagccagggaaaaccgagaacaccatcaccatgacaaccagtcaccagcctcaggacagatacaaagctgtctggcttatcttcttcatgctgggtctgggaacgctgctcccgtggaattttttcatgacggccactcagtatttcacaaaccgcctggacatgtcccagaatgtgtccttggtcactgctgaactgagcaaggacgcccaggcgtcagccgcccctgcagcacccttgcctgagcggaactctctcagtgccatcttcaacaatgtcatgaccctatgtgccatgctgcccctgctgttattcacctacctcaactccttcctgcatcagaggatcccccagtccgtacggatcctgggcagcctggtggccatcctgctggtgtttctgatcactgccatcctggtgaaggtgcagctggatgctctgcccttctttgtcatcaccatgatcaagatcgtgctcattaattcatttggtgccatcctgcagggcagcctgtttggtctggctggccttctgcctgccagctacacggcccccatcatgagtggccagggcctagcaggcttctttgcctccgtggccatgatctgcgctattgccagtggctcggaactatcagaaagtgccttcggctactttatcacagcctgtgctgttatcattttgaccatcatctgttacctgggcctgccccgcctggaattctaccgctactaccagcagctcaagcttgaaggacccggggagcaggagaccaagttggacctcattagcaaaggagaggagccaagagcaggcaaagaggaatctggagtttcagtctccaactctcagcccaccaatgaaagccactctatcaaagccatcctgaaaaatatctcagtcctggctttctctgtctgcttcatcttcactatcaccattgggatgtttccagccgtgactgttgaggtcaagtccagcatcgcaggcagcagcacctgggaacgttacttcattcctgtgtcctgtttcttgactttcaatatctttgactggttgggccggagcctcacagctgtattcatgtggcctgggaaggacagccgctggctgccaagcctggtgctggcccggctggtgtttgtgccactgctgctgctgtgcaacattaagccccgccgctacctgactgtggtcttcgagcacgatgcctggttcatcttcttcatggctgcctttgccttctccaacggctacctcgccagcctctgcatgtgcttcgggcccaagaaagtgaagccagctgaggcagagaccgcaggagccatcatggccttcttcctgtgtctgggtctggcactgggggctgttttctccttcctgttccgggcaattgtgtgacaaaggatggacagaaggactgcctgcctccctccctgtctgcctcctgccccttccttctgccaggggtgatcctgagtggtctggcggttttttcttctaactgacttctgctttccacggcgtgtgctgggcccggatctccaggccctggggagggagcctctggacggacagtggggacattgtgggtttggggctcagagtcgagggacggggtgtagcctcggcatttgcttgagtttctccactcttggctctgactgatccctgcttgtgcaggccagtggaggctcttgggcttggagaacacgtgtgtctctgtgtatgtgtctgtgtgtctgcgtccgtgtctgtcagactgtctgcctgtcctggggtggctaggagctgggtctgaccgttgtatggtttgacctgatatactccattctcccctgcgcctcctcctctgtgttttttccatgtccccctcccaactccccatgcccagtttttacccatcatgcaccctgtacagttgccacgttactgccttttttaaaaatatatttgacagaaaccaggtgccttcagaggctctctgatttaaataaacctttcttgttttttt

SEQ ID NO: 373 - protein, 456 aa, Homo sapien [sequence omitted]

SEQ ID NO: 374 - DNA, 3142 bp, Homo sapien
cctgggccggccgggctggatgagccgggagctccctgctgccggtcataccacagccttcatctgcgccctggggccaggactgctgctgtcactgccatccattggagcccagcaccccctccccgcccatccttcggacagcaactccagcccagccccgcgtccctgtgtccacttctcctgacccctcggccgccaccccagaaggctggagcagggacgccgtcgctccggccgcctgctcccctcgggtccccgtgcgagcccacgccggccccggtgcccgcccgcagccctgccactggacacaggataaggcccagcgcacaggcccccacgtggacagcatggaccgcggcacgctccctctggctgttgccctgctgctggccagctgcagcctcagccccacaagtcttgcagaaacagtccattgtgaccttcagcctgtgggccccgagaggggcgaggtgacatataccactagccaggtctcgaagggctgcgtggctcaggcccccaatgccatccttgaagtccatgtcctcttcctggagttcccaacgggcccgtcacagctggagctgactctccaggcatccaagcaaaatggcacctggccccgagaggtgcttctggtcctcagtgtaaacagcagtgtcttcctgcatctccaggccctgggaatcccactgcacttggcctacaattccagcctggtcaccttccaagagcccccgggggtcaacaccacagagctgccatccttccccaagacccagatccttgagtgggcagctgagaggggccccatcacctctgctgctgagctgaatgacccccagagcatcctcctccgactgggccaagcccaggggtcactgtccttctgcatgctggaagccagccaggacatgggccgcacgctcgagtggcggccgcgtactccagccttggtccggggctgccacttggaaggcgtggccggccacaaggaggcgcacatcctgagggtcctgccgggccactcggccgggccccggacggtgacggtgaaggtggaactgagctgcgcacccggggatctcgatgccgtcctcatcctgcagggtcccccctacgtgtcctggctcatcgacgccaaccacaacatgcagatctggaccactggagaatactccttcaagatctttccagagaaaaacattcgtggcttcaagctcccagacacacctcaaggcctcctgggggaggcccggatgctcaatgccagcattgtggcatccttcgtggagctaccgctggccagcattgtctcacttcatgcctccagctgcggtggtaggctgcagacctcacccgcaccgatccagaccactcctcccaaggacacttgtagcccggagctgctcatgtccttgatccagacaaagtgtgccgacgacgccatgaccctggtactaaagaaagagcttgttgcgcatttgaagtgcaccatcacgggcctgaccttctgggaccccagctgtgaggcagaggacaggggtgacaagtttgtcttgcgcagtgcttactccagctgtggcatgcaggtgtcagcaagtatgatcagcaatgaggcggtggtcaatatcctgtcgagctcatcaccacagcggaaaaaggtgcactgcctcaacatggacagcctctctttccagctgggcctctacctcagcccacacttcctccaggcctccaacaccatcgagccggggcagcagagctttgtgcaggtcagagtgtccccatccgtctccgagttcctgctccagttagacagctgccacctggacttggggcctgagggaggcaccgtggaactcatccagggccgggcggccaagggcaactgtgtgagcctgctgtccccaagccccgagggtgacccgcgcttcagcttcctcctccacttctacacagtacccatacccaaaaccggcaccctcagctgcacggtagccctgcgtcccaagaccgggtctcaagaccaggaagtccataggactgtcttcatgcgcttgaacatcatcagccctgacctgtctggttgcacaagcaaaggcctcgtcctgcccgccgtgctgggcatcacctttggtgccttcctcatcggggccctgctcactgctgcactctggtacatctactcgcacacgcgtgagtaccccaggcccccacagtgagcatgccgggcccctccatccacccgggggagcccagtgaagcctctgagggattgaggggccctggcaggaccctgacctccgcccctgcccccgctcccgctcccaggttcccccagcaagcgggagcccgtggtggcggtggctgccccggcctcctcggagagcagcagcaccaaccacagcatcgggagcacccagagcaccccctgctccaccagcagcatggcatagccccggccccccgcgctcgcccagcaggagagactgagcagccgccagctgggagcactggtgtgaactcaccctgggagccagtcctccactcgacccagaatggagcctgctctccgcgcctacccttcccgcctccctctcagaggcctgctgccagtgcagccactggcttggaacaccttggggtccctccaccccacagaaccttcaacccagtgggtctgggatatggctgcccaggagacagaccacttgccacgctgttgtaaaaacccaagtccctgtcatttgaacctggatccagcactggtgaactgagctgggcaggaagggagaacttgaaacagattcaggccagcccagccaggccaacagcacctccccgctgggaagagaagagggcccagcccagagccacctggatctatccctgcggcctccacacctgaacttgcctaactaactggcaggggagacaggagcctagcggagcccagcctgggagcccagagggtggcaagaacagtgggcgttgggagcctagctcctgccacatggagccccctctgccggtcgggcagccagcagagggggagtagccaagctgcttgtcctgggcctgcccctgtgtattcaccaccaataaatcagaccatgaaacctgaaaaaaaaaaaaa

SEQ ID NO: 375 - protein, 625 aa, Homo sapien
MDRGTLPLAVALLLASCSLSPTSLAETVHCDLQPVGPERGEVTYTTSQVSKGCVAQAPNAILEVHVLFLEFPTGPSQLELTLQASKQNGTWPREVLLVLSVNSSVFLHLQALGIPLHLAYNSSLVTFQEPPGVNTTELPSFPKTQILEWAAERGPITSAAELNDPQSILLRLGQAQGSLSFCMLEASQDMGRTLEWRPRTPALVRGCHLEGVAGHKEAHILRVLPGHSAGPRTVTVKVELSCAPGDLDAVLILQGPPYVSWLIDANHNMQIWTTGEYSFKIFPEKNIRGFKLPDTPQGLLGEARMLNASIVASFVELPLASIVSLHASSCGGRLQTSPAPIQTTPPKDTCSPELLMSLIQTKCADDAMTLVLKKELVAHLKCTITGLTFWDPSCEAEDRGDKFVLRSAYSSCGMQVSASMISNEAVVNILSSSSPQRKKVHCLNMDSLSFQLGLYLSPHFLQASNTIEPGQQSFVQVRVSPSVSEFLLQLDSCHLDLGPEGGTVELIQGRAAKGNCVSLLSPSPEGDPRFSFLLHFYTVPIPKTGTLSCTVALRPKTGSQDQEVHRTVFMRLNIISPDLSGCTSKGLVLPAVLGITFGAFLIGALLTAALWYIYSHTREYPRPPQ

SEQ ID NO: 376 - DNA, 2570 bp, Homo sapien
tcggaggagccagccgaaatcctgccgcctgcccgggacgaggaggaggaggaggaagaggggatggagcaggggctggaggaggaagaagaggtggatccccggatccagggagaactggagaagttaaatcagtccacggatgatatcaacagacgggagactgaacttgaggatgctcgtcagaagttccgctctgttctggttgaagcaacggtgaaactggatgaactggtgaagaaaattggcaaagctgtggaagactccaagccctactgggaggcacggagggtggcgaggcaggctcagctggaagctcagaaagccacgcaggacttccagagggccacagaggtgctccgtgccgccaaggagaccatctccctggccgagcagcggctgctggaggatgacaagcggcagttcgactccgcctggcaggagatgctgaatcacgccactcagagggtcatggaggcggagcagaccaagaccaggagcgagctggtgcataaggagacggcagccaggtacaatgccgccatgggccgcatgcgacagctggagaagaaactcaagagagccatcaacaagtccaagccttattttgaactcaaggcaaagtactatgtgcagctcgagcaactgaaaaagactgtggatgacctgcaggccaaactgaccctggcaaaaggcgagtacaagatggccctgaagaacctggagatgatctcagatgagatccacgagcggcggcgctccagtgccatggggcctcggggatgcggtgttggtgctgagggcagcagcacatctgtggaggatctgccagggagcaaacctgagcctgatgccatttctgtggcctcggaggcctttgaagatgacagctgtagcaactttgtgtctgaagatgactcggaaacccagtccgtgtccagctttagttcaggaccaacaagcccgtctgagatgcctgaccagttccctgcggttgtgaggcctggcagcctggatctgcccagccctgtgtccctgtcagagtttgggatgatgttcccagtgttgggccctcgaagtgaatgcagcggggcctcctcccctgaatgtgaagtagaacgaggagacagggcagaaggggcagagaataaaacaagtgacaaagccaacaacaaccggggcctcagcagtagcagtggcagtggtggcagcagtaagagccaaagcagcacctcccctgagggccaggccttggagaaccggatgaagcagctctccctacagtgctcaaagggaagagatggaattattgctgacataaaaatggtgcagattggctgattcatcctgggccctggccgatgtgcatatcaacatttatacatggaactggagaacattgtgccaataatcatttaatatatgccaaatcttacacgtctactctaaactgctctaatgaagtttcagtgaccttgagggctaaagattgttcttctgggtaagagctcttgggctggtttttcagagcagagttcttgttgtgggtagactgtgactaggttcacagcctttgtggaacattccgtataacggcattgtggaagcaataactagttcctatgaaagaaccagagctgggaagatggctgggaagccaggccaaagtgggggcaacagcttgcttctctttctcttctcaccctcagtttgtatgggaaaatggagatgtcctctccactttatcccacgatatctaaatgaaaaagaaagaaaacccacacacaaagcaaaaactcaagtattaagagcacatatttttgacccagtggaggcttaaaaaaaaaaaaatccaagaacacaattcattttcaccacctctggtgttcagagggggcttttaaaaaagcgtgtatgctgggatacccattaaaaccattttctagaaggctaccatgagctgcactttttggggtgggaaaggtgaatgccagtggggatgcggggggatgagggtaggagggacttatagaaggggatttgtggctgtgggggagaaggttctacagcataagccttatcctgccagccaaggggatttattctaagagaagtgcatgtgaagaatggttgccactgttattagattgacaagatgttaatttctctgtaggttgtaactttaaaaataaatgaaattatttaagggttatgctgcactagtattccttagaggaaacagttctttaaagttaggaaagggagtaggcaggcatgtgttggcaaaggctgttaatagtagttaagtgttaagactgcttttctttaacgttttcatggtaatgcatatttagagcactgtatttttgtcttgttaagaaaatttagcatttctaaaagaaaaaagcaaccctctttcaaactgttaattctgtcacagcctgtatattttagtcatttgtaaatctcttcatacaatagtgacttcttttttgactgatacagtatcttaattacaaggttattttgtacttgtcttaatacactaagtgtaataaaaacggcttgag

SEQ ID NO: 377 - protein, 425 aa, Homo sapien
MEQGLEEEEEVDPRIQGELEKLNQSTDDINRRETELEDARQKFRSVLVEATVKLDELVKKIGKAVEDSKPYWEARRVARQAQLEAQKATQDFQRATEVLRAAKETISLAEQRLLEDDKRQFDSAWQEMLNHATQRVMEAEQTKTRSELVHKETAARYNAAMGRMRQLEKKLKRAINKSKPYFELKAKYYVQLEQLKKTVDDLQAKLTLAKGEYKMALKNLEMISDEIHERRRSSAMGPRGCGVGAEGSSTSVEDLPGSKPEPDAISVASEAFEDDSCSNFVSEDDSETQSVSSFSSGPTSPSEMPDQFPAVVRPGSLDLPSPVSLSEFGMMFPVLGPRSECSGASSPECEVERGDRAEGAENKTSDKANNNRGLSSSSGSGGSSKSQSSTSPEGQALENRMKQLSLQCSKGRDGIIADIKMVQIG

SEQ ID NO: 378 - DNA, 3476 bp, Homo sapien
gacgccatccctgtgaccatgacgatgtcctccatcgtgatgaaggcagagagcagagacatcccgatctggggaactctgatccagtatatacggcctgtgttcgtgtcccggtcagaccaggattctcgcaggaaaacagtagaagaaatcaagagacgggcgcagtccaacggaaagtggccacagataatgatttttccagaaggaacttgtacaaacaggacctgcctaattaccttcaaacctggtgcattcatccctggagcgcccgtccagcctgtggttttacgatatccaaataaactggacaccatcacatggacgtggcaaggacctggagcgctggaaatcctgtggctcacgctgtgtcagtttcacaaccaagtggaaatcgagttccttcctgtgtacagcccttctgaggaggagaagaggaaccccgcgctgtatgccagcaacgtgcggcgagtcatggccgaggccttgggtgtctccgtgactgactacacgttcgaggactgccagctggccctggcggaaggacagctccgtctccccgctgacacttgccttttagaatttgccaggctcgtgcggggcctcgggctaaaaccagaaaagcttgaaaaagatctggacagatactcagaaagagccaggatgaagggaggagagaagataggtattgcggagtttgccgcctccctggaagtccccgtttctgacttgctggaagacatgttttcactgttcgacgagagcggcagcggcgaggtggacctgcgagagtgtgtggttgccctgtctgtcgtctgccggccggcccggaccctggacaccatccagctggctttcaagatgtacggagcgcaagaggacggcagcgtcggcgaaggtgacctgtcctgcatcctcaagacggccctgggggtggcagagctcaccgtgaccgacctattccgagccattgaccaagaggagaaggggaagatcacattcgctgacttccacaggtttgcagaaatgtaccctgccttcgcagaggaatacctgtacccggatcagacacatttcgaaagctgtgcagagacctcacctgcgccaatcccaaacggcttctgtgccgatttcagcccggaaaactcagacgctgggcggaagcctgttcgcaagaagctggattaggacccagggttgcggagagacgcggcccctcccgcgtggacatcaccgccatgagcctctttgcgagtgacctctgggctccgctcctcactcctgctgtacaggcactgtcttcagcccgagttccaggggcctcgggggctgtttgtatcttgttcctttgtgaagtgtgttgcagaaccgacgcttactgtgcgagaatcggagggcgcgcacgcggatcccccgcctggcctggaccccgtggggtcaggttccctgccgggcggggggcaccggtgccgccccgtgttctcccacggggccctggtttcgagtctctgtcacagcctcttccggcggcagcgtgcaccgggcgggcctccgtgcacactcagcacacgcctgccacacagcgtgcgcttgcgtgtcactctggcacgaaacctgtctgcctctgtggatccacagcctggcagagccgagccgtcacctgatttttcagtgtttctacctgtgtgctggagctcatgagtattttataaactccatttaggtacttcaggaaacatgcagcattttttaaaaaatgaaaattgtttttctacttcatttttccttttagagtcaaaggatatttatttataggcctttttttttttaatatagaatctgaggctgtttgggctttgacttaaatttccatcaggcctctctccagcaggtaatccctctccttccgctgggtcccctggggaggtgtgaactcaagggcctagccccaaaacactttttctgcttttcttaatccttttccagtcccctctttttttataaacgttggcagtttgatgtttctgtttcggcataacgtaatccatttcactgtagcctaaactccagtccgaggttggatattgttcaaatgagcagggcccgagctggaagcgcaaggcagccgccgccgtgccgctcctcccttgccctcaggccaggtccctgctggaagcggctgcatcttcctgtcagccctggtttccatggtgactggcgtcacgcagccacccgagtatggctgaccttcctgcagagagaggagccgcagtcttttgcttgtggaaggagacgctgggctgtgcggtgcggagggtgatgaggatgtctggtgacagccgtgcggacaccactcctctctgcagcactgcctcccagcgccagggtcgcgggcacatcccactgagagcgggggtcctgccccatcttagagtcaaaggcagaggggcttccaggccctggatggggtattttggtgtcacctgaagtccctctgacatcaccttgtttcatcattttttatgacagaattagaaacccatccttcaagcacaataatcatcacagacttgagtttgcttcctaaagcaaaggctccgggtttgtttggaaaatttttttgatttctgaaatgaattgatttttatatttggggcatctctatagaaagtgaccaccaaggccagtaagtacgggaaaaaatgtttactaacttcctcagagattcgtgatacgcgtttctccactgacagacatttaaaaacaaccttcagctccgtttcaatcaatcacctcgacttgttttttagcatggacactgccagcaggacagacagggatggagtaaaccgaagtcaatttcagggctcttggctgttggacacagaagaaatcctagtgcagcctttggtagctaacagtcactgattttataattggagaatgcgtaaagattcatttttcaaggagaagagcctgcaaatggccaatgaaggaggtaaataaactaagatattccgagggaagggacccaggccacctcccttccgcaggtctgcagatgaagggttttttgaatgaaatgccactgtgcattttcagaaaaaaaaatctctgataaacagactttgaatggatgtttgttcctcctgattctcttttctcttcgtggcgacttagagttggcggatattcggaactgtgaatgtacatagcgttgagttaaaccccttgtgtgtgagacaggacgcagcgggcccctggtggcctgggggccagacccgtgggcaggtggggcatgggccctggcctgcggggacctgctggggtgtgagggcagagggagggttgccatgaaggaacttgggattttcaatggaataagtaaaacataaagtctatacttgggaaaaaaaaaaaaaaaaaaaaaaaaaaaaaaaaaaaaaaaaaaaaaaaaaaaaaaaaaaaaaaaaaaa

SEQ ID NO: 379 - protein, 237 aa, Homo sapien
MAEALGVSVTDYTFEDCQLALAEGQLRLPADTCLLEFARLVRGLGLKPEKLEKDLDRYSERARMKGGEKIGIAEFAASLEVPVSDLLEDMFSLFDESGSGEVDLRECVVALSVVCRPARTLDTIQLAFKMYGAQEDGSVGEGDLSCILKTALGVAELTVTDLFRAIDQEEKGKITFADFHRFAEMYPAFAEEYLYPDQTHFESCAETSPAPIPNGFCADFSPENSDAGRKPVRKKLD

SEQ ID NO: 380 - DNA, 2751 bp, Homo sapien
ggcacgaggccggatccaccgtgcctctgcggcctgcgtgcccggagtccccgcctgtgtcgtctctgtcgccgtccccgtctcctgccaggcgcggagccctgcgagccgcgggtgggccccaggcgcgcagacatgggctgctccgccaaagcgcgctgggctgccggggcgctgggcgtcgcggggctactgtgcgctgtgctgggcgctgtcatgatcgtgatggtgccgtcgctcatcaagcagcaggtccttaagaacgtgcgcatcgaccccagtagcctgtccttcaacatgtggaaggagatccctatccccttctatctctccgtctacttctttgacgtcatgaaccccagcgagatcctgaagggcgagaagccgcaggtgcgggagcgcgggccctacgtgtacagggagttcaggcacaaaagcaacatcaccttcaacaacaacgacaccgtgtccttcctcgagtaccgcaccttccagttccagccctccaagtcccacggctcggagagcgactacatcgtcatgcccaacatcctggtcttgggtgcggcggtgatgatggagaataagcccatgaccctgaagctcatcatgaccttggcattcaccaccctcggcgaacgtgccttcatgaaccgcactgtgggtgagatcatgtggggctacaaggacccccttgtgaatctcatcaacaagtactttccaggcatgttccccttcaaggacaagttcggattatttgctgagctcaacaactccgactctgggctcttcacggtgttcacgggggtccagaacatcagcaggatccacctcgtggacaagtggaacgggctgagcaaggttgacttctggcattccgatcagtgcaacatgatcaatggaacttctgggcaaatgtggccgcccttcatgactcctgagtcctcgctggagttctacagcccggaggcctgccgatccatgaagctaatgtacaaggagtcaggggtgtttgaaggcatccccacctatcgcttcgtggctcccaaaaccctgtttgccaacgggtccatctacccacccaacgaaggcttctgcccgtgcctggagtctggaattcagaacgtcagcacctgcaggttcagtgcccccttgtttctctcccatcctcacttcctcaacgccgacccggttctggcagaagcggtgactggcctgcaccctaaccaggaggcacactccttgttcctggacatccacccggtcacgggaatccccatgaactgctctgtgaaactgcagctgagcctctacatgaaatctgtcgcaggcattggacaaactgggaagattgagcctgtggtcctgccgctgctctggtttgcagagagcggggccatggagggggagactcttcacacattctacactcagctggtgttgatgcccaaggtgatgcactatgcccagtacgtcctcctggcgctgggctgcgtcctgctgctggtccctgtcatctgccaaatccggagccaagtaggtgctggccagagggcagcccgggctgacagccattcgcttgcctgctgggggaaaggggcctcagatcggaccctctggccaaccgcagcctggagcccacctccagcagcagtcctgcgtctctgccggagtgggagcggtcactgctgggggctgcgcagcacgcttgcgtcttttgcatgccgcgttgccactactctgcctgttctggaaggcctgggaccctcccttggagggggcacagggtcctgaggacaccgtgagccagccaggcctggccgctgggcctgaccggccccccagcccctacaccccgcttctcccggactctcccagcggacagccccccagccccacagcctgagcctcccagctgccatgtgcctgttgcacacctgcacacacgccctggcacacatacacacatgcgtgcaggcttgtgcagacactcagggatggagctgctgctgaagggacttgtagggagaggctcgtcaacaagcactgttctggaaccttctctccacgtggcccacaggcctgaccacaggggctgtgggtcctgcgtccccttcctcgggtgagcctggcctgtcccgttcagccgttgggcccaggcttcctcccctccaaggtgaaacactgcagtcccggtgtggtggctccccatgcaggacgggccaggctgggagtgccgccttcctgtgccaaattcagtggggactcagtgcccaggccctggccacgagctttggccttggtctacctgccaggccaggcaaagcgcctttacacaggcctcggaaaacaatggagtgagcacaagatgccctgtgcagctgcccgagggtctccgcccaccccggccggactttgatccccccgaagtcttcacaggcactgcatcgggttgtctggcgcccttttcctccagcctaaactgacatcatcctatggactgagccggccactctctggccgaagtggccgcaggctgtgcccccgagctgcccccaccccctcacagggtccctcagattataggtgcccaggctgaggtgaagaggcctgggggccctgccttccgggcgctcctggaccctggggcaaacctgtgacccttttctactggaatagaaatgagttttatcatctttgaaaaataattcactcttgaagtaataaacgtttaaaaaaaaaaaaaaaaaa

SEQ ID NO: 381 - protein, 552 aa, Homo sapien
MGCSAKARWAAGALGVAGLLCAVLGAVMIVMVPSLIKQQVLKNVRIDPSSLSFNMWKEIPIPFYLSVYFFDVMNPSEILKGEKPQVRERGPYVYREFRHKSNITFNNNDTVSFLEYRTFQFQPSKSHGSESDYIVMPNILVLGAAVMMENKPMTLKLIMTLAFTTLGERAFMNRTVGEIMWGYKDPLVNLINKYFPGMFPFKDKFGLFAELNNSDSGLFTVFTGVQNISRIHLVDKWNGLSKVDFWHSDQCNMINGTSGQMWPPFMTPESSLEFYSPEACRSMKLMYKESGVFEGIPTYRFVAPKTLFANGSIYPPNEGFCPCLESGIQNVSTCRFSAPLFLSHPHFLNADPVLAEAVTGLHPNQEAHSLFLDIHPVTGIPMNCSVKLQLSLYMKSVAGIGQTGKIEPVVLPLLWFAESGAMEGETLHTFYTQLVLMPKVMHYAQYVLLALGCVLLLVPVICQIRSQVGAGQRAARADSHSLACWGKGASDRTLWPTAAWSPPPAAVLRLCRSGSGHCWGLRSTLASFACRVATTLPVLEGLGPSLGGGTGS

SEQ ID NO: 382 - DNA, 1645 bp, Homo sapien
agtcaagatggaggagtacgcgcgagagccttgcccatggcgaattgtggatgactgtggtggggcctttacgatgggtaccattggtggtggtatctttcaagcaatcaaaggttttcgcaattctccagtgggagtaaaccacagactacgagggagtttgacagctattaaaaccagggctccacagttaggaggtagctttgcagtttggggagggctgttttccatgattgactgtagtatggttcaagtcagaggaaaggaagatccctggaactccatcacaagtggtgccttaacgggagccatactggcagcaagaaatggaccagtggccatggttgggtcagccgcaatgggtggcattctcctagctttaattgaaggagctggtatcttgttgacaagatttgcctctgcacagtttcccaatggtcctcagtttgcagaagacccctcccagttgccttcaactcagttaccttcctcaccttttggagactatcgacaatatcagtaggacttctttcctaggatttctttaacagaacgagttgtggttcgagaaggatttcagaagatcaagttacagtctgtttttaaaaccataggtgggacagctatggccaataggctataaagagacatttagcacttttttctatttaaaggaacaagcggggaagggtgctaaaagataatacgtttatttattcacacttgaattgcatttgtgatcaaaataaatgtttaaatcgctaaaggaaaatacagtaagtgcttgaaagatgaaggaccaaaaggccaaaaaacagtgaaatatgatcatcatctcttgcggacttctctgcctggttttgtgtgttctgttattcaaacaataaaaagctggtggaacttactctttcttttaagataagttgtagacttcgatgtttcatgctcatgtacttcaaataatgcatgttttatagttagtccctcatcacttgaagtgacttctgagaattatgcagagtcaacatggatcatttcacagtgagatgctttatggattgaaggatatggtaaaatgtttatagtttactttgaaagtaaaatatactatgtcttggttttgaggatattggatacaaaactctcttcctttagggctactgagtcttgattcctgatcatcagaaatttcaccagaaacaacttgcttccaatatacccaattctatatgaagaattcatggagagtgtactggcactggaagagtttagtgtttcttgtatgcttgaaaataaagtatgtactgttttgaatgtgttccaagtcctctgcataaacgatgtattttggggtctggttgggcctggaaaatggatgagcacttcagaacaggtcattttcctgatattggaagtgacatgtggccctataggaggcatgatgttagttaattacacatttgcctacatctgtgggaaatggagaacaaagccatgtgggtactgtaaacacacgtttatcttttggcccaatgccatacatatggtaggcatttaattactgattgtgtttggataatttgggaattttcgactgtggtaaaatatacataaaataatacttattaaaaaaaaaaaaaaaaaa

SEQ ID NO: 383 - protein, 171 aa, Homo sapien
MEEYAREPCPWRIVDDCGGAFTMGTIGGGIFQAIKGFRNSPVGVNHRLRGSLTAIKTRAPQLGGSFAVWGGLFSMIDCSMVQVRGKEDPWNSITSGALTGAILAARNGPVAMVGSAAMGGILLALIEGAGILLTRFASAQFPNGPQFAEDPSQLPSTQLPSSPFGDYRQYQ

SEQ ID NO: 384 - DNA, 2127 bp, Homo sapien
atggcgacggagcagaggcctttccacctggtggtgttcggcgcgtctggcttcaccggccagttcgtgaccgaggaggtggcccgggagcaggtggacccggagcggacccagcctgccctgggcgtggcgggccgctcccgggagaagctgcagcgggtgctggagaaggcggccctgaagctgggaagaccaacactgtcatctgaagttggaatcatcatctgtgatattgctaatccagcctcgcttgatgaaatggctaaacaggcaacagttgtcctcaattgcgtaggaccatatcggttttatggagaacctgtaataaaagcatgtattgaaaatggagccagttgtatcgacatcagtggagaacctcagtttctggaactaatgcaactgaagtatcatgagaaagctgcagacaaaggggtttatatcattggaagcagcggctttgactccattccagcagatctgggagtaatatataccagaaataaaatgaatggtactttgactgctgtggaaagtttcctgactatacattcaggacctgaggggttgagcattcatgatggtacctggaagtcagcaatttatggttttggagatcagagtaatttgagaaaactaagaaatgtatcaaatctgaaacctgtcccgctcattggtccaaaattgaagagaaggtggccaatttcttattgtcgggaactcaaaggttattccattccttttatgggatctgatgtgtctgttgtaaggaggactcaacgttacttgtatgaaaatttagaggaatcaccagttcagtatgctgcgtatgtaactgtgggaggcatcacctctgttattaagctgatgtttgcaggacttttctttttgttctttgtgaggtttggaattggaaggcaacttctcataaaattcccatggttcttctcctttggctatttttcaaaacaaggcccaacacaaaaacagattgatgctgcctcattcacgctgacattctttggtcaaggatacagccaaggcactggtacagataagaacaaaccaaatatcaaaatttgtactcaggtgaaaggaccagaggctggctatgtggctacccccatagctatggttcaggcagccatgactcttctaagtgatgcttctcatctgcctaaggcgggcggggtcttcacacctggagcagctttttccaaaacaaagttgattgacagactcaacaaacacggtattgagtttagtgttattagcagctctgaagtctaaacactggaagaattaactgaagtcataacgtgcgtgaattaacagcttctctatttgatatttgaaattcttctgtaagcctgtctgagtgtatgtggaaacgattgtcaaatctaaaatatctatatattaaaaagtaggaaattgtcctagcttaccctaaatttcaaatctgagttgattttgtgattttattgcttataacagagaactcatatttgacatatttttttcattgatgtgttcctggtagattttcacgaatgagctggcaggtctaatgggggaggcggcgtcccagtctgtgttgcagcagcattctcatcgggggtgcgcacaccatcgttactgtcgggcagtaactgccgcttgccttgccgcagtaggagggaaatctcaccttccttccacatactgtcttgagcctttgctaaattaaactgcactttttgctgtttttgcctagtttttcgccaatctacactgattttggactgttacctaagttgaaaaataaaaggttgtcaatcgaatggtggttaatgttggacctgccgatgtatttgtatagtggtagaaacatgctgcttaagtggcctaacctgtttcttgccaataagtaggcttatcattttatttttacgtaattctatatctgtgactaggtttttaaggatacagcttataagttgctatcaattttcactacctaagcagaatttttctctaatttactttttgtattttaactaggttttacatggaagccctaaaataaggcaaaagactttttcttttgtaataagcatataataaacacgtatatacatagcaaattga

SEQ ID NO: 385 - protein, 428 aa, Homo sapien
MATEQRPFHLVVFGASGFTGQFVTEEVAREQVDPERTQPALGVAGRSREKLQRVLEKAALKLGRPTLSSEVGIIICDIANPASLDEMAKQATVVLNCVGPYRFYGEPVIKACIENGASCIDISGEPQFLELMQLKYHEKAADKGVYIIGSSGFDSIPADLGVIYTRNKMNGTLTAVESFLTIHSGPEGLSIHDGTWKSAIYGFGDQSNLRKLRNVSNLKPVPLIGPKLKRRWPISYCRELKGYSIPFMGSDVSVVRRTQRYLYENLEESPVQYAAYVTVGGITSVIKLMFAGLFFLFFVRFGIGRQLLIKFPWFFSFGYFSKQGPTQKQIDAASFTLTFFGQGYSQGTGTDKNKPNIKICTQVKGPEAGYVATPIAMVQAAMTLLSDASHLPKAGGVFTPGAAFSKTKLIDRLNKHGIEFSVISSSEV

SEQ ID NO: 386 - DNA, 865 bp, Homo sapien
ctcaaacaccgcctgctaaaaatacccgactggaggagcataaaagcgcagccgagcccagcgccccgcacttttctgagcagacgtccagagcagagtcagccagcatgaccgagcgccgcgtccccttctcgctcctgcggggccccagctgggaccccttccgcgactggtacccgcatagccgcctcttcgaccaggccttcgggctgccccggctgccggaggagtggtcgcagtggttaggcggcagcagctggccaggctacgtgcgccccctgccccccgccgccatcgagagccccgcagtggccgcgcccgcctacagccgcgcgctcagccggcaactcagcagcggggtctcggagatccggcacactgcggaccgctggcgcgtgtccctggatgtcaaccacttcgccccggacgagctgacggtcaagaccaaggatggcgtggtggagatcaccggcaagcacgaggagcggcaggacgagcatggctacatctcccggtgcttcacgcggaaatacacgctgccccccggtgtggaccccacccaagtttcctcctccctgtcccctgagggcacactgaccgtggaggcccccatgcccaagctagccacgcagtccaacgagatcaccatcccagtcaccttcgagtcgcgggcccagcttgggggcccagaagctgcaaaatccgatgagactgccgccaagtaaagccttagcctggatgcccacccctgctgccgccactggctgtgcctcccccgccacctgtgtgttcttttgatacatttatcttctgtttttctcaaataaagttcaaagcaaccacctgtaaaaaaaaaaaaaaaaaa

SEQ ID NO: 387 - protein, 205 aa, Homo sapien
MTERRVPFSLLRGPSWDPFRDWYPHSRLFDQAFGLPRLPEEWSQWLGGSSWPGYVRPLPPAAIESPAVAAPAYSRALSRQLSSGVSEIRHTADRWRVSLDVNHFAPDELTVKTKDGVVEITGKHEERQDEHGYISRCFTRKYTLPPGVDPTQVSSSLSPEGTLTVEAPMPKLATQSNEITIPVTFESRAQLGGPEAAKSDETAAK

SEQ ID NO: 388 - DNA, 2493 bp, Homo sapien
actgcgactcgagacagcggcccggcaggacagctccagaatgaaaatgcggttcttggggttggtggtctgtttggttctctggcccctgcattctgaggggtctggagggaaactgacagctgtggatcctgaaacaaacatgaatgtgagtgaaattatctcttactggggattccctagtgaggaatacctagttgagacagaagatggatatattctgtgccttaaccgaattcctcatgggaggaagaaccattctgacaaaggtcccaaaccagttgtcttcctgcaacatggcttgctggcagattctagtaactgggtcacaaaccttgccaacagcagcctgggcttcattcttgctgatgctggttttgacgtgtggatgggcaacagcagaggaaatacctggtctcggaaacataagacactctcagtttctcaggatgaattctgggctttcagttatgatgagatggcaaaatatgacctaccagcttccattaacttcattctgaataaaactggccaagaacaagtgtattatgtgggtcattctcaaggcaccactataggttttatagcattttcacagatccctgagctggctaaaaggattaaaatgttttttgccctgggtcctgtggcttccgtcgccttctgtactagccctatggccaaattaggacgattaccagatcatctcattaaggacttatttggagacaaagaatttcttccccagagtgcgtttttgaagtggctgggtacccacgtttgcactcatgtcatactgaaggagctctgtggaaatctctgttttcttctgtgtggatttaatgagagaaatttaaatatgtctagagtggatgtatatacaacacattctcctgctggaacttctgtgcaaaacatgttacactggagccaggctgttaaattccaaaagtttcaagcctttgactggggaagcagtgccaagaattattttcattacaaccagagttatcctcccacatacaatgtgaaggacatgcttgtgccgactgcagtctggagcgggggtcacgactggcttgcagatgtctacgacgtcaatatcttactgactcagatcaccaacttggtgttccatgagagcattccggaatgggagcatcttgacttcatttggggcctggatgccccttggaggctttataataaaattattaatctaatgaggaaatatcagtgaaagctggacttgagctgtgtaccaccaagtcaatgattatgtcatgtgaaaatgtgtttgcttcatttctgtaaaacacttgtttttctttcccaggtcttttgtttttttatatccaagaaaatgataactttgaagatgcccagttcactctagtttcaattagaaacatactagctattttttctttaattagggctggaataggaagccagtgtctcaaccatagtattgtctctttaagtcttttaaatatcactgatgtgtaaaaaggtcattatatccattctgtttttaaaatttaaaatatattgactttttgcccttcataggacaaagtaatatatgtgttggaattttaaaattgtgttgtcattggtaaatctgtcactgacttaagcgaggtataaaagtacgcagttttcatgtccttgccttaaagagctctctagtctaacggtcttgtagttagagatctaaatgacattttatcatgttttcctgcagcaggtgcatagtcaaatccagaaatatcacagctgtgccagtaataaggatgctaacaattaattttatcaaacctaactgtgacagctgtgatttgacacgttttaattgctcaggttaaatgaaatagttttccggcgtcttcaaaaacaaattgcactgataaaacaaaaacaaaagtatgttttaaatgctttgaagactgatacactcaaccatctatattcatgagctctcaatttcatggcaggccatagttctacttatctgagaagcaaatccctgtggagactataccactattttttctgagattaatgtactcttggagcccgctactgtcgttattgatcacatctgtgtgaagccaaagccccgtggttgcccatgagaagtgtccttgttcattttcacccaaatgaagtgtgaacgtgatgttttcggatgcaaactcagctcagggattcattttgtgtcttagttttatatgcatccttatttttaatacacctgcttcacgtccctatgttgggaagtccatatttgtctgcttttcttgcagcatcatttccttacaatactgtccggtggacaaaatgacaattgatatgtttttctgatataattactttagctgcactaacagtacaatgcttgttaatggttaatataggcagggcgaatactactttgtaacttttaaagtcttaaacttttcaataaaattgagtgagacttataggccc

SEQ ID NO: 389 - protein, 399 aa, Homo sapien
MKMRFLGLVVCLVLWPLHSEGSGGKLTAVDPETNMNVSEIISYWGFPSEEYLVETEDGYILCLNRIPHGRKNHSDKGPKPVVFLQHGLLADSSNWVTNLANSSLGFILADAGFDVWMGNSRGNTWSRKHKTLSVSQDEFWAFSYDEMAKYDLPASINFILNKTGQEQVYYVGHSQGTTIGFIAFSQIPELAKRIKMFFALGPVASVAFCTSPMAKLGRLPDHLIKDLFGDKEFLPQSAFLKWLGTHVCTHVILKELCGNLCFLLCGFNERNLNMSRVDVYTTHSPAGTSVQNMLHWSQAVKFQKFQAFDWGSSAKNYFHYNQSYPPTYNVKDMLVPTAVWSGGHDWLADVYDVNILLTQITNLVFHESIPEWEHLDFIWGLDAPWRLYNKIINLMRKYQ

SEQ ID NO: 390 - DNA, 1221 bp, Homo sapien
cgcaggctggaaggaagacgaacctacgaagcagagatctgaagacagcatgtacacagccattccccagagtggctctccattcccaggctcagtgcaggatccaggcctgcatgtgtggcgggtggagaagctgaagccggtgcctgtggcgcaagagaaccagggcgtcttcttctcgggggactcctacctagtgctgcacaatggcccagaagaggtttcccatctgcacctgtggataggccagcagtcatcccgggatgagcagggggcctgtgccgtgctggctgtgcacctcaacacgctgctgggagagcggcctgtgcagcaccgcgaggtgcagggcaatgagtctgacctcttcatgagctacttcccacggggcctcaagtaccaggaaggtggtgtggagtcagcatttcacaagacctccacaggagccccagctgccatcaagaaactctaccaggtgaaggggaagaagaacatccgtgccaccgagcgggcactgaactgggacagcttcaacactggggactgcttcatcctggacctgggccagaacatcttcgcctggtgtggtggaaagtccaacatcctggaacgcaacaaggcgagggacctggccctggccatccgggacagtgagcgacagggcaaggcccaggtggagattgtcactgatggggaggagcctgctgagatgatccaggtcctgggccccaagcctgctctgaaggagggcaaccctgaggaagacctcacagctgacaaggcaaatgcccaggccgcagctctgtataaggtctctgatgccactggacagatgaacctgaccaaggtggctgactccagcccctttgcccttgaactgctgatatctgatgactgctttgtgctggacaacgggctctgtggcaagatctatatctggaaggggcgaaaagcgaatgagaaggagcggcaggcagccctgcaggtggccgagggcttcatctcgcgcatgcagtacgccccgaacactcaggtggagattctgcctcagggccgtgagagtcccatcttcaagcaatttttcaaggactggaaatgagggtgggcgtcttcctgccccatgctcccctgccccccaccacctgcctgcttgcttctctggctgcctggtcagtgcagaggtgccccctgcagatgttcaataaaggagacaagtgctttccc

SEQ ID NO: 391 - protein, 348 aa, Homo sapien
MYTAIPQSGSPFPGSVQDPGLHVWRVEKLKPVPVAQENQGVFFSGDSYLVLHNGPEEVSHLHLWIGQQSSRDEQGACAVLAVHLNTLLGERPVQHREVQGNESDLFMSYFPRGLKYQEGGVESAFHKTSTGAPAAIKKLYQVKGKKNIRATERALNWDSFNTGDCFILDLGQNIFAWCGGKSNILERNKARDLALAIRDSERQGKAQVEIVTDGEEPAEMIQVLGPKPALKEGNPEEDLTADKANAQAAALYKVSDATGQMNLTKVADSSPFALELLISDDCFVLDNGLCGKIYIWKGRKANEKERQAALQVAEGFISRMQYAPNTQVEILPQGRESPIFKQFFKDWK

SEQ ID NO: 392 - DNA, 3568 bp, Homo sapien
ccggtcctgagacacgctgtgtggctgaaaagtgaaggcaagagctcatttggcctctgtgctcccctccgcaagggatcgtttctccagaagagctggatattctttcgcccagttatggcagacaagttaacgagaattgctattgtcaaccatgacaaatgtaaacctaagaaatgtcgacaggaatgcaaaaagagttgtcctgtagttcgaatgggaaaattatgcatagaggttacaccccagagcaaaatagcatggatttccgaaactctttgtattggttgtggtatctgtattaagaaatgcccctttggcgccttatcaattgtcaatctaccaagcaacttggaaaaagaaaccacacatcgatattgtgccaatgccttcaaacttcacaggttgcctatccctcgtccaggtgaagttttgggattagttggaactaatggtattggaaagtcagctgctttaaaaattttagcaggaaaacaaaagccaaaccttggaaagtacgatgatcctcctgactggcaggagattttgacttatttccgtggatctgaattacaaaattactttacaaagattctagaagatgacctaaaagccatcatcaaacctcaatatgtagccagattcctaaggctggcaaaggggacagtgggatctattttggaccgaaaagatgaaacaaagacacaggcaattgtatgtcagcagcttgatttaacccacctaaaagaacgaaatgttgaagatctttcaggaggagagttgcagagatttgcttgtgctgtcgtttgcatacagaaagctgatattttcatgtttgatgagccttctagttacctagatgtcaagcagcgtttaaaggctgctattactatacgatctctaataaatccagatagatatatcattgtggtggaacatgatctaagtgtattagactatctctccgacttcatctgctgtttatatggtgtaccaagcgcctatggagttgtcactatgccttttagtgtaagagaaggcataaacatttttttggatggctatgttccaacagaaaacttgagattcagagatgcatcacttgtttttaaagtggctgagacagcaaatgaagaagaagttaaaaagatgtgtatgtataaatatccaggaatgaagaaaaaaatgggagaatttgagctagcaattgtagctggagagtttacagattctgaaattatggtgatgctgggggaaaatggaacgggtaaaacgacatttatcagaatgcttgctggaagacttaaacctgatgaaggaggagaagtaccagttctaaatgtcagttataagccacagaaaattagtcccaaatcaactggaagtgttcgccagttactacatgaaaagataagagatgcttatactcacccacaatttgtgaccgatgtaatgaagcctctgcaaattgaaaacatcattgatcaagaggtgcagacattatctggtggtgaactacagcgagtacgtttacgcctttgcttgggcaaacctgctgatgtctatttaattgatgaaccatctgcatatttggattctgagcaaagactgatggcagctcgagttgtcaaacgtttcatactccatgcaaaaaagacagcctttgttgtggaacatgacttcatcatggccacctatctagcggatcgcgtcatcgtttttgatggtgttccatctaagaacacagttgcaaacagtcctcaaacccttttggctggcatgaataaatttttgtctcagcttgaaattacattcagaagagatccaaacaactataggccacgaataaacaaacttaattcaattaaggatgtagaacaaaagaagagtggaaactactttttcttggatgattagactgactctgagaatattgataagccatttattaaaaggagtatttactagaattttttgtcatataaaacttgaatcaggattttatgccccacatactctggaacttgaagtataatatacttaatataacataaaaagccagttgggttctaaattgtagttgaaacacagaaaatgccacttttctgttcctgaagaggctcttttgtgcataatattctaaaatgaagacatttcaagctatacaaattacttccaagttttcatgatgtatgggaagattttcagtaggtgtattatattcacggtaccaaatgctgaccagtgttgctccattttttaaatcttgaaaagggtttctgtacttacctggtttgccaagtatgccagtgtaatgaaactgcccttattttaaaagccagtcaaagattccactgattgacatttgataaataaacatcaggattatgtttattgtttgttttcagtctttgcactatattaccagtatatggtttccgaggaagattatctactgcaaaacaccactgttggaaaaataggtatttttaaattgtttttaatccttttttggtgcttttaaacatgtttaagcaaaaaccaattcagtccattccccgcaaaaaacccctaactttactctgaactttttttgtttttgcattccatgaggttctgtattcagtcattctctaggtaatgtcatttttgtacacatatatttatataatcactgattgagatttaggaaaaagcatttctaaagaatatttgcttcccttagaactacagactcgaaatctttaaagatggtgcctaagcatctatgtattttttttaagttccacagatttttctgttgggcaggccaaggattataaaccacttccctaaaggcaacattaatgcaaaagtccccagatggcaatacaaagtatcccctggtaccacatatattcatttgtgagtttggatatagagcacattatctaaaccattttgtagttccaaaaacccatctaaatttcttgagttcctgaattttgaacaggattacctggagcctggagccactttaagttgtacttctgactaaactggaattatgagtgaggaagagtgtttactaaataaatgactggggcaagcaaaattgaggaggaaattagaaactgtttgacaaactttaagagctacttgaaataacagaagtcttgattaatatgcaaataatggctagaaagtatggtttaactggaccctattatgccttttaaaaataatttcagtaacccataaatacatgttgtaaaaaattcaaatatacagaatggaataaaaaaatgatctccctttattaccctcccaaaggttaccagcgtttgaatttaataatgtatattctttcatgcttttttctgtgcacttacctaagtgtgaatatgtaaagggtttgttttgtatacaaatgggattatactaaaataagtaatgcctatttttaaggataggttaaatttgtgaatgatcatttcaaatatattgaataaaataagcaaaagctattgttatttactgatcctgaaaaaaaaaaaaaaaaaaaaaaaaaaaaaaaaaaaaaaaaaaa

SEQ ID NO: 393 - protein, 599 aa, Homo sapien
MADKLTRIAIVNHDKCKPKKCRQECKKSCPVVRMGKLCIEVTPQSKIAWISETLCIGCGICIKKCPFGALSIVNLPSNLEKETTHRYCANAFKLHRLPIPRPGEVLGLVGTNGIGKSAALKILAGKQKPNLGKYDDPPDWQEILTYFRGSELQNYFTKILEDDLKAIIKPQYVARFLRLAKGTVGSILDRKDETKTQAIVCQQLDLTHLKERNVEDLSGGELQRFACAVVCIQKADIFMFDEPSSYLDVKQRLKAAITIRSLINPDRYIIVVEHDLSVLDYLSDFICCLYGVPSAYGVVTMPFSVREGINIFLDGYVPTENLRFRDASLVFKVAETANEEEVKKMCMYKYPGMKKKMGEFELAIVAGEFTDSEIMVMLGENGTGKTTFIRMLAGRLKPDEGGEVPVLNVSYKPQKISPKSTGSVRQLLHEKIRDAYTHPQFVTDVMKPLQIENIIDQEVQTLSGGELQRVRLRLCLGKPADVYLIDEPSAYLDSEQRLMAARVVKRFILHAKKTAFVVEHDFIMATYLADRVIVFDGVPSKNTVANSPQTLLAGMNKFLSQLEITFRRDPNNYRPRINKLNSIKDVEQKKSGNYFFLDD

SEQ ID NO: 394 - DNA, 717 bp, Mus musculus
agagcgatcatgtcgcacaaacaaatttactattcggacaaatacgacgacgaggagtttgagtatcgacatgtcatgctgcccaaggacatagccaagctggtccctaaaacccatctgatgtctgaatctgaatggaggaatcttggcgttcagcagagtcagggatgggtccattatatgatccatgaaccagaacctcacatcttgctgttccggcgcccactacccaagaaaccaaagaaatgaagctggcaagctacttttcagcctcaagctttacacagctgtccttacttcctaacatctttctgataacattattatgttgccttcttgtttctcactttgatatttaaaagatgttcaatacactgtttgaatgtgctggtaactgctttgcttcttgagtagagccaccaccaccatagcccagccagatgagtgctctgtggacccacagcctaagctgagtgtgaccccagaagccacgatgtgctctgtatccagaacacacttggcagatggaggaagcatctgagtttgagaccatggctgttacagggatcatgtaaacttgctgtttttgttttttctgccgggtgttgtatgtgtggtgacttgcggatttatgtttcagtgtactggaaactttccattttattcaagaaatctgttcatgttaaaagccttgattaaagaggaagtttttataat

SEQ ID NO: 395 - protein, 79 aa, Mus musculus [sequence omitted]

SEQ ID NO: 396 - DNA, 1132 bp, Homo sapien
agccagaaatgtgaagtgctagctgaaggatgagcagcagctagccaggcaaagggggcaatggcggcttcctgtgttctactgcacactgggcagaagatgcctctgattggtctgggtacctggaagagtgagcctggtcaggtaaaagcagctgttaagtatgcccttagcgtaggctaccgccacattgattgtgctgctatctacggcaatgagcctgagattggggaggccctgaaggaggacgtgggaccaggcaaggcggtgcctcgggaggagctgtttgtgacatccaagctgtggaacaccaagcaccaccccgaggatgtggagcctgccctccggaagactctggctgacctccagctggagtatctggacctgtacctgatgcactggccttatgcctttgagcggggagacaaccccttccccaagaatgctgatgggactatatgctacgactccacccactacaaggagacttggaaggctctggaggcactggtggctaaggggctggtgcaggcgctgggcctgtccaacttcaacagtcggcagattgatgacatactcagtgtggcctccgtgcgtccagctgtcttgcaggtggaatgccacccatacttggctcaaaatgagctaattgcccactgccaagcacgtggcttggaggtaactgcttatagccctttgggctcctctgatcgtgcatggcgtgatcctgatgagcctgtcctgctggaggaaccagtagtcctggcattggctgaaaagtatggccgatctccagctcagatcttgctcaggtggcaggtccagcggaaagtgatctgcatccccaaaagtatcactccttctcgaatccttcagaacatcaaggtgtttgacttcacctttagcccagaagagatgaagcagctaaatgccctgaacaaaaattggagatatattgtgcctatgcttacggtggatgggaagagagtcccaagggatgcagggcatcctctgtacccctttaatgacccgtactgagaccacagcttcttggcctcccttccagctctgcagctaatgaggtcctgccacaacggaaagagggagttaataaagccattggagcatccat

SEQ ID NO: 397 - protein, 325 aa, Homo sapien
MAASCVLLHTGQKMPLIGLGTWKSEPGQVKAAVKYALSVGYRHIDCAAIYGNEPEIGEALKEDVGPGKAVPREELFVTSKLWNTKHHPEDVEPALRKTLADLQLEYLDLYLMHWPYAFERGDNPFPKNADGTICYDSTHYKETWKALEALVAKGLVQALGLSNFNSRQIDDILSVASVRPAVLQVECHPYLAQNELIAHCQARGLEVTAYSPLGSSDRAWRDPDEPVLLEEPVVLALAEKYGRSPAQILLRWQVQRKVICIPKSITPSRILQNIKVFDFTFSPEEMKQLNALNKNWRYIVPMLTVDGKRVPRDAGHPLYPFNDPY

SEQ ID NO: 398 - DNA, 921 bp, Homo sapien
gcggcgctcgcgccaagggacgtgtttctgcgctcgcgtggtcatggaggcgctgccgctgctagccgcgacaactccggaccacggccgccaccgaaggctgcttctgctgccgctactgctgttcctgctgccggctggagctgtgcagggctgggagacagaggagaggccccggactcgcgaagaggagtgccacttctacgcgggtggacaagtgtacccgggagaggcatcccgggtatcggtcgccgaccactccctgcacctaagcaaagcgaagatttccaagccagcgccctactgggaaggaacagctgtgatcgatggagaatttaaggagctgaagttaactgattatcgtgggaaatacttggttttcttcttctacccacttgatttcacatttgtgtgtccaactgaaattatcgcttttggcgacagacttgaagaattcagatctataaatactgaagtggtagcatgctctgttgattcacagtttacccatttggcctggattaatacccctcgaagacaaggaggacttgggccaataaggattccacttctttcagatttgacccatcagatctcaaaggactatggtgtatacctagaggactcaggccacactcttagaggtctcttcattattgatgacaaaggaatcctaagacaaattactctgaatgatcttcctgtgggtagatcagtggatgagacactacgtttggttcaagcattccagtacactgacaaacacggagaagtctgccctgctggctggaaacctggtagtgaaacaataatcccagatccagctggaaagctgaagtatttcgataaactgaattgagaaatacttcttcaagttatgatgcttgaaagttctcaataaagttcacggtttcattacca

SEQ ID NO: 399 - protein, 271 aa, Homo sapien
MEALPLLAATTPDHGRHRRLLLLPLLLFLLPAGAVQGWETEERPRTREEECHFYAGGQVYPGEASRVSVADHSLHLSKAKISKPAPYWEGTAVIDGEFKELKLTDYRGKYLVFFFYPLDFTFVCPTEIIAFGDRLEEFRSINTEVVACSVDSQFTHLAWINTPRRQGGLGPIRIPLLSDLTHQISKDYGVYLEDSGHTLRGLFIIDDKGILRQITLNDLPVGRSVDETLRLVQAFQYTDKHGEVCPAGWKPGSETIIPDPAGKLKYFDKLN

SEQ ID NO: 400 - DNA, 2102 bp, Homo sapien
ccgctgggcgtagctgcgactcggcggagtcccggcggcgcgtccttgttctaacccggcgcgccatgaccgtcgcgcggccgagcgtgcccgcggcgctgcccctcctcggggagctgccccggctgctgctgctggtgctgttgtgcctgccggccgtgtggggtgactgtggccttcccccagatgtacctaatgcccagccagctttggaaggccgtacaagttttcccgaggatactgtaataacgtacaaatgtgaagaaagctttgtgaaaattcctggcgagaaggactcagtgatctgccttaagggcagtcaatggtcagatattgaagagttctgcaatcgtagctgcgaggtgccaacaaggctaaattctgcatccctcaaacagccttatatcactcagaattattttccagtcggtactgttgtggaatatgagtgccgtccaggttacagaagagaaccttctctatcaccaaaactaacttgccttcagaatttaaaatggtccacagcagtcgaattttgtaaaaagaaatcatgccctaatccgggagaaatacgaaatggtcagattgatgtaccaggtggcatattatttggtgcaaccatctccttctcatgtaacacagggtacaaattatttggctcgacttctagtttttgtcttatttcaggcagctctgtccagtggagtgacccgttgccagagtgcagagaaatttattgtccagcaccaccacaaattgacaatggaataattcaaggggaacgtgaccattatggatatagacagtctgtaacgtatgcatgtaataaaggattcaccatgattggagagcactctatttattgtactgtgaataatgatgaaggagagtggagtggcccaccacctgaatgcagaggaaaatctctaacttccaaggtcccaccaacagttcagaaacctaccacagtaaatgttccaactacagaagtctcaccaacttctcagaaaaccaccacaaaaaccaccacaccaaatgctcaagcaacacggagtacacctgtttccaggacaaccaagcattttcatgaaacaaccccaaataaaggaagtggaaccacttcaggtactacccgtcttctatctgggcacacgtgtttcacgttgacaggtttgcttgggacgctagtaaccatgggcttgctgacttagccaaagaagagttaagaagaaaatacacacaagtatacagactgttcctagtttcttagacttatctgcatattggataaaataaatgcaattgtgctcttcatttaggatgctttcattgtctttaagatgtgttaggaatgtcaacagagcaaggagaaaaaaggcagtcctggaatcacattcttagcacacctacacctcttgaaaatagaacaacttgcagaattgagagtgattcctttcctaaaagtgtaagaaagcatagagatttgttcgtatttagaatgggatcacgaggaaaagagaaggaaagtgatttttttccacaagatctgtaatgttatttccacttataaaggaaataaaaaatgaaaaacattatttggatatcaaaagcaaataaaaacccaattcagtctcttctaagcaaaattgctaaagagagatgaaccacattataaagtaatctttggctgtaaggcattttcatctttccttcgggttggcaaaatattttaaaggtaaaacatgctggtgaaccaggggtgttgatggtgataagggaggaatatagaatgaaagactgaatcttcctttgttgcacaaatagagtttggaaaaagcctgtgaaaggtgtcttctttgacttaatgtctttaaaagtatccagagatactacaatattaacataagaaaagattatatattatttctgaatcgagatgtccatagtcaaatttgtaaatcttattcttttgtaatatttatttatatttatttatgacagtgaacattctgattttacatgtaaaacaagaaaagttgaagaagatatgtgaagaaaaatgtatttttcctaaatagaaataaatgatcccattttttggt

SEQ ID NO: 401 - protein, 381 aa, Homo sapien
MTVARPSVPAALPLLGELPRLLLLVLLCLPAVWGDCGLPPDVPNAQPALEGRTSFPEDTVITYKCEESFVKIPGEKDSVICLKGSQWSDIEEFCNRSCEVPTRLNSASLKQPYITQNYFPVGTVVEYECRPGYRREPSLSPKLTCLQNLKWSTAVEFCKKKSCPNPGEIRNGQIDVPGGILFGATISFSCNTGYKLFGSTSSFCLISGSSVQWSDPLPECREIYCPAPPQIDNGIIQGERDHYGYRQSVTYACNKGFTMIGEHSIYCTVNNDEGEWSGPPPECRGKSLTSKVPPTVQKPTTVNVPTTEVSPTSQKTTTKTTTPNAQATRSTPVSRTTKHFHETTPNKGSGTTSGTTRLLSGHTCFTLTGLLGTLVTMGLLT

SEQ ID NO: 402 - DNA, 1266 bp, Homo sapien
atgttccgagcggcggctccggggcagctccggcgggcggcctcattgctacgatttcagagtaccctggtaatagctgagcatgcaaatgattccctagcacccattactttaaataccattactgcagccacacgccttggaggtgaagtgtcctgcttagtagctggaaccaaatgtgacaaggtggcacaagatctctgtaaagtagcaggcatagcaaaagttctggtggctcagcatgatgtgtacaaaggcctacttccagaggaactgacaccattgattttggcaactcagaagcagttcaattacacacacatctgtgctggagcatctgccttcggaaagaaccttttgcccagagtagcagccaaacttgaggttgccccgatttctgacatcattgcaatcaagtcacctgacacatttgtgagaactatttatgcaggaaatgctctatgtacagtgaagtgtgatgagaaagtgaaagtgttttctgtccgtggaacatcctttgatgctgcagcaacaagtggcggtagtgccagttcagaaaaggcatcaagtacttcaccagtggaaatatcagagtggcttgaccagaaattaacaaaaagtgatcgaccagagctaacaggtgccaaagtggtggtatctggtggtcgaggcttgaagagtggagagaactttaagttgttatatgacttggcagatcaactacatgctgcagttggtgcttcccgtgctgctgttgatgctggctttgttcccaatgacatgcaagttggacagacgggaaaaatagtagcaccagaactttatattgctgttggaatatctggagccatccaacatttagctgggatgaaagacagcaagacaattgtggcaattaataaagacccagaagctccaattttccaagtggcagattatggaatagttgcagatttatttaaggtagttcctgaaatgactgagatattgaagaaaaaatgaatcaggatcatgccttaaaaagaaaacttttgttaaagtattccactgaaatcacagatatttgtgggtattataacaatcattggaaagcatggagagctacatttcataatttgagggaaaatttctaacagatgccagaatgcttgtttatgggattgctgtgtttccttttaattatttgtggttccaaacaattattgtttgaacttttttaattctgtactaaaatctataataaagcttttccacagctttaaaact

SEQ ID NO: 403 - protein, 333 aa, Homo sapien
MFRAAAPGQLRRAASLLRFQSTLVIAEHANDSLAPITLNTITAATRLGGEVSCLVAGTKCDKVAQDLCKVAGIAKVLVAQHDVYKGLLPEELTPLILATQKQFNYTHICAGASAFGKNLLPRVAAKLEVAPISDIIAIKSPDTFVRTIYAGNALCTVKCDEKVKVFSVRGTSFDAAATSGGSASSEKASSTSPVEISEWLDQKLTKSDRPELTGAKVVVSGGRGLKSGENFKLLYDLADQLHAAVGASRAAVDAGFVPNDMQVGQTGKIVAPELYIAVGISGAIQHLAGMKDSKTIVAINKDPEAPIFQVADYGIVADLFKVVPEMTEILKKK

SEQ ID NO: 404 - DNA, 1857 bp, Homo sapien
ctgatccgggccgggcgggaagtcgggtcccgaggctccggctcggcagaccgggcggaaagcagccgagcggccatggagctgtgcgggctggggctgccccggccgcccatgctgctggcgctgctgttggcgacactgctggcggcgatgttggcgctgctgactcaggtggcgctggtggtgcaggtggcggaggcggctcgggccccgagcgtctcggccaagccggggccggcgctgtggcccctgccgctctcggtgaagatgaccccgaacctgctgcatctcgccccggagaacttctacatcagccacagccccaattccacggcgggcccctcctgcaccctgctggaggaagcgtttcgacgatatcatggctatatttttggtttctacaagtggcatcatgaacctgctgaattccaggctaaaacccaggttcagcaacttcttgtctcaatcacccttcagtcagagtgtgatgctttccccaacatatcttcagatgagtcttatactttacttgtgaaagaaccagtggctgtccttaaggccaacagagtttggggagcattacgaggtttagagacctttagccagttagtttatcaagattcttatggaactttcaccatcaatgaatccaccattattgattctccaaggttttctcacagaggaattttgattgatacatccagacattatctgccagttaagattattcttaaaactctggatgccatggcttttaataagtttaatgttcttcactggcacatagttgatgaccagtctttcccatatcagagcatcacttttcctgagttaagcaataaaggaagctattctttgtctcatgtttatacaccaaatgatgtccgtatggtgattgaatatgccagattacgaggaattcgagtcctgccagaatttgatacccctgggcatacactatcttggggaaaaggtcagaaagacctcctgactccatgttacagtagacaaaacaagttggactcttttggacctataaaccctactctgaatacaacatacagcttccttactacatttttcaaagaaattagtgaggtgtttccagatcaattcattcatttgggaggagatgaagtggaatttaaatgttgggaatcaaatccaaaaattcaagatttcatgaggcaaaaaggctttggcacagattttaagaaactagaatctttctacattcaaaaggttttggatattattgcaaccataaacaagggatccattgtctggcaggaggtttttgatgataaagcaaagcttgcgccgggcacaatagttgaagtatggaaagacagcgcatatcctgaggaactcagtagagtcacagcatctggcttccctgtaatcctttctgctccttggtacttagatttgattagctatggacaagattggaggaaatactataaagtggaacctcttgattttggcggtactcagaaacagaaacaacttttcattggtggagaagcttgtctatggggagaatatgtggatgcaactaacctcactccaagattatggcctcgggcaagtgctgttggtgagagactctggagttccaaagatgtcagagatatggatgacgcctatgacagactgacaaggcaccgctgcaggatggtcgaacgtggaatagctgcacaacctctttatgctggatattgtaaccatgagaacatgtaaaaaatggaggggaaaaaggccacagcaatctgtactacaatcaactttattttgaaatcatgtaaaataagatattagacttttttgaataaaatatttttattgattgaa

SEQ ID NO: 405 - protein, 556 aa, Homo sapien
MELCGLGLPRPPMLLALLLATLLAAMLALLTQVALVVQVAEAARAPSVSAKPGPALWPLPLSVKMTPNLLHLAPENFYISHSPNSTAGPSCTLLEEAFRRYHGYIFGFYKWHHEPAEFQAKTQVQQLLVSITLQSECDAFPNISSDESYTLLVKEPVAVLKANRVWGALRGLETFSQLVYQDSYGTFTINESTIIDSPRFSHRGILIDTSRHYLPVKIILKTLDAMAFNKFNVLHWHIVDDQSFPYQSITFPELSNKGSYSLSHVYTPNDVRMVIEYARLRGIRVLPEFDTPGHTLSWGKGQKDLLTPCYSRQNKLDSFGPINPTLNTTYSFLTTFFKEISEVFPDQFIHLGGDEVEFKCWESNPKIQDFMRQKGFGTDFKKLESFYIQKVLDIIATINKGSIVWQEVFDDKAKLAPGTIVEVWKDSAYPEELSRVTASGFPVILSAPWYLDLISYGQDWRKYYKVEPLDFGGTQKQKQLFIGGEACLWGEYVDATNLTPRLWPRASAVGERLWSSKDVRDMDDAYDRLTRHRCRMVERGIAAQPLYAGYCNHENM

SEQ ID NO: 406 - DNA, 1935 bp, Homo sapien
ctggtcccgagcacgagctgtgaggggattcacttgtgtgcggaactcctcggaaccatggcgtccctttcccttgcacctgttaacatctttaaggcaggagctgatgaagagagagcagagacagctcgtctgacttcttttattggtgccatcgccattggagacttggtaaagagcaccttgggacccaaaggcatggacaaaattcttctaagcagtggacgagatgcctctcttatggtaaccaatgatggtgccactattctaaaaaacattggtgttgacaatccagcagctaaagttttagttgatatgtcaagggttcaagatgatgaagttggtgatggcactacctctgttaccgttttagcagcagaattattaagggaagcagaatctttaattgcaaaaaagattcatccacagaccatcatagcgggttggagagaagccacgaaggctgcaagagaggcgctgttgagttctgcagttgatcatggttccgatgaagttaaattccgtcaagatttaatgaatattgcgggcacaacattatcctcaaaacttcttactcatcacaaagaccactttacaaagttagctgtagaagcagttctcagactgaaaggctctggcaacctggaggcaattcatattatcaagaagctaggaggaagtttggcagattcctatttagatgaaggcttcctgttggataaaaaaattggagtaaatcaaccaaaacgaattgaaaatgctaaaattcttattgcaaatactggtatggatacagacaaaataaagatatttggttcccgggtaagagttgactctacagcaaaggttgcagaaatagaacatgcggaaaaggaaaaaatgaaggagaaagttgaacgtattcttaagcatggaataaattgctttattaacaggcaattaatttataattatcctgaacagctctttggtgctgctggtgtcatggctattgagcatgcagattttgcaggtgtggaacgcctagctcttgtcacaggtggtgaaattgcctctacctttgatcacccagaactggtgaagcttggaagttgcaaacttatcgaggaagtcatgattggagaagacaaactcattcacttttctggggttgcccttggtgaggcttgtaccattgttttgcgtggtgccactcaacaaattttagatgaagcagaaagatcattgcatgatgctctttgtgttcttgcgcaaactgtaaaggactctagaacagtttatggaggaggctgttctgagatgttgatggctcatgctgtgacacagcttgccaatagaacaccaggcaaagaagctgttgcaatggagtcttatgctaaagcactgagaatgttgccaaccatcatagctgacaatgcaggctatgacagtgcagacctggtggcacagctcagggctgctcacagtgaaggcaataccactgctggattggatatgagggaaggcaccattggagatatggctatcctgggtataacagaaagttttcaagtgaagcgacaggttcttctgagtgcagctgaagcagcagaggtgattctgcgtgtggacaacatcatcaaagcggcacccaggaaacgtgtccctgatcaccacccctgttaagcattcccacgtgctgtcgatctttggaccagtttctagcaaagttgtgtttgaaagatactctattaaagaagactgtggaatctgtttatcggtgcccattatatccttaagtttggatatttagctgaccttcgctttaacataggtctaatttatttgccgtgtcattttccatacaaatcagttgatttaaaggagttcatttcgcatactgggcattaaaataaaaatttgaacaatgaaaggaaaaaaaggagaaaaaaaaaa

SEQ ID NO: 407 - protein, 535 aa, Homo sapien
MASLSLAPVNIFKAGADEERAETARLTSFIGAIAIGDLVKSTLGPKGMDKILLSSGRDASLMVTNDGATILKNIGVDNPAAKVLVDMSRVQDDEVGDGTTSVTVLAAELLREAESLIAKKIHPQTIIAGWREATKAAREALLSSAVDHGSDEVKFRQDLMNIAGTTLSSKLLTHHKDHFTKLAVEAVLRLKGSGNLEAIHIIKKLGGSLADSYLDEGFLLDKKIGVNQPKRIENAKILIANTGMDTDKIKIFGSRVRVDSTAKVAEIEHAEKEKMKEKVERILKHGINCFINRQLIYNYPEQLFGAAGVMAIEHADFAGVERLALVTGGEIASTFDHPELVKLGSCKLIEEVMIGEDKLIHFSGVALGEACTIVLRGATQQILDEAERSLHDALCVLAQTVKDSRTVYGGGCSEMLMAHAVTQLANRTPGKEAVAMESYAKALRMLPTIIADNAGYDSADLVAQLRAAHSEGNTTAGLDMREGTIGDMAILGITESFQVKRQVLLSAAEAAEVILRVDNIIKAAPRKRVPDHHPC

SEQ ID NO: 408 - DNA, 4235 bp, Homo sapien
gaatccaagggggccagttcctgccgtctgctcttctgcctcttgatctccgccaccgtcttcaggccaggccttggatggtatactgtaaattcagcatatggagataccattatcataccttgccgacttgacgtacctcagaatctcatgtttggcaaatggaaatatgaaaagcccgatggctccccagtatttattgccttcagatcctctacaaagaaaagtgtgcagtacgacgatgtaccagaatacaaagacagattgaacctctcagaaaactacactttgtctatcagtaatgcaaggatcagtgatgaaaagagatttgtgtgcatgctagtaactgaggacaacgtgtttgaggcacctacaatagtcaaggtgttcaagcaaccatctaaacctgaaattgtaagcaaagcactgtttctcgaaacagagcagctaaaaaagttgggtgactgcatttcagaagacagttatccagatggcaatatcacatggtacaggaatggaaaagtgctacatccccttgaaggagcggtggtcataatttttaaaaaggaaatggacccagtgactcagctctataccatgacttccaccctggagtacaagacaaccaaggctgacatacaaatgccattcacctgctcggtgacatattatggaccatctggccagaaaacaattcattctgaacaggcagtatttgatatttactatcctacagagcaggtgacaatacaagtgctgccaccaaaaaatgccatcaaagaaggggataacatcactcttaaatgcttagggaatggcaaccctcccccagaggaatttttgttttacttaccaggacagcccgaaggaataagaagctcaaatacttacacactgacggatgtgaggcgcaatgcaacaggagactacaagtgttccctgatagacaaaaaaagcatgattgcttcaacagccatcacagttcactatttggatttgtccttaaacccaagtggagaagtgactagacagattggtgatgccctacccgtgtcatgcacaatatctgctagcaggaatgcaactgtggtatggatgaaagataacatcaggcttcgatctagcccgtcattttctagtcttcattatcaggatgctggaaactatgtctgcgaaactgctctgcaggaggttgaaggactaaagaaaagagagtcattgactctcattgtagaaggcaaacctcaaataaaaatgacaaagaaaactgatcccagtggactatctaaaacaataatctgccatgtggaaggttttccaaagccagccattcagtggacaattactggcagtggaagcgtcataaaccaaacagaggaatctccttatattaatggcaggtattatagtaaaattatcatttcccctgaagagaatgttacattaacttgcacagcagaaaaccaactggagagaacagtaaactccttgaatgtctctgctataagtattccagaacacgatgaggcagacgagataagtgatgaaaacagagaaaaggtgaatgaccaggcaaaactaattgtgggaatcgttgttggtctcctccttgctgcccttgttgctggtgtcgtctactggctgtacatgaagaagtcaaagactgcatcaaaacatgtaaacaaggacctcggtaatatggaagaaaacaaaaagttagaagaaaacaatcacaaaactgaagcctaagagagaaactgtcctagttgtccagagataaaaatcatatagaccaattgaagcatgaacgtggattgtatttaagacataaacaaagacattgacagcaattcatgttcaagtattaagcagttcattctaccaagctgtcacaggttttcagagaattatctcaagtaaaacaaatgaaatttaattacaaacaataagaacaagttttggcagccatgataataggtcatatgttgtgtttggttcaattttttttccgtaaatgtctgcactgaggatttctttttggtttgccttttatgtaaattttttacgtagctatttttatacactgtaagctttgttctgggagttgctgttaatctgatgtataatgtaatgtttttatttcaattgtttatatggataatctgagcaggtacatttctgattctgattgctatcagcaatgccccaaactttctcataagcacctaaaacccaaaggtggcagcttgtgaagattggggacactcatattgccctaattaaaaactgtgatttttatcacaagggaggggaggccgagagtcagactgatagacaccataggagccgactctttgatatgccaccagcgaactctcagaaataaatcacagatgcatatagacacacatacataatggtactcccaaactgacaattttacctattctgaaaaagacataaaacagaatttggtagcacttacctctacagacacctgctaataaattattttctgtcaaaagaaaaaacacaagcatgtgtgagagacagtttggaaaaatcatggtcaacattcccattttcatagatcacaatgtaaatcactataattacaaattggtgttaaatcctttgggttatccactgccttaaaattatacctatttcatgtttaaaaagatatcaatcagaattggagtttttaacagtggtcattatcaaagctgtgttattttccacagaatatagaatatatatttttttcgtgtgtgtttttgttaactaccctacagatattgaatgcaccttgagataatttagtgttttaactgatacataatttatcaagcagtacatgaaagtgtaataataaaatgtctatgtatctttagttacattcaaatttgtaactttataaacatgttttatgcttgaggaaatttttaaggtggtagtataaatggaaactttttgaagtagaccagatatgggctacttgtgactagacttttaaactttgctctttcaagcagaagcctggtttctgggagaacactgcacagtgatttctttcccaggatttacacaactttaaagggaagataaatgaacatcagatttctaggtatagaactatgttattgaaaggaaaaggaaaactggtgtttgtttcttagactcatgaaataaaaaattatgaaggcaatgaaaaataaattgaaaattaaagtcagatgagaataggaataatactttgccacttctgcattatttagaaacatacgttattgtacatttgtaaaccatttactgtctgggcaatagtgactccgtttaataaaagcttccgtagtgcattggtatggattaaatgcataaaatatcttagactcgatgctgtataaaatattatgggaaaaaagaaatacgttattttgcctctaaacttttattgaagttttatttggcaggaaaaaaaattgaatcttggtcaacatttaaaccaaagtaaaaggggaaaaaccaaagttatttgttttgcatggctaagccattctgttatctctgtaaatactgtgatttcttttttattttctctttagaattttgttaaagaaattctaaaatttttaaacacctgctctccacaataaatcacaaacactaaaataaaattacttccatataaatattattttctcttttggtgtgggagatcaaaggtttaaagtctaacttctaagatatatttgcagaaagaagcaacatgacaatagagagagttatgctacattatttcttggtttccacttgcaatggttaattaagtccaaaaacagctgtcagaacctcgagagcagaacatgagaaactcagagctctggaccgaaagcagaaagtttgccggaaaaaaaaagaccacattattaccatcgattcagtgcctggataaagaggaaagcttacttgtttaatggcagccacatgcacgaagatgctaagaagaaaaagaattccaaatcctcaacttttgaggtttcggctctccaatttaactctttggcaacaggaaacaggttttgcaagttcaaggttcactccctatatgtgattataggaattgtttgtggaaatggattaacatacccgtctatgcctaaaagataataagaaaactgaaatatgtcttcaaaaaaaaaaaaaaaaaaaaaaaaaaaaaaaaaaaaaaaaaa

SEQ ID NO: 409 - DNA, 3635 bp, Homo sapien
tcaacacaggacaatgcaagcccatgagctgttccggtattttcgaatgccagagctggttgacttccgacagtacgtgcgtactcttccgaccaacacgcttatgggcttcggagcttttgcagcactcaccaccttctggtacgccacgagacccaaacccctgaagccgccatgcgacctctccatgcagtcagtggaagtggcgggtagtggtggtgcacgaagatccgcactacttgacagcgacgagcccttggtgtatttctatgatgatgtcacaacattatacgaaggtttccagaggggaatacaggtgtcaaataatggcccttgtttaggctctcggaaaccagaccaaccctatgaatggctttcatataaacaggttgcagaattgtcggagtgcataggctcagcactgatccagaagggcttcaagactgccccagatcagttcattggcatctttgctcaaaatagacctgagtgggtgattattgaacaaggatgctttgcttattcgatggtgatcgttccactttatgatacccttggaaatgaagccatcacgtacatagtcaacaaagctgaactctctctggtttttgttgacaagccagagaaggccaaactcttattagagggtgtagaaaataagttaataccaggccttaaaatcatagttgtcatggatgcctacggcagtgaactggtggaacgaggccagaggtgtggggtggaagtcaccagcatgaaggcgatggaggacctgggaagagccaacagacggaagcccaagcctccagcacctgaagatcttgcagtaatttgtttcacaagtggaactacaggcaaccccaaaggagcaatggtcactcaccgaaacatagtgagcgattgttcagcttttgtgaaagcaacagagaatacagtcaatccttgcccagatgatactttgatatctttcttgcctctcgcccatatgtttgagagagttgtagagtgtgtaatgctgtgtcatggagctaaaatcggatttttccaaggagatatcaggctgctcatggatgacctcaaggtgcttcaacccactgtcttccccgtggttccaagactgctgaaccggatgtttgaccgaattttcggacaagcaaacaccacgctgaagcgatggctcttggactttgcctccaagaggaaagaagcagagcttcgcagcggcatcatcagaaacaacagcctgtgggaccggctgatcttccacaaagtacagtcgagcctgggcggaagagtccggctgatggtgacaggagccgccccggtgtctgccactgtgctgacgttcctcagagcagccctgggctgtcagttttatgaaggatacggacagacagagtgcactgccgggtgctgcctaaccatgcctggagactggaccgcaggccatgttggggccccgatgccgtgcaatttgataaaacttgttgatgtggaagaaatgaattacatggctgccgagggcgagggcgaggtgtgtgtgaaagggccaaatgtatttcagggctacttgaaggacccagcgaaaacagcagaagctttggacaaagacggctggttacacacaggggacattggaaaatggttaccaaatggcaccttgaaaattatcgaccggaaaaagcacatatttaagctggcacaaggagaatacatagcccctgaaaagattgaaaatatctacatgcgaagtgagcctgttgctcaggtgtttgtccacggagaaagcctgcaggcatttctcattgcaattgtggtaccagatgttgagacattatgttcctgggcccaaaagagaggatttgaagggtcgtttgaggaactgtgcagaaataaggatgtcaaaaaagctatcctcgaagatatggtgagacttgggaaggattctggtctgaaaccatttgaacaggtcaaaggcatcacattgcaccctgaattattttctatcgacaatggccttctgactccaacaatgaaggcgaaaaggccagagctgcggaactatttcaggtcgcagatagatgacctctattccactatcaaggtttagtgtgaagaagaaagctcagaggaaatggcacagttccacaatctcttctcctgctgatggccttcatgttgttaattttgaatacagcaagtgtagggaaggaagcgttcgtgtttgacttgtccattcggggttcttctcataggaatgctagaggaaacagaacaccgccttacagtcacctcatgttgcagaccatgtttatggtaatacacactttccaaaatgagccttaaaaattgtaaaggggatactataaatgtgctaagttatttgagacttcctcagtttaaaaagtgggttttaaatcttctgtctccctgcttttctaatcaaggggttaggactttgctatctctgagatgtctgctacttgctgcaaattctgcagctgtctgctgctctaaagagtacagtgcactagagggaagtgttccctttaaaaataagaacaactgtcctggctggagaatctcacaagcggaccagagatctttttaaatccctgctactgtcccttctcacaggcattcacagaacccttctgattcgtaagggttacgaaactcatgttcttctccagtcccctgtggtttctgttggagcataaggtttccagtaagcgggagggcagatccaactcagaaccatgcagataaggagcctctggcaaatgggtgctcatcagaacgcgtggattctctttcatggcagaatgctcttggactcggttctccaggcctgattccccgactccatcctttttcaggggttatttaaaaatctgccttagattctatagtgaagacaagcatttcaagaaagagttacctggatcagccatgctcagctgtgacgcctgaataactgtctactttatcttcactgaaccactcactctgtgtaaaggccaacagatttttaatgtggttttcatatcaaaagatcatgttgggattaacttgcctttttccccaaaaaataaactctcaggcaagcatttctttaaagctattaagggagtatatacttgagtacttattgaaatggacagtaataagcaaatgttcttataatgctacctgatttctatgaaatgtgtttgacaagccaaaattctaggatgtagaaatctggaaagttcatttcctgggattcacttctccagggattttttaaagttaatttgggaaattaacagcagttcactttattgtgagtctttgccacatttgactgaattgagctgtcatttgtacatttaaagcagctgttttggggtctgtgagagtacatgtattatatacaagcacaacagggcttgcactaaagaattgtcattgtaataacactacttggtagcctaacttcatatatgtattcttaattgcacaaaaagtcaataatttgtcaccttggggttttgaatgtttgctttaagtgttggctatttctatgttttataaaccaaaacaaaatttccaaaaacaatgaaggaaaccaaaataaatatttctgcatttcg

SEQ ID NO: 410 - protein, 698 aa, Homo sapien
MQAHELFRYFRMPELVDFRQYVRTLPTNTLMGFGAFAALTTFWYATRPKPLKPPCDLSMQSVEVAGSGGARRSALLDSDEPLVYFYDDVTTLYEGFQRGIQVSNNGPCLGSRKPDQPYEWLSYKQVAELSECIGSALIQKGFKTAPDQFIGIFAQNRPEWVIIEQGCFAYSMVIVPLYDTLGNEAITYIVNKAELSLVFVDKPEKAKLLLEGVENKLIPGLKIIVVMDAYGSELVERGQRCGVEVTSMKAMEDLGRANRRKPKPPAPEDLAVICFTSGTTGNPKGAMVTHRNIVSDCSAFVKATENTVNPCPDDTLISFLPLAHMFERVVECVMLCHGAKIGFFQGDIRLLMDDLKVLQPTVFPVVPRLLNRMFDRIFGQANTTLKRWLLDFASKRKEAELRSGIIRNNSLWDRLIFHKVQSSLGGRVRLMVTGAAPVSATVLTFLRAALGCQFYEGYGQTECTAGCCLTMPGDWTAGHVGAPMPCNLIKLVDVEEMNYMAAEGEGEVCVKGPNVFQGYLKDPAKTAEALDKDGWLHTGDIGKWLPNGTLKIIDRKKHIFKLAQGEYIAPEKIENIYMRSEPVAQVFVHGESLQAFLIAIVVPDVETLCSWAQKRGFEGSFEELCRNKDVKKAILEDMVRLGKDSGLKPFEQVKGITLHPELFSIDNGLLTPTMKAKRPELRNYFRSQIDDLYSTIKV

SEQ ID NO: 411 - DNA, 3097 bp, Homo sapien
gagaatggctcaactctccaaatagagagaatttctatcagttgcaagtacgaaaatttcctgccgattatataaaatactgggagtttgcagtttatctggaagaatgtgaactggctaaacagctttatccaaaggaaaacgatttggtgtttttagctcctgagagaataaatgaagagaagaaagatacagagagaaatgacatacaagatctccacgaatatcattctggttatgttcataaatttcgccgcacgtcagtcatgcgtaatgggaaaactgagtgttacctttccatccagactcaagagaactttccggccaatttaaacgaacttgtgaattgtattgtaatcagttctctggtaactacacaaaggaagttgaaagccatgtctctgttgggtagtcggaaccaactggctagagctgttctgaatccaaaccctatggacttctgtacaaaagatttactgactacaacatctgagagaattattgcgtacttaagagatttcaatgaagatcaaaagaaagcaatagaaactgcatatgctatggtgaaacactcaccatcagttgccaaaatctgcttgattcatggaccacctggaacaggaaaatcaaaaactattgttggcctcctctatcgtctactgacagagaaccagaggaaggggcattcagacgaaaactccaatgccaaaatcaaacaaaaccgtgtcctcgtgtgtgcaccttccaatgcagctgttgatgaactcatgaaaaaaattatccttgaattcaaagaaaaatgtaaagacaagaagaatcctttaggaaactgtggagatataaatttagtacgactgggtccagaaaagtctattaatagtgaggttctaaagttcagtttggacagccaagtaaaccacagaatgaaaaaagagttaccttctcatgttcaggcgatgcataaaagaaaggaatttctagattatcagctggatgagctttcccggcagcgagctctatgccgaggtggacgggaaatacagaggcaagaattagatgaaaacatttccaaagtttctaaggaaaggcaggaacttgcttctaaaattaaagaggttcaaggacgcccacagaaaacacagagtatcatcatcttagagtcccatatcatctgctgcacgttgagcacaagtggtggtttactacttgagtctgctttccgtgggcaagggggtgtccccttcagctgtgtcattgttgatgaggctggacagtcttgtgaaattgagactcttactccactcatccatcgctgcaataagctcatcctagtaggagatcctaagcagctccctccgacagtcatctctatgaaagcacaggagtatggctacgaccagtcaatgatggctcgcttctgcagactgctggaagagaatgtagaacacaacatgatcagcaggctgcccattctacagctcactgttcagtacaggatgcatccagacatatgcctcttcccttctaattatgtttataacagaaacttaaaaacaaatagacagacagaagccattcgatgttcatcagattggccatttcagccataccttgtgtttgatgttggagatggttcagaaagacgggataatgactcatatataaatgttcaagaaataaaactggtgatggaaataattaagcttattaaagacaaaagaaaggatgttagttttcgaaacattggcataataactcattacaaggcccagaagacgatgattcagaaggatttggacaaagagttcgatagaaaaggaccagcagaagtagacactgtggatgcattccagggtcggcagaaggattgtgttattgttacgtgtgtcagagcaaatagcatccaaggttcaattggattcctggcaagtttgcagagattgaatgtcaccatcacacgagccaagtacagcctcttcatcctcggacatttgaggaccctgatggaaaaccagcattggaatcagctgattcaggatgctcagaagcgtggtgccattattaagacctgtgacaaaaactatagacatgatgcagtgaagattctgaaactcaagcctgtgctgcagagaagtctcactcaccctcctaccatagccccagaggggtccagaccccagggtggtttgcccagcagcaagctagacagtggatttgccaagacatctgttgctgcttctctataccacacaccctctgactccaaggaaattactcttactgttacttcaaaggaccctgaaagacctcctgttcatgaccaacttcaggacccacgactgctgaagaggatgggcattgaggtcaaaggaggaatattcctttgggatccacaaccctcgagcccccagcatcctggagcaacacctcctacgggcgagccgggcttccctgtcgttcaccaggacctgagccatatacagcagcccgctgctgtagtggctgctctgagcagccacaaacctcccgtgcggggcgaacctccagctgccagtcccgaggcttccacgtgtcagagcaaatgtgatgacccggaagaggagctctgtcacaggagagaggccagggctttcagtgaaggggagcaggagaagtgtggttccgagacccatcacaccaggaggaactctaggtgggacaagaggacactggagcaggaggacagcagttccaagaaaagaaagcttttataggaaagcccagtgacatgggccagcagccacagcatattgtaaactgaagatgaccagctcgtgggaccatctagataagcttgttttttgtaaggagtttgtgtgctgttggaaaacatggaaaatgcatccttaacacctgagcctctggtcatcttcagtattttctgtcatttgcaaaagctttcagagggcattgtgtatccgtaataatgtccttgaagtcagagactggaaatgttgatctcttagtcttctatagacaaggaggtcagactggagtgaatgttgtaaaagttgaaatgtatatttgtatagcaaataacaaaatccttttaaaattt

SEQ ID NO: 412 - protein, 828 aa, Homo sapien
MRNGKTECYLSIQTQENFPANLNELVNCIVISSLVTTQRKLKAMSLLGSRNQLARAVLNPNPMDFCTKDLLTTTSERIIAYLRDFNEDQKKAIETAYAMVKHSPSVAKICLIHGPPGTGKSKTIVGLLYRLLTENQRKGHSDENSNAKIKQNRVLVCAPSNAAVDELMKKIILEFKEKCKDKKNPLGNCGDINLVRLGPEKSINSEVLKFSLDSQVNHRMKKELPSHVQAMHKRKEFLDYQLDELSRQRALCRGGREIQRQELDENISKVSKERQELASKIKEVQGRPQKTQSIIILESHIICCTLSTSGGLLLESAFRGQGGVPFSCVIVDEAGQSCEIETLTPLIHRCNKLILVGDPKQLPPTVISMKAQEYGYDQSMMARFCRLLEENVEHNMISRLPILQLTVQYRMHPDICLFPSNYVYNRNLKTNRQTEAIRCSSDWPFQPYLVFDVGDGSERRDNDSYINVQEIKLVMEIIKLIKDKRKDVSFRNIGIITHYKAQKTMIQKDLDKEFDRKGPAEVDTVDAFQGRQKDCVIVTCVRANSIQGSIGFLASLQRLNVTITRAKYSLFILGHLRTLMENQHWNQLIQDAQKRGAIIKTCDKNYRHDAVKILKLKPVLQRSLTHPPTIAPEGSRPQGGLPSSKLDSGFAKTSVAASLYHTPSDSKEITLTVTSKDPERPPVHDQLQDPRLLKRMGIEVKGGIFLWDPQPSSPQHPGATPPTGEPGFPVVHQDLSHIQQPAAVVAALSSHKPPVRGEPPAASPEASTCQSKCDDPEEELCHRREARAFSEGEQEKCGSETHHTRRNSRWDKRTLEQEDSSSKKRKLL

SEQ ID NO: 413 - DNA, 3639 bp, Homo sapien
gcggcgctgggtcggtggcggaggctgaggagaaggaggagcgggccgtggaggcttcgccgcctaggtactgctataaccagaatttggtagaaaaaggatttacttgttggggccctcttgataaaaagagatgtggggggattctcgacctgctaacagaactggaccttttcgtgggagccaagaagaaaggtttgctcccgggtggaacagggattatcctcctcctccccttaagagtcatgctcaagagagacactctggcaactttcctggcagagattcacttccctttgatttccaggggcattcggggcctccttttgcaaatgtagaggagcattctttcagctatggagctagagacggaccgcatggtgactatcgaggaggggagggacctggacatgatttcagggggggagatttttcgtcttctgatttccagagcagagattcatcacagttggacttcaggggtagggacatacattctggggattttcgggatagagaaggaccacctatggactataggggtggagatggtacttctatggattatagaggtagggaggcacctcatatgaactacagagacagggatgctcacgctgttgacttcagaggtagggatgctcctccatctgacttcaggggccggggcacttatgatttagattttagaggccgggatggatcccatgcagattttaggggaagggatttatcagatttggattttagggccagagaacagtcccgttctgattttaggaatagagatgtatctgatttggactttagagacaaagacggaacacaagtagactttagaggccgaggttcaggtactactgatctagactttagggacagggatacgccacattcagatttcagaggtagacaccgatctaggactgatcaggattttaggggcagagagatgggatcttgtatggaatttaaagatagggagatgccccctgtggatccaaatattttggattacattcagccctctacacaagatagagaacattctggtatgaatgtgaacaggagagaagaatccacacatgaccatacgatagaaaggcctgcttttggcattcagaagggagaatttgagcattcagaaacaagagaaggagaaacacaaggtgtagcctttgaacatgagtctccagcagactttcagaacagccaaagtccagttcaagaccaagataagtcacagctttctggacgtgaagagcagagttcagatgctggtctgtttaaagaagaaggcggtctggactttcttgggcggcaagacaccgattacagaagcatggagtaccgtgatgtggatcataggctgccaggaagccagatgtttggctatggccagagcaagtcttttccagagggcaaaactgcccgagatgcccaacgggaccttcaggatcaagattataggaccggcccaagtgaggagaaacccagcaggcttattcgattaagtggggtacctgaagatgccacaaaagaagagattcttaatgcttttcggactcctgatggcatgcctgtaaagaacttgcagttgaaggagtataacacaggttacgactatggctatgtctgcgtggagttttcactcttggaagatgccatcggatgcatggaggccaaccagggaactctaatgatccaggacaaagaagttaccctggagtatgtatcaagcctggatttttggtactgcaaacgatgtaaggcaaacattggtgggcaccgatcttcctgttcattctgcaagaacccaagagaagtgacagaggccaagcaagaattaataacctaccctcagcctcagaaaacatccataccagcaccattggaaaaacagcccaaccagcccctaagaccagctgataaggaacctgaacccaggaagagggaagaaggccaagagtcacgcttaggacatcaaaagagagaagcagaaaggtatctgcctccttctcgaagggaagggccaactttccgaagagaccgagagagggagtcatggtctggagagacacgccaggatggagagagcaaaactatcatgctaaagcgtatctatcgttccacaccacctgaggtgatagtggaagtgctggagccctatgtccgccttactactgccaacgtccgtatcatcaagaacagaacaggccctatggggcatacctatggctttattgacctcgactcccatgcggaagctcttcgtgtggtgaagatcttacagaaccttgatccgccatttagcattgatgggaagatggtagctgtaaacctggccactggaaaacgaagaaatgattctggggaccattctgaccacatgcattactatcagggtaaaaaatatttccgagataggaggggaggtggcagaaattcagactggtcttcagatacaaatcgacaaggacaacagtcatcatctgactgctacatatatgattctgctactggctactattatgaccccttggcaggaacttattatgaccccaatacccagcaagaagtctatgtgccccaggatcctggattacctgaggaagaagagatcaaggaaaaaaaacccaccagtcaaggaaagtcaagtagcaagaaggaaatgtctaaaagagatggcaaggagaaaaaagacagaggagtgacgaggtttcaggaaaatgccagtgaagggaaggcccctgcagaagacgtctttaagaagcccctgcctcctactgtgaagaaggaagagagtccccctccacctaaagtggtaaacccactgatcggcctcttgggtgaatatggaggagacagtgactatgaggaggaagaagaggaggaacagacccctcccccacagccccgcacagcacagccccagaagcgagaggagcaaaccaagaaggagaatgaagaagacaaactcactgactggaataaactggcttgtctgctttgcagaaggcagtttcccaataaagaagttctgatcaaacaccagcagctgtcagacctgcacaagcaaaacctggaaatccaccggaagataaaacagtctgagcaggagctagcctatctggaaaggagagaacgagagggaaagtttaaaggaagaggaaatgatcgcagggaaaagctccagtcttttgactctccagaaaggaaacggattaagtactccagggaaactgacagtgatcgtaaacttgttgataaagaagatatcgacactagcagcaaaggaggctgtgtccaacaggctactggctggaggaaagggacaggcctgggatatggccatcctggattggcttcatcagaggaggctgaaggccggatgaggggccccagtgttggagcctcaggaagaaccagcaaaagacagtccaacgagacttatcgagatgctgttcgaagagtcatgtttgctcgatataaagaactcgattaagaaaggagacaagttccatgggatacaacctccctcttgttttgtttgtctctccttttcttttgttactgttcttgctgctagaacttttttaaataaactttttttcaatgtgaaaaaaaaaaaaaaaaaaa

SEQ ID NO: 414 - protein, 1123 aa, Homo sapien
MWGDSRPANRTGPFRGSQEERFAPGWNRDYPPPPLKSHAQERHSGNFPGRDSLPFDFQGHSGPPFANVEEHSFSYGARDGPHGDYRGGEGPGHDFRGGDFSSSDFQSRDSSQLDFRGRDIHSGDFRDREGPPMDYRGGDGTSMDYRGREAPHMNYRDRDAHAVDFRGRDAPPSDFRGRGTYDLDFRGRDGSHADFRGRDLSDLDFRAREQSRSDFRNRDVSDLDFRDKDGTQVDFRGRGSGTTDLDFRDRDTPHSDFRGRHRSRTDQDFRGREMGSCMEFKDREMPPVDPNILDYIQPSTQDREHSGMNVNRREESTHDHTIERPAFGIQKGEFEHSETREGETQGVAFEHESPADFQNSQSPVQDQDKSQLSGREEQSSDAGLFKEEGGLDFLGRQDTDYRSMEYRDVDHRLPGSQMFGYGQSKSFPEGKTARDAQRDLQDQDYRTGPSEEKPSRLIRLSGVPEDATKEEILNAFRTPDGMPVKNLQLKEYNTGYDYGYVCVEFSLLEDAIGCMEANQGTLMIQDKEVTLEYVSSLDFWYCKRCKANIGGHRSSCSFCKNPREVTEAKQELITYPQPQKTSIPAPLEKQPNQPLRPADKEPEPRKREEGQESRLGHQKREAERYLPPSRREGPTFRRDRERESWSGETRQDGESKTIMLKRIYRSTPPEVIVEVLEPYVRLTTANVRIIKNRTGPMGHTYGFIDLDSHAEALRVVKILQNLDPPFSIDGKMVAVNLATGKRRNDSGDHSDHMHYYQGKKYFRDRRGGGRNSDWSSDTNRQGQQSSSDCYIYDSATGYYYDPLAGTYYDPNTQQEVYVPQDPGLPEEEEIKEKKPTSQGKSSSKKEMSKRDGKEKKDRGVTRFQENASEGKAPAEDVFKKPLPPTVKKEESPPPPKVVNPLIGLLGEYGGDSDYEEEEEEEQTPPPQPRTAQPQKREEQTKKENEEDKLTDWNKLACLLCRRQFPNKEVLIKHQQLSDLHKQNLEIHRKIKQSEQELAYLERREREGKFKGRGNDRREKLQSFDSPERKRIKYSRETDSDRKLVDKEDIDTSSKGGCVQQATGWRKGTGLGYGHPGLASSEEAEGRMRGPSVGASGRTSKRQSNETYRDAVRRVMFARYKELD

SEQ ID NO: 415 - DNA, 4567 bp, Homo sapien
gacagcctctgggtcctcggtcggtacagtctctgcacctcgcgccccagcaggtaaactaacattatggatttttccaagctacccaaaatactcgatgaagataaagaaagcacatttggttatgtgcatggggtctcaggacctgtggttacagcctgtgacatggcgggtgcagccatgtatgagctggtgagagtgggccacagcgaattggttggagagattattcgattggagggtgacatggctactattcaggtgtatgaagaaacttctggtgtgtctgttggagatcctgtacttcgcactggtaaacccctctctgtagagcttggtcctggcattatgggagccatttttgatggtattcaaagacctttgtcggatatcagcagtcagacccaaagcatctacatccccagaggagtaaacgtgtctgctcttagcagagatatcaaatgggactttacaccttgcaaaaacctacgggttggtagtcatatcactggcggagacatttatggaattgtcagtgagaactcgcttatcaaacacaaaatcatgttacccccacgaaacagaggaactgtaacttacattgctccacctgggaattatgatacctctgatgttgtcttggagcttgaatttgaaggtgtaaaggagaagttcaccatggtgcaagtatggcctgtacgtcaagttcgacctgtcactgagaagctgccagccaatcatcctctgttgactggccagagagtccttgatgccctttttccgtgtgtccagggaggaactactgctatccctggagcctttggctgtggaaagacagtgatatcacagtctctatccaagtattctaacagtgatgtaatcatctatgtaggatgtggtgaaagaggaaatgagatgtctgaagtcctccgggacttcccagagctcacaatggaggttgatggtaaggtagagtcaattatgaagaggacagctttggtagccaatacctccaatatgcctgttgctgctagagaagcctctatttatactggaatcacactgtcagagtacttccgtgacatgggctatcatgtcagtatgatggctgactctacctctagatgggctgaggcccttagagaaatctctggtcgtttagctgaaatgcctgcagatagtggatatccagcctatcttggtgcccgtctggcctcgttttatgaacgagcaggcagggtgaaatgtcttggaaatcctgaaagagaagggagtgtcagcattgtaggagcagtttctccacctggtggtgatttttctgatccagttacatctgccactcttggtatcgttcaggtgttctggggcttagataagaaactagctcaacgtaagcatttcccctctgtcaattggctcatcagctacagcaagtatatgcgtgccttggatgaatactatgacaaacacttcacagagttcgttcctctgaggacgaaagctaaggaaattctgcaggaagaagaagacctggcagaaattgtacagcttgtgggaaaggcttctttggcagaaacagataaaatcactctggaggtagcaaaacttatcaaagatgatttcctacaacaaaatggatatactccttatgacaggttctgcccattctacaagacagtagggatgctgtccaacatgattgcattttatgatatggctcgtagagctgttgaaaccactgcccagagtgacaataaaatcacatggtccattattcgtgagcacatgggagacatcctctataaactttcctccatgaaattcaaggatccactgaaagatggtgaggcaaagatcaaaagcgactatgcacaacttcttgaagacatgcagaatgcattccgtagccttgaagattagaagccttgaagattacaactgtgatttccttttcctcagcaagctcctatgtgtatattttcctgaatttctcatctcaaaccctttgcttctttattgtgcagctttgagactagtgcctatgtgtgttatttgtttccctgtttttttggtaggtcttatataaaacaaacattcctttgttctagtgttgtgaagggcctccctcttcctttatctgaagtggtgaatatagtaaatatacattctggttacactactgtaaacttgtatgtagggtgatgaccctctttgtcctaggtgtaccctttcctcatctctattaaattgtaaacaggactactgcatgtactctctttgcagtgaatttggaatggaaggccaggtttctataacttttgaacaggtactttgtgaaatgactcaatttctattgtggtaagctcattggcagcttagcattttgcaaaggaattgctttgcaggaaatatttaattttcaaaaacataatgattaatgttccaattatgcatcacttcccccagtataaatcaggaatgtttgtgagaaaccattgggaactatactctttttatttttattttttattttttttattattttttttttggggacggagtgtccctcttgttgcccaggctggagtgcaatggcgtgatcttggctcactgcagccttcgcctcccgggttcaagtgattctcctgcctcagcctcccgagtagctgggattacaggcatgctccaccatgcccagctaattttgtatttttagtagaaacggggtttcaccatattggtcaggctggtctcgaactccagacctcaggtgatccgcccacctcggcctcccaaactgctgggattacaggcgtgagccaccgcgcctggccagggactatactctttttaaaatagacatttgtggggctcacacaatatatgaaatagtaccctctaaaaaagagaaaaaaaaaatcaggcggtcaaacttagagcaacattgtcttattaaagcatagtttatttcactagaaaaaatttaatatcaaggactattacatacttcattactaggaagttctttttaaaatgacacttaaaacaatcactgaaaacttgatccacatcacaccctgtttattttccttaaacatcttggaagcctaagcttctgagaatcatgtggcaagtgtgatgggcagtaaaataccagagaagatgtttagtagcaattaaaggctgtttgcacctttaaggaccagctgggctgtagtgattcctggggccagagtggcattatgtttttacaaaataatgacatatgtcacatgtttgcatgtttgtttgcttgttgaatttttgaacagccagttgaccaatcatagaaagtattactttctttcatatggtttttggttcactggcttaagaggtttctcagaatatctatggccacagcagcataccagtttccatcctaataggaatgaaattaattttgtatctactgataacagaatctgggtcacatgaaaaaaaatcattttatccgtcttttaagtatatgtttaaaataataatttatgtgtctgcatattgcagaacagctctgagagcaacagtttcccattaactctttctgaccaatagtgctggcaccgttgcttcctctttgggaagaggaaagggtgtgtgaacatggctaacaatcttcaaatacccaaattgtgatagcataaataaagtatttattttatgcctcagtatattattatttaattttttaggtaatgcctatctcttggtctattaaggaaagaagcaatcagtagagaattcaggatagttttgtttaaattcttgcagattacatgtttttacagtggcctgctattgaggaaaggtattcttctatacaacttgttttaacctttgagaacattgacagaaattatgcaatggtttgttgagatacggacttgatggtgctgtttaatcagtttgcttccaaagtggcctactcaagaggccctaagactggtagaaattaaaaggatttcaaaaactttctattcctttcttaaacctaccagcaaactaggattgtgatagcaatgaatggtatgatgaagaaagtttgaccaaatttgtttttttgttgttgttgttgttttgaatttgaaatcattcttattccctttaagaatgtttatgtatgagtgtgaagatgctagcgaacctatgctcagatattcatcgtaagtctcccttcacctgttacagagtttcagatcggtcactgatagtatgtatttctttagtaagaatgtgttaaaattacaatgatcttttaaaaagatgatgcagttctgtatttattgtgctgtgtctggtcctaagtggagccaattaaacaagtttcatatgtatttttccagtgttgaatctcacacactgtactttgaaaatttccttccatcctgaataacgaatagaagaggccatatatattgcctccttatccttgagatttcactacctttatgttaaaagttgtgtataattgttaaaatctgtgaaagaataaaaagtggatttaaattaaaaaaaaaaaaaaaaaaaa

SEQ ID NO: 416 - protein, 617 aa, Homo sapien
MDFSKLPKILDEDKESTFGYVHGVSGPVVTACDMAGAAMYELVRVGHSELVGEIIRLEGDMATIQVYEETSGVSVGDPVLRTGKPLSVELGPGIMGAIFDGIQRPLSDISSQTQSIYIPRGVNVSALSRDIKWDFTPCKNLRVGSHITGGDIYGIVSENSLIKHKIMLPPRNRGTVTYIAPPGNYDTSDVVLELEFEGVKEKFTMVQVWPVRQVRPVTEKLPANHPLLTGQRVLDALFPCVQGGTTAIPGAFGCGKTVISQSLSKYSNSDVIIYVGCGERGNEMSEVLRDFPELTMEVDGKVESIMKRTALVANTSNMPVAAREASIYTGITLSEYFRDMGYHVSMMADSTSRWAEALREISGRLAEMPADSGYPAYLGARLASFYERAGRVKCLGNPEREGSVSIVGAVSPPGGDFSDPVTSATLGIVQVFWGLDKKLAQRKHFPSVNWLISYSKYMRALDEYYDKHFTEFVPLRTKAKEILQEEEDLAEIVQLVGKASLAETDKITLEVAKLIKDDFLQQNGYTPYDRFCPFYKTVGMLSNMIAFYDMARRAVETTAQSDNKITWSIIREHMGDILYKLSSMKFKDPLKDGEAKIKSDYAQLLEDMQNAFRSLED

SEQ ID NO: 417 - DNA, 1826 bp, Homo sapien
cacgtcggctgctgggaagatctggattctcgtttcaggtcaccatcagaaaagctaagtttgctgtatagtgaggatcaggagatctgatcctgattgcagaaccttccctgattacagaatcttggatgatttcacaaaagttcatcttcattgcagatacctgcctttctttctaggttgtatctcccacttcacccttctagaccatcccagaagatctataagatttcatctgggaaatcactaggagttcttggaagggaaagaaggaagattgttggttggaataaaaacagggttgaatgagttccagaaagcagggttctcaacctcgtggacagcaatctgcagaagaagagaacttcaaaaaaccaactagaagcaacatgcagagaagtaaaatgagaggggcctcctcaggaaagaagacagctggtccacagcagaaaaatcttgaaccagctctcccaggaagatggggtggtcgctctgcagagaaccccccttcaggatccgtgaggaagaccagaaagaacaagcagaagactcctggaaacggagatggtggcagtaccagcgaagcacctcagccccctcggaagaaaagggcccgggcagaccccactgttgaaagtgaggaggcgtttaagaatagaatggaggttaaagtgaagattcctgaagaattaaaaccatggcttgttgaggactgggacttagttaccaggcagaagcagctgtttcaactccctgccaagaaaaatgtagatgcaattctggaggagtatgcaaattgcaagaaatcgcagggaaatgttgataataaggaatatgcggttaatgaagttgtggcaggaataaaagaatatttcaatgtgatgttgggcactcagctgctctacaaatttgagaggccccagtatgctgaaatcctcttggctcaccctgatgctccaatgtcccaggtttatggagcaccacacctactgagattatttgtaagaattggagcaatgttggcctatacgccccttgatgagaaaagccttgcattattgttgggctatttgcatgatttcctaaaatatctggcaaagaattctgcatctctctttactgccagtgattacaaagtggcttctgctgagtaccaccgcaaagccctgtgagcgtctacagacagctcaccatttttgtcctgtatctgtaaacactttttgttcttagtctttttcttgtaaaattgatgttctttaaaatcgttaatgtataacagggcttatgtttcagtttgttttccgttctgttttaaacagaaaataaaaggagtgtaagctccttttctcatttcaaagttgctaccagtgtatgcagtaattagaacaaagaagaaacattcagtagaacattttattgcctagttgacaacattgcttgaatgctggtggttcctatccctttgacactacacaattttctaatatgtgttaatgctatgtgacaaaacgccctgattcctagtgccaaaggttcaacttaatgtatatacctgaaaacccatgcatttgtgctctttttttttttatggtgcttgaagtaaaacagcccatcctctgcaagtccatctatgttgttcttaggcattctatctttgctcaaattgttgaaggatggtgatttgtttcatggtttttgtatttgagtctaatgcacgttctaacatgatagaggcaatgcattattgtgtagccacggttttctggaaaagttgatattttaggaattgtatttcagatcttaaataaaatttgtttctaaatttc

SEQ ID NO: 418 - protein, 288 aa, Homo sapien
MSSRKQGSQPRGQQSAEEENFKKPTRSNMQRSKMRGASSGKKTAGPQQKNLEPALPGRWGGRSAENPPSGSVRKTRKNKQKTPGNGDGGSTSEAPQPPRKKRARADPTVESEEAFKNRMEVKVKIPEELKPWLVEDWDLVTRQKQLFQLPAKKNVDAILEEYANCKKSQGNVDNKEYAVNEVVAGIKEYFNVMLGTQLLYKFERPQYAEILLAHPDAPMSQVYGAPHLLRLFVRIGAMLAYTPLDEKSLALLLGYLHDFLKYLAKNSASLFTASDYKVASAEYHRKAL

SEQ ID NO: 419 - DNA, 3304 bp, Homo sapien
gcgaccgaacgcggcggtcggcagcgttcgcgcgggggcctgcgaagcgctgctcggggccggcactgcccgcggggaggacgcgccgccgccgccacccagcgccgccgccgccgccgcctccagccgggccgccgcgcgtcccgggggccggccccgcgagcgcaggagtaaacaccgccggagtcttggagccgctgcagaagggaataaagagagatgcagggatttgtgaggttacggcgccccagctgcaagatgcactagccggctgaacccgggatcggctgacttgttggaaccggagtgctctgcacggagagtggtggatgagttgaagttgccttcccggggctcattttccacgctgccgagaggaatccgagaggcaaggcaatcacttcgtcttgccattgattgggtatcgggagctttttttttctcccctctctctttcttttcctccgtcttgttgcatgcaagaaaattacagtccgctgctcgcccgccctgggtgcgagatattcagccccgctctctcccgtgcattgtgcaacccaaagatgaaagaccgaaggggagaaagttaaagaaatcgcccacatgcgctggatcagtccacggcttggggaaaggcatccagagaaggtgggagcggagagtttgaagtctttacaggcgggaagatggcggactggagctgaaagtgttgattgggaaacttgggtgattcttgtgtttatttacaatcctcttgacccaggcaggacacatgcaggccaaaaaacgctatttcatcctgctctcagctggctcttgtctcgcccttttgttttatttcggaggcttgcagtttagggcatcgaggagccacagccggagagaagaacacagcggtaggaatggcttgcaccaccccagtccggatcatttctggccccgcttcccggagcctctgcgccccttcgttccttgggatcaattggaaaacgaggattccagcgtgcacatttccccccggcagaagcgagatgccaactccagcatctacaaaggcaagaagtgccgcatggagtcctgcttcgatttcaccctttgcaagaaaaacggcttcaaagtctacgtatacccacagcaaaaaggggagaaaatcgccgaaagttaccaaaacattctagcggccatcgagggctccaggttctacacctcggaccccagccaggcgtgcctctttgtcctgagtctggatactttagacagagaccagttgtcacctcagtatgtgcacaatttgagatccaaagtgcagagtctccacttgtggaacaatggtaggaatcatttaatttttaatttatattccggcacttggcctgactacaccgaggacgtggggtttgacatcggccaggcgatgctggccaaagccagcatcagtactgaaaacttccgacccaactttgatgtttctattcccctcttttctaaggatcatcccaggacaggaggggagagggggtttttgaagttcaacaccatccctcctctcaggaagtacatgctggtattcaaggggaagaggtacctgacagggataggatcagacaccaggaatgccttatatcacgtccataacggggaggacgttgtgctcctcaccacctgcaagcatggcaaagactggcaaaagcacaaggattctcgctgtgacagagacaacaccgagtatgagaagtatgattatcgggaaatgctgcacaatgccactttctgtctggttcctcgtggtcgcaggcttgggtccttcagattcctggaggctttgcaggctgcctgcgtccctgtgatgctcagcaatggatgggagttgccattctctgaagtgattaattggaaccaagctgccgtcataggcgatgagagattgttattacagattccttctacaatcaggtctattcatcaggataaaatcctagcacttagacagcagacacaattcttgtgggaggcttatttttcttcagttgagaagattgtattaactacactagagattattcaggacagaatattcaagcacatatcacgtaacagtttaatatggaacaaacatcctggaggattgttcgtactaccacagtattcatcttatctgggagattttccttactactatgctaatttaggtttaaagcccccctccaaattcactgcagtcatccatgcggtgacccccctggtctctcagtcccagccagtgttgaagcttctcgtggctgcagccaagtcccagtactgtgcccagatcatagttctatggaattgtgacaagcccctaccagccaaacaccgctggcctgccactgctgtgcctgtcgtcgtcattgaaggagagagcaaggttatgagcagccgttttctgccctacgacaacatcatcacagacgccgtgctcagccttgacgaggacacggtgctttcaacaacagaggtggatttcgccttcacagtgtggcagagcttccctgagaggattgtggggtaccccgcgcgcagccacttctgggataactctaaggagcggtggggatacacatcaaagtggacgaacgactactccatggtgttgacaggagctgctatttaccacaaatattatcactacctatactcccattacctgccagccagcctgaagaacatggtggaccaattggccaattgtgaggacattctcatgaacttcctggtgtctgctgtgacaaaattgcctccaatcaaagtgacccagaagaagcagtataaggagacaatgatgggacagacttctcgggcttcccgttgggctgaccctgaccactttgcccagcgacagagctgcatgaatacgtttgccagctggtttggctacatgccgctgatccactctcagatgaggctcgaccccgtcctctttaaagaccaggtctctattttgaggaagaaataccgagacattgagcgactttgaggaatccggctgagtgggggaggggaagcaagaagggatgggggtcaagctgctctctcttcccagtgcagatccactcatcagcagagccagattgtgccaactatccaaaaacttagatgagcagaatgacaaaaaaaaaaaaggccaatgagaactcaactcctggctcctgggactgcaccagactgctccaaactcacctcactggcttctgtgtcccaagactaggttggtacagtttaattatggaacattaaataattatttttgaaaaaaaaaaaaaaaaaa

SEQ ID NO: 420 - protein, 746 aa, Homo sapien
MQAKKRYFILLSAGSCLALLFYFGGLQFRASRSHSRREEHSGRNGLHHPSPDHFWPRFPEPLRPFVPWDQLENEDSSVHISPRQKRDANSSIYKGKKCRMESCFDFTLCKKNGFKVYVYPQQKGEKIAESYQNILAAIEGSRFYTSDPSQACLFVLSLDTLDRDQLSPQYVHNLRSKVQSLHLWNNGRNHLIFNLYSGTWPDYTEDVGFDIGQAMLAKASISTENFRPNFDVSIPLFSKDHPRTGGERGFLKFNTIPPLRKYMLVFKGKRYLTGIGSDTRNALYHVHNGEDVVLLTTCKHGKDWQKHKDSRCDRDNTEYEKYDYREMLHNATFCLVPRGRRLGSFRFLEALQAACVPVMLSNGWELPFSEVINWNQAAVIGDERLLLQIPSTIRSIHQDKILALRQQTQFLWEAYFSSVEKIVLTTLEIIQDRIFKHISRNSLIWNKHPGGLFVLPQYSSYLGDFPYYYANLGLKPPSKFTAVIHAVTPLVSQSQPVLKLLVAAAKSQYCAQIIVLWNCDKPLPAKHRWPATAVPVVVIEGESKVMSSRFLPYDNIITDAVLSLDEDTVLSTTEVDFAFTVWQSFPERIVGYPARSHFWDNSKERWGYTSKWTNDYSMVLTGAAIYHKYYHYLYSHYLPASLKNMVDQLANCEDILMNFLVSAVTKLPPIKVTQKKQYKETMMGQTSRASRWADPDHFAQRQSCMNTFASWFGYMPLIHSQMRLDPVLFKDQVSILRKKYRDIERL

SEQ ID NO: 421 - DNA, 12227 bp, Homo sapien
tgagctgcgaggcccgagagtcagaacctgggggagagggatggtctctgcacgggggggagccggaggagccgccgccgctgccgacgccaccgccgcagccgccgccgccgccgccccggcacccgcctcccggcgctgacggtctcgtacgaagccggcgagggggagccagcagcggcggtcgccggcacgccgcccagcatggtccgggaaaccaggcatctctgggtgggcaacttacccgagaacgtgcgggaagagaagatcatcgagcatttcaaacgatatggccgcgtggaaagtgtcaaaattcttcccaagaggggatctgaaggaggagtggctgcctttgtggattttgtggacatcaaaagtgcacagaaagctcacaactcggtcaacaaaatgggtgacagagacctacgcacggattataatgaaccaggcaccatcccgagtgctgctcggggattggatgatacagtttccatagcatctcgtagtagagaggtttctgggttcagaggaggtggtggagggcctgcttatggtcccccaccgtcacttcatgcacgagaaggacgttatgagcggagacttgatggggcttcagataacagggagcgtgcttatgaacatagtgcctatggacaccatgaacgggggacgggaggatttgatcggacaagacattacgatcaggattactatagagatcctcgagagcggactttacaacatgggctctattacgcttctcggagtcgaagtccaaatcgctttgatgctcatgacccccgatatgaacctagggctcgcgagcagtttacactgcccagtgtggtacacagggatatctacagggatgatattacccgggaggtacgaggcagaaggccagagcggaattaccagcacagcaggagtcggtcaccacattcatcccagtctagaaatcagtctcctcagagactggctagccaagcatctagacccacaaggtcccctagcggcagcggctctagaagtagatcctccagtagtgattcaatcagcagcagcagtagtaccagcagtgacagcagtgattccagcagtagttcaagtgatgattctccagctcgatcagttcagtctgcagcagtccctgcacccacttcccagttgctttcatctctggaaaaagatgagccccgtaaaagttttggcatcaaggtccagaatcttccagtacgctctacagatacaagccttaaagatggccttttccatgaatttaagaaatttggaaaagtaacttcagtgcagatacatggaacttcagaagagaggtatggtctggtattctttcggcagcaagaggaccaagaaaaagccttgactgcatcaaaaggaaaacttttctttggcatgcagattgaagtaacagcatggataggtccagaaacagaaagtgaaaatgaatttcgccccttggatgaaaggatagatgaatttcaccccaaagcaacaagaactctctttattggcaaccttgaaaaaaccactacttaccatgaccttcgcaacatcttccagcgctttggagaaattgtggatattgacattaagaaagtaaatggagttcctcagtatgcgtttctgcaatactgtgatattgctagcgtttgtaaagctattaagaagatggatggggaatatcttggaaataatcgcctcaagctgggttttggaaagagcatgcctacaaactgcgtgtggctagatgggctttcttcgaatgtgtcagatcagtatttaacacgacatttctgccgatatgggcctgtggtaaaggtggtgtttgaccgcttaaaaggcatggccctggttctctacaatgaaattgaatatgcacaagcagctgtaaaagagaccaaagggaggaaaatcggtgggaataaaattaaggtggattttgcaaatcgggaaagtcagctggctttttatcactgcatggagaaatctggtcaagacatcagagacttttatgaaatgttagccgaaagaagagaggaacgaagggcatcctacgactataaccaagatcgtacatattatgagagtgttcgaactccaggcacttatcctgaggattccaggcgggactatccagctcgagggagagagttttattcagaatgggaaacttaccaaggagactactatgaatcacgatactacgatgatcctcgggaatacagggattacaggaatgatccttatgaacaagatattagggaatatagttacaggcaaagggaacgagaaagagaacgtgaaagatttgagtctgaccgggacagagaccatgagaggaggccgattgaacgaagtcaaagtcctgttcacttgcgacgtccacagagtcctggagcgtctccctctcaggcagagaggttgccgagtgattctgagaggaggctttacagccgatcctcagaccggagtggaagctgtagctcactctcccctccaagatatgagaaactggacaagtctcgtttggagcgctatacaaaaaatgaaaagacagataaagaacgaacttttgatccggagagagtggagagagagagacgcttaatacggaaggaaaaagtggaaaaggacaaaactgacaagcagaaacgcaaaggaaaggttcactcccctagttctcagtcttcagaaacggaccaagaaaatgagcgagagcaaagccctgaaaagcccaggagttgtaataaactgagcagagagaaagctgacaaagagggaatagcgaaaaaccgcctggaactcatgccttgcgtggttttgactcgagtgaaagagaaagagggaaaggtcattgaccacactcctgtggaaaagttgaaagccaagcttgataatgacactgtcaaatcttctgccctggaccagaaacttcaggtctctcagacggagcctgcaaaatctgacttgtctaaactggaatcagttagaatgaaagtaccaaaggaaaaggggctttcaagccatgttgaagtggtggagaaggaaggcaggcttaaagccaggaagcacctcaagcctgagcagcctgcagatggggtaagtgctgtggatctggagaagctggaagccaggaaaaggcgctttgcagattccaatttaaaagcagaaaagcaaaaaccagaggtcaagaaaagcagtccagagatggaggatgctcgcgtgctttcaaaaaagcagcctgacgtgtcctctagagaggtcattctgctgagggaaggagaggctgaaagaaagcctgtgaggaaagaaattcttaaaagagaatctaaaaaaatcaaactggacagacttaatactgttgccagccccaaagactgtcaggagcttgccagtatttctgttgggtctggctcaaggcccagctcagacctacaagcaagactgggagaactagcaggtgaatctgtggaaaatcaagaagtccaatcaaaaaagcccattccctcaaaaccacagctcaaacagctgcaggtattagatgatcaaggaccagagagagaagacgttaggaaaaactattgcagtcttcgtgatgaaacacctgaacgtaaatcaggccaagagaaatcacattcagtaaatactgaagaaaaaattggcattgacatcgatcacacgcagagttaccgaaaacaaatggaacagagtcgtaggaaacagcagatggaaatggaaatagccaagtctgagaagtttggcagtcctaaaaaagatgtagatgaatatgaaagacgtagcctcgttcacgaggtaggcaaaccccctcaagatgtcactgatgactctcctcctagcaaaaagaaaaggatggatcatgtcgattttgatatctgcaccaagcgagaacggaattacagaagttcacgccaaatcagcgaagattctgaaaggactggtggttctcccagtgtccgacatggttccttccatgaagatgaggatcccataggctcccctaggctactgtcagtaaaagggtctcctaaagtagatgaaaaagtcctcccctattctaacataacagtcagggaagagtctttaaaatttaatccttatgattctagcaggagagaacagatggcagatatggccaaaataaaactatctgtcttgaattctgaagatgaactaaatcgttgggactctcagatgaaacaggatgctggcagatttgatgtgagtttcccaaacagcataattaagagagatagccttcgaaaaaggtctgtacgagatctggaacctggtgaggtgccttctgattctgacgaagatggtgaacacaaatcccactcacccagagcctctgcattatatgaaagttctcgattgtcttttttattgagggacagagaagacaagctacgtgagcgagatgaaagactctctagttctttagaaaggaacaaattttactcttttgcattggataagacaatcacaccagacactaaagctttgcttgaaagagctaaatccctctcttcatctcgtgaagaaaattggtcttttcttgattgggactcccgatttgcaaattttcgaaacaacaaagataaagaaaaggttgactctgctccaagacctattccatcctggtacatgaaaaagaagaaaattaggactgattcagaagggaaaatggatgataagaaagaggaccataaagaagaagagcaagagaggcaggaattgtttgcttctcgttttttacacagctcaatctttgaacaagattccaagcgattgcagcatctagagagaaaagaggaagattctgacttcatttctggtaggatctatgggaagcagacatctgagggagcaaacagcacaactgattccattcaagaaccagtagttctgttccatagcagatttatggagctcacacggatgcaacagaaagaaaaagaaaaagaccagaaacccaaagaggttgagaaacaggaagatacagagaatcatcccaagaccccagaatctgctcctgagaataaagattcagaactgaaaactccaccttccgttgggcctccaagtgtcacagtcgtaactctagaatcagccccatcagcactagagaagaccactggtgacaaaacggtagaggcgcctttggtaacagaagagaagactgtggagccagctaccgtctcagaagaagcaaagcctgcatctgaacctgctcctgcccctgtggaacagctggaacaagtagacctgcccccaggagcagaccccgataaagaagctgccatgatgcctgcgggtgttgaggaaggttcatcaggtgaccagccgccttatctggatgccaagcctccaactcccggggcctcgttttcccaggcagagagcaacgtagatccagagcctgacagtacccagccactttcaaaaccagctcagaagtctgaggaagccaatgagccaaaggccgaaaagccagacgccactgcagatgctgagcctgatgcaaaccagaaagccgaagctgctcctgagtctcagcccccagcttctgaagatttagaggttgatcctccagttgctgcaaaggataaaaagccaaacaaaagcaagcgttcaaagacccctgttcaggcagctgcagtgagtatcgtggagaagcccgtcacaaggaagagtgagaggatagaccgggaaaaactcaagcggtccaattctcctcggggagaagcacagaagcttttggaattgaagatggaggcagagaagattacaaggactgcttctaaaaactctgctgcagaccttgaacatcccgaaccaagtttgcctctcagccgaacaaggcgccggaatgtaaggagcgtctatgcaaccatgggtgaccatgaaaaccgctctcctgtcaaagagcccgttgagcaaccaagagtgaccagaaagagattggagcgagagcttcaggaggctgcagcggttcccaccacccctcggaggggaaggcctccaaagacacgccggcgagccgatgaagaggaggagaacgaggccaaggaacctgcagaaacactcaagccacctgagggatggcggtcgccaaggtcccagaaaactgcagctggtggtggaccccaagggaaaaagggaaaaaatgaaccgaaggtggatgctacacgtcctgaggccaccactgaggtgggcccccaaataggcgtgaaagagagctccatggaacccaaggctgctgaggaggaggcagggagtgaacagaaacgtgacagaaaagatgctggcacagacaaaaacccccctgaaaccgcccctgttgaagttgtagagaaaaaaccggcccctgaaaaaaactccaaatcaaagagaggaagatctcgaaactccaggttagcagtggacaaatctgcaagtctgaaaaatgtggatgctgctgtcagtcccaggggggctgcagcacaggcaggggagagggaatctggggtggtggcagtctcccctgagaaaagtgagagtccccaaaaggaggatggtttatcatcccagttgaaaagtgatccagttgatccagacaaggaaccagagaaagaagacgtgtctgcctctgggccgtccccagaagccacccagttagccaagcagatggagctggagcaggccgtggaacacatcgcaaagctcgctgaggcctctgcctctgctgcctataaggcagatgcaccagagggccttgccccagaggacagggacaagcctgcacaccaagcaagtgaaacagagctggctgcggccatcggctccatcatcaatgacatttctggggagccagaaaacttcccagcacctccaccttatcctggagaatcccagacagatctgcaaccccccgcaggtgcacaggcgctgcagccttctgaggaaggaatggagacagatgaggctgtatctggcatcctggaaactgaggctgctacagaatcttctaggcctccagtcaatgctcctgacccctcagccggcccaacagataccaaggaagccagaggaaatagcagtgaaacctcacactcagtgccagaagccaaagggtctaaagaagtggaagtcactcttgttcggaaagacaaagggcgccagaaaacaacccgatcacgccgcaagcgaaacacaaacaagaaagtggtggctcctgtagagagccatgtccctgaatccaaccaagctcaaggtgagagtcctgctgcaaatgaggggacaacagtacagcaccccgaagccccacaggaagaaaagcagagtgagaaaccccattccactcctcctcagtcatgtacttctgacctaagcaagattccctccacagagaattcgtcccaagaaatcagtgttgaggaaaggactccaaccaaagcatctgtgcccccagaccttcccccacctccccagccagcaccggtggatgaggagcctcaagccaggttcagggtgcattccatcattgaaagtgacccggtgaccccacccagcgatccaagcatccccatacccacactgccttctgtaactgcagcaaagctctcacctcctgtcgcctctggggggatcccacaccagagcccccctactaaggtgacagagtggatcacaaggcaggaggagccacgggctcagtctactccatctccagctcttcccccagacacaaaggcctctgatgttgacaccagctccagcaccctgaggaagattctcatggaccccaagtatgtgtctgccacaagtgtcacttccacaagtgtcaccacagccattgcagagcctgtcagtgctgccccttgcctacatgaggccccgcccccgccagttgactctaaaaagcctttagaagaaaaaacagcacctccagtgacaaacaactctgagatacaagcctcggaggtgctggtagctgctgacaaggaaaaggtggctccagtcattgctcccaaaattacctctgttattagccggatgcctgtcagcattgacctggaaaattcacagaagataaccttggcaaaaccagctcctcaaaccctcactggtctggtgagcgcactcactggcctggtgaacgtctccctggtcccggtgaatgccctgaaaggccccgtgaagggctcagtgaccacactgaaaagtttggtgagcacccctgctgggcccgtgaacgtcctgaaagggcctgtgaatgttcttacggggccagtgaatgttctcaccactccagtgaacgccacggtgggcacagtgaatgccgccccaggcacagtcaatgccgctgcgagtgcagtgaatgccacagcaagtgcagtgaccgtcacagcgggtgcggttactgctgcatctggtggtgtaacggccacaacaggcacggtgacaatggcaggggcagtgattgcgccgtcaacaaagtgcaaacagagagcgagtgctaatgaaaacagtcggttccacccagggtccatgcctgtgatcgacgatcgtccggcagacgcgggctcaggggcggggctgcgtgtgaacacttctgaaggggttgtgctcctgagttactcagggcagaagaccgaaggcccacagcggatcagcgccaagatcagccagatccccccggccagtgcaatggacattgaatttcagcagtcagtgtccaagtcccaggtcaaacctgattctgtcacagcatcgcagcctccatccaaaggccctcaagctcctgcaggctatgcgaacgtggccacccattccacgttggtactgaccgcccagacatataatgcctctcctgtgatttcgtctgtgaaggccgataggccatccttggagaagcccgagcccattcacctctcggtgtccacgcctgtcacccagggaggcacagtgaaggttctcacccaggggatcaacacaccccctgtgctggttcacaaccagctggtcctcaccccaagcattgtcaccacaaacaagaagcttgctgaccccgtcacccttaaaatcgagaccaaggtccttcagccggccaacctggggtccacgctcacgccccaccaccctcctgctctgcccagcaaactgcctacagaagtcaaccatgtcccctcggggcccagcatcccagcagatcgaactgtctcccatttggcagctgcaaagctagatgctcattctcctcgaccaagtggacccgggccatcctcattcccaagggcaagccaccccagcagtactgcatctacggcgctctccaccaacgccacagtcatgctggctgcaggcatcccagtgccccagttcatctccagcatccacccagagcagtctgtcatcatgccaccccacagcatcacccagactgtgtccctgagccacctctcccagggcgaggtgagaatgaacactcccacgctgcccagtatcacctacagcatccggccagaagcgcttcactctcctcgggctccgctgcagccccagcaaatagaggtcagggccccacagcgtgccagcaccccgcagccagccccagctggtgtgcctgcactggcctcccagcaccctcccgaggaggaagtgcattatcaccttcctgtcgctcgagccacagcccctgtgcagtcagaggtactagtcatgcagtctgagtaccgactgcacccctatactgtgccacgggatgtgaggatcatggtgcatccacatgtgacggcagtcagcgagcagcccagggccgcggatggggtggtgaaggtgccaccagccagcaaggcccctcagcagccagggaaggaagctgccaagacaccagatgccaaagctgcccccacccccacccctgcccccgtccctgtccctgtcccccttcctgcccctgctcctgcccctcatggtgaggcccgtatcctcacagttacccccagtaaccaactccaggggctgcctctgacccctcctgtggtggtgacccatggggtgcagattgtgcactccagcggggagctgtttcaagagtaccggtacggcgacatccgcacctaccaccccccggcccagctcacacacactcagtttcccgccgcttcctctgttggcctgccttcccggaccaagacagctgctcagggccctcctcctgaaggtgagcccctgcagcctcctcagcctgtgcagtccacacagcctgcccagcctgcaccaccctgcccgccctcccagctcggtcagcccggccagccaccaagcagcaagatgcctcaagtgtcccaggaggcaaaggggacccagacgggagtagagcagcctcgcctcccagctggacctgcaaacaggccacctgagcctcacacccaggttcagagggcacaagcagaaacaggcccgacttccttcccctcccctgtgtctgtctccatgaagcctgaccttccagtctctcttcccactcagactgccccaaaacagccgttgtttgtcccaacaacctctggccccagcaccccaccaggactggttctgccacacactgaattccagccagcccccaaacaagattcctctccacacctgacttcccagagacccgtggatatggttcaacttctgaagaagtaccccatcgtgtggcagggcctgctggccctcaagaatgacacagctgctgtgcagctccacttcgtctctggcaacaacgtcctggcccatcggtccctgcccctttctgaaggagggcccccactaaggatcgcccagaggatgcggctggaggcaacgcagctggaaggggttgcccgaaggatgacggtggagacagattactgtctgctgctggctctgccctgtggccgtgaccaagaggatgttgtgagccagaccgagtccctcaaggctgccttcatcacttacctgcaggccaagcaggcggcagggatcatcaacgttcccaaccctggctccaatcagcctgcctacgtgctgcagatcttcccgccctgtgagttctctgagagtcacctgtcccgcctggcccctgacctccttgccagcatctccaacatctctccccacctcatgattgtcattgcctccgtgtgagccactgagtggttatcacctcagtgaatcttcccagggctctgcagtaaaaacaaaggacaacccagccaagcagaggaagaagctgccgaaggggacagactccactgccagacggccagccgtttgctgtcctgccgcccggctcagtcggccagacttcctctaggagtggtgctgctaccttgtatgtttacataatgctttagcccaaggacacatcaccaacccatggactcgcagacaccggggctgggtttctctttcctctttttggagaaaaggaacagggcagtggaatgaaaattttttgtttgtttgtttttaagaaacaagaaaacagaactgcctttgcactaaattagtgacttggacttttgcccagtgaagacaggctgtgacactctggatgtcttggtgtgtgtagacacacattgcagactcttaacgcaggaaggacttcaaacttctgctgagaccttggggtcaaggaacatttcattggttttttttgtccacccccatctcccttgctcatttggatgcgtcaccttaattctcctgctgccaccgtctttgattcaccgggatgtacagtttacagttgaagagcaaacagaaaggttttctcttggtgggatatgcagaacttgggatgtgtgtatatataaatatataatatatataaatatatataatactgacttaaaaaatcaaatcccccgacatacgttttttttaatctgtgccaaaaatgtgttttcagaggaaatcttattttcatattcagactttgtattgcccactcatttgtataagtgcgcttcggtacagcacgggtcctgctcccgcgatgtggaagtgtcacacggcacctgtacaaaaagactggctaacccctcttcctattaccttgatctcttcccccaacttcctaacacttattaatttatgaaactgtttttctcagcgcagttttgttttgtgtgtccattggattacaaactttattaaaaaatataaaacac

SEQ ID NO: 422 - protein, 2000 aa, Homo sapien
MVRETRHLWVGNLPENVREEKIIEHFKRYGRVESVKILPKRGSEGGVAAFVDFVDIKSAQKAHNSVNKMGDRDLRTDYNEPGTIPSAARGLDDTVSIASRSREVSGFRGGGGGPAYGPPPSLHAREGRYERRLDGASDNRERAYEHSAYGHHERGTGGFDRTRHYDQDYYRDPRERTLQHGLYYASRSRSPNRFDAHDPRYEPRAREQFTLPSVVHRDIYRDDITREVRGRRPERNYQHSRSRSPHSSQSRNQSPQRLASQASRPTRSPSGSGSRSRSSSSDSISSSSSTSSDSSDSSSSSSDDSPARSVQSAAVPAPTSQLLSSLEKDEPRKSFGIKVQNLPVRSTDTSLKDGLFHEFKKFGKVTSVQIHGTSEERYGLVFFRQQEDQEKALTASKGKLFFGMQIEVTAWIGPETESENEFRPLDERIDEFHPKATRTLFIGNLEKTTTYHDLRNIFQRFGEIVDIDIKKVNGVPQYAFLQYCDIASVCKAIKKMDGEYLGNNRLKLGFGKSMPTNCVWLDGLSSNVSDQYLTRHFCRYGPVVKVVFDRLKGMALVLYNEIEYAQAAVKETKGRKIGGNKIKVDFANRESQLAFYHCMEKSGQDIRDFYEMLAERREERRASYDYNQDRTYYESVRTPGTYPEDSRRDYPARGREFYSEWETYQGDYYESRYYDDPREYRDYRNDPYEQDIREYSYRQRERERERERFESDRDRDHERRPIERSQSPVHLRRPQSPGASPSQAERLPSDSERRLYSRSSDRSGSCSSLSPPRYEKLDKSRLERYTKNEKTDKERTFDPERVERERRLIRKEKVEKDKTDKQKRKGKVHSPSSQSSETDQENEREQSPEKPRSCNKLSREKADKEGIAKNRLELMPCVVLTRVKEKEGKVIDHTPVEKLKAKLDNDTVKSSALDQKLQVSQTEPAKSDLSKLESVRMKVPKEKGLSSHVEVVEKEGRLKARKHLKPEQPADGVSAVDLEKLEARKRRFADSNLKAEKQKPEVKKSSPEMEDARVLSKKQPDVSSREVILLREGEAERKPVRKEILKRESKKIKLDRLNTVASPKDCQELASISVGSGSRPSSDLQARLGELAGESVENQEVQSKKPIPSKPQLKQLQVLDDQGPEREDVRKNYCSLRDETPERKSGQEKSHSVNTEEKIGIDIDHTQSYRKQMEQSRRKQQMEMEIAKSEKFGSPKKDVDEYERRSLVHEVGKPPQDVTDDSPPSKKKRMDHVDFDICTKRERNYRSSRQISEDSERTGGSPSVRHGSFHEDEDPIGSPRLLSVKGSPKVDEKVLPYSNITVREESLKFNPYDSSRREQMADMAKIKLSVLNSEDELNRWDSQMKQDAGRFDVSFPNSIIKRDSLRKRSVRDLEPGEVPSDSDEDGEHKSHSPRASALYESSRLSFLLRDREDKLRERDERLSSSLERNKFYSFALDKTITPDTKALLERAKSLSSSREENWSFLDWDSRFANFRNNKDKEKVDSAPRPIPSWYMKKKKIRTDSEGKMDDKKEDHKEEEQERQELFASRFLHSSIFEQDSKRLQHLERKEEDSDFISGRIYGKQTSEGANSTTDSIQEPVVLFHSRFMELTRMQQKEKEKDQKPKEVEKQEDTENHPKTPESAPENKDSELKTPPSVGPPSVTVVTLESAPSALEKTTGDKTVEAPLVTEEKTVEPATVSEEAKPASEPAPAPVEQLEQVDLPPGADPDKEAAMMPAGVEEGSSGDQPPYLDAKPPTPGASFSQAESNVDPEPDSTQPLSKPAQKSEEANEPKAEKPDATADAEPDANQKAEAAPESQPPASEDLEVDPPVAAKDKKPNKSKRSKTPVQAAAVSIVEKPVTRKSERIDREKLKRSNSPRGEAQKLLELKMEAEKITRTASKNSAADLEHPEPSLPLSRTRRRNVRSVYATMGDHENRSPVKEPVEQPRVTRKRLERELQEAAAVPTTPRRGRPPKTRRRADEEEENEAKEPAETLKPPEGWRSPRSQKTAAGGGPQGKKG

SEQ ID NO: 423 - DNA, 1063 bp, Homo sapien
gatggcggggagcggcgtccgccaagctacttctaccgccagcaccttcgtgaagcccattttcagtcgggacatgaacgaggccaagcggagggtgcgcgagctctaccgcgcctggtatcgggaggtgccgaacactgtgcaccaattccagctggacatcactgtgaaaatgggacgggataaagtccgagaaatgtttatgaagaatgcccatgtcacagaccccagggtggttgatcttctggtcattaagggaaagatcgaactggaagaaacaattaaagtatggaagcagcggacacatgttatgcggttcttccatgaaacagaagcgccaaggccaaaggatttcctatccaagttctatgttggccacgatccatgaagtcattcagtggaaagatgcacgttgatactattttagagcacaaataaactcactatacaatggtcactttgtgatagaattccattgatgaaccaattttctgcagcctctttttgcctgagcaagtgggaccttggtatacacatcacctgttctttcccttttcttgaaatgtggtgtttgctgtaaattggattgaattatttttctcagagccttgcatgtcagtaaacaggaaggaaggaggccatctgttcaaaaattgtgacattgggcatgaggctggacgacttgttaatgtagttgtttctatagcccctatgattagacacttcagtgtcagggcacagattatctaaaattagccagctcttcctgtcagggatcagggcagcactaacaggcgcaaaagtagagctgtcaagatgggctagttttccttgggttctgaagaaaatggatgtgcaaaggcttggctccgctacttgtaacaagctccagcccttaaaatgaaattaacttcctactcaggcaccctgcttaggtgcacagctgttcaatatacacagagaacagaaatattcctactgtctttggaaaccctggtgtacctctcagtggcagaataaacatcaacacaggttcaagaactgaaaaaaaaaaaaaaaaaaa

SEQ ID NO: 424 - protein, 128 aa, Homo sapien
MAGSGVRQATSTASTFVKPIFSRDMNEAKRRVRELYRAWYREVPNTVHQFQLDITVKMGRDKVREMFMKNAHVTDPRVVDLLVIKGKIELEETIKVWKQRTHVMRFFHETEAPRPKDFLSKFYVGHDP

SEQ ID NO: 425 - DNA, 1584 bp, Homo sapien
gcgtcccccacaccacagacccgcgccgccgacgacccagcagccgccatgcgtctgctccgaggtgtgtttgtagttgctgctaagcgaacgccctttggagcttacggaggccttctgaaagacttcactgctactgacttgtctgaatttgctgccaaggctgccttgtctgctggcaaagtctcacctgaaacagttgacagtgtgattatgggcaatgtcctgcagagttcttcagatgctatatatttggcaaggcatgttggtttgcgtgtgggaatcccaaaggagaccccagctctcacgattaataggctctgtggttctggttttcagtccattgtgaatggatgtcaggaaatttgtgttaaagaagctgaagttgttttatgtggaggaaccgaaagcatgagccaagctccctactgtgtcagaaatgtgcgttttggaaccaagcttggatcagatatcaagctggaagattctttatgggtatcattaacagatcagcatgtccagctccccatggcaatgactgcagagaatcttactgtaaaacacaaaataagcagagaagaatgtgacaaatatgccctgcagtcacagcagagatggaaagctgctaatgatgctggctactttaatgatgaaatggcaccaattgaagtgaagacaaagaaaggaaaacagacaatgcaggtagacgagcatgctcggccccaaaccaccctggaacagttacagaaacttcctccagtattcaagaaagatggaactgttactgcagggaatgcatcgggtgtagctgatggtgctggagctgttatcatagctagtgaagatgctgttaagaaacataacttcacaccactggcaagaattgtgggctactttgtatctggatgtgatccctctatcatgggtattggtcctgtccctgctatcagtggggcactgaagaaagcaggactgagtcttaaggacatggatttggtagaggtgaatgaagcttttgctccccagtacttggctgttgagaggagtttggatcttgacataagtaaaaccaatgtgaatggaggagccattgctttgggtcacccactgggaggatctggatcaagaattactgcacacctggttcacgaattaaggcgtcgaggtggaaaatatgccgttggatcagcttgcattggaggtggccaaggtattgctgtcatcattcagagcacagcctgaagagaccagtgagctcactgtgacccatccttactctacttggccaggccacagtaaaacaagtgaccttcagagcagctgccacaactggccatgccctgccattgaaacagtgattaagtttgatcaagccatggtgacacaaaaatgcattgatcatgaataggagcccatgctagaagtacattctctcagatttgaaccagtgaaatatgatgtatttctgagctaaaactcaactatagaagacattaaaagaaatcgtattcttgccaagtaaccaccacttctgccttagataatatgattataaggaaatcaaataaatgttgccttaacttc

SEQ ID NO: 426 - protein, 397 aa, Homo sapien
MRLLRGVFVVAAKRTPFGAYGGLLKDFTATDLSEFAAKAALSAGKVSPETVDSVIMGNVLQSSSDAIYLARHVGLRVGIPKETPALTINRLCGSGFQSIVNGCQEICVKEAEVVLCGGTESMSQAPYCVRNVRFGTKLGSDIKLEDSLWVSLTDQHVQLPMAMTAENLTVKHKISREECDKYALQSQQRWKAANDAGYFNDEMAPIEVKTKKGKQTMQVDEHARPQTTLEQLQKLPPVFKKDGTVTAGNASGVADGAGAVIIASEDAVKKHNFTPLARIVGYFVSGCDPSIMGIGPVPAISGALKKAGLSLKDMDLVEVNEAFAPQYLAVERSLDLDISKTNVNGGAIALGHPLGGSGSRITAHLVHELRRRGGKYAVGSACIGGGQGIAVIIQSTA

SEQ ID NO: 427 - DNA, 3269 bp, Homo sapien
cgcgccagggcgagggcaccgccgccggtcgggcgcgctgggcctgcccggaatcccgccgcctgcgccccgcgccccgcgccctgcgggccatgggagccggccgccggcagggacgacgcctgtgagacccgcgagcggcctcggggaccatggggagcgatcgggcccgcaagggcggagggggcccgaaggacttcggcgcgggactcaagtacaactcccggcacgagaaagtgaatggcttggaggaaggcgtggagttcctgccagtcaacaacgtcaagaaggtggaaaagcatggcccggggcgctgggtggtgctggcagccgtgctgatcggcctcctcttggtcttgctggggatcggcttcctggtgtggcatttgcagtaccgggacgtgcgtgtccagaaggtcttcaatggctacatgaggatcacaaatgagaattttgtggatgcctacgagaactccaactccactgagtttgtaagcctggccagcaaggtgaaggacgcgctgaagctgctgtacagcggagtcccattcctgggcccctaccacaaggagtcggctgtgacggccttcagcgagggcagcgtcatcgcctactactggtctgagttcagcatcccgcagcacctggtggaggaggccgagcgcgtcatggccgaggagcgcgtagtcatgctgcccccgcgggcgcgctccctgaagtcctttgtggtcacctcagtggtggctttccccacggactccaaaacagtacagaggacccaggacaacagctgcagctttggcctgcacgcccgcggtgtggagctgatgcgcttcaccacgcccggcttccctgacagcccctaccccgctcatgcccgctgccagtgggccctgcggggggacgccgactcagtgctgagcctcaccttccgcagctttgaccttgcgtcctgcgacgagcgcggcagcgacctggtgacggtgtacaacaccctgagccccatggagccccacgccctggtgcagttgtgtggcacctaccctccctcctacaacctgaccttccactcctcccagaacgtcctgctcatcacactgataaccaacactgagcggcggcatcccggctttgaggccaccttcttccagctgcctaggatgagcagctgtggaggccgcttacgtaaagcccaggggacattcaacagcccctactacccaggccactacccacccaacattgactgcacatggaacattgaggtgcccaacaaccagcatgtgaaggtgcgcttcaaattcttctacctgctggagcccggcgtgcctgcgggcacctgccccaaggactacgtggagatcaatggggagaaatactgcggagagaggtcccagttcgtcgtcaccagcaacagcaacaagatcacagttcgcttccactcagatcagtcctacaccgacaccggcttcttagctgaatacctctcctacgactccagtgacccatgcccggggcagttcacgtgccgcacggggcggtgtatccggaaggagctgcgctgtgatggctgggccgactgcaccgaccacagcgatgagctcaactgcagttgcgacgccggccaccagttcacgtgcaagaacaagttctgcaagcccctcttctgggtctgcgacagtgtgaacgactgcggagacaacagcgacgagcaggggtgcagttgtccggcccagaccttcaggtgttccaatgggaagtgcctctcgaaaagccagcagtgcaatgggaaggacgactgtggggacgggtccgacgaggcctcctgccccaaggtgaacgtcgtcacttgtaccaaacacacctaccgctgcctcaatgggctctgcttgagcaagggcaaccctgagtgtgacgggaaggaggactgtagcgacggctcagatgagaaggactgcgactgtgggctgcggtcattcacgagacaggctcgtgttgttgggggcacggatgcggatgagggcgagtggccctggcaggtaagcctgcatgctctgggccagggccacatctgcggtgcttccctcatctctcccaactggctggtctctgccgcacactgctacatcgatgacagaggattcaggtactcagaccccacgcagtggacggccttcctgggcttgcacgaccagagccagcgcagcgcccctggggtgcaggagcgcaggctcaagcgcatcatctcccaccccttcttcaatgacttcaccttcgactatgacatcgcgctgctggagctggagaaaccggcagagtacagctccatggtgcggcccatctgcctgccggacgcctcccatgtcttccctgccggcaaggccatctgggtcacgggctggggacacacccagtatggaggcactggcgcgctgatcctgcaaaagggtgagatccgcgtcatcaaccagaccacctgcgagaacctcctgccgcagcagatcacgccgcgcatgatgtgcgtgggcttcctcagcggcggcgtggactcctgccagggtgattccgggggacccctgtccagcgtggaggcggatgggcggatcttccaggccggtgtggtgagctggggagacggctgcgctcagaggaacaagccaggcgtgtacacaaggctccctctgtttcgggactggatcaaagagaacactggggtataggggccggggccacccaaatgtgtacacctgcggggccacccatcgtccaccccagtgtgcacgcctgcaggctggagactggaccgctgactgcaccagcgcccccagaacatacactgtgaactcaatctccagggctccaaatctgcctagaaaacctctcgcttcctcagcctccaaagtggagctgggaggtagaaggggaggacactggtggttctactgacccaactgggggcaaaggtttgaagacacagcctcccccgccagccccaagctgggccgaggcgcgtttgtgtatatctgcctcccctgtctgtaaggagcagcgggaacggagcttcggagcctcctcagtgaaggtggtggggctgccggatctgggctgtggggcccttgggccacgctcttgaggaagcccaggctcggaggaccctggaaaacagacgggtctgagactgaaattgttttaccagctcccagggtggacttcagtgtgtgtatttgtgtaaatgagtaaaacattttatttctttttaaaaaaaaaaa

SEQ ID NO: 428 - protein, 855 aa, Homo sapien [sequence omitted]

SEQ ID NO: 429 - DNA, 1291 bp, Homo sapien
taggaatttcaaggtgtaggtcagatatttgagaataggggatttttttgatgtgccttaaattataccaaagattactaattattcctctttgcccaaaatacttgcatccaaggttctagtctctgttgctgtgctggtctttagccccactgcttgcactgatgtccctccttttcacggagacctatctgaggtacaggatggggctggcaccagatgatgtcccaccacagtccctcacctccggcctccacatgacagaaccaatttacactcaaccatgacctcacccctccttggtttctccctcgatctgtggccctttttggatgtattcttatctaacaacacaatccggaaagactgaattgaatatttatactaatggttcatatcctttattgctcaatgatctaattaaagggatcattgccacatttcatgtttatatttctacaatttgtttagaaaacatctcctgaccatatcagtagctcgtgttatctttttatcaactgcttcccagagtcctaaaacaatagaaattttggattgaaaagttcagcataaggagtttgagtcagtaaaggatgggataaaggagtcgagatgattcaatgaaaagtatcacaaaaaagagattgatcaacaagagaaataaaaaagcccaagaggaagtggtaggggaaggaatttaagaacagcaataagtaaaactcttaagtaactccaaaaagaaaatggtacattttgccaaagaccacttatacttgagaacatggaagaatttgcctgatactctctttggggaaaagagtctctcctcttttcctcaaaccccagtacactcagcctctctgccccaccttctcctgactttgtcctcacttgcttctgcagtacattggaacctgaattgaaagaaagtcttccttgaataattggagtttgtcttgagaggcaaatatagccccaagaatcacaagattcgaggaccatgtaggtcttttacgtagcccaaatccataaattagtctcactttttgtatttatcgtttcatattaaaccctctatatcaaatgttcatcatgattttgtatgatttttataactattttattcattttattagatttattctaaaattttttaatggtaaattcttaaactgtggaaaccactgaaggtgcttattaactgttctcccagatttgtacaagtattggatgattccttgagtttacagctgtacaaatagtgtggaaaataaactttttttaaaaaaga

SEQ ID NO: 430 - protein, 9 aa, Homo sapien
GISRCRSDI

SEQ ID NO: 431 - DNA, 1856 bp, Homo sapien
ctgacttggcaggactgtgcaattgtcagaaggccgtggggagtgggggccagtgcctgcagcctgccctgcctctctcacaggcccttagagcatcgccaggtgcagagctccacagctctctttcccaaggagtaatcagagggtgagaacgtggagcctggtggacaggtgaaagcactgggatctttctgcccagaaaggggaaagttgcacatttatatcctagagggaagcgacagcagtgcttctccctgtgctgaggtacaggagccatgtggctagaaatcctcctcacttcagtgctgggctttgccatctactggttcatctcccgggacaaagaggaaactttgccacttgaagatgggtggtgggggccaggcacgaggtccgcagccagggaggacgacagcatccgccctttcaaggtggaaacgtcagatgaggagatccacgacttacaccagaggatcgataagttccgtttcaccccacctttggaggacagctgcttccactatggcttcaactccaactacctgaagaaagtcatctcctactggcggaatgaatttgactggaagaagcaggtggagattctcaacagataccctcacttcaagactaagattgaagggctggacatccacttcatccacgtgaagcccccccagctgcccgcaggccataccccgaagcccttgctgatggtgcacggctggcccggctctttctacgagttttataagatcatcccactcctgactgaccccaagaaccatggcctgagcgatgagcacgtttttgaagtcatctgcccttccatccctggctatggcttctcagaggcatcctccaagaaggggttcaactcggtggccaccgccaggatcttttacaagctgatgctgcggctgggcttccaggaattctacattcaaggaggggactgggggtccctgatctgcactaatatggcccagctggtgcccagccacgtgaaaggcctgcacttgaacatggctttggttttaagcaacttctctaccctgaccctcctcctgggacagcgtttcgggaggtttcttggcctcactgagagggatgtggagctgctgtaccccgtcaaggagaaggtattctacagcctgatgagggagagcggctacatgcacatccagtgcaccaagcctgacaccgtaggctctgctctgaatgactctcctgtgggtctggctgcctatattctagagaagttttccacctggaccaatacggaattccgatacctggaggatggaggcctggaaaggaagttctccctggacgacctgctgaccaacgtcatgctctactggacaacaggcaccatcatctcctcccagcgcttctacaaggagaacctgggacagggctggatgacccagaagcatgagcggatgaaggtctatgtgcccactggcttctctgccttcccttttgagctattgcacacgcctgaaaagtgggtgaggttcaagtacccaaagctcatctcctattcctacatggttcgtgggggccactttgcggcctttgaggagccggagctgctcgcccaggacatccgcaagttcctgtcggtgctggagcggcaatgacccacccctctccccccgcctgccacctccccccacaagtgccctccaggcttttcttggggaagataccccttttctgaggaatgagtttgcctccgtcccctgcccatgctgggagcccacgctcaccccctcacccctccaagctcactccccaacccccaactccgtgtggtaagcaacatggctttgatgataaacgactttactcta

SEQ ID NO: 432 - protein, 455 aa, Homo sapien
MWLEILLTSVLGFAIYWFISRDKEETLPLEDGWWGPGTRSAAREDDSIRPFKVETSDEEIHDLHQRIDKFRFTPPLEDSCFHYGFNSNYLKKVISYWRNEFDWKKQVEILNRYPHFKTKIEGLDIHFIHVKPPQLPAGHTPKPLLMVHGWPGSFYEFYKIIPLLTDPKNHGLSDEHVFEVICPSIPGYGFSEASSKKGFNSVATARIFYKLMLRLGFQEFYIQGGDWGSLICTNMAQLVPSHVKGLHLNMALVLSNFSTLTLLLGQRFGRFLGLTERDVELLYPVKEKVFYSLMRESGYMHIQCTKPDTVGSALNDSPVGLAAYILEKFSTWTNTEFRYLEDGGLERKFSLDDLLTNVMLYWTTGTIISSQRFYKENLGQGWMTQKHERMKVYVPTGFSAFPFELLHTPEKWVRFKYPKLISYSYMVRGGHFAAFEEPELLAQDIRKFLSVLERQ

SEQ ID NO: 433 - DNA, 1324 bp, Homo sapien
cggcacgagcgccgccgaggattcagcagcctcccccttgagccccctcgcttcccgacgttccgttcccccctgcccgccttctcccgccaccgccgccgccgccttccgcaggccgtttccaccgaggaaaaggaatcgtatcgtatgtccgctatccagaacctccactctttcgacccctttgctgatgcaagtaagggtgatgacctgcttcctgctggcactgaggattatatccatataagaattcaacagagaaacggcaggaagacccttactactgtccaagggatcgctgatgattacgataaaaagaaactagtgaaggcgtttaagaaaaagtttgcctgcaatggtactgtaattgagcatccggaatatggagaagtaattcagctacagggtgaccaacgcaagaacatatgccagttcctcgtagagattggactggctaaggacgatcagctgaaggttcatgggttttaagtgcttgtggctcactgaagcttaagtgaggatttccttgcaatgagtagaatttcccttctctcccttgtcacaggtttaaaaacctcacagcttgtataatgtaaccatttggggtccgcttttaacttggactagtgtaactccttcatgcaataaactgaaaagagccatgctgtctagtcttgaagtccctcatttaaacagaggtcaagcaataggcgcctggcagtgtcaagcctgaaaccaagcaataccgtcatgtttcagccaagcccagagccctaagattacaaacaactatggccggaacctcctcagctctccctctgcagagttccctaccctaagagaatgttaccacctgaacagtcctcggtgaatctgagaggagaggatggggtaaggcagaagcaccagctgtactactagaagggagcttttggtggtagatcccctggtgtctccaacctgactaggtggacagagctcaaagaggccctcttaccgctagcgaggtgataggacatctggcttgccacaaaggtctgttcgaccagacatatcctagctaagggatgtccaaacatcagaatgtgaggccaaccttctatcagagttaaacttttgacaagggaacaaatctcaaactgatccatcagtcatgtagctagctgtagagcttgcaacttaatagcagcagctgcccaatgccatgtgaagtaacaaactggtttttggtttttttttccccttcagttttaatgttatgtgtaatgtatttaaacccttatttaaataaaacttgttttcagaaaaaaaaaaaaaaaaaaaa

SEQ ID NO: 434 - protein, 113 aa, Homo sapien
MSAIQNLHSFDPFADASKGDDLLPAGTEDYIHIRIQQRNGRKTLTTVQGIADDYDKKKLVKAFKKKFACNGTVIEHPEYGEVIQLQGDQRKNICQFLVEIGLAKDDQLKVHGF

SEQ ID NO: 435 - DNA, 6455 bp, Homo sapien
gaggaagcgattctggggtttctgtgttgaacggttcttgtccgcgaagatgcgcttcggcctctgtcaggggacttgaacgggcttagtgggcttcagccagcttttctccaccggttccccacggggaccccccccccccggccgttgcaatggcgggcgtggggccggggggctacgcggcggagttcgtgccaccgccagagtgccccgtctttgagccgagttgggaggagttcacagatccgctcagctttatcggccgcatccggcctttggcggagaaaaccggcatctgcaaaattcggccgcccaaggactggcagcctccatttgcctgtgaagtaaaaagctttcgtttcactccaagagtccagcgcctgaatgaacttgaggcaatgaccagagtgagattggatttcttggatcaactagcaaaattttgggaacttcaaggatctactctgaagatccctgtggtagagagaaaaatcctggatctgtatgctttgagcaagattgttgccagcaaaggaggttttgaaatggtcaccaaagagaagaaatggtctaaagtgggtagtcgcttgggatatctgccaggaaaaggaactgggtctcttttgaagtcacattatgaaagaattctctacccatatgagcttttccagtctggtgtgagccttatgggtgtgcagatgcctaatttagatcttaaagaaaaagtggagcctgaggttctcagcactgatacccaaacttccccagagccaggcacaaggatgaacattctgccgaagagaacaagacgtgtgaagactcagtcagaatctggagatgtgagtagaaacacggaactgaagaaacttcagatttttggggctgggcccaaggttgtgggcttggcaatgggaacaaaagataaagaagatgaggtcacccgaagacgaaaagttaccaacaggtcagacgcatttaacatgcaaatgagacaacggaaaggcactctctctgttaactttgttgatctctatgtttgtatgttttgtggtcggggaaacaatgaagataaattgcttttgtgtgatggatgtgatgacagctatcatacattttgtctaattcctccactacctgatgtgcccaaaggagactggaggtgtcctaaatgtgtcgccgaggaatgtagcaaacctcgagaagcctttggatttgaacaagctgtacgagagtatacacttcagagctttggagagatggcagataattttaagtctgattattttaatatgccagtccatatggttcccacagaactagtagaaaaggaattttggcggctggtaagcagcattgaagaagatgttattgtggaatatggagcagatatctcctcaaaagactttggaagtggatttccggtgaaggatgggcggagaaagattctgccagaagaagaggaatatgcactttctggttggaatttgaataacatgcctgtcctggaacagtctgttcttgcacatattaatgtggacatctctggtatgaaagtgccgtggctctatgtgggaatgtgcttctcttctttttgctggcacattgaggatcactggagttattccatcaactacttgcactggggggagccaaagacatggtatggtgtgccatctcatgctgcagagcaactggaggaggtgatgagagagctggcccccgagttatttgaatcccagcctgatcttctgcatcagttagttaccatcatgaaccccaacgtgctaatggagcatggtgtgcctgtgtacaggaccaatcagtgtgctggcgagtttgttgtgacatttcctcgtgcctatcactctggatttaaccagggctacaactttgctgaagctgtgaacttctgtactgctgactggttgcccattggacgtcaatgtgtaaatcattaccgacgcctaaggcgccactgtgtcttttcacacgaggaactaattttcaagatggcagcagatccagaatgcttagatgtggggctggctgccatggtctgcaaagaattgactctcatgactgaagaagaaacacgattaagagagtctgttgtacagatgggtgtcctgatgtcagaagaagaagtgtttgaacttgttcctgatgatgagcggcagtgttcagcatgcagaaccacatgttttctctctgctctcacatgttcctgtaatcctgagcggcttgtatgtctctaccatccaactgatctgtgcccctgccccatgcagaagaaatgtcttagatatcgctacccattagaagacctcccttctctgctatatggtgtaaaagtcagggcacagtcctatgacacttgggtcagtcgtgttacagaagcattgtctgctaacttcaaccacaaaaaagatttgattgaattgcgagtaatgctggaagatgctgaggataggaaatacccagagaatgatctctttcgaaaactcagggatgctgtaaaagaagctgagacctgtgcttctgtggctcagctgcttctgagcaaaaagcagaaacacagacagagcccagatagtgggaggactcggaccaaactgacagtggaagaattgaaggcctttgtccaacaactttttagtcttccgtgtgtcatcagccaagctcggcaagtaaagaatctgctagatgatgtggaagagtttcatgaacgtgctcaggaggccatgatggatgaaaccccagattcttccaaactccagatgttgatagatatgggctctagtctctatgtggaactccctgaattaccacgactgaagcaagagctacaacaggctcggtggttggacgaagtaagactgaccttatcagatccgcaacaagtcactttggatgtcatgaagaagctgatagactctggggtagggttggcaccccaccatgctgtggagaaagcaatggctgaactacaggagctccttacagtctctgaacgatgggaagaaaaggctaaggtctgcctacaggcaagaccgaggcacagtgtggcaagtttagaaagcattgtgaatgaagccaagaacattccagcctttctacccaatgtgttgtccttgaaagaagccttacaaaaggctcgagaatggaccgctaaagtggaagctattcagagtggcagcaattacgcttatttggagcagcttgagagcttgtctgcgaaaggacgccctattcctgtgcgtcttgaagcactgccgcaagtggaatcacaggtagcagcagcacgggcatggagagaacggactgggcggacgtttcttaagaagaattctagccatacattgttacaggtgctgagcccccggaccgacattggtgtatatgggagtggcaaaaataggaggaaaaaagtaaaagaactaatagaaaaagaaaaagaaaaggatctggacctggagcctctgagtgatctggaggaaggattggaggaaaccagagatacagccatggtggtggcagttttcaaagaacgggagcaaaaagagattgaagccatgcattctctcagagcagccaacctagccaagatgacaatggtggaccgcatagaagaagtaaaattttgcatttgccgcaagacagccagtgggtttatgctacagtgtgagctctgcaaagactggttccataacagctgtgttcctcttcctaaatcaagttcccaaaaaaaaggatccagctggcaagctaaagaagtaaaattcctttgccctctttgtatgcggtctcgaaggcccaggctagagactattctgtcactcctggtatcccttcagaagttgcccgtacggttgcctgaaggagaggccctgcagtgtttgacagaacgtgctatgagttggcaagatagagcgcggcaggctctagccacagatgaactatcctctgccctggccaaactatctgtgttgagccagcgtatggtggaacaggcggctcgagaaaaaactgaaaagatcatcagtgcagaactccaaaaagcagctgccaatccagacttacagggacacttacctagtttccagcagtctgcttttaaccgggtggtgagcagtgtgtcatcttctcctcgacaaacaatggactatgatgatgaagaaacagactctgatgaagacattcgagagacatatggctacgacatgaaggacacagccagtgtgaagtcctctagtagtcttgaacccaatcttttttgtgatgaagagattcccatcaaatccgaggaggtggtgacccacatgtggacagcaccttcattttgtgcagagcatgcttattcttctgcttctaagagttgttctcaagtattttttgggaaaggttctagcaccccaaggaaacaacctcggaagagccctttggtgccccgaagtttggaacctccagtgctggagttgtcacctggagctaaggcacaactggaagaacttatgatggttggagatctcctggaagtatctctggacgagactcaacacatatggcggattttgcaggccacacacccaccctctgaagacagattcttgcatatcatggaggatgacagcatggaagagaaaccactaaaagtgaaaggaaaggactcttcagagaagaaacggaaacggaagctagaaaaggtagagcaactttttggagaaggaaaacagaagtccaaggagttaaagaaaatggacaaacctagaaagaagaaattaaaattaggtgcagacaaatcaaagaagctgaataaactggccaagaaactagcaaaagaagaagagagaaagaaaaagaaggagaaggctgctgcagccaaagttgaacttgtgaaagagagcactgaaaagaaaagagagaaaaaggtgctggacatcccctcaaagtatgactggtcaggagcagaggagtctgatgatgagaatgctgtgtgcgcagaaccagactgccaaaggccctgcaaggacaagggagttgtatttgtaacgaagaagagagagataaaaaatattagttttaaaagtgtcctatgtgactgcttttctaaaaaggtagactgggtacaatgtgatggtggctgtgatgagtggtttcatcgggtttgtgtgggtgtatctccagaaatggctgaaaatgaagattacatctgtataaactgtgcaaagaagcaggggccagttagcccaggtccagcaccacctccttccttcataatgagctacaaactaccaatggaggatcttaaagagaccagttagcagatgcttggttagtttgggacatggggggacatggaccacattgagaccttagtcatcaagtagagtggtttatatcacttggaatgttgcttctaaagatgaatggccttcagagaaagtccccttagtgctggcttcctctttgcatggactctgtgggttacattgctctatcaacatatctatgcagagggtgtcttctttggtacaacagccaatatctcatgtctcctttgagtgtggtttactgcattaaggccagatgcttaattgagctctagggtggctggttagtattaatacattggtgtgctaacagggcatataggatgtggcttttgtccagctgatagtagttagaggcttacaacttaggagcagcaccaactgaaggtgctaattgcttggatctccttcattaggatagttggagagggattggagtaccactttcttccactgttaccaggtacttaatgccctaaagatacaactaggagtaacagggccaaagttatttctgttagacgtcaaggaatggtatcacagtctattgacctcagcgatttgtgcttgtttgtgctagaagaacatcccaaataggagaacctctcacaagctggggcaggtcaccttatctttgtaagatgaggatatcatctagatcagaaatctgactagattggattctgaggagaagaacctactacaaggcaaggagccgttttttggctttgaaaagtcttgctgtcttgggtctacattttagggaagagcaggtacatggatccaggcttctgccaaaaaaaaaaagagaagaagatgacgagtatgaccagtcgtactatcttactgagccacagtgatgcatgcttttcggggaaaacttcattcacaagtattccagacaccaggcttcaggcatggccatgagcaagaccagcaaataacagctttttcccttgcagccctgaccccaatgtctgctgtttccaacactggtgatttctaactacggcccacagcagatgctgttgaataacaccatggcttcatcagaggatgtggggttgtagtacctctgggtgatgaagttgttttagcaaatccatttttaaaaaaaaaaaaaaa

SEQ ID NO: 436 - protein, 1722 aa, Homo sapien
MAGVGPGGYAAEFVPPPECPVFEPSWEEFTDPLSFIGRIRPLAEKTGICKIRPPKDWQPPFACEVKSFRFTPRVQRLNELEAMTRVRLDFLDQLAKFWELQGSTLKIPVVERKILDLYALSKIVASKGGFEMVTKEKKWSKVGSRLGYLPGKGTGSLLKSHYERILYPYELFQSGVSLMGVQMPNLDLKEKVEPEVLSTDTQTSPEPGTRMNILPKRTRRVKTQSESGDVSRNTELKKLQIFGAGPKVVGLAMGTKDKEDEVTRRRKVTNRSDAFNMQMRQRKGTLSVNFVDLYVCMFCGRGNNEDKLLLCDGCDDSYHTFCLIPPLPDVPKGDWRCPKCVAEECSKPREAFGFEQAVREYTLQSFGEMADNFKSDYFNMPVHMVPTELVEKEFWRLVSSIEEDVIVEYGADISSKDFGSGFPVKDGRRKILPEEEEYALSGWNLNNMPVLEQSVLAHINVDISGMKVPWLYVGMCFSSFCWHIEDHWSYSINYLHWGEPKTWYGVPSHAAEQLEEVMRELAPELFESQPDLLHQLVTIMNPNVLMEHGVPVYRTNQCAGEFVVTFPRAYHSGFNQGYNFAEAVNFCTADWLPIGRQCVNHYRRLRRHCVFSHEELIFKMAADPECLDVGLAAMVCKELTLMTEEETRLRESVVQMGVLMSEEEVFELVPDDERQCSACRTTCFLSALTCSCNPERLVCLYHPTDLCPCPMQKKCLRYRYPLEDLPSLLYGVKVRAQSYDTWVSRVTEALSANFNHKKDLIELRVMLEDAEDRKYPENDLFRKLRDAVKEAETCASVAQLLLSKKQKHRQSPDSGRTRTKLTVEELKAFVQQLFSLPCVISQARQVKNLLDDVEEFHERAQEAMMDETPDSSKLQMLIDMGSSLYVELPELPRLKQELQQARWLDEVRLTLSDPQQVTLDVMKKLIDSGVGLAPHHAVEKAMAELQELLTVSERWEEKAKVCLQARPRHSVASLESIVNEAKNIPAFLPNVLSLKEALQKAREWTAKVEAIQSGSNYAYLEQLESLSAKGRPIPVRLEALPQVESQVAAARAWRERTGRTFLKKNSSHTLLQVLSPRTDIGVYGSGKNRRKKVKELIEKEKEKDLDLEPLSDLEEGLEETRDTAMVVAVFKEREQKEIEAMHSLRAANLAKMTMVDRIEEVKFCICRKTASGFMLQCELCKDWFHNSCVPLPKSSSQKKGSSWQAKEVKFLCPLCMRSRRPRLETILSLLVSLQKLPVRLPEGEALQCLTERAMSWQDRARQALATDELSSALAKLSVLSQRMVEQAAREKTEKIISAELQKAAANPDLQGHLPSFQQSAFNRVVSSVSSSPRQTMDYDDEETDSDEDIRETYGYDMKDTASVKSSSSLEPNLFCDEEIPIKSEEVVTHMWTAPSFCAEHAYSSASKSCSQVFFGKGSSTPRKQPRKSPLVPRSLEPPVLELSPGAKAQLEELMMVGDLLEVSLDETQHIWRILQATHPPSEDRFLHIMEDDSMEEKPLKVKGKDSSEKKRKRKLEKVEQLFGEGKQKSKELKKMDKPRKKKLKLGADKSKKLNKLAKKLAKEEERKKKKEKAAAAKVELVKESTEKKREKKVLDIPSKYDWSGAEESDDENAVCAEPDCQRPCKDKGVVFVTKKREIKNISFKSVLCDCFSKKVDWVQCDGGCDEWFHRVCVGVSPEMAENEDYICINCAKKQGPVSPGPAPPPSFIMSYKLPMEDLKETS

SEQ ID NO: 437 - DNA, 4925 bp, Homo sapien
gaagcggcgggcggggtggagcagccagctgggtccggggagcgccgccgccgcctcgatggggtgttgaaaagtctcctctagagctttggaaggctgaatgcactaaacatgaagagcttgaaagcgaagttcaggaagagtgacaccaatgagtggaacaagaatgatgaccggctactgcaggccgtggagaatggagatgcggagaaggtggcctcactgctcggcaagaagggggccagtgccaccaaacacgacagtgagggcaagaccgctttccatcttgctgctgcaaaaggacacgtggaatgcctcagggtcatgattacacatggtgtggatgtgacagcccaagatactaccggacacagcgccttacatctcgcagccaagaacagccaccatgaatgcatcaggaggctgcttcagtctaaatgcccagccgaaagtgtcgacagctctgggaaaacagctttacattatgcagcggctcagggctgccttcaagctgtgcagattctctgcgaacacaagagccccataaacctcaaagatttggatgggaatataccgctgcttcttgctgtacaaaatggtcacagtgagatctgtcactttctcctggatcatggagcagatgtcaattccaggaacaaaagtggaagaactgctctcatgctggcctgtgagattggcagctctaacgctgtggaagccttaattaaaaagggtgcagacctaaaccttgtagattctcttggatacaatgccttacattattccaaactctcagaaaatgcaggaattcaaagccttctattatcaaaaatctctcaggatgctgatttaaagaccccaacaaaaccaaagcagcatgaccaagtctctaaaataagctcagaaagaagtggaactccaaaaacacgcaaagctccaccacctcctatcagtcctacccagttgagtgatgtctcttccccaagatcaataacttcgactccactatcgggaaaggaatcggtattttttgctgaaccacccttcaaggctgagatcagttctatacgagaaaacaaagacagactaagtgacagtactacaggtgctgatagcttattggatataagttctgaagctgaccaacaagatcttctctctctattgcaagcaaaagttgcttcccttaccttacacaataaggagttacaagataaattacaggccaaatcacccaaggaggcggaagcagacctaagctttgactcataccattccacccaaactgacttgggcccatccctgggaaaacctggtgaaacctctcccccagactccaaatcatctccatctgtcttaatacattctttaggtaaatccactactgacaatgatgtcagaattcagcaactgcaagagattttgcaagatctacagaagagattagagagctctgaagcagagagaaaacagctacaggtcgaactccaatcccgaagggcagaactggtatgcttaaacaacactgagatttcagagaacagctctgacctcagccagaaacttaaagaaactcagagcaaatacgaggaggctatgaaagaagtccttagtgtgcagaagcagatgaaactcggtcttgtctcacctgaaagcatggataattattcacatttccacgagctgagggtcacggaagaggaaataaatgtgctaaagcaggatctgcagaatgcattagaagaaagtgaaagaaataaagagaaagtgagagagttagaggaaaaactggtagagagggagaaaggtacagtgattaagccacctgtggaagagtacgaggaaatgaaaagttcatattgctctgttattgagaatatgaataaggagaaagcatttttgtttgagaaataccaagaagcccaagaagaaatcatgaaattaaaagacacactaaaaagtcagatgacacaggaagccagtgatgaagctgaggacatgaaagaagccatgaataggatgatagatgaactcaataaacaggtgagcgagctgtcacagctgtacaaagaagcccaggctgagctggaggattacaggaagaggaaatctctagaggatgtcacagctgaatatatccataaagcagagcatgagaaactgatgcaattgacaaacgtgtccagggctaaagcagaagatgcactgtctgaaatgaagtctcagtattcaaaagtgttgaatgagttgacccagctcaaacaactggtggatgcacaaaaagagaactctgtctctatcacagaacatttgcaagtgataaccacgctgcggactgcagcaaaagagatggaagaaaaaataagcaatcttaaggaacaccttgcaagcaaggaagtggaagtagcaaagctggagaaacaactcttagaagagaaagctgctatgactgatgcaatggtacctcggtcttcctatgaaaaactccagtcatccttagagagtgaagtgagtgtgttggcatcgaaattaaaggaatctgtgaaagagaaagagaaggtccattcagaggttgtccagattagaagtgaggtctcacaggtgaaaagagaaaaggaaaatattcagactctcttgaaatccaaagagcaagaagtaaatgaacttctgcaaaaattccagcaagctcaggaagaacttgcagaaatgaaaagatacgctgagagctcttcaaaactggaggaagataaagataaaaagataaatgagatgtcgaaggaagtcaccaaattgaaggaggccttgaacagcctctcccagctctcctactcaacaagctcatccaaaaggcagagtcagcagctggaggcgctgcagcagcaagtcaaacagctccagaaccagctggcggaatgcaagaaacaacaccaggaggtcatatcagtttacagaatgcatcttctgtatgctgtgcagggccagatggatgaagatgtccagaaagtactgaagcaaatccttaccatgtgtaaaaaccagtctcaaaagaagtaaagtggattccttggcaggacactgccccttgtcatctgtctttgtgttagatccagagttgtcggcagccgctgccattgttctcattcgtggtatgcactgtggcctagcgtagcttcttccctttccaaaggtttctgaggacttctcccaggagaagactgcccgcctcagaactgcttagagacttcaaaccagcagaggtgaaagtccctgtcatcccttcagattccagagctgggatcagccatgcccagaggtctggtcctgatgctggcaggggggccccctcctccatccctgactggctgagtggctttatcaccaccgagtgatgtgctgaggcctcctgcagtgaatgctccttccattcctgtactcgggcagtgccattcagcacaggagagctctttttgcctttggctttcaattccaaaacatgatttaatttctaactaaattagtatggcactagttatgaagtatctgcttaaaacccttcatcatgatatcctgtggatttaaaaactctaattccatgttttcttcccatctgccttatatatctcatcaccctgcttatcaatattcagtttgatgagcactattaactaaaatatgaaacttaaaaacaaaagcaagttgtccttaaaagttctttttttaagtaaattgttgacatactgcaaattttctatgcaaacttgcctcctgctgttatctgtgaagctcaggaaatccaaacatttgtgtttcaacaagggacagtaaactgtgtgtttacagccaaaagaaatgcctcatagttcttaacctcaacttttgtagaagtatttttttctctgtaatatttttattggctcataaagatgttttcatatctgaactcctaaataagtgaaattacagtagattatattaacaaaatactttttaggtagccatgcttgagactttttaaaaatataactttttccttaaagttttcagctatagcaaaaggtagttatgtatgccagacctaatatgagctgccaccaacacccctagaactttcagccatggtgtcttcagaattgtagcgcatttctgaatctagcaaatcctccttttacccgttgaatgttttgaatgccctgactctaccagcgcccataaatgatctctagaaggactgttagtaccaatctgtttttcaactttgaagctaaaaaccctgatatggtaatattatggtgcatagcagaggtctcggaaaaaaaatatttctgttcactttactttcaggttaaaaatgtttctaacacgcttgcaacttcccttatggcattaatcttgttgagggagagagacagaatcctggactctccaaagtatttaactgaaagtagggcctgctctgacagggcccatgtcccacaaggctgcttggcctcagtgggtgcttggctgtgctggatgatatgttgatctgtattggataaggaccaatgacagcaaagcaaaaatggctttaaagcttggtgttacttttcttaagttgtttaattatagttaagcaatttcaaaaatgctccaaagaaatgtgaaaggaccttttgtcacagcacttcagaaaatacacaacagccccttctgcccccgcacagaaatgctgcagagtatataaaacttgagacatttttgtaggatgcctgacgaggtgtagccttttatcttgtttccggatgcatatttattacgagtactctggttaaatattgaaaagttatatgctgtagtttttagtattttgtctttgtaatttacagaagttattggagaaaataaacttgtttcattttgcaaaaaaaaaaaaaaaaaaaaaaaaa

SEQ ID NO: 438 - protein, 980 aa, Homo sapien
MKSLKAKFRKSDTNEWNKNDDRLLQAVENGDAEKVASLLGKKGASATKHDSEGKTAFHLAAAKGHVECLRVMITHGVDVTAQDTTGHSALHLAAKNSHHECIRRLLQSKCPAESVDSSGKTALHYAAAQGCLQAVQILCEHKSPINLKDLDGNIPLLLAVQNGHSEICHFLLDHGADVNSRNKSGRTALMLACEIGSSNAVEALIKKGADLNLVDSLGYNALHYSKLSENAGIQSLLLSKISQDADLKTPTKPKQHDQVSKISSERSGTPKTRKAPPPPISPTQLSDVSSPRSITSTPLSGKESVFFAEPPFKAEISSIRENKDRLSDSTTGADSLLDISSEADQQDLLSLLQAKVASLTLHNKELQDKLQAKSPKEAEADLSFDSYHSTQTDLGPSLGKPGETSPPDSKSSPSVLIHSLGKSTTDNDVRIQQLQEILQDLQKRLESSEAERKQLQVELQSRRAELVCLNNTEISENSSDLSQKLKETQSKYEEAMKEVLSVQKQMKLGLVSPESMDNYSHFHELRVTEEEINVLKQDLQNALEESERNKEKVRELEEKLVEREKGTVIKPPVEEYEEMKSSYCSVIENMNKEKAFLFEKYQEAQEEIMKLKDTLKSQMTQEASDEAEDMKEAMNRMIDELNKQVSELSQLYKEAQAELEDYRKRKSLEDVTAEYIHKAEHEKLMQLTNVSRAKAEDALSEMKSQYSKVLNELTQLKQLVDAQKENSVSITEHLQVITTLRTAAKEMEEKISNLKEHLASKEVEVAKLEKQLLEEKAAMTDAMVPRSSYEKLQSSLESEVSVLASKLKESVKEKEKVHSEVVQIRSEVSQVKREKENIQTLLKSKEQEVNELLQKFQQAQEELAEMKRYAESSSKLEEDKDKKINEMSKEVTKLKEALNSLSQLSYSTSSSKRQSQQLEALQQQVKQLQNQLAECKKQHQEVISVYRMHLLYAVQGQMDEDVQKVLKQILTMCKNQSQKK

SEQ ID NO: 439 - DNA, 3673 bp, Homo sapien
agtgggactcagcgggcgtggaggtcgcggcggacggagcgagccctgggcgagtgaattgtggctgtgggttgacggtggagacaccccccggagaggcggagggaagggaggcgaggctgcacctgcatgcttcccgcctcccactccccagcgcccccggaccgtgcagttctctgcaggaccaggccatggagctcgaagtccggcgggtccgacaggcgttcctgtccggccggtcgcgacctctgcggtttcggctgcagcagctggaggccctgcggaggatggtgcaggagcgcgagaaggatatcctgacggccatcgccgccgacctgtgcaagagtgaattcaatgtgtacagtcaggaagtcattactgtccttggggaaattgattttatgcttgagaatcttcctgaatgggttactgctaaaccagttaagaagaacgtgctcaccatgctggatgaggcctatattcagccacagcctctgggagtggtgctgataatcggagcttggaattaccccttcgttctcaccattcagccactgataggagccatcgctgcaggaaatgctgtgattataaagccttctgaactgagtgaaaatacagccaagatcttggcaaagcttctccctcagtatttagaccaggatctctatattgttattaatggtggtgttgaggaaaccacggagctcctgaagcagcgatttgaccacattttctatacgggaaacactgcggttggcaaaattgtcatggaagctgctgccaagcatctgacccctgtgactcttgaactgggagggaaaagtccatgttatattgataaagattgtgacctggacattgtttgcagacgcataacctggggaaaatacatgaattgtggccaaacctgcattgcacccgactatattctctgtgaagcatccctccaaaatcaaattgtatggaagattaaggaaacagtgaaggaattttatggagaaaatataaaagagtctcctgattatgaaaggatcatcaatcttcgtcattttaagaggatactaagtttgcttgaaggacaaaagatagcttttggtggggagactgatgaggccacacgctacatagccccaacagtacttaccgatgttgatcctaaaaccaaggtgatgcaagaagaaatttttggaccaattcttccaatagtgcctgtgaaaaatgtagatgaggccataaatttcataaatgaacgtgaaaagcctctggctctttatgtattttcgcataaccataagctcatcaaacggatgattgatgagacatccagtggaggtgtcacaggcaatgacgtcattatgcacttcacgctcaactctttcccatttggaggagtgggttccagtgggatgggagcttatcacggaaaacatagttttgatactttttctcatcagcgtccctgtttattaaaaagtttaaagagagaaggtgctaacaaactcagatatcctcccaacagccagtcaaaggtggattgggggaaattttttctcttgaaacggttcaacaaagaaaaactcggtctcctgttgctcactttcctgggtattgtagccgctgtgcttgtcaaggcagaatattactgaagaatgatcctgttcaacctcctagtgcctctactgaattattcctcttttaaatggttaatgaaccaataatttttaaatcataccaaaaatagtaagaaaatatgcaaacactctgtgatcaaacttaaaagtcattgccattcatcattaataaaagttgccatttcaactacgtcccaacattccctaatagggtattcagggaacctgtcttaaattgtgcttatctaaatcttggaactttgagctaggggaggagaatgtattagactaaatacaaactgcggggttgtaagggagtctcagaacctcactgaatccttcactccagttaatggcactgctcacttcctgcctctgctgccaccatcactgtgtgaagctttcaagagcttggtacttcccagggctaccggcagtcctctgtagtccagagaggtgagattagatcttcttggttccctgtgaggtttcaggcactaaaactctatgtggggaagggaggggttactcctcctccaatgggactcaaggacttgacctccaggagtaggcccctggtcagaagtgccatctcaccagtggtcttcattcttcctcattcattctttatcatcctgtgttctgtttagttgcaacaatctcttgtgactaatgtcactcaaagcatcttgtaacctagggcttcctggaagttagttgccaaagtcatgcaagcatcacctgtcattcttgtgttggagttatagaattctacatcttataaaacctaactggcatttaaaaaatactgtggccgggcgtggtggctcatgcctgtaatcccagcactttgggaggccgaggtgggaggattgcttgagtccaggaatttgagaccagcctggacaacacagtgagacctcatctctatcaaaaaataaaaattagctagatgtggtggcatgagcctgtgttcccagctgcttaggaggctgaagcaggaggattgattgagcctgcgaggccaaggctgcagcaggctgtgattgcaccactgcacttcagcttgggcaacagagcaagaccctgtctccgaaacaaataaaaaatactgtaataaaagtacttataaacatactaatcctctttcaggaccctaaagttgcaggttagtaggtcttcaaggacaaatctgtaagtttcttttctgtagtgcaagtaaaatttcactttttgaaactatagagagatccctttctgattagcctacagaacttaaagtgagggaaccatttcctctcacagacaaagaggcctgggatattaggactttggggtttgagagcatcatggggcagacagatggtggatggtctggacaagaagcgagtaagccactgcggttggtcatactgaagggaattgatggcaagaggatcccctgagcaagtcagaagttactctcatcagtcgttcatggtcacaacctgaggtactctgctgagtgggcaaggctgaagtaagaggcctgtggaatgcagcattacctgctggacagagcagggcaggcagttctatgccttggagctcctgactgcagggactctgtccccacactcagaaagactcagctcactcaatgagagaatgtgatttactttatagaacgtataatcaactttgttgaataatttgttctattaaggctgtctaaaatgtgatgtcttcatcatagtatgaagtgttgaaaattaataacgagcctagtttaggaaaaagctgcttaaaactgtggctctaagagagtaatcataaaataccttagataaaattgcactatggaattttcattgagtatgtttaaattattggcttgtctactaatacatctgcttcaaaatgaacatatttcataaaattggcatcaattttaatgacgctcctggtatggaacctcagatataccctattggagacaatcctttgatcataaattctccccaactataaatcattttatgtctttaaaaaaaaaaaaa

SEQ ID NO: 440 - protein, 485 aa, Homo sapien
MELEVRRVRQAFLSGRSRPLRFRLQQLEALRRMVQEREKDILTAIAADLCKSEFNVYSQEVITVLGEIDFMLENLPEWVTAKPVKKNVLTMLDEAYIQPQPLGVVLIIGAWNYPFVLTIQPLIGAIAAGNAVIIKPSELSENTAKILAKLLPQYLDQDLYIVINGGVEETTELLKQRFDHIFYTGNTAVGKIVMEAAAKHLTPVTLELGGKSPCYIDKDCDLDIVCRRITWGKYMNCGQTCIAPDYILCEASLQNQIVWKIKETVKEFYGENIKESPDYERIINLRHFKRILSLLEGQKIAFGGETDEATRYIAPTVLTDVDPKTKVMQEEIFGPILPIVPVKNVDEAINFINEREKPLALYVFSHNHKLIKRMIDETSSGGVTGNDVIMHFTLNSFPFGGVGSSGMGAYHGKHSFDTFSHQRPCLLKSLKREGANKLRYPPNSQSKVDWGKFFLLKRFNKEKLGLLLLTFLGIVAAVLVKAEYY

SEQ ID NO: 441 - DNA, 2613 bp, Homo sapien
gcgcgccttctccagtccgcggtgccatggcccccgcccgtctgttcgcgctgctgctgctcttcgtaggcggagtcgccgagtcgatccgagagactgaggtcatcgacccccaggacctcctagaaggccgatacttctccggagccctaccagacgatgaggatgtagtggggcccgggcaggaatctgatgactttgagctgtctggctctggagatctggatgacttggaagactccatgatcggccctgaagttgtccatcccttggtgcctctagataaccatatccctgagagggcagggtctgggagccaagtccccaccgaacccaagaaactagaggagaatgaggttatccccaagagaatctcacccgttgaagagagtgaggatgtgtccaacaaggtgtcaatgtccagcactgtgcagggcagcaacatctttgagagaacggaggtcctggcagctctgattgtgggtggcatcgtgggcatcctctttgccgtcttcctgatcctactgctcatgtaccgtatgaagaagaaggatgaaggcagctatgacctgggcaagaaacccatctacaagaaagcccccaccaatgagttctacgcgtgaagcttgcttgtgggcactggcttggactttagcggggagggaagccaggggattttgaagggtggacattagggtagggtgaggtcaacctaatactgacttgtcagtatctccagctctgattacctttgaagtgttcagaagagacattgtcttctactgttctgccaggttcttcttgagctttgggcctcagttgccctggcagaaaaatggattcaacttggcctttctgaaggcaagactgggattggatcacttcttaaacttccagttaagaatctaggtccgccctcaagcccatactgaccatgcctcatccagagctcctctgaagccagggggctaacggatgttgtgtggagtcctggctggaggtcctcccccagtggccttcctcccttcctttcacagccggtctctctgccaggaaatgggggaaggaactagaaccacctgcaccttgagatgtttctgtaaatgggtacttgtgatcacactacgggaatctctgtggtatatacctggggccattctaggctctttcaagtgacttttggaaatcaaccttttttatttgggggggaggatggggaaaagagctgagagtttatgctgaaatggatttatagaatatttgtaaatctatttttagtgtttgttcgtttttttaactgttcattcctttgtgcagagtgtatatctctgcctgggcaagagtgtggaggtgccgaggtgtcttcattctctcgcacatttccacagcacctgctaagtttgtatttaatggtttttgtttttgtttttgtttgtttcttgaaaatgagagaagagccggagagatgatttttattaattttttttttttttttttttttactatttatagctttagatagggcctcccttcccctcttctttctttgttctctttcattaaaccccttccccagttttttttttatactttaaaccccgctcctcatggccttggccctttctgaagctgcttcctcttataaaatagcttttgccgaaacatagtttttttttagcagatcccaaaatataatgaaggggatggtgggatatttgtgtctgtgttcttataatatattattattcttccttggttctagaaaaatagataaatatatttttttcaggaaatagtgtggtgtttccagtttgatgttgctgggtggttgagtgagtgaattttcatgtggctgggtgggtttttgcctttttctcttgccctgttcctggtgccttctgatggggctggaatagttgaggtggatggttctaccctttctgccttctgtttgggacccagctggtgttctttggtttgctttcttcaggctctagggctgtgctatccaatacagtaaccacatgcggctgtttaaagttaagccaattaaaatcacataagattaaaaattccttcctcagttgcactaaccacgtttctagaggcgtcactgtatgtagttcatggctactgtactgacagcgagagcatgtccatctgttggacagcactattctagagaactaaactggcttaacgagtcacagcctcagctgtgctgggacgacccttgtctccctgggtaggggggggggaatgggggagggctgatgaggccccagctggggcctgttgtctgggaccctccctctcctgagaggggaggcctggtggcttagcctgggcaggtcgtgtctcctcctgaccccagtggctgcggtgaggggaaccaccctcccttgctgcaccagtggccattagctcccgtcaccactgcaacccagggtcccagctggctgggtcctcttctgcccccagtgcccttccccttgggctgtgttggagtgagcacctcctctgtaggcacctctcacactgttgtctgttactgattttttttgataaaaagataataaaacctggtactttctaaaaaaaaaaaaaaaaaaa

SEQ ID NO: 442 - protein, 198 aa, Homo sapien
MAPARLFALLLLFVGGVAESIRETEVIDPQDLLEGRYFSGALPDDEDVVGPGQESDDFELSGSGDLDDLEDSMIGPEVVHPLVPLDNHIPERAGSGSQVPTEPKKLEENEVIPKRISPVEESEDVSNKVSMSSTVQGSNIFERTEVLAALIVGGIVGILFAVFLILLLMYRMKKKDEGSYDLGKKPIYKKAPTNEFYA

SEQ ID NO: 443 - DNA, 3904 bp, Homo sapien
  Unsure 2175-2501: Unknown base
cctggtcagcgtcccatcccggtcgggagttctctccaggcggcacgatgccgaggaaacagtgaccctgagcgaaccaagccgggcggcaggtgtggctttgatagctggtggtgccacttcctggccttggatgagccgtacgcctctgtaaacccaacttcctcacctttgaaacagctgcctggttcagcattaatgaagattagtcagtgacaggcctggtgtgctgagtccgcacatagaagaatcaaaaatgtccaaaatgtaactggagagaaagtgggcaacttttgggagtgacttttccacaggaacttctgcaatgtcccatcaacctctcagctgcctcactgaaaaggaggacagccccagtgaaagcacaggaaatggacccccccacctggcccacccaaacctggacacgtttaccccggaggagctgctgcagcagatgaaagagctcctgaccgagaaccaccagctgaaagaagccatgaagctaaataatcaagccatgaaagggagatttgaggagctttcggcctggacagagaaacagaaggaagaacgccagttttttgagatacagagcaaagaagcaaaagagcgtctaatggccttgagtcatgagaatgagaaattgaaggaagagcttggaaaactaaaagggaaatcagaaaggtcatctgaggaccccactgatgactccaggcttcccagggccgaagcggagcaggaaaaggaccagctcaggacccaggtggtgaggctacaagcagagaaggcagacctgttgggcatcgtgtctgaactgcagctcaagctgaactccagcggctcctcagaagattcctttgttgaaattaggatggctgaaggagaagcagaagggtcagtaaaagaaatcaagcatagtcctgggcccacgagaacagtctccactggcacggcattgtctaaatataggagcagatctgcagatggggccaagaattacttcgaacatgaggagttaactgtgagccagctcctgctgtgcctaagggaagggaatcagaaggtggagagacttgaagttgcactcaaggaggccaaagaaagagtttcagattttgaaaagaaaacaagtaatcgttctgagattgaaacccagacagaggggagcacagagaaagagaatgatgaagagaaaggcccggagactgttggaagcgaagtggaagcactgaacctccaggtgacatctctgtttaaggagcttcaagaggctcatacaaaactcagcgaagctgagctaatgaagaagagacttcaagaaaagtgtcaggcccttgaaaggaaaaattctgcaattccatcagagttgaatgaaaagcaagagcttgtttatactaacaaaaagttagagctacaagtggaaagcatgctatcagaaatcaaaatggaacaggctaaaacagaggatgaaaagtccaaattaactgtgctacagatgacacacaacaagcttcttcaagaacataataatgcattgaaaacaattgaggaactaacaagaaaagagtcagaaaaagtggacagggcagtgctgaaggaactgagtgaaaaactggaactggcagagaaggctctggcttccaaacagctgcaaatggatgaaatgaagcaaaccattgccaagcaggaagaggacctggaaaccatgaccatcctcagggctcagatggaagtttactgttctgattttcatgctgaaagagcagcgagagagaaaattcatgaggaaaaggagcaactggcattgcagctggcagttctgctgaaagagaatgatgctttcgaagacggaggcaggcagtccttgatggagatgcagagtcgtcatggggcgagaacaagtgactctgaccagcaggcttaccttgttcaaagaggagctgaggacagggactggcggcaacagcggaatattccgattcattcctgccccaagtgtggagaggttctgcctgacatagacacgttacagattcacgtgatggattgcatcatttaagtgttgatgtatcacctccccaaaactgttggtaaatgtcagattttttcctccaagagttgtgcttttgtgttatttgttttcactcaaatattttgcctcattattcttgtttnnnnnnnnnnnnnnnnnnnnnnnnnnnnnnnnnnnnnnnnnnnnnnnnnnnnnnnnnnnnnnnnnnnnnnnnnnnnnnnnnnnnnnnnnnnnnnnnnnnnnnnnnnnnnnnnnnnnnnnnnnnnnnnnnnnnnnnnnnnnnnnnnnnnnnnnnnnnnnnnnnnnnnnnnnnnnnnnnnnnnnnnnnnnnnnnnnnnnnnnnnnnnnnnnnnnnnnnnnnnnnnnnnnnnnnnnnnnnnnnnnnnnnnnnnnnnnnnnnnnnnnnnnnnnnnnnnnnnnnnnnnnnnnnnnnnnnnnnnnnnnnnnnnnnnnnnnnnnnnnnnnnnnnagaaggaaggaaggagaagaaaaggtacctgttctacgtagaacacctttggtggagttccatcaactcgcaaagtagaatccttacctactactcttctgataataattttaatattttttatgtttggttgatgcgagcagctgcactgctcatgcagttagctagcatgtgacatcatgtgacaaagttcatgtaattagatggaagaaacctcactgattaattttaagaaccttttagggatgcaggaacaatgaagtggccacagtatgtgctgtttttgaagcatttttaaaaacgaattgtagttgtttttcttcatttaaaatggatctgttggaggttatgtgtgtatgttgtagttttattgcagccacaataattttaccaaagttttcacataggcagttagcctttacttaatatcaagacaagtgaaaaaatattggcatcgatgaaaccgataacattggcctcattggatttctttacccattcacagtgtaaagaagttaccttcatgctttcattgtacctgcaggcctgtgggcttgtacagtagataattaatttctaaaaagaacagctgcctattttcttcctaggttaggttatatcttcataatcacaagaattagtgatggcaaaataaaattttgcttatgaatcttttacattgtttatatatgattaatatcatcatatatattttctgtattaagctcatttggcttcatttaagctgtatacttagtcatatatctttcattagttctatggatatgagcagatccctttactggagcccagtatgtgctgtgtgagttagaagtcattcttgctgagaaggtgaataggtagggatttgccttgttttgtaagtctacaatttgccaagagtaaataacactggaccagctgtaaaagtaaacagtgtgtttatgcattgagatactaaagcatttaagaaaaaattaaaagatctcttttgtttaaatttgtcttaagaatctctcctagacaaacttgactatacacacacacacttcaataagaatcaaaatagttcattatatcttcatgccaagagaacacatgatacaaattcaacagtaatttcaattaaacgagtcccctaccacacctcagggagaatatttgttaaagacatttctaaagtaactctgacatttttacttttctttgttatggtttctaatgtaaatttttttcccttatcatcttatactggaggaaatatatttctatagtctcctaaacagagaaggaaaccaaatggtttcacatttaaagttattggacataatccttttactttgttcaagtaaaaatattcagcaaagccagactgaaataataacatgaatgggcttattaaa

SEQ ID NO: 444 - protein, 577 aa, Homo sapien
MSHQPLSCLTEKEDSPSESTGNGPPHLAHPNLDTFTPEELLQQMKELLTENHQLKEAMKLNNQAMKGRFEELSAWTEKQKEERQFFEIQSKEAKERLMALSHENEKLKEELGKLKGKSERSSEDPTDDSRLPRAEAEQEKDQLRTQVVRLQAEKADLLGIVSELQLKLNSSGSSEDSFVEIRMAEGEAEGSVKEIKHSPGPTRTVSTGTALSKYRSRSADGAKNYFEHEELTVSQLLLCLREGNQKVERLEVALKEAKERVSDFEKKTSNRSEIETQTEGSTEKENDEEKGPETVGSEVEALNLQVTSLFKELQEAHTKLSEAELMKKRLQEKCQALERKNSAIPSELNEKQELVYTNKKLELQVESMLSEIKMEQAKTEDEKSKLTVLQMTHNKLLQEHNNALKTIEELTRKESEKVDRAVLKELSEKLELAEKALASKQLQMDEMKQTIAKQEEDLETMTILRAQMEVYCSDFHAERAAREKIHEEKEQLALQLAVLLKENDAFEDGGRQSLMEMQSRHGARTSDSDQQAYLVQRGAEDRDWRQQRNIPIHSCPKCGEVLPDIDTLQIHVMDCII

SEQ ID NO: 445 - DNA, 2327 bp, Homo sapien
ggcacgaggggctgccccctccgccaccgccgccgcccgccggcaggttccctggtcagcgtcccatcccggtcgggagttctctccaggcggcacgatgccgaggaaacagtgaccctgagcgaagccaagccgggcggcaggaacttctgcaatgtcccatcaacctctcagctgcctcactgaaaaggaggacagccccagtgaaagcacaggaaatggacccccccacctggcccacccaaacctggacacgtttaccccggaggagctgctgcagcagatgaaagagctcctgaccgagaaccaccagctgaaagaagccatgaagctaaataatcaagccatgaaagggagatttgaggagctttcggcctggacagagaaacagaaggaagaacgccagttttttgagatacagagcaaagaagcaaaagagcgtctaatggccttgagtcatgagaatgagaaattgaaggaagagcttggaaaactaaaagggaaatcagaaaggtcatctgaggaccccactgatgactccaggcttcccagggccgaagcggagcaggaaaaggaccagctcaggacccaggtggtgaggctacaagcagagaaggcagacctgttgggcatcgtgtctgaactgcagctcaagctgaactccagcggctcctcagaagattcctttgttgaaattaggatggctgaaggagaagcagaagggtcagtaaaagaaatcaagcatagtcctgggcccacgagaacagtctccactggcacggcattgtctaaatataggagcagatctgcagatggggccaagaattacttcgaacatgaggagttaactgtgagccagctcctgctgtgcctaagggaagggaatcagaaggtggagagacttgaagttgcactcaaggaggccaaagaaagagtttcagattttgaaaagaaaacaagtaatcgttctgagattgaaacccagacagaggggagcacagagaaagagaatgatgaagagaaaggcccggagactgttggaagcgaagtggaagcactgaacctccaggtgacatctctgtttaaggagcttcaagaggctcatacaaaactcagcgaagctgagctaatgaagaagagacttcaagaaaagtgtcaggcccttgaaaggaaaaattctgcaattccatcagagttgaatgaaaagcaagagcttgtttatactaacaaaaagttagagctacaagtggaaagcatgctatcagaaatcaaaatggaacaggctaaaacagaggatgaaaagtccaaattaactgtgctacagatgacacacaacaagcttcttcaagaacataataatgcattgaaaacaattgaggaactaacaagaaaagagtcagaaaaagtggacagggcagtgctgaaggaactgagtgaaaaactggaactggcagagaaggctctggcttccaaacagctgcaaatggatgaaatgaagcaaaccattgccaagcaggaagaggacctggaaaccatgaccatcctcagggctcagatggaagtttactgttctgattttcatgctgaaagagcagcgagagagaaaattcatgaggaaaaggagcaactggcattgcagctggcagttctgctgaaagagaatgatgctttcgaagacggaggcaggcagtccttgatggagatgcagagtcgtcatggggcgagaacaagtgactctgaccagcaggcttaccttgttcaaagaggagctgaggacagggactggcggcaacagcggaatattccgattcattcctgccccaagtgtggagaggttctgcctgacatagacacgttacagattcacgtgatggattgcatcatttaagtgttgatgtatcacctccccaaaactgttggtaaatgtcagattttttcctccaagagttgtgcttttgtgttatttgttttcactcaaatattttgcctcattattcttgttttaaaagaaagaaaacaggccgggcacagtggctcatgcctgtaatcccagcactttgggaggtcgaggtgggtggatcacttggggtcagggtttgagaccagcctggccaacatggcggaaccctgtctctaccaaaattacaaaaattagccgagcatggtggcgcatgcctgtagtcgcagctactcgcgaggttgaggcaggagaattgcttgaacccaggaagtggcagttgcagtgagccgagacgacaccactgcactccagcctgggtgacagagggagactctgtctcgaaagaaaaaaaaaaaaaaaaaaaaaa

SEQ ID NO: 446 - protein, 577 aa, Homo sapien
MSHQPLSCLTEKEDSPSESTGNGPPHLAHPNLDTFTPEELLQQMKELLTENHQLKEAMKLNNQAMKGRFEELSAWTEKQKEERQFFEIQSKEAKERLMALSHENEKLKEELGKLKGKSERSSEDPTDDSRLPRAEAEQEKDQLRTQVVRLQAEKADLLGIVSELQLKLNSSGSSEDSFVEIRMAEGEAEGSVKEIKHSPGSTRTVSTGTALSHYRRRSADGAKNYFEHEELTVSQLLLCLREGNQKVERLEVALKEAKERVSDFEKKTSNRSEIETQTEGSTEKENDEEKGPETVGSEVEALNLQVTSLFKELQEAHTKLSEAELMKKRLQEKCQALERKNSAIPSELNEKQELVYPNKKLELQVESMLSEIKMEQAKTEDEKSKLTVLQMTHNKLLQEHNNALKTIEELTRKESEKVDRAVLKELSEKLELAEKALASKQLQMDEMKQTIAKQEEDLETMTILRAQMEVYCSDFHAERAAREKIHEEKEQLALQLAVLLKENDAFEDGGRQSLMEMQSRHGARTSDSDQQAYLVQRGAEDRDWRQQRNIPIHSCPKCGEVLPDIDTLQIHVMDCII

SEQ ID NO: 447 - DNA, 1811 bp, Homo sapien
ggtttgtgtagagaggcgtgcagagcccgttgtccggagtgcacctgctgcctgttctgtccctcccgggagcccccgccgctgtcgccgtcgagtcgccatggaagtgcagaaagaggcacagcgcatcatgaccctgtcggtgtggaagatgtatcactcccgcatgcagcgcggtggcctgcggctgcaccggagtctgcagctgtcgctggtcatgcgcagcgcccgggagctctacctctcggccaaggtggaggccctcgagcccgaggtgtcgttgccggccgccctcccctctgaccctcgcctgcacccgccccgagaagccgagtccacggccgagacagcgacccccgacggtgagcacccgtttccggagccaatggacacgcaggaggcgccgacagccgaggagacctccgcctgctgtgccccgcgccccgccaaagtcagccgcaaacgacgcagcagcagcctgagcgacggcggggacgttggactggtcccgagcaagaaagcccgtctggaagaaaaggaagaagaggagggagcgtcatccgaagtcgccgatcgcctgcagccccctccgggccaagcggagggcgcctttcccaacctggcccgcgtcctgcagaggcgcttctccggcctcctgaactgcagccccgcggcccctccgacggcgccgcccgcgtgcgaggcaaagcccgcttgccgcccggcggacagcatgctcaacgtgctcgtgcgggccgtggtggccttctgaggaccccgagcggcgctgccggagcccagagcgcgcgtcgaaccgtcggcccgagggcgcagacctgaggcgaggccacccccctccatcctgggggaagcgcccgcgaaaaccgtggagagaagccgccgcccgggctgctgagaggcccggagaggactctgtccccggggagccatcgccttcagtgtgcagggacggcaccgaggagtctgagccgggcgcgggcgccttccgcagagacctgcgcccacaggtgctgtcttagtggactgggacgtgaacctttcgctctccttctggactgggagaagggaggcttgggtgttgtgttttttgttttgtttgtttgtttgtttttaaagatctcctcagggtcggacttcattttgtactgtgggctgtgctggccctttcaaggtttttcaagagttggttttgcgtttccaacctcggagaattccaggcactccccttccccctccgctgacatacttgtataagcggtcatcgttgcgtcatggggcaggcgtggggagcttcctgtcgccttggctgggtgtgggcctggaggaaggtcctggggcgtgcactcgcctgggcagtggggaggagagtggcctgagttacttcacccccgcgtgctgctggttaatgtcccgcgtctctgcaccttcgggtgggagcggggactgatctactttcacattctcaagtttttctcatctgcattagaggtccccagtaggttcccaggttccagcgtgcccctccctcagacacacggacacaatcagccgagaagttcctggtctgaatcacgagaatgtggaggggtggggggtgtcagtggaaaggcataaggctgagctgagaccagttgctggtgaaactgggccaatctggggaggggaacatccttgccagggagtttctgagggtctgctttgtttacctttcgtgcggtggattctttttaactccgtctacctggcgttttgttagaaatgtcagataggaaaataaaaaccatttgagt

SEQ ID NO: 448 - protein, 223 aa, Homo sapien
MEVQKEAQRIMTLSVWKMYHSRMQRGGLRLHRSLQLSLVMRSARELYLSAKVEALEPEVSLPAALPSDPRLHPPREAESTAETATPDGEHPFPEPMDTQEAPTAEETSACCAPRPAKVSRKRRSSSLSDGGDVGLVPSKKARLEEKEEEEGASSEVADRLQPPPGQAEGAFPNLARVLQRRFSGLLNCSPAAPPTAPPACEAKPACRPADSMLNVLVRAVVAF

SEQ ID NO: 449 - DNA, 1632 bp, Homo sapien
gccggccgaacccagacccgaggttttagaagcagagtcaggcgaagctgggccagaaccgcgacctccgcaaccttgagcggcatccgtggagtgcgcctgcgcagctacgaccgcagcaggaaagcgccgccggccaggcccagctgtggccggacagggactggaagagaggacgcggtcgagtaggtgtgcaccagccctggcaacgagagcgtctaccccgaactctgctggccttgaggtggggaagccggggagggcagttgaggaccccgcggaggcgcgtgactggttgagcgggcaggccagcctccgagccgggtggacacaggttttaaaacatgaatcctacactcatccttgctgccttttgcctgggaattgcctcagctactctaacatttgatcacagtttagaggcacagtggaccaagtggaaggcgatgcacaacagattatacggcatgaatgaagaaggatggaggagagcagtgtgggagaagaacatgaagatgattgaactgcacaatcaggaatacagggaagggaaacacagcttcacaatggccatgaacgcctttggagacatgaccagtgaagaattcaggcaggtgatgaatggctttcaaaaccgtaagcccaggaaggggaaagtgttccaggaacctctgttttatgaggcccccagatctgtggattggagagagaaaggctacgtgactcctgtgaagaatcagggtcagtgtggttcttgttgggcttttagtgctactggtgctcttgaaggacagatgttccggaaaactgggaggcttatctcactgagtgagcagaatctggtagactgctctgggcctcaaggcaatgaaggctgcaatggtggcctaatggattatgctttccagtatgttcaggataatggaggcctggactctgaggaatcctatccatatgaggcaacagaagaatcctgtaagtacaatcccaagtattctgttgctaatgacaccggctttgtggacatccctaagcaggagaaggccctgatgaaggcagttgcaactgtggggcccatttctgttgctattgatgcaggtcatgagtccttcctgttctataaagaaggcatttattttgagccagactgtagcagtgaagacatggatcatggtgtgctggtggttggctacggatttgaaagcacagaatcagataacaataaatattggctggtgaagaacagctggggtgaagaatggggcatgggtggctacgtaaagatggccaaagaccggagaaaccattgtggaattgcctcagcagccagctaccccactgtgtgagctggtggacggtgatgaggaaggacttgactggggatggcgcatgcatgggaggaattcatcttcagtctaccagcccccgctgtgtcggatacacactcgaatcattgaagatccgagtgtgatttgaattctgtgatattttcacactggtaaatgttacctctattttaattactgctataaataggtttatattattgattcacttactgactttgcattttcgtttttaaaaggatgtataaatttttacctgtttaaataaaatttaatttcaaatgta

SEQ ID NO: 450 - protein, 333 aa, Homo sapien [sequence omitted]

SEQ ID NO: 451 - DNA, 3379 bp, Homo sapien
aattccgcggaatcatcggaatccttcaccatggcatccagcccggcccagcgtcggcgaggcaatgatcctctcacctccagccctggccgaagctcccggcgtactgatgccctcacctccagccctggccgtgaccttccaccatttgaggatgagtccgaggggctcctaggcacagaggggcccctggaggaagaagaggatggagaggagctcattggagatggcatggaaagggactaccgcgccatcccagagctggacgcctatgaggccgagggactggctctggatgatgaggacgtagaggagctgacggccagtcgaagggaggcagcagacgggccatgcggcacggtgaccgggagctggccggggctgggcgcatgcgccgtgggctcctgtatgacagcgatgaggaggacgaggagcgccctgcccgcaagcgccgccagtggagccggcacggaggacggcgaggaggacgagcagatgattgagagcatcgagaacctggaggatctcaaaggccactctgtgcgcgagtgggtgagcatggcgggcccccggctggagatccaccaccgcttcaagaacttcctgcgcactcacgtcgacagccacggccacaacgtcttcaaggagcgcatcagcgacatgtgcaaagagaaccgtgagagcctggtggtgaactatgaggacttggcagccagggagcacgtgctggcctacttcctgcctgaggcaccggcggagctgctgcagatctttgatgaggctgccctggaggtggtactggccatgtaccccaagtacgaccgcatcaccaaccacatccatgtccgcatctcccacctgcctctggtggaggagctgcgctcgctgaggcagctgcatctgaaccagctgatccgcaccagtggggtggtgaccagctgcactggcgtcctgccccagctcagcatggtcaagtacaactgcaacaagtgcaatttcgtcctgggtcctttctgccagtcccagaaccaggaggtgaaaccaggctcctgtcctgagtgccagtcggccggcccctttgaggtcaacatggaggagaccatctatcagaactaccagcgtatccgaatccaggagagtccaggcaaagtggcggctcggcggctgccccgctccaaggacgccattctcctcgcagatctggtggacagctgcaacgcaggagacgagatagagctgactggcatctatcacaacaactatgatggctccctcaacactgccaatggcttccctgtctttgccactgtcatcctagccaaccacgtggccaagaaggacaacaaggttgctgtaggggaactgaccgatgaagatgtgaagatgatcactagcctctccaaggatcagcagatcggagagaagatctttgccagcattgctccttccatctatggtcatgaagacatcaagagaggccctgctctggccctgttcggaggggagcccaaaaacccaggtggcaagcacaaggtacgtggtgatatcaacgtgctcttgtgcggagaccctggcacagcgaagtcgcagtttctcaagtatattgagaaagtgtccagccgagccatcttcaccactggccagggggcgtcggctgtggccgtcacggcgtatgtccagcggcaccctgtcagcagggagtggaccttggaggctggggccctggttctggctgaccgaggagtgtgtctcattgatgaatttgacaagatgaatgaccaggacagaaccagcatccatgaggccatggagcaacagagcatctccatctcgaaggctggcatcgtcacctccctgcaggctcgctgcacggtcattgctgccgccaaccccataggagggcgctacgacccctcgctgactttctctgagaacgtggacctcacagagcccatcatctcacgctttgacatcctgtgtgtggtgagggacaccgtggacccagtccaggacgagatgctggcccgcttcgtggtgggcagccacgtcagacaccaccccagcaacaaggaggaggaggggctggccaatggcagcgctgctgagcccgccatgcccaacacgtatggcgtggagcccctgccccaggaggtcctgaagaagtacatcatctacgccaaggagagggtccacccgaagctcaaccagatggaccaggacaaggtggccaagatgtacagtgacctgaggaaagaatctatggcgacaggcagcatccccattacggtgcggcacatcgagtccatgagtcatggcggaggcccacgcgcgcatccatctgcgggactatgtgatcgaagacgacgtcaacatggccatccgcgtgatgctggagagcttcatagacacacagaagttcagcgtcatcgcagcatgcgcaagacttttgcccgctacctttcattccggcgtgacaacaatgagctgttgctcttcatactgaagcagttagtggcagagcaggtgacatatcagcgcaaccgctttggggcccagcaggacactattgaggtccctgagaaggacttggtggataaggctcgtcagatcaacatccacaacctctctgcattttatgacagtgagctcttcaggatgaacaagttcagccacgacctgaaaaggaaaatgatcctgcagcagttctgaggccctatgccatccataaggattccttgggattctggtttggggtggtcagtgccctctgtgctttatggacacaaaaccagagcacttgatgaactcggggtactagggtcagggcttatagcaggatgtctggctgcacctggcatgactgtttgtttctccaagcctgctttgtgcttctcacctttgggtgggatgccttgccagtgtgtcttacttggttgctgaacatcttgccacctccgagtgctttgtctccactcagtaccttggatcagagctgctgagttcaggatgcctgcgtgtggtttaggtgttagccttcttacatggatgtcaggagagctgctgccctcttggcgtgagttgcgtattcaggctgcttttgctcgctttggccagagagctggttgaagatgtttgtaatcgttttcagtctcctgcaggtttctgtgcccctgtggtggaagaggcacgacagtgccagcgcagcgttctgggctcctcagtcgcaggggtgggatgtgagtcatgcggattatccactcgccacagttatcagctgccattgctccctgtctgtttccccactctcttatttgtgcattcggtttggtttctgtagttttaatttttaataaagttgaataaaatataaaaaaaaaaa

SEQ ID NO: 452 - protein, 892 aa, Homo sapien
MASSPAQRRRGNDPLTSSPGRSSRRTDALTSSPGRDLPPFEDESEGLLGTEGPLEEEEDGEELIGDGMERDYRAIPELDAYEAEGLALDDEDVEELTASRREAADGPCGTVTGSWPGLGACAVGSCMTAMRRTRSALPASAASGAGTEDGEEDEQMIESIENLEDLKGHSVREWVSMAGPRLEIHHRFKNFLRTHVDSHGHNVFKERISDMCKENRESLVVNYEDLAAREHVLAYFLPEAPAELLQIFDEAALEVVLAMYPKYDRITNHIHVRISHLPLVEELRSLRQLHLNQLIRTSGVVTSCTGVLPQLSMVKYNCNKCNFVLGPFCQSQNQEVKPGSCPECQSAGPFEVNMEETIYQNYQRIRIQESPGKVAARRLPRSKDAILLADLVDSCNAGDEIELTGIYHNNYDGSLNTANGFPVFATVILANHVAKKDNKVAVGELTDEDVKMITSLSKDQQIGEKIFASIAPSIYGHEDIKRGPALALFGGEPKNPGGKHKVRGDINVLLCGDPGTAKSQFLKYIEKVSSRAIFTTGQGASAVAVTAYVQRHPVSREWTLEAGALVLADRGVCLIDEFDKMNDQDRTSIHEAMEQQSISISKAGIVTSLQARCTVIAAANPIGGRYDPSLTFSENVDLTEPIISRFDILCVVRDTVDPVQDEMLARFVVGSHVRHHPSNKEEEGLANGSAAEPAMPNTYGVEPLPQEVLKKYIIYAKERVHPKLNQMDQDKVAKMYSDLRKESMATGSIPITVRHIESMSHGGGPRAHPSAGLCDRRRRQHGHPRDAGELHRHTEVQRHRSMRKTFARYLSFRRDNNELLLFILKQLVAEQVTYQRNRFGAQQDTIEVPEKDLVDKARQINIHNLSAFYDSELFRMNKFSHDLKRKMILQQF

SEQ ID NO: 453 - DNA, 1888 bp, Homo sapien
ccggtgccgggcgaacatggcggcggccaccggaccctcgttttggctggggaatgaaaccctgaaggtgccgctggcgctctttgccttgaaccggcagcgcctgtgtgagcggctgcggaagaaccctgctgtgcaggccggctccatcgtggtcctgcagggcggggaggagactcagcgctactgcaccgacaccggggtcctcttcctccaggagtccttctttcactgggcgttcggtgtcactgagccaggctgctatggtgtcatcgatgttgacactgggaagtcgaccctgtttgtgcccaggcttcctgccagccatgccacctggatgggaaagatccattccaaggagcacttcaaggagaagtatgccgtggacgacgtccagtacgtagatgagattgccagcgtcctgacgtcacagaagccctctgtcctcctcactttgcgtggcgtcaacacggacagcggcagtgtctgcagggaggcctcctttgacggcatcagcaagttcgaagtcaacaataccattcttcacccagagatcgttgagagccgagtgtttaagacggatatggagctggaggttctgcgctataccaataaaatctccagcgaggcccaccgtgaggtaatgaaggctgtaaaagtgggaatgaaagaatatgggttggaaagcctcttcgagcactactgctactcccggggcggcatgcgccacagctcctacacctgcatctgcggcagtggtgagaactcagccgtgctacactacggacacgccggagctcccaacgaccgaacgatccagaatggggatatgtgcctgttcgacatgggcggtgagtattactctgtcgcttccgacatcacctgctcctttccccgcaacggcaagttcactgcagaccagaaggccgtctatgaggcagtgctgctgagctcccgtgccgtcatgggtgccatgaagccaggtgactggtggcctgacatcgaccgcctggctgaccgcatccacctggaggagctggcccacatgggcatcctgagcggcagcgtggacgccatggtccaggctcacctgggggccgtgtttatgcctcacgggcttggccacttcctgggcattgacgtgcacgacgtgggaggctacccagagggcgtggagcgcatcgacgagcccggcctgcggagcctgcgcactgcacggcacctgcagccaggcatggtgctcaccgtggagccgggcatctacttcatcgaccacctcctggatgaggccctggcggacccggcccgcgcctccttccttaaccgcgaggtcctgcagcgctttcgcggttttggcggggtccgcatcgaggaggacgtcgtggtgatcgacagcggcatagagctgctgacctgcgtgccccgcactgtggaagagattgaagcatgcatggcaggctgtgacaaggcctttacccccttctctggccccaagtagagccagccagaaatcccagcgcacctgggggcctggccttgcaacctcttttcgtgatgggcagcctgctggtcagcactccagtagcgagagacggcacccagaatcagatcccagcttcggcatttgatcagaccaaacagtgctgtttcccggggaggaaacacttttttaattacccttttgcaggcaccacctttaatctgttttataccttgcttattaaatgagcgacttaaaatgattgaaaataatgctgtcctttagtagcaagtaaaatgtgtcttgctgtcatttatattccttttcccaggaaagaagcatttctgatactttctgtcaaaaatcaatatgcagaatggcatttgcaataaaaggtttcctaaaatg

SEQ ID NO: 454 - protein, 493 aa, Homo sapien
MAAATGPSFWLGNETLKVPLALFALNRQRLCERLRKNPAVQAGSIVVLQGGEETQRYCTDTGVLFLQESFFHWAFGVTEPGCYGVIDVDTGKSTLFVPRLPASHATWMGKIHSKEHFKEKYAVDDVQYVDEIASVLTSQKPSVLLTLRGVNTDSGSVCREASFDGISKFEVNNTILHPEIVESRVFKTDMELEVLRYTNKISSEAHREVMKAVKVGMKEYGLESLFEHYCYSRGGMRHSSYTCICGSGENSAVLHYGHAGAPNDRTIQNGDMCLFDMGGEYYSVASDITCSFPRNGKFTADQKAVYEAVLLSSRAVMGAMKPGDWWPDIDRLADRIHLEELAHMGILSGSVDAMVQAHLGAVFMPHGLGHFLGIDVHDVGGYPEGVERIDEPGLRSLRTARHLQPGMVLTVEPGIYFIDHLLDEALADPARASFLNREVLQRFRGFGGVRIEEDVVVIDSGIELLTCVPRTVEEIEACMAGCDKAFTPFSGPK

SEQ ID NO: 455 - DNA, 3910 bp, Homo sapien
gtgataacccccgtgaggacaggccatggctacgtatacgagtacccatccagataccaaaaggacgtctatgatatccctccttctcataccactcaaggggtatacgacatccctccctcatcagcaaaaggccctgtgttttcagttccagtgggagagataaaacctcaaggggtgtatgacatcccgcctacaaaaggggtatatgccattccgccctctgcttgccgggatgaagcagggcttagggaaaaagactatgacttcccccctcccatgagacaagctggaaggccggacctcagaccggagggggtttatgacattcctccaacctgcaccaagccagcagggaaggaccttcatgtaaaatacaactgtgacattccaggagctgcagaaccggtggctcgaaggcaccagagcctgtccccgaatcacccacccccgcaactcggacagtcagtgggctctcagaacgacgcatatgatgtcccccgaggcgttcagtttcttgagccaccagcagaaaccagtgagaaagcaaacccccaggaaagggatggtgtttatgatgtccctctgcataacccgccagatgctaaaggctctcgggacttggtggatgggatcaaccgattgtctttctccagtacaggcagcacccggagtaacatgtccacgtcttccacctcctccaaggagtcctcactgtcagcctccccagctcaggacaaaaggctcttcctggatccagacacagctattgagagacttcagcggctccagcaggcccttgagatgggtgtctccagcctaatggcactggtcactaccgactggcggtgttacggatatatggaaagacacatcaatgaaatacgcacagcagtggacaaggtggagctgttcctgaaggagtacctccactttgtcaagggagctgttgcaaatgctgcctgcctcccggaactcatcctccacaacaagatgaagcgggagctgcaacgagttgaagactcccaccagatcctgagtcaaaccagccatgacttaaatgagtgcagctggtccctgaatatcttggccatcaacaagccccagaacaagtgtgacgatctggaccggtttgtgatggtggcaaagacggtgcccgatgacgccaagcagctcaccacaaccatcaacaccaacgcagaggccctcttcagacccggccctggcagcttgcatctgaagaatgggccggagagcatcatgaactcaacggagtacccacacggtggctcccagggacagctgctgcatcctggtgaccacaaggcccaggcccacaacaaggcactgcccccaggcctgagcaaggagcaggcccctgactgtagcagcagtgatggttctgagaggagctggatggatgactacgattacgtccacctacagggtaaggaggagtttgagaggcaacagaaagagctattggaaaaagagaatatcatgaaacagaacaagatgcagctggaacatcatcagctgagccagttccagctgttggaacaagagattacaaagcccgtggagaatgacatctcgaagtggaagccctctcagagcctacccaccacaaacagtggcgtgagtgctcaggatcggcagttgctgtgcttctactatgaccaatgtgagacccatttcatttcccttctcaacgccattgacgcactcttcagttgtgtcagctcagcccagcccccgcgaatcttcgtggcacacagcaagtttgtcatcctcagtgcacacaaactggtgttcattggagacacgctgacacggcaggtgactgcccaggacattcgcaacaaagtcatgaactccagcaaccagctctgcgagcagctcaagaccatagtcatggcaaccaagatggccgccctccattaccccagcaccacggccctgcaggaaatggtgcaccaagtgacagacctttctagaaatgcccagctgttcaagcgctctttgctggagatggcaacgttctgagaagaaaaaaaagaggaaggggactgcgttaacggttactaaggaaaactggaaatactgtctggtttttgtaaatgttatctatttttgtagatattttatataaaaatgaaatattttaacattttatgggtcagtcaactttcagaaattcagggagctggagagggaaatctttttttttccccctgagtggttcttatgtatacatagaagtatctgagacataaactgtacagaaaacttgtccacgtgcttttgtatgcccatgtattcatgtttgtttgtagatgtttgtctgatgcatttcattaaaaaaaaaaccatgaattacgaagcaccttagtaagcaccttctaatgctgcattttttttgttgttgttaaaaacataccagctggttataatattgttctccacgtccttgtgatgattctgagcctggcactcccaaatctgggaagcatagtttatttgcaagtgttcaccttccaaatcatgaggcatagcatgacttattcttgtttggaaaactcttttcaaaactgaccatcttaaacacatgatggccaagtgcccaaaagccctcttgcggagcaaatttcagaatatatatgtggatccaagctctgatagttcaggtgctggagggaagagagacctgtgtgtttagaggccaggaccacagttaggattgggttgtttcaatactgagagacagctacaataaaaggagagcaattgcctccctggggctgttcaatcttctgcatttgtgagtggttcagtcatgaggttttccaaaagatgtttttagagttgtaaaaaccatatttgcagcaaagatttacaaaggcgtatcagactatgattgttcaccaaaataggggaatggtttgatccgccagttgcaagtagaggcctttctgactcttaatattcactttggtgctactacccccattacctgagggaaactggccaggtccttgatcatggaactatagagctaccaggacatatcctgctctctaagggaatttattgctatcttgcaccttctttaaaactcacatatgcagacctgacactcaagagtggctagctacacagagtccatctaatttttgcaacttcctgtggccagtgtgtataaccccttccactatctcacagatagtcacagcgtccattccatagtctgtctcctcacatctgttagtattgacacagcacagacaccacaagccatcaggttcttcatggggcaggtgaaatacttctaccccatgggtaaatgtattcacatattaccaagagaagaagcacattatctatgatcttttggcccagttcttatttagcatttttattccagcctacttggaaacatgtttttatttgcaatatatgcctgactgaattaagcttgcttgttttaaacaaccaaatcattggaacagaaaaggatttaaaaaacaagaatgcatgatctcagagtgattaaaaaaaaatcagtggaaataaatgatcatagaaggtgcttttcaaaacaactgctattataattctcaaagtcctactctgccaaaagaagattaaaagtcatacattacattacaaggaaatgttcatgtgggaagagggttgctgaaaatcaacaacgcttgaagttaaaaagtgtgtctttgtagatttcattgtataatgtgtatttcttaggagatggctgacttgattgatctacgctaagtggagacatttcacatttttaaaaccaaatgttcaatctgtattactctttgccgtcttgtatgtagaggctatttttaaatcattaaatttttagatctctgttttcata

SEQ ID NO: 456 - protein, 681 aa, Homo sapien
VITPVRTGHGYVYEYPSRYQKDVYDIPPSHTTQGVYDIPPSSAKGPVFSVPVGEIKPQGVYDIPPTKGVYAIPPSACRDEAGLREKDYDFPPPMRQAGRPDLRPEGVYDIPPTCTKPAGKDLHVKYNCDIPGAAEPVARRHQSLSPNHPPPQLGQSVGSQNDAYDVPRGVQFLEPPAETSEKANPQERDGVYDVPLHNPPDAKGSRDLVDGINRLSFSSTGSTRSNMSTSSTSSKESSLSASPAQDKRLFLDPDTAIERLQRLQQALEMGVSSLMALVTTDWRCYGYMERHINEIRTAVDKVELFLKEYLHFVKGAVANAACLPELILHNKMKRELQRVEDSHQILSQTSHDLNECSWSLNILAINKPQNKCDDLDRFVMVAKTVPDDAKQLTTTINTNAEALFRPGPGSLHLKNGPESIMNSTEYPHGGSQGQLLHPGDHKAQAHNKALPPGLSKEQAPDCSSSDGSERSWMDDYDYVHLQGKEEFERQQKELLEKENIMKQNKMQLEHHQLSQFQLLEQEITKPVENDISKWKPSQSLPTTNSGVSAQDRQLLCFYYDQCETHFISLLNAIDALFSCVSSAQPPRIFVAHSKFVILSAHKLVFIGDTLTRQVTAQDIRNKVMNSSNQLCEQLKTIVMATKMAALHYPSTTALQEMVHQVTDLSRNAQLFKRSLLEMATF

SEQ ID NO: 457 - DNA, 2318 bp, Homo sapien
cgcagggaccgtgctccgccgtctccgccgcatcttccaccctcgccgccgccgcagctccccgcgctcgtgccaccgccgccgcgtccaccctcagcgccaccgccatgcgggagatcgtgcacctgcaggccggccagtgcggcaaccagatcggggccaagttttgggaggttatcagtgacgaacatggcatcgaccccacaggcacataccatggggacagtgacctgcaactggagaggatcaacgtgtactacaacgaggccacaggaggaaattatgtccccagagcggtgctggtggacctggaacccggcaccatggactctgtccgttctggccccttcggtcagatctttcggccggacaacttcgtgtttggccaatccggagccggcaacaactgggcaaaggggcactacacggagggcgcagagctggtggacgctgtcctggacgtagtccggaaggaggccgagagctgcgactgccttcagggcttccagctgacccactcgctggggggtggcacggggtccggaatgggcacgctgctcatcagtaagatccgcgaggagttcccagaccgcatcatgaacaccttcagcgtggtgccctcgcccaaagtgtcagacacggtggtggagccctacaacgccacgctgtctgtgcaccagctggtggagaatacggatgagacctactgcatcgacaacgaggcactctacgacatctgtttccgcaccctcaagctgaccacccccacctacggggacctcaaccacctggtgtcggccaccatgagcggggtcaccacctgcctgcgcttcccgggccagctgaacgccgacctgcgcaagctggccgtcaacatggttccctttcctcgcctgcacttcttcatgcccggcttcgcacccctgaccagccggggcagccagcagtaccgggccctgacggtgcccgagctcacccagcagatgttcgatgccaagaacatgatggcggcgtgcgacccgcgccacggccgctacctgaccgtggccgccgtgttccggggccgcatgtccatgaaggaggtggacgagcagatgctgagcgtgcagagcaagaacagcagctacttcgtggagtggatccccaacaacgtgaagacggccgtgtgcgacatcccgccccgcggcctgaagatggccgcgaccttcatcggcaacagcacggccatccaggagctgttcaagcgcatctccgagcagttcacggccatgttccggcgcaaggccttcttgcactggtacacgggcgagggcatggacgagatggagttcaccgaggccgagagcaacatgaatgacctggtatctgagtaccagcagtaccaggacgccacggccgaggagggcgagttcgaggaggaggcggaggaggaggtggcctaggctgctcccatcgcttcccacctgtcccctcgaggcttctgacctttgatccgctaggccccccatctctgaaccctagagccccgctttccctccaaggctgactccccgctgaccctaacaatacctttggagctcgctttacctctggctacttcatctccgaccctggctcccctttgagccctaatttatctttaacccccttgagctcttccaaccttgacattcccaggaggagccccgcttcaccccttctgactctggaaaccgcacctttaactttgcagaccttccttcacccctgacttctgcttcacctttgacctctgccccccatgaatcccattttacctctagacctataagttctggtttatgtttgacccctccctctgagctgcacttcaccgctgaccttgcctcacctttaaccccccacctgagccccagctcctacctctgaccccaacttctctttgatctctgaatcccctctgactccaacttctctttcaccctctatgagtcccattttacttctacacctgcaagtcctggtttatattggacccctccctccgagctgcagttcacctttgaccttgcctcacctttcaccccccaccccccacagcgtcagctcctacctctgaccccagcttctctctgattcccacaggccccatgcatcctccctgcctcactcccctcagcccctgccgaccttagcttatctgggagagaaacaaggcctggtgcctgtgaggaagagaggtcacccctaccctccctccccgcttccctgcctcaccctcaataaataaattaattgttgtcatggaaaaaaaaaaaaaaaaaaaaaaaaaaaaaaaa

SEQ ID NO: 458 - protein, 444 aa, Homo sapien
MREIVHLQAGQCGNQIGAKFWEVISDEHGIDPTGTYHGDSDLQLERINVYYNEATGGNYVPRAVLVDLEPGTMDSVRSGPFGQIFRPDNFVFGQSGAGNNWAKGHYTEGAELVDAVLDVVRKEAESCDCLQGFQLTHSLGGGTGSGMGTLLISKIREEFPDRIMNTFSVVPSPKVSDTVVEPYNATLSVHQLVENTDETYCIDNEALYDICFRTLKLTTPTYGDLNHLVSATMSGVTTCLRFPGQLNADLRKLAVNMVPFPRLHFFMPGFAPLTSRGSQQYRALTVPELTQQMFDAKNMMAACDPRHGRYLTVAAVFRGRMSMKEVDEQMLSVQSKNSSYFVEWIPNNVKTAVCDIPPRGLKMAATFIGNSTAIQELFKRISEQFTAMFRRKAFLHWYTGEGMDEMEFTEAESNMNDLVSEYQQYQDATAEEGEFEEEAEEEVA

SEQ ID NO: 459 - DNA, 8694 bp, Homo sapien
tgaggaatcaacagccgccatcttgtcgcggacccgaccggggcttcgagcgcgatctactcggccccgccggtcccgggccccacaaccgcccgcgctcgctcctctccctcgcagccggcagggcccccgacccccgtccgggccctcgccggcccggccgcccgtgcccggggctgttttcgcgagcaggtgaaaatggctgagaacttgctggacggaccgcccaaccccaaaagagccaaactcagctcgcccggtttctcggcgaatgacagcacagattttggatcattgtttgacttggaaaatgatcttcctgatgagctgatacccaatggaggagaattaggccttttaaacagtgggaaccttgttccagatgctgcttccaaacataaacaactgtcggagcttctacgaggaggcagcggctctagtatcaacccaggaataggaaatgtgagcgccagcagccccgtgcagcagggcctgggtggccaggctcaagggcagccgaacagtgctaacatggccagcctcagtgccatgggcaagagccctctgagccagggagattcttcagcccccagcctgcctaaacaggcagccagcacctctgggcccacccccgctgcctcccaagcactgaatccgcaagcacaaaagcaagtggggctggcgactagcagccctgccacgtcacagactggacctggtatctgcatgaatgctaactttaaccagacccacccaggcctcctcaatagtaactctggccatagcttaattaatcaggcttcacaagggcaggcgcaagtcatgaatggatctcttggggctgctggcagaggaaggggagctggaatgccgtaccctactccagccatgcagggcgcctcgagcagcgtgctggctgagaccctaacgcaggtttccccgcaaatgactggtcacgcgggactgaacaccgcacaggcaggaggcatggccaagatgggaataactgggaacacaagtccatttggacagccctttagtcaagctggagggcagccaatgggagccactggagtgaacccccagttagccagcaaacagagcatggtcaacagtttgcccaccttccctacagatatcaagaatacttcagtcaccaacgtgccaaatatgtctcagatgcaaacatcagtgggaattgtacccacacaagcaattgcaacaggccccactgcagatcctgaaaaacgcaaactgatacagcagcagctggttctactgcttcatgctcataagtgtcagagacgagagcaagcaaacggagaggttcgggcctgctcgctcccgcattgtcgaaccatgaaaaacgttttgaatcacatgacgcattgtcaggctgggaaagcctgccaagttgcccattgtgcatcttcacgacaaatcatctctcattggaagaactgcacacgacatgactgtcctgtttgcctccctttgaaaaatgccagtgacaagcgaaaccaacaaaccatcctggggtctccagctagtggaattcaaaacacaattggttctgttggcacagggcaacagaatgccacttctttaagtaacccaaatcccatagaccccagctccatgcagcgagcctatgctgctctcggactcccctacatgaaccagccccagacgcagctgcagcctcaggttcctggccagcaaccagcacagcctcaaacccaccagcagatgaggactctcaaccccctgggaaataatccaatgaacattccagcaggaggaataacaacagatcagcagcccccaaacttgatttcagaatcagctcttccgacttccctgggggccacaaacccactgatgaacgatggctccaactctggtaacattggaaccctcagcactataccaacagcagctcctccttctagcaccggtgtaaggaaaggctggcacgaacatgtcactcaggacctgcggagccatctagtgcataaactcgtccaagccatcttcccaacacctgatcccgcagctctaaaggatcgccgcatggaaaacctggtagcctatgctaagaaagtggaaggggacatgtacgagtctgccaacagcagggatgaatattatcacttattagcagagaaaatctacaagatacaaaaagaactagaagaaaaacggaggtcgcgtttacataaacaaggcatcttggggaaccagccagccttaccagccccgggggctcagccccctgtgattccacaggcacaacctgtgagacctccaaatggacccctgtccctgccagtgaatcgcatgcaagtttctcaagggatgaattcatttaaccccatgtccttggggaacgtccagttgccacaagcacccatgggacctcgtgcagcctccccaatgaaccactctgtccagatgaacagcatgggctcagtgccagggatggccatttctccttcccgaatgcctcagcctccgaacatgatgggtgcacacaccaacaacatgatggcccaggcgcccgctcagagccagtttctgccacagaaccagttcccgtcatccagcggggcgatgagtgtgggcatggggcagccgccagcccaaacaggcgtgtcacagggacaggtgcctggtgctgctcttcctaaccctctcaacatgctggggcctcaggccagccagctaccttgccctccagtgacacagtcaccactgcacccaacaccgcctcctgcttccacggctgctggcatgccatctctccagcacacgacaccacctgggatgactcctccccagccagcagctcccactcagccatcaactcctgtgtcgtcttccgggcagactcccaccccgactcctggctcagtgcccagtgctacccaaacccagagcacccctacagtccaggcagcagcccaggcccaggtgaccccgcagcctcaaaccccagttcagcccccgtctgtggctacccctcagtcatcgcagcaacagccgacgcctgtgcacgcccagcctcctggcacaccgctttcccaggcagcagccagcattgataacagagtccctaccccctcctcggtggccagcgcagaaaccaattcccagcagccaggacctgacgtacctgtgctggaaatgaagacggagacccaagcagaggacactgagcccgatcctggtgaatccaaaggggagcccaggtctgagatgatggaggaggatttgcaaggagcttcccaagttaaagaagaaacagacatagcagagcagaaatcagaaccaatggaagtggatgaaaagaaacctgaagtgaaagtagaagttaaagaggaagaagagagtagcagtaacggcacagcctctcagtcaacatctccttcgcagccgcgcaaaaaaatctttaaaccagaggagttacgccaggccctcatgccaaccctagaagcactgtatcgacaggacccagagtcattacctttccggcagcctgtagatccccagctcctcggaattccagactattttgacatcgtaaagaatcccatggacctctccaccatcaagcggaagctggacacagggcaataccaagagccctggcagtacgtggacgacgtctggctcatgttcaacaatgcctggctctataatcgcaagacatcccgagtctataagttttgcagtaagcttgcagaggtctttgagcaggaaattgaccctgtcatgcagtcccttggatattgctgtggacgcaagtatgagttttccccacagactttgtgctgctatgggaagcagctgtgtaccattcctcgcgatgctgcctactacagctatcagaataggtatcatttctgtgagaagtgtttcacagagatccagggcgagaatgtgaccctgggtgacgacccttcacagccccagacgacaatttcaaaggatcagtttgaaaagaagaaaaatgataccttagaccccgaacctttcgttgattgcaaggagtgtggccggaagatgcatcagatttgcgttctgcactatgacatcatttggccttcaggttttgtgtgcgacaactgcttgaagaaaactggcagacctcgaaaagaaaacaaattcagtgctaagaggctgcagaccacaagactgggaaaccacttggaagaccgagtgaacaaatttttgcggcgccagaatcaccctgaagccggggaggtttttgtccgagtggtggccagctcagacaagacggtggaggtcaagcccgggatgaagtcacggtttgtggattctggggaaatgtctgaatctttcccatatcgaaccaaagctctgtttgcttttgaggaaattgacggcgtggatgtctgcttttttggaatgcacgtccaagaatacggctctgattgcccccctccaaacacgaggcgtgtgtacatttcttatctggatagtattcatttcttccggccacgttgcctccgcacagccgtttaccatgagatccttattggatatttagagtatgtgaagaaattagggtatgtgacagggcacatctgggcctgtcctccaagtgaaggagatgattacatcttccattgccacccacctgatcaaaaaatacccaagccaaaacgactgcaggagtggtacaaaaagatgctggacaaggcgtttgcagagcggatcatccatgactacaaggatattttcaaacaagcaactgaagacaggctcaccagtgccaaggaactgccctattttgaaggtgatttctggcccaatgtgttagaagagagcattaaggaactagaacaagaagaagaggagaggaaaaaggaagagagcactgcagccagtgaaaccactgagggcagtcagggcgacagcaagaatgccaagaagaagaacaacaagaaaaccaacaagaacaaaagcagcatcagccgcgccaacaagaagaagcccagcatgcccaacgtgtccaatgacctgtcccagaagctgtatgccaccatggagaagcacaaggaggtcttcttcgtgatccacctgcacgctgggcctgtcatcaacaccctgccccccatcgtcgaccccgaccccctgctcagctgtgacctcatggatgggcgcgacgccttcctcaccctcgccagagacaagcactgggagttctcctccttgcgccgctccaagtggtccacgctctgcatgctggtggagctgcacacccagggccaggaccgctttgtctacacctgcaacgagtgcaagcaccacgtggagacgcgctggcactgcactgtgtgcgaggactacgacctctgcatcaactgctataacacgaagagccatgcccataagatggtgaagtgggggctgggcctggatgacgagggcagcagccagggcgagccacagtcaaagagcccccaggagtcacgccgggtgagcatccagcgctgcatccagtcgctggtgcacgcgtgccagtgccgcaacgccaactgctcgctgccatcctgccagaagatgaagcgggtggtgcagcacaccaagggctgcaaacgcaagaccaacgggggctgcccggtgtgcaagcagctcatcgccctctgctgctaccacgccaagcactgccaagaaaacaaatgccccgtgcccttctgcctcaacatcaaacacaagctccgccagcagcagatccagcaccgcctgcagcaggcccagctcatgcgccggcggatggccaccatgaacacccgcaacgtgcctcagcagagtctgccttctcctacctcagcaccgcccgggacccccacacagcagcccagcacaccccagacgccgcagccccctgcccagccccaaccctcacccgtgagcatgtcaccagctggcttccccagcgtggcccggactcagccccccaccacggtgtccacagggaagcctaccagccaggtgccggcccccccacccccggcccagccccctcctgcagcggtggaagcggctcggcagatcgagcgtgaggcccagcagcagcagcacctgtaccgggtgaacatcaacaacagcatgcccccaggacgcacgggcatggggaccccggggagccagatggcccccgtgagcctgaatgtgccccgacccaaccaggtgagcgggcccgtcatgcccagcatgcctcccgggcagtggcagcaggcgccccttccccagcagcagcccatgccaggcttgcccaggcctgtgatatccatgcaggcccaggcggccgtggctgggccccggatgcccagcgtgcagccacccaggagcatctcacccagcgctctgcaagacctgctgcggaccctgaagtcgcccagctcccctcagcagcaacagcaggtgctgaacattctcaaatcaaacccgcagctaatggcagctttcatcaaacagcgcacagccaagtacgtggccaatcagcccggcatgcagccccagcctggcctccagtcccagcccggcatgcaaccccagcctggcatgcaccagcagcccagcctgcagaacctgaatgccatgcaggctggcgtgccgcggcccggtgtgcctccacagcagcaggcgatgggaggcctgaacccccagggccaggccttgaacatcatgaacccaggacacaaccccaacatggcgagtatgaatccacagtaccgagaaatgttacggaggcagctgctgcagcagcagcagcaacagcagcagcaacaacagcagcaacagcagcagcagcaagggagtgccggcatggctgggggcatggcggggcacggccagttccagcagcctcaaggacccggaggctacccaccggccatgcagcagcagcagcgcatgcagcagcatctccccctccagggcagctccatgggccagatggcggctcagatgggacagcttggccagatggggcagccggggctgggggcagacagcacccccaacatccagcaagccctgcagcagcggattctgcagcaacagcagatgaagcagcagattgggtccccaggccagccgaaccccatgagcccccagcaacacatgctctcaggacagccacaggcctcgcatctccctggccagcagatcgccacgtcccttagtaaccaggtgcggtctccagcccctgtccagtctccacggccccagtcccagcctccacattccagcccgtcaccacggatacagccccagccttcgccacaccacgtctcaccccagactggttccccccaccccggactcgcagtcaccatggccagctccatagatcagggacacttggggaaccccgaacagagtgcaatgctcccccagctgaacacccccagcaggagtgcgctgtccagcgaactgtccctggtcggggacaccacgggggacacgctagagaagtttgtggagggcttgtagcattgtgagagcatcaccttttccctttcatgttcttggaccttttgtactgaaaatccaggcatctaggttctttttattcctagatggaactgcgacttccgagccatggaagggtggattgatgtttaaagaaacaatacaaagaatatatttttttgttaaaaaccagttgatttaaatatctggtctctctctttggtttttttttggcgggggggtggggggggttcttttttttccgttttgtttttgtttggggggaggggggttttgtttggattctttttgtcgtcattgctggtgactcatgcctttttttaacgggaaaaacaagttcattatattcatattttttatttgtattttcaagactttaaacatttatgtttaaaagtaagaagaaaaataatattcagaactgattcctgaaataatgcaagcttataatgtatcccgataactttgtgatgtttcgggaagatttttttctatagtgaactctgtgggcgtctcccagtattaccctggatgataggaattgactccggcgtgcacacacgtacacacccacacacatctatctatacataatggctgaagccaaacttgtcttgcagatgtagaaattgttgctttgtttctctgataaaactggttttagacaaaaaatagggatgatcactcttagaccatgctaatgttactagagaagaagccttcttttctttcttctatgtgaaacttgaaatgaggaaaagcaattctagtgtaaatcatgcaagcgctctaattcctataaatacgaaactcgagaagattcaatcactgtatagaatggtaaaataccaactcatttcttatatcatattgttaaataaactgtgtgcaacagacaaaaagggtggtccttcttgaattcatgtacatggtattaacacttagtgttcggggttttttgttatgaaaatgctgttttcaacattgtatttggactatgcatgtgttttttccccattgtatataaagtaccgcttaaaattgatataaattactgaggtttttaacatgtattctgttctttaagatcccctgtaagaatgtttaaggtttttatttatttatatatattttttggtctgttctttgtaaaaaaaaaaaaaaaaa

SEQ ID NO: 460 - protein, 2000 aa, Homo sapien
MAENLLDGPPNPKRAKLSSPGFSANDSTDFGSLFDLENDLPDELIPNGGELGLLNSGNLVPDAASKHKQLSELLRGGSGSSINPGIGNVSASSPVQQGLGGQAQGQPNSANMASLSAMGKSPLSQGDSSAPSLPKQAASTSGPTPAASQALNPQAQKQVGLATSSPATSQTGPGICMNANFNQTHPGLLNSNSGHSLINQASQGQAQVMNGSLGAAGRGRGAGMPYPTPAMQGASSSVLAETLTQVSPQMTGHAGLNTAQAGGMAKMGITGNTSPFGQPFSQAGGQPMGATGVNPQLASKQSMVNSLPTFPTDIKNTSVTNVPNMSQMQTSVGIVPTQAIATGPTADPEKRKLIQQQLVLLLHAHKCQRREQANGEVRACSLPHCRTMKNVLNHMTHCQAGKACQVAHCASSRQIISHWKNCTRHDCPVCLPLKNASDKRNQQTILGSPASGIQNTIGSVGTGQQNATSLSNPNPIDPSSMQRAYAALGLPYMNQPQTQLQPQVPGQQPAQPQTHQQMRTLNPLGNNPMNIPAGGITTDQQPPNLISESALPTSLGATNPLMNDGSNSGNIGTLSTIPTAAPPSSTGVRKGWHEHVTQDLRSHLVHKLVQAIFPTPDPAALKDRRMENLVAYAKKVEGDMYESANSRDEYYHLLAEKIYKIQKELEEKRRSRLHKQGILGNQPALPAPGAQPPVIPQAQPVRPPNGPLSLPVNRMQVSQGMNSFNPMSLGNVQLPQAPMGPRAASPMNHSVQMNSMGSVPGMAISPSRMPQPPNMMGAHTNNMMAQAPAQSQFLPQNQFPSSSGAMSVGMGQPPAQTGVSQGQVPGAALPNPLNMLGPQASQLPCPPVTQSPLHPTPPPASTAAGMPSLQHTTPPGMTPPQPAAPTQPSTPVSSSGQTPTPTPGSVPSATQTQSTPTVQAAAQAQVTPQPQTPVQPPSVATPQSSQQQPTPVHAQPPGTPLSQAAASIDNRVPTPSSVASAETNSQQPGPDVPVLEMKTETQAEDTEPDPGESKGEPRSEMMEEDLQGASQVKEETDIAEQKSEPMEVDEKKPEVKVEVKEEEESSSNGTASQSTSPSQPRKKIFKPEELRQALMPTLEALYRQDPESLPFRQPVDPQLLGIPDYFDIVKNPMDLSTIKRKLDTGQYQEPWQYVDDVWLMFNNAWLYNRKTSRVYKFCSKLAEVFEQEIDPVMQSLGYCCGRKYEFSPQTLCCYGKQLCTIPRDAAYYSYQNRYHFCEKCFTEIQGENVTLGDDPSQPQTTISKDQFEKKKNDTLDPEPFVDCKECGRKMHQICVLHYDIIWPSGFVCDNCLKKTGRPRKENKFSAKRLQTTRLGNHLEDRVNKFLRRQNHPEAGEVFVRVVASSDKTVEVKPGMKSRFVDSGEMSESFPYRTKALFAFEEIDGVDVCFFGMHVQEYGSDCPPPNTRRVYISYLDSIHFFRPRCLRTAVYHEILIGYLEYVKKLGYVTGHIWACPPSEGDDYIFHCHPPDQKIPKPKRLQEWYKKMLDKAFAERIIHDYKDIFKQATEDRLTSAKELPYFEGDFWPNVLEESIKELEQEEEERKKEESTAASETTEGSQGDSKNAKKKNNKKTNKNKSSISRANKKKPSMPNVSNDLSQKLYATMEKHKEVFFVIHLHAGPVINTLPPIVDPDPLLSCDLMDGRDAFLTLARDKHWEFSSLRRSKWSTLCMLVELHTQGQDRFVYTCNECKHHVETRWHCTVCEDYDLCINCYNTKSHAHKMVKWGLGLDDEGSSQGEPQSKSPQESRRVSIQRCIQSLVHACQCRNANCSLPSCQKMKRVVQHTKGCKRKTNGGCPVCKQLIALCCYHAKHCQENKCPVPFCLNIKHKLRQQQIQHRLQQAQLMRRRMATMNTRNVPQQSLPSPTSAPPGTPTQQPSTPQTPQPPAQPQPSPVSMSPAGFPSVARTQPPTTVSTGKPTSQVPAPPPPAQPPPAAVEAARQIEREAQQQQHLYRVNINNSMPPGRTGMGTPGSQMAPVSL

SEQ ID NO: 461 - DNA, 7979 bp, Homo sapien
gaggatgcagagtgggagaccttaaaaccgtctgatctggctgctaaagcgagtgtctgacgaccacccattaacaccagcgagtagcgtttgctcacggctttaggataagaagcctggaatggtcccccctccgccgggagaagaaagccagacggtcatccttccacctggctggcagagctacctgtcgcctcagggccggcggtactatgtcaacacgaccaccaatgagaccacctgggaacgtcccagcagttctcctgggattccagccagccctggctctcacaggagctctctgcctccaacagtgaatggataccacgcatcagggaccccagcgcaccctccagagactgcccacatgagtgtccgaaaatccaccggtgattcccagaacctgggatcctcatcgccaagcaaaaagcagagcaaggaaaacaccatcacaataaactgtgtgacgttccctcacccagacacgatgccggaacagcagctgctgaaaccaaccgagtggagctactgcgactacttctgggctgataagaaggacccccaaggcaacggcacggtggctgggtttgaactactgctccagaaacagctgaagggcaaacaaatgcagaaggaaatgtcagaattcatccgggaaaggataaagattgaagaagactatgcgaagaacttagctaagctctctcagaactccttggcttcacaggaggaaggctccttgggagaggcgtgggcccaggtgaagaagagcctggcggacgaagcagaagttcacctcaagttctctgccaagcttcacagcgaggtggagaagcccctgatgaacttccgtgagaacttcaagaaagacatgaagaagtgcgaccaccacattgccgaccttcgcaagcagctcgccagccgctatgcctcggtggagaaggcccggaaagccctcacagagcggcagagagacctggagatgaagacccagcagctggagatcaagctgagcaacaagacagaggaggacatcaagaaggcgcggagaaagtccacacaggctggagacgacctcatgcgctgtgtggatctctacaaccaggcccagtccaaatggtttgaagagatggtgaccaccacattggagctagagcggctggaggtggagagggtagagatgatccggcagcacctgtgccagtacacgcagctgcggcatgaaacagacatgttcaaccaaagcacagtcgagcccgtggatcagctgcttcgaaaagtggacccggccaaagacagggagctgtgggtcagagagcacaagacgggcaacatccgccctgtggacatggagatctagatgggcctgtgcagcttcggggggtcctgctggggaggggggctgggctcccaccatggggcccatgccgagtggatgccccccaccctctctcctgggccactgaggagaggggagagagctggtgattccagaagggtgacccggacagcctagctgggggctcccccatattcccaggcccagaagacagacccacagccctgcccttgtctctgaggctgaagaccccctgactcccatgctgtgcttgccgctctgaaacaaacagaggctggaactttgtggtccttgccgagttttgtaggggtcactgtcacatgcttgtgccctggaagccccaaggctcttcctccagctggctcccttgtctccagggctttggaggatcagggtagggagggctctgtctctaagccaggtgtcaggatcagaatcatgggtagaaggtgccattcagctcacagccgcacccagaatcctttgcagccctccttctttatttttttcccattgcattctgggagtccacatctggctttctcagccactgttcatcaccaggggttttaggaggaaggcttggctcctgtcttcccagacccaccatgcctggagaggtcaggatggaactacctcattcggcaaattagccccaaattgagcgctgaatcgtgtcccatgagatcaggcgccatctgtaaagtctcctctggaaatgccaatccatccttcccccagctgcttcctcggggaggcccctgcccccaccctgccagcccttcccagtctcattagaggaagctttccaaagttctcagttatcaagacctcatccagctcgtccaaaggcttcagggatggaaacaaaccagctcgtctcagaggccagcaagctggggcctgtccgccacggtgccctgtgcacctttgggctgccctggcccccactctcccgggccgcccaccacaggctcttaatggggccgggtcagtcctacatgtgagatgggttagggcaagtctttgccatcccccagatggctctgtcttcttgtgtatggcagggctgggactgctgtcccttgtacagttttctgtcactggtgggcactggacaggcatagcagactctcttgtggccacactaggttgtcgcctttcaggcagtgtcccgccacctttgcttcccgctccttctggacattccagagccctgcaccaaacccttacttggtgtctgcacctcctttccctctctccatcttccaatccctggaaaagtctggtctgagtgtgacttgggaagctttcagtgctgctgtttggcccagctcattactttctccctttctctaccacagcaaacacattctccaccatgtcagtctaaagagtctaaaggggccgggagaagcatgagcgaggggcagattctagtcgggagcccatgccctggaaatccatctttcttcatctttcccattgaccactttgggtttgacctgcacatctgcagtgagggcagaattcaacaagcacaactcactggtctttcagtcaacgtgctagaaaccgatgacttattaatctctaattttttggcgcctctttcattgaatgagaattgctttcgtatagttcacattagaaaaatgcctaatatactaaagtaaaccaaacgttgtcacttttctcttgttcttgaaacattgcaaccaaaaaggtcagcacaaaggccttcacctacgtgaagacctcctggtaggatctgtccatgggatggagaaccactctgtccagatctggggttgggtcatgacaccagctaccaattttagaatattatttcttggtttctttatgaaaaatgggtgctagtggtaattgctttgtggcttagtaaactactctgtggatgatttccaaacattcaaagccaatagccttgttattaacaagatattttgagtacaatatggctcattgacttttccattacatctgaggattccagagtcctctgttcatccctgggatagagtgagccctcttgcgtcttccagggtagctcaggttggcccagtttgggccagtccatttttggaggtcactctttcccccctcatcccctcacctccttctctttacccccttcacgtacttcctttctttcttccctctgttattcattcatcaagcaggttaaagccattgtgctaagatctaatctgaggacactataatggccctgtcgtcagggaagcccgtgatcgctcgttttcaggggtcttaccggtcagcaaccttggcattgatacataggcactctacagaatttaagttttcagaggtaagtctgttgttctgattaatctgcattcattcagcgaatgctcaagacaagccaggcatgctgagaagcggcgctctagttgtatgtaagatgggcattcctctgctctcctctattctccatgtcgactgagaagagtataataagaacattgtaccctctccacacttaaccctctgggattctttattataatataaaccaccgtcgtgaggcatttacctgttggatggaaggtagacagcaacaagattttaatcacctggtcaccagaccctcacggcccatatccaattcgaatttcagaaatttctctgtttgctttaaataactctttacaaataagggtcgggcacggtggctcacgcctgtaatcccagctctttgggaggccgaggtgggcagatcacgaggtcaggagatcgagaccatcctggctaacatggtgaaaccccgtctctgctaaaaatacaaaaaattagccagatgtggtggtgcacacctgtagtcccaactattcggcaggctgaggcagtagaatcgcttgaacctgggaggcggagattgcagtgaaccaagatcgggccactgcactccagcttgggtgacagagcaagactccatctcaaaaaaattataaataactctttgcaaataggaaagtgaagctcaagggtaaccagtgaggctatgaaattgccagtgaattaagaccagggctagagtcaacagtccagaacccctatccgtatgaacaggggcccgtttctggttgaaatcaaggttaggatgcaactgagaaaataaaagactgcactttggagaggcaagcacgctatccgggttgttgttttgttttatgtcttggtgcttaggtgaggacttagctgggtttattcaaagtgggcgggtctgggctattcttgagaatgtcccttccatttctgagaacaagtcagccccttctacctgcctccacccaggagactgatgcacaagatctgtttgtgaaagcctgatttaaaaagaaaaaaaaaattccttaagccaaatggtgttccaagttggttgctgtgacaacctccaggaagagccacttgttaccctctattctttctagtgctttcagtcagtggcaacacataggccccttggaccgtggggatggcggccctgagattctgtcagtgggaccaccctgggcctcctttctacctccactcagcaccctgttggccaaggagaatttctgcggtgggaggcagtgctctgctagtcaggattgataaacagctgggcacaccgaaacagtgtaccaacgaattcaccaaccaggggtttctttccctaccctttgtgaaaaccaatcaattactagatgagtggatggatgcagaaaaatctgggctgagccaaagtcccttttggaaatacaagccataacattcgaaggacatcagcgaccttggcttgtttaggtgattttacttccagctgcaggtagtcttgacaaggagtgtttaaacagaaggctcaagatgcattccttgtgtaggtcggagagagcacttctaatgttaagtggggtacagatcagctgcccccccacgtagcctggacatcgtcttatccccataatccttgccatccctacaaggcccatcgccaccaccttttcccaggtttattgaggtatgattgacatccagtaaaattcaccctttggaaatatacagctctgtgaattttgacaaatttagtgtcttgtgaccatcaccaagatcaacctgtttttaaccctccaaaaaattcccttctcctgccctctttccctggcaaccctgattgattatctgatcctataattttgccttttctagaatgtcatataaatggagtcacactgatgtcgccttttgagtctggcatctttccctcagcttaatgcttttgagtcattcatgatgtgtgcgtgtggtttgttccttctccttgccgggaagtatttcattgcatgggcgtactactctgcttctttatttttacactgagcctttcgccctggaagttcttggcccagggtcttcaacttgtttgcacgaccacttccagcttgctgcttccttcagttccccaggctcctcctccaaatgccagctgtgcccacaagctgttcttagggctcacactcgccttttggcgcgtggtgggtttttggtagtgcagaaagaatccagggatgggaggggaagggacggatgggtgctcaattgctgctcacgtctgctgcaacctgaagcttgcatctcagccagcagatctgctcccttctgggacccaggcttcagtgtcacacggtccttggctatgtattgggcgttggaggctttgaaaggcgagcagaagcagcatggacaagaaggctggggctggccctggggctcatcatgatgctttcctggatctgttgcttcatctgcaagctgagggtgtttgttctagatgagtgtctcaggccaccggcaactgcatgtacctcctccctttctcatttccaatgatgtaccctgtacacgtgttcatgctgtgtctggctctcatctgcacaatcgtgcatagaattgcctcaagtcctggtgagagagatgccgtggtacttttccatttagattcaaatggagctaaaattaagagttttatgagctgttaagaatgaggtagtttctcctaggaccccccaaagacagtgcaagtaatgaccgtttggatctcattcgtcgatctttgatagtatgttctggagtctactccccaggagccaggacaggcgtgaagatggagtccttgtcgcagctggagccttgcctagctggtgatcacacagcctggcctgtacctgcaccccactggatggtggtacatggtggcagggacaggaccacacccagttaaggccagaccaggctgagtgtgacccctgaggtaaacactccactaagctgtgtcttgttcatgccccctgctcagtgaaaggtgagtcccgagaccagttgggtacctctctatgcgaaccagagacatttctggatccaggccaggtgaagattagggccaggaagcctgagcccccggggcctcaaggtagggagccgaagaggctgccaggactctgctgggttgaaatttgccggggaggactcttgtctccccctcaggagtatttttgttgaggctttcctggaggtgaagaagcaattcccattgcagcaggttagagcgagaatcagacagagggcaaaaaccaattcgcttctccccacgttctaaatgctggggcatggctgtcaggagggcttcctgggaggtgtctctgggggtggggtgaggttggggcgatggcctttggagattgcgtgtggtgttcaggactgttccttggtgtttgagggaaactttagtgggattgcagtggaatgtaaggtcagggcacgtgggtgctctctcggggtggggtgactgggagacctagagggaaagcctgctatgcagggggagagcacaggactggccctgctctgcggcctcctttgtcccataacctgaagttaagtcacatcccctgtcgggacctccgtgcactcatctgtcaagtgggggcgcttcccttccagcatcacctgcagcagacgggctctcgggagtcgtgggttccaggcagctgtgtggacccagggacagacattcaaagggacgccagccatccttagtgacaggggccccaacttagcatcccttcccttccgttaggaaggagatgaccggaagcaaccccttcacagacacgagcacatcggcaaaccctatgaaagtggaattttctaacaaaataaacttgcttgtttgatctgttttctgtaacttttgctaaatactttatacatttttcatgttaaagagccgtgtctcccgccagcactcctcaccccggtatgaatgtgtttcctccacattgtatatccttccaccctctggctgcctagatcagtaaataaaattgatgtaatataatttataagtaacactgttgaaaccctgatcccagtggaggctgtaacccacctgcccccgcaccacccccctgacccctgttaccgcatttgtgtgtattaatgctgaagaattaaatgtttaaagagtttaaattttgaaggcgtttgctatatacagttgtcctgcattattataaagagttttcaggaagtt

SEQ ID NO: 462 - protein, 412 aa, Homo sapien
MVPPPPGEESQTVILPPGWQSYLSPQGRRYYVNTTTNETTWERPSSSPGIPASPGSHRSSLPPTVNGYHASGTPAHPPETAHMSVRKSTGDSQNLGSSSPSKKQSKENTITINCVTFPHPDTMPEQQLLKPTEWSYCDYFWADKKDPQGNGTVAGFELLLQKQLKGKQMQKEMSEFIRERIKIEEDYAKNLAKLSQNSLASQEEGSLGEAWAQVKKSLADEAEVHLKFSAKLHSEVEKPLMNFRENFKKDMKKCDHHIADLRKQLASRYASVEKARKALTERQRDLEMKTQQLEIKLSNKTEEDIKKARRKSTQAGDDLMRCVDLYNQAQSKWFEEMVTTTLELERLEVERVEMIRQHLCQYTQLRHETDMFNQSTVEPVDQLLRKVDPAKDRELWVREHKTGNIRPVDMEI

SEQ ID NO: 463 - DNA, 3410 bp, Homo sapien
tgcgacgtgactggctagctgcgtgggtactggaacaagcaaacgaggcagcgagcgaaggacgggagccggaccctgggccccgtggaactccagcctgcgccaccacgtcacgcacacgctcggcgctgcgatccgcgcatataacgatatttggatttgacctgcattttggaatttatctacacttaaaatgccaccagcagttggaggtccagttggatacacccccccagatggaggctggggctgggcagtggtaattggagctttcatttccatcggcttctcttatgcatttcccaaatcaattactgtcttcttcaaagagattgaaggtatattccatgccaccaccagcgaagtgtcatggatatcctccataatgttggctgtcatgtatggtggaggtcctatcagcagtatcctggtgaataaatatggaagtcgtatagtcatgattgttggtggctgcttgtcaggctgtggcttgattgcagcttctttctgtaacaccgtacagcaactatacgtctgtattggagtcattggaggtcttgggcttgccttcaacttgaatccagctctgaccatgattggcaagtatttctacaagaggcgaccattggccaacggactggccatggcaggcagccctgtgttcctctgtactctggcccccctcaatcaggttttcttcggtatctttggatggagaggaagctttctaattcttgggggcttgctactaaactgctgtgttgctggagccctcatgcgaccaatcgggcccaagccaaccaaggcagggaaagataagtctaaagcatcccttgagaaagctggaaaatctggtgtgaaaaaagatctgcatgatgcaaatacagatcttattggaagacaccctaaacaagagaaacgatcagtcttccaaacaattaatcagttcctggacttaaccctattcacccacagaggctttttgctatacctctctggaaatgtgatcatgttttttggactctttgcacctttggtgtttcttagtagttatgggaagagtcagcattattctagtgagaagtctgccttccttctttccattctggcttttgttgacatggtagcccgaccatctatgggacttgtagccaacacaaagccaataagacctcgaattcagtatttctttgcggcttccgttgttgcaaatggagtgtgtcatatgctagcacctttatccactacctatgttggattctgtgtctatgcgggattctttggatttgccttcgggtggctcagctccgtattgtttgaaacattgatggaccttgttggaccccagaggttctccagcgctgtgggattggtgaccattgtggaatgctgtcctgtcctcctggggccaccacttttaggtcggctcaatgacatgtatggagactacaaatacacatactgggcatgtggcgtcgtcctaattatttcaggtatctatctcttcattggcatgggcatcaattatcgacttttggcaaaagaacagaaagcaaacgagcagaaaaaggaaagtaaagaggaagagaccagtatagatgttgctgggaagccaaatgaagttaccaaagcagcagaatctccggaccagaaagacacagaaggagggcccaaggaggaggaaagtccagtctgaatccatggggctgaagggtaaattgagcagttcatgacccaggatatctgaaaatattctactggcctgtaatctaccagtggtgctcaatgcaaatagtagacatttgtgtggaaatcataccagttgttcattgatgggatttttgtttgactccttaccaatagcctgaatttgaggagggaatgattggtagcaaaggatgggggaaagaagtaggttctgttttgttttgttttaatcttagcttttaatagtgtcataaagattataatatgtgccttaagttttagtctttagaactctagagagccttaacttcttaaaccatttttgctgaattcatctatttcgagtgttgtgttaaaaggaaaaataacaactaacttgtttgaggcaaatctaaaatttaaaattaatcttgcttcattgttacatgtaatatatttcagacattttcactggaagatttatgaacagaaatattggttgaaagttagagattttacaaaatgctgacaaaaatattttcctagcatcagtagatttctggcatatgtttctgctagctatatatttaggaaattcaaagcataaaactttggcaacatcttggctgttctagacacagtgtacttgtcaacccctctcaggtaccttttcttgggatgcttattagaagccaagtaaagtgcttaaggtttgttttcattaaattagctatttctgctcccctgttcaaagatgcattttgagtgtttatagatcactgccctttttgaaatcacctggtattatttttcttactggaaaagttagtattaaaatctacagaactacatatttgtgcctccttggtaaatacaacacatctaattaaatgtagacagatatttcaaacatcagctgaattcacttaagtttttccaaaacctcagttaaactgtgaagctattggaatttttttttcctggaatttttcccctttgattcacagtggtcccatttatatctgcttctagcttagtgctatgtgtgagatatgtgtgtgtttggtgtttttgtttttttgtttttttttttttaaggtttgcaaattaaaaagggccagaaaaatttggcaccaggcaaacgaataaagataggattgggaaagaagttgctaagtgtgcttagttttaataagtaattccttctcttttttcagagaaggccttacagaaaattgttgtgcttagaattgctggatgcatttttaccctccacacaaacctaaaaattttgtgacccctttcacttacctgaaaagtagagaaatggattcagtataaggataaggagggaaggtggaccagaatgaaaactgtaaatatttttttaacctaatatcacttaaatcgaggcagaaagatatagacattcaatgaattatattcaatgcatttaaaataccactgtaattgacagagtaaaagtatagatacaaaaccttgtgtaagaggctgacttttccaaataaacattttttaagaaaacatttcttctcccaaatgtctattttcttgaggaaaatattgctgtgtcttcattttcattaccaggtttcattttgggccttgctaaattgattgaattaaatcctccagcttttgaaccttgaaaaaaaaaaaaaaaaaaaaaaaaaaaaaaaaaaaagaaaaaaaaaaaaaaaaag

SEQ ID NO: 464 - protein, 500 aa, Homo sapien
MPPAVGGPVGYTPPDGGWGWAVVIGAFISIGFSYAFPKSITVFFKEIEGIFHATTSEVSWISSIMLAVMYGGGPISSILVNKYGSRIVMIVGGCLSGCGLIAASFCNTVQQLYVCIGVIGGLGLAFNLNPALTMIGKYFYKRRPLANGLAMAGSPVFLCTLAPLNQVFFGIFGWRGSFLILGGLLLNCCVAGALMRPIGPKPTKAGKDKSKASLEKAGKSGVKKDLHDANTDLIGRHPKQEKRSVFQTINQFLDLTLFTHRGFLLYLSGNVIMFFGLFAPLVFLSSYGKSQHYSSEKSAFLLSILAFVDMVARPSMGLVANTKPIRPRIQYFFAASVVANGVCHMLAPLSTTYVGFCVYAGFFGFAFGWLSSVLFETLMDLVGPQRFSSAVGLVTIVECCPVLLGPPLLGRLNDMYGDYKYTYWACGVVLIISGIYLFIGMGINYRLLAKEQKANEQKKESKEEETSIDVAGKPNEVTKAAESPDQKDTEGGPKEEESPV

SEQ ID NO: 465 - DNA, 1347 bp, Homo sapien
ggcacgagggagaactagtctcgatttttttttttttttttttctttgttttgtttttcctgtataaaaaaggaccccaaatataaaggtagggaaagggacaagagggaacataccccttagtgtagagaaatgggaaggagaaggagaagcctcaaaaggagaggtgggaggggaatgtcattaaggcagcaaagtaatctctgtagaaagatggaggaggaccctccatagcctcagagataaaggcaaagattgccctctcagtgtccagaagggaaatggcagcttttcttccttccatggcagccactccattgctcactccggattaccttcatccttatgtagataagagtgctgcagagctcgaaaggcagagattcgcttgtgtgggttaaaagtcagcatttccagcagcagctgtgctcccgactcctccatctcaggtaccaccgactgcactgggcggggccctctggggggaaaggctccacggggcagggatacatctcgaggccagtcatcctctggaggcagcccaatcaggtcaaagattttgcccaactggtcggcttcagagtttccacagaagagaggctttcgacgaaacatctctgcaaagatacagccaacactccacatgtccacaggtgttgcatatgtggactgcagaagaacttcgggagctcggtaccagagtgtaacaaccacgggtgtaagtgccatctggtagctgtagattctggccaggccaaagtcagccagcttgactgttccaccacttgtcaccagaatgttctctggcttcagatctcggtgaacgatgcaattggcatgaaggaaatctaggcctcttagaaactggcgcatcagatccttgatcgtttcggctggcaagcctggtgggggtgccttgtccagatatgtccttaggtcctggtctacatgctcaaacaccagggttaccttgatctcccggtcagttcgggatgtggcacagacgtccatcagccggacaacattgggatgctcaaaagcctccagtcgcctcagtaaagccacctcacgaactgtgctgatgggaaggcctcctccacctcctcctccattggggactctcacactcttgagggccacaaagtggccactgtggggatcacgggccttgtacactgtcccataggcaccgacaccaatttcagccactggctcatatcgagaggtagccattctcagatcaagggagaccctcacgccagcccggggtgctgtgggggcggcccgttatcggggccccggagccggttcctacggccccatacacccgagctcggtccggagcag

SEQ ID NO: 466 - protein, 30 aa, Homo sapien
MSTGVAYVDCRRTSGARYQSVTTTGVSAIW

SEQ ID NO: 467 - DNA, 1238 bp, Homo sapien
gaattcgaggatccgggtaccatgggaggaaaacttcttcctggcctgggctccgtgccgctctgtttgccaaccgtccagtcccgcctaccagtgccgggcgctccccacccctcccccggctcccccggtgtccgccatggccaaagcctacgaccacctcttcaagttgctgctgatcggggactcgggggtgggcaagacttgtctgatcattcgctttgcagaggacaacttcaacaacacttacatctccaccatcggaattgatttcaagatccgcactgtggatatagaggggaagaagatcaaactacaagtctgggacacggctggccaagagcggttcaagacaataactactgcctactaccgtggagccatgggcattatcctagtatacgacatcacggatgagaaatctttcgagaatattcagaactggatgaaaagcatcaaggagaatgcctcggctggggtggagcgcctcttgctggggaacaaatgtgacatggaggccaagaggaaggtgcagaaggagcaggccgataagttggctcgagagcatggaatccgatttttcgaaactagtgctaaatccagtatgaatgtggatgaggcttttagttccctggcccgggacatcttgctcaagtcaggaggccggagatcaggaaacggcaacaagcctcccagtactgacctgaaaacttgtgacaagaagaacaccaacaagtgctccctgggctgaggaccctttcttgcctccccaccccggaagctgaacctgagggagacaacggcagagggagtgagcaggggagaaatagcagaggggcttggagggtcacataggtagatggtaaagagaatgaggagaaaaaggagaaaagggaaaagcagaaaggaaaaaaaggaagagagaggaagggagaagggagaggaatgaattgaggaagtgaaagaaggcaaggaggtaggaagagagggaggaggaaaggaaggagagagatgcctcaggcttcagaccttacctgggttttcagggcaaacataaatgtaaatacactgatttattctgttactagatcaggttttagggtcctgcaaaaggctagctcggcactacactagggaatttgctcctgttctgtcacttgtcatggtctttcttggtattaaaggccaccatttgcacaaaaaaaaaaaaaaaccatggtacccggatcctcgaattc

SEQ ID NO: 468 - protein, 203 aa, Homo sapien
MAKAYDHLFKLLLIGDSGVGKTCLIIRFAEDNFNNTYISTIGIDFKIRTVDIEGKKIKLQVWDTAGQERFKTITTAYYRGAMGIILVYDITDEKSFENIQNWMKSIKENASAGVERLLLGNKCDMEAKRKVQKEQADKLAREHGIRFFETSAKSSMNVDEAFSSLARDILLKSGGRRSGNGNKPPSTDLKTCDKKNTNKCSLG

SEQ ID NO: 469 - DNA, 6028 bp, Homo sapien
ggtgtggacgttgtctaaatttcggtagccatggcacaagaatataagaaagcatgggattatggcaaccacagaatctcagtagtacaagttccattcagttttttctgaaagaaagccctctgttaaagtgaagcaaagaaactgttgtggattataacgtttagaagttccaatttttcagtgctttacaaataaagcatcatttaaccttttaaatgaaaaagattaagatctcatgcaactgttgtattttctggaagccattctccaaaagggaagtgcacatttaaaacacagatatgatggtccttgctgcagggatttaagtctacttgcttttacatcatgaccagcttgaaacggtcacagacagaaaggcctcttgccactgacagggcctctgttgttggcacagacggcacccccaaagtccacactgatgatttctacatgcggcgcttccggtcccaaaatggcagcttaggatcatcagttatggctcctgtaggacccccccgaagtgaaggttctcaccatataacctcaacccccggagtcccaaaaatgggggtaagggcaaggattgcagattggcccccaagaaaggaaaacataaaagaatctagccgttcaagccaggaaatagaaacctcaagttgccttgatagcctgtcctccaaaagcagtcctgtgagtcagggaagttctgttagcctcaattccaatgactcagccatgctgaaaagcatacagaacacgctgaaaaacaagacaagaccgtcggagaacatggactccagatttctcatgcctgaagcctaccccagctcccccagaaaagctcttcgcagaatacgccagcgaagcaacagtgatatcaccataagtgaacttgatgtggatagctttgatgaatgtatctcacctacatacaagactggaccatcactgcacagggaatatggtagcacatcttcaattgataaacagggaacatctggagaaagcttttttgatttgttaaagggctacaaagatgacaaatctgatcgaggtccaactccaaccaagctcagtgactttctcattactggtggtggcaagggttctggtttctctttggatgtaatagacgggcctatctcacagagagagaacctcaggctttttaaggaaagggaaaaaccactcaagcgacgttcaaaatctgaaactggagactcctctatttttcgtaaattgcgcaatgccaaaggtgaagaacttgggaagtcatcagatcttgaagataaccgatcagaagactctgtcaggccctggacatgtccaaagtgctttgcccactatgatgtccagagtatattatttgatttgaatgaggcaattatgaacaggcacaatgttattaagaggagaaacaccaccactggagcttccgcagctgccgtggcatccttggtctctggacctctgtctcattcagccagttttagctccccaatgggcagcacagaggacctgaattccaaaggaagcctcagcatggaccagggagatgataaaagcaatgagcttgtaatgagctgtccatattttcggaatgagataggtggagaaggggagaggaaaatcagcctttcaaaatcaaattctggctcctttagtggatgtgaaagtgcctcctttgagtctacccttagttcccattgcacaaatgcaggagtggcagtacttgaagtgcccaaggagaacttggtgttgcacctagatagagtgaaaagatacatcgtggaacacgtagatctgggtgcatactattatagaaaatttttctaccagaaggaacactggaactattttggggctgatgagaatcttggtccagtggctgtgagcattcgaagggaaaaaccagatgaaatgaaagaaaatggatctccgtacaactaccgaataatttttagaactagtgagctcatgacactgagaggttcggtcctggaggacgccattccgtcgacagccaagcactcgacagccagaggcctgcctctcaaagaagtgctggagcacgtggttcctgagctcaatgtccagtgcctgcggttggccttcaacacacccaaggtcacagagcagctcatgaaactggatgaacaagggctgaactaccagcagaaagtaggcatcatgtactgcaaagctggacagagcactgaagaagagatgtacaacaatgagtcagctggcccagcctttgaagaattccttcaactattgggagagcgagttcggctcaaaggatttgagaagtatcgagcacagcttgataccaaaactgactccactggaacccattctctgtacacaacatacaaagattatgaaattatgttccatgtttctaccatgctgccatacacacccaacaacaaacaacagctcctgaggaagcggcacattggaaatgatatcgtaacaattgttttccaagagcctggagcacagccattcagcccaaaaaacatccgatcccacttccagcacgttttcgtcatcgtcagggtgcacaatccgtgctctgacagtgtctgttatagtgtggctgttaccaggtccagagatgtgccttcctttgggcctcccattcctaaaggggtcactttccctaagtcaaatgtgttcagggacttccttttggcgaaagtgattaatgcagaaaatgctgctcataaatcggagaagtttcgggccatggcaactcggacccgccaggaatacctgaaagatctggcagaaaagaatgtcaccaacacccctatcgacccttctggcaagtttccgttcatctctctggcttccaagaagaaggaaaagtctaagccatatccaggagccgagctcagcagcatgggggccattgtatgggcagtccgggctgaagactacaacaaggccatggaactagactgccttttagggatctccaatgagttcattgtgctcattgaacaggaaacaaagagcgtggtcttcaattgttcctgtagagatgtgatagggtggacttcaactgacaccagcctcaaaatcttctatgaacgaggagaatgtgtttcagtgggtagttttattaacattgaggagatcaaagagattgtcaaaaggttgcagtttgtttcaaaaggctgtgaatcggtggagatgactctgcgaagaaatgggctaggacagcttggcttccatgtcaactatgagggcattgtggcggatgtggagccctacggttatgcctggcaggcagggctgaggcagggcagtcgcctggtggagatctgcaaggtggcggtagccactctgagccatgagcagatgatcgacctcctgagaacatctgtcacggtgaaggttgtcatcattcccccgcatgatgactgcaccccgcggaggagttgctctgaaacctaccgcatgccagtgatggagtacaaaatgaatgaaggtgtttcatacgaattcaagtttcccttccgaaataataacaagtggcagaggaacgccagcaaggggcctcattcacctcaagtcccgtcccaggtgcagagtcccatgacctcgcggctgaatgctggaaaaggagatgggaagatgcctcctccagaaagagccgccaacatccctcgaagcatctccagtgacgggcgcccactagagaggcggctgtctcctggttcggacatctatgtgacggtctcatccatggctttagcaagatcccagtgtcggaactctcctagcaacttgtcttcatccagtgatactggttctgtggggggcacttacaggcagaagtccatgcccgaagggtttggagtgagccgtagatccccagcctccattgacaggcagaacacccagtcagatattggtggcagcggaaaatccacgcctagctggcaaagaagtgaggatagcattgctgaccagatggcttacagttatagaggacctcaggatttcaattcttttgtcctcgagcagcatgaatatacagagccaacatgccatctcccagcagtatcaaaggtactgccagctttccgagagagccccagtgggagattaatgcggcaggatccagtggttcatttgtctccaaacaaacaagggcattctgatagccactactcgagccactccagtagcaatactctctccagcaatgcgtcaagtgcccatagtgatgagaagtggtacgatggggaccgcacagaatccgaactcaacagctataactatctgcaaggcacctctgctgacagtggcattgacaccacctcttatggccccagccacggcagcacagcctcgctgggggctgccacatcgtcacctcgctcagggccaggcaaggagaaagtggcacccctatggcacagctccagtgaagtaatctccatggcagatcggactttggagacagagagccacggcctggaccggaaaacagagtcttccctgagcttagacatacacagcaagagccaagccggctcgacccctctgacaagggagaacagcaccttcagtataaacgatgctgcttcccacacaagtaccatgagctcccgacactctgccagcccagtggttttcaccagtgcccggagttcacctaaagaagagcttcatccagctgccccctcacagctcgcaccatccttctcctcctcttcctcctcctcctctggtcctaggagtttttaccctcgccagggcgctactagcaagtacctgattggatggaaaaaacccgaaggaaccataaactccgtgggatttatggacacgagaaagcgtcatcagagcgatggcaatgaaatagcccacaccaggctgcgtgcctcaaccagagacctccgggcatctcctaagccaacctccaagtccaccattgaagaagatctaaagaaactaattgatcttgaaagcccaactcctgaatcacagaagagttttaagttccacgcactctcctctcctcagtctcctttccccagcacccccacctcacggcgggccttgcacagaacactgtcggacgagagcatttacaatagccagagggagcactttttcacctccagggcgtcacttctggaccaagccctgcccaacgacgtcctcttcagtagcacgtacccttctctccccaagtcgctcccgttgaggaggccttcttacaccttaggaatgaaatcgctgcatggagagttctcagcctcggacagctccctcactgacatccaggagacccgcaggcagcctatgcccgaccctggcctgatgcccctgcctgacactgctgcagacttggattggtccaacctggtagatgctgccaaagcctatgaggtccagagagcctcattttttgctgctagtgatgaaaaccatcgccccttgagtgctgcatccaacagtgatcagctggaggaccaggctctggcccagatgaagccttacagcagcagtaaagactcctctcccactctggcttctaaagtggaccagctggaaggtatgctgaagatgcttcgggaagatttgaagaaggaaaaagaagacaaagctcaccttcaggcggaggtgcagcacctgcgagaggacaacctgaggctacaggaggagtcccagaacgcctcggacaagctgaagaagttcacagaatgggtcttcaacaccatagacatgagctagggaaggctgaggaggacaggagaagggcccagacactccctccagtgagtgtcctgcagcccttattccctccatagaaagcatcctcagagcaccttccctggcttcctactctgccccctttcggggagtgcacaacacaatagttgcagatcaacaatcatcacctgccttttgtagaaaagaaaaacaaaaaaagtaaataaaaattttaaacagtaaaataaaagtttaactgctaaaaaaaaaaaaaaaaaaaaaaaaa

SEQ ID NO: 470 - protein, 1804 aa, Homo sapien
MTSLKRSQTERPLATDRASVVGTDGTPKVHTDDFYMRRFRSQNGSLGSSVMAPVGPPRSEGSHHITSTPGVPKMGVRARIADWPPRKENIKESSRSSQEIETSSCLDSLSSKSSPVSQGSSVSLNSNDSAMLKSIQNTLKNKTRPSENMDSRFLMPEAYPSSPRKALRRIRQRSNSDITISELDVDSFDECISPTYKTGPSLHREYGSTSSIDKQGTSGESFFDLLKGYKDDKSDRGPTPTKLSDFLITGGGKGSGFSLDVIDGPISQRENLRLFKEREKPLKRRSKSETGDSSIFRKLRNAKGEELGKSSDLEDNRSEDSVRPWTCPKCFAHYDVQSILFDLNEAIMNRHNVIKRRNTTTGASAAAVASLVSGPLSHSASFSSPMGSTEDLNSKGSLSMDQGDDKSNELVMSCPYFRNEIGGEGERKISLSKSNSGSFSGCESASFESTLSSHCTNAGVAVLEVPKENLVLHLDRVKRYIVEHVDLGAYYYRKFFYQKEHWNYFGADENLGPVAVSIRREKPDEMKENGSPYNYRIIFRTSELMTLRGSVLEDAIPSTAKHSTARGLPLKEVLEHVVPELNVQCLRLAFNTPKVTEQLMKLDEQGLNYQQKVGIMYCKAGQSTEEEMYNNESAGPAFEEFLQLLGERVRLKGFEKYRAQLDTKTDSTGTHSLYTTYKDYEIMFHVSTMLPYTPNNKQQLLRKRHIGNDIVTIVFQEPGAQPFSPKNIRSHFQHVFVIVRVHNPCSDSVCYSVAVTRSRDVPSFGPPIPKGVTFPKSNVFRDFLLAKVINAENAAHKSEKFRAMATRTRQEYLKDLAEKNVTNTPIDPSGKFPFISLASKKKEKSKPYPGAELSSMGAIVWAVRAEDYNKAMELDCLLGISNEFIVLIEQETKSVVFNCSCRDVIGWTSTDTSLKIFYERGECVSVGSFINIEEIKEIVKRLQFVSKGCESVEMTLRRNGLGQLGFHVNYEGIVADVEPYGYAWQAGLRQGSRLVEICKVAVATLSHEQMIDLLRTSVTVKVVIIPPHDDCTPRRSCSETYRMPVMEYKMNEGVSYEFKFPFRNNNKWQRNASKGPHSPQVPSQVQSPMTSRLNAGKGDGKMPPPERAANIPRSISSDGRPLERRLSPGSDIYVTVSSMALARSQCRNSPSNLSSSSDTGSVGGTYRQKSMPEGFGVSRRSPASIDRQNTQSDIGGSGKSTPSWQRSEDSIADQMAYSYRGPQDFNSFVLEQHEYTEPTCHLPAVSKVLPAFRESPSGRLMRQDPVVHLSPNKQGHSDSHYSSHSSSNTLSSNASSAHSDEKWYDGDRTESELNSYNYLQGTSADSGIDTTSYGPSHGSTASLGAATSSPRSGPGKEKVAPLWHSSSEVISMADRTLETESHGLDRKTESSLSLDIHSKSQAGSTPLTRENSTFSINDAASHTSTMSSRHSASPVVFTSARSSPKEELHPAAPSQLAPSFSSSSSSSSGPRSFYPRQGATSKYLIGWKKPEGTINSVGFMDTRKRHQSDGNEIAHTRLRASTRDLRASPKPTSKSTIEEDLKKLIDLESPTPESQKSFKFHALSSPQSPFPSTPTSRRALHRTLSDESIYNSQREHFFTSRASLLDQALPNDVLFSSTYPSLPKSLPLRRPSYTLGMKSLHGEFSASDSSLTDIQETRRQPMPDPGLMPLPDTAADLDWSNLVDAAKAYEVQRASFFAASDENHRPLSAASNSDQLEDQALAQMKPYSSSKDSSPTLASKVDQLEGMLKMLREDLKKEKEDKAHLQAEVQHLREDNLRLQEESQNASDKLKKFTEWVFNTIDMS

SEQ ID NO: 471 - DNA, 2825 bp, Homo sapien
cggaggtgaggtttgttaccgcgattctgagaggtgggcttttagtccctccagacctcggctttagtgctgtctccgcttttctttcaccttcacagaggttcgtgtcttcctaaaagaaggttttattgggaggtaaaggtcaatgcgtaggggtagagtaagatgtcttatggtgaaattgaaggtaaattcttgggacctagagaagaagtaacgagtgagccacgctgtaaaaaattgaagtcaaccacagagtcgtatgtttttcacaatcatagtaatgctgattttcacagaatccaagagaaaactggaaatgattgggtccctgtgaccatcattgatgtcagaggacatagttatttgcaggagaacaaaatcaaaactacagatttgcatagacctttgcatgatgagatgcctggtaatagaccagatgttattgaatccattgattcacaggttttacaggaagcacgtcctccattagtatccgcagacgatgagatatatagcacaagtaaagcatttataggacccatttacaaaccccctgagaaaaagaaacgtaatgaagggaggaatgaggcacatgttctaaatggtataaatgacagaggaggacaaaaagagaaacagaaatttaactctgaaaaatcagagattgacaatgaattattccagttttacaaagaaattgaagagcttgaaaaggaaaaagatggttttgagaacagttgtaaagaatctgaaccttctcaggaacaatttgttccattttatgagggtcataataatggtctcttaaaacctgatgaagaaaagaaagatcttagtaataaagctatgccatcacattgtgattatcagcagaacttggggaatgagccagacaaatatccctgtaatggacaagtaatacctacattttgtgacacttcatttacttctttcaggcctgaatggcagtcagtatatccttttatagtgccctatggtccccctcttcccagtttgaactatcatttaaacattcagagattcagtggtccaccaaatccaccatcaaatattttccaagcccaagatgactctcagatacaaaatggatattatgtaaataattgtcatgttaactggaattgcatgacttttgatcagaacaatgaatatactgactgtagtgagaataggagtagtgttcatccctctggaaatggctgcagtatgcaagatcgatatgtgagtaatggtttctgtgaagtcagagaaagatgctggaaagatcattgtatggacaagcataatggaacagacaggtttgtgaaccagcagtttcaagaggaaaagttaaataaattgcagaagttacttattcttttaagaggtctgcctggttctgggaaaacaacattgtctcgaattctgcttggtcagaatcgtgatggcattgtgttcagcactgatgactattttcaccatcaagatgggtacaggtataatgttaatcaacttggtgatgcccatgactggaaccagaacagagcaaaacaagctatcgatcagggaagatctccagttataatagataacactaatatacaagcttgggaaatgaagccatatgtggaagtggccataggaaaaggatacagagtagagtttcatgaacctgaaacttggtggaaatttgatcctgaagaattagaaaagaggaataaacatggtgtgtctcgaaagaagattgctcagatgttggatcgttatgaatatcaaatgtccatttctattgtaatgaattcagtggaaccatcacacaaaagcacacaaagacctcctcctccacaggggagacagaggtggggaggctctcttggctcacataatcgtgtctgtgtcacaaataatcattaaattagctattttcagctaacacatttgttgttgcacttgaaaaagagttagtgagcctgtcttggagtttaagtagtttcaaataaaaaaaggctacagtgcctcacaaaggatgttcccagcaagttgtttaaattcccagcaagttgttaaagtgtaaataaaaatatatgaaattgtattttaaatgtttttatattctcttgttgtaatactcttggctgttatggaagcacctgagtaatagagtggtgggtaggagctaggatgtttttctacaatcgaattttaaactaatttatctattttatagacactattgaacagttttttaatagttcatatctaaatctaacttttcataaaactttacggtttttccttcactaccttaaatatgcaagaaatactgacttggtatagggtaccttagttttctctattcattagacaggtaaaattatatttcagctgattgatctgtgtgacaaaattatttcttagctataatcagcacatcacttagttcaaacaaaattccccagcaaatgttagatagtaggtatatcagtcacctggggagttttcttcataatatgcatattcatcttgtaatgcatacatagttatcatcctccttctcaacccatctccctaaccccacatgcttgccagttcttgaagggataaagtgattctaataatgttttacttctctctgttcaatttaatgtgatataattctagtataaaaatattttggacagttgcttaacatggtcataagaggatttgtactatagaatatcttctagtactaatttttctgtagagcaaattatatttctctcactggatagtttttagatgtgtttcttcatataaaattaaaaactgagatggaattc

SEQ ID NO: 472 - protein, 583 aa, Homo sapien
MSYGEIEGKFLGPREEVTSEPRCKKLKSTTESYVFHNHSNADFHRIQEKTGNDWVPVTIIDVRGHSYLQENKIKTTDLHRPLHDEMPGNRPDVIESIDSQVLQEARPPLVSADDEIYSTSKAFIGPIYKPPEKKKRNEGRNEAHVLNGINDRGGQKEKQKFNSEKSEIDNELFQFYKEIEELEKEKDGFENSCKESEPSQEQFVPFYEGHNNGLLKPDEEKKDLSNKAMPSHCDYQQNLGNEPDKYPCNGQVIPTFCDTSFTSFRPEWQSVYPFIVPYGPPLPSLNYHLNIQRFSGPPNPPSNIFQAQDDSQIQNGYYVNNCHVNWNCMTFDQNNEYTDCSENRSSVHPSGNGCSMQDRYVSNGFCEVRERCWKDHCMDKHNGTDRFVNQQFQEEKLNKLQKLLILLRGLPGSGKTTLSRILLGQNRDGIVFSTDDYFHHQDGYRYNVNQLGDAHDWNQNRAKQAIDQGRSPVIIDNTNIQAWEMKPYVEVAIGKGYRVEFHEPETWWKFDPEELEKRNKHGVSRKKIAQMLDRYEYQMSISIVMNSVEPSHKSTQRPPPPQGRQRWGGSLGSHNRVCVTNNH

SEQ ID NO: 473 - DNA, 1700 bp, Homo sapien
ggcggcggcagcgggttcggttgcgcgtggcgcacggggtgggagcggagcccaggccgggagcaggcgccgccgccagcgaccatggggaacgtgttggctgccagctcgccgcccgcagggccgccaccgccgcctgcgccggccctcgtggggctgccgccacctccgccctcgccgccgggcttcacgctgccgccgctgggaggcagcctgggcgccggcaccagtacgagtcgaagttcggaacggacccccggggctgcaaccgccagcgcctcaggggccgccgaggatggggcctgcggctgcctgcccaacccgggcacattcgaggagtgccaccggaagtgcaaggagctgtttcccattcagatggagggtgtcaagctcacagtcaacaaagggttgagtaaccattttcaggtcaaccacacagtagccctcagcacaatcggggagtccaactaccacttcggggtcacatatgtggggacaaagcagctgagtcccacagaggcgttccctgtactggtgggtgacatggacaacagtggcagtctcaacgctcaggtcattcaccagctgggccccggtctcaggtccaagatggccatccagacccagcagtcgaagtttgtgaactggcaggtggacggggagtatcggggctctgacttcacagcagccgtcaccctggggaacccagacgtcctcgtgggttcaggaatcctcgtagcccactacctccagagcatcacgccttgcctggccctgggtggagagctggtctaccaccggcggcctggagaggagggcactgtcatgtctctagctgggaaatacacattgaacaactggttggcaacggtaacgttgggccaggcgggcatgcacgcaacatactaccacaaagccagtgaccagctgcaggtgggtgtggagtttgaggccagcacaaggatgcaggacaccagcgtctccttcgggtaccagctggacctgcccaaggccaacctcctcttcaaaggctctgtggatagcaactggatcgtgggtgccacgctggagaagaagctcccacccctgcccctgacactggcccttggggccttcctgaatcaccgcaagaacaagtttcagtgtggctttggcctcaccatcggctgagccctcctggcccccgccttccacgcccttccgattccacctccacctccacctccccctgccacagaggggagacctgagcccccctcccttccctccccccttgggggtcggggggggacattggaaaggagggaccccgccaccccagcagctgaggaggggattctggaactgaatggcgcttcgggattctgagtagcaggggcagcatgcccagtgggcctggggtcccgggagggattccggaattgaggggcacgcaggattctgagcaccaggggcagaggcggccagacaacctcagggaggagtgtcctggcgtccccatcctccaaagggcctgggcccgccccgagggggcagcgagaggagcttccccatccccggtcagtccaccctgccccgtccactttcccatctcctcggtataaatcatgtttataagttatggaagaaccgggacattttacagaaaaaaaacaaaaaacaacaaaaaatatacgtgggaaaaaaaaaaaaaaaaaaaa

SEQ ID NO: 474 - protein, 361 aa, Homo sapien
MGNVLAASSPPAGPPPPPAPALVGLPPPPPSPPGFTLPPLGGSLGAGTSTSRSSERTPGAATASASGAAEDGACGCLPNPGTFEECHRKCKELFPIQMEGVKLTVNKGLSNHFQVNHTVALSTIGESNYHFGVTYVGTKQLSPTEAFPVLVGDMDNSGSLNAQVIHQLGPGLRSKMAIQTQQSKFVNWQVDGEYRGSDFTAAVTLGNPDVLVGSGILVAHYLQSITPCLALGGELVYHRRPGEEGTVMSLAGKYTLNNWLATVTLGQAGMHATYYHKASDQLQVGVEFEASTRMQDTSVSFGYQLDLPKANLLFKGSVDSNWIVGATLEKKLPPLPLTLALGAFLNHRKNKFQCGFGLTIG

SEQ ID NO: 475 - DNA, 1936 bp, Homo sapien
gcagaggcgcaggtagatggagttggggagttgcctggagggcgggagggaggcggcggaggaagagggcgagcctgaggtgaaaaagcggcgacttctgtgtgtgaggtttgcctcggtcgcaagctgcgatgccgcagtggctcagtgcttcctggccgagaacgactgggagatggaaagggctctgaactcctacttcgagcctccggtggaggagagcgccttggaacgccgacctgaaaccatctctgagcccaagacctatgttgacctaaccaatgaagaaacaactgattccaccacttctaaaatcagcccatctgaagatactcagcaagaaaatggcagcatgttctctctcattacctggaatattgatggattagatctaaacaatctgtcagagagggctcgaggggtgtgttcctacttagctttgtacagcccagatgtgatatttctacaggaagttattcccccatattatagctacctaaagaagagatcaagtaattatgagattattacaggtcatgaagaaggatatttcacagctataatgttgaagaaatcaagagtgaaattaaaaagccaagagattattccttttccaagtaccaaaatgatgagaaaccttttatgtgtgcatgtgaacgtgtcaggaaatgagctttgccttatgacatcccatttggagagcaccagagggcatgctgcggaacgaatgaatcagttaaaaatggttttaaagaaaatgcaagaggctccagagtcagctacagttatatttgcaggagatacaaatctaagggatcgagaggttaccagatgtggtggtttacccaacaacattgtggatgtctgggagtttttgggcaaacctaaacattgccagtatacatgggatacacaaatgaactctaatcttggaataactgctgcttgtaaacttcgttttgatcgaatatttttcagagcagcagcagaagagggacacattattccccgaagtttggaccttcttggattagaaaaactggactgtggtagatttcctagtgatcactggggtcttctgtgcaacttagatataatattgtaaaatgcttttcaagtgtgggttttgccctgattgttgcaaatacaatttccaccttctggaaaggtaggtttgctgtggaggaaataatgtactagatcattgtcacagaaaaaccaactatgatttatggttgtgttttcagaattcaacattaaagattaatgtttatttaaacgaacacattcctgcattcaggatgtgaggccatttaataaaaagggcacaaagcctgtcagagttttcaacggtgcttatagctgccagctggattccaaacaggtaccccattgtctctgagctaatgtttatatttttccattcaggcaccgaaatagttaatatttaaaataagtcttcaaaagaaaacataagagattattgagttcttgggactggatcctttatttcataagttcagatcatcttaaatgaaaatgccatgattatctgcagttaagtagatgacagctattctacatcagacttgatttttgtcagctaattacataattggtaagctataattgaaaccttatggcttaaaattccttaactcctttttgattcatgtttgtagtcatgttgtcaacagaggcaaagttaagcttgatgatggttaaaatcggtttgatagcaccatgggacatttttctaacaaaaataaatgcatgaagagacatagccttttagttttgctaattgtgaaatggaaatgctttacaggaagtaaatgcaaattacttttaagtgtgctttaaagaaaaatattttccccacaagagaaatttaaataaagaattttatttgtttaaaaaaaaaaaaaaaaaaaaa

SEQ ID NO: 476 - protein, 362 aa, Homo sapien
MELGSCLEGGREAAEEEGEPEVKKRRLLCVRFASVASCDAAVAQCFLAENDWEMERALNSYFEPPVEESALERRPETISEPKTYVDLTNEETTDSTTSKISPSEDTQQENGSMFSLITWNIDGLDLNNLSERARGVCSYLALYSPDVIFLQEVIPPYYSYLKKRSSNYEIITGHEEGYFTAIMLKKSRVKLKSQEIIPFPSTKMMRNLLCVHVNVSGNELCLMTSHLESTRGHAAERMNQLKMVLKKMQEAPESATVIFAGDTNLRDREVTRCGGLPNNIVDVWEFLGKPKHCQYTWDTQMNSNLGITAACKLRFDRIFFRAAAEEGHIIPRSLDLLGLEKLDCGRFPSDHWGLLCNLDIIL

SEQ ID NO: 477 - DNA, 1810 bp, Homo sapien
cgcgcttgtggagctggtggcggcgctccgcaggggctcggctgttttccgcgcggcaggcgcggccatggcgcagctgggaaagctgctcaaggagcagaagtacgaccggcagctgaggttgtggggtgatcatgggcaagaggctttagaatctgctcatgtttgcctaataaatgcaacagccacaggaactgaaattcttaaaaacttggtactaccaggtattggttcgtttacaattattgatggaaatcaggtcagcggagaagatgctggaaacaatttcttccttcaaagaagcagtatcggcaagaaccgagctgaagctgccatggaattcttacaagaattaaatagcgatgtctctggaagttttgtggaagagagtccagaaaaccttctagacaatgatccctcatttttctgtaggtttactgttgtagttgcaactcagcttcctgaaagcacttcactacgcttagcagatgtcctctggaattcccagattcctcttttgatctgtaggacatatggactagttggttatatgaggatcattataaaagaacatccagtaatagaatctcatccagataatgcattagaggatctacgactagataagccatttcctgaactgagagaacattttcagtcctatgatttggatcatatggaaaaaaaggaccacagtcatactccatggattgtgatcatagctaaatatttagcacagtggtatagtgaaacaaatggacgaatacctaaaacgtataaagaaaaagaggacttcagagatttgattagacaaggaattctaaaaaatgaaaatggggctccagaagatgaagagaattttgaagaagctattaaaaatgtgaacacagcactaaatacaactcagatcccaagcagtattgaagatatatttaatgatgatcgctgcataaatatcaccaaacagactccatcattttggattttagctcgtgccttaaaggaatttgtggccaaagagggtcaaggaaatttacctgttcgaggcacaattcctgatatgattgcagattcaggcaaatatataaaactgcaaaacgtttaccgtgaaaaagcaaagaaagatgctgccgctgtgggtaatcatgttgccaaattgctgcagtccattggccaggcaccagagtccatttcagagaaagaattaaaattactctgcagcaattctgcatttcttcgagtggtaagatgtcgatccttagctgaagaatatggtttggatacaattaacaaggatgaaattatttctagcatggacaatccagataatgaaatagtgttgtacttaatgttacgggctgttgatagatttcataaacaacagggtagatatccaggagtatctaactatcaagttgaagaagatataggaaagttgaagtcttgtctcactggcttccttcaggaatatggtttatctgtaatggtgaaagatgattatgtccacgaattttgccgatatggagctgctgagccacataccattgctgcattcttggggggagctgctgctcaagaggtcatcaaaataatcaccaaacaatttgtaatttttaataatacttacatttacagtggcatgtcacaaacttcagcaactttccagttgtagagtaagcaagcaccttaagtagtgtgttaatgattgaaactgtaattgccttcgggttgtgctttagtctgtaaaattctaaaggagagctgctaaattgttttcttaataaacatttttctcatttgtaaaaaaaaa

SEQ ID NO: 478 - protein, 534 aa, Homo sapien
MAQLGKLLKEQKYDRQLRLWGDHGQEALESAHVCLINATATGTEILKNLVLPGIGSFTIIDGNQVSGEDAGNNFFLQRSSIGKNRAEAAMEFLQELNSDVSGSFVEESPENLLDNDPSFFCRFTVVVATQLPESTSLRLADVLWNSQIPLLICRTYGLVGYMRIIIKEHPVIESHPDNALEDLRLDKPFPELREHFQSYDLDHMEKKDHSHTPWIVIIAKYLAQWYSETNGRIPKTYKEKEDFRDLIRQGILKNENGAPEDEENFEEAIKNVNTALNTTQIPSSIEDIFNDDRCINITKQTPSFWILARALKEFVAKEGQGNLPVRGTIPDMIADSGKYIKLQNVYREKAKKDAAAVGNHVAKLLQSIGQAPESISEKELKLLCSNSAFLRVVRCRSLAEEYGLDTINKDEIISSMDNPDNEIVLYLMLRAVDRFHKQQGRYPGVSNYQVEEDIGKLKSCLTGFLQEYGLSVMVKDDYVHEFCRYGAAEPHTIAAFLGGAAAQEVIKIITKQFVIFNNTYIYSGMSQTSATFQL

SEQ ID NO: 479 - DNA, 2650 bp, Homo sapien
agggacagcccagaggaggcgtggccacgctgccggcggaagtggagccctccgcgagcgcgcgaggccgccggggcaggcggggaaaccggacagtaggggcggggccgggccggcgatggggatgcgggagcactacgcggagctgcacccgtgcccgccggaattggggatgcagagcagcggcagcgggtatggcaggcagccggcgggccggcctccagcgcaggtgcccgagaggcaggggctggcctgggatgcgcgcgcacctgccctcgccccgccccgcccgcacgaggggtggtggccgaggccccgccccgcacgcctcgcctgaggcgggtccgctcagcccaggcgcccgcccccgcccccgccgattaaatgggccggcggggctcagcccccggaaacggtcgtaacttcggggctgcgagcgcggagggcgacgacgacgaagcgcagacagcgtcatggcagagcaggtggccctgagccggacccaggtgtgcgggatcctgcgggaagagcttttccagggcgatgccttccatcagtcggatacacacatattcatcatcatgggtgcatcgggtgacctggccaagaagaagatctaccccaccatctggtggctgttccgggatggccttctgcccgaaaacaccttcatcgtgggctatgcccgttcccgcctcacagtggctgacatccgcaaacagagtgagcccttcttcaaggccaccccagaggagaagctcaagctggaggacttctttgcccgcaactcctatgtggctggccagtacgatgatgcagcctcctaccagcgcctcaacagccacatggatgccctccacctggggtcacaggccaaccgcctcttctacctggccttgcccccgaccgtctacgaggccgtcaccaagaacattcacgagtcctgcatgagccagataggctggaaccgcatcatcgtggagaagcccttcgggagggacctgcagagctctgaccggctgtccaaccacatctcctccctgttccgtgaggaccagatctaccgcatcgaccactacctgggcaaggagatggtgcagaacctcatggtgctgagatttgccaacaggatcttcggccccatctggaaccgggacaacatcgcctgcgttatcctcaccttcaaggagccctttggcactgagggtcgcgggggctatttcgatgaatttgggatcatccgggacgtgatgcagaaccacctactgcagatgctgtgtctggtggccatggagaagcccgcctccaccaactcagatgacgtccgtgatgagaaggtcaaggtgttgaaatgcatctcagaggtgcaggccaacaatgtggtcctgggccagtacgtggggaaccccgatggagagggcgaggccaccaaagggtacctggacgaccccacggtgccccgcgggtccaccaccgccacttttgcagccgtcgtcctctatgtggagaatgagaggtgggatggggtgcccttcatcctgcgctgcggcaaggccctgaacgagcgcaaggccgaggtgaggctgcagttccatgatgtggccggcgacatcttccaccagcagtgcaagcgcaacgagctggtgatccgcgtgcagcccaacgaggccgtgtacaccaagatgatgaccaagaagccgggcatgttcttcaaccccgaggagtcggagctggacctgacctacggcaacagatacaagaacgtgaagctccctgacgcctacgagcgcctcatcctggacgtcttctgcgggagccagatgcacttcgtgcgcagcgacgagctccgtgaggcctggcgtattttcaccccactgctgcaccagattgagctggagaagcccaagcccatcccctatatttatggcagccgaggccccacggaggcagacgagctgatgaagagagtgggtttccagtatgagggcacctacaagtgggtgaacccccacaagctctgagccctgggcacccacctccacccccgccacggccaccctccttcccgccgcccgaccccgagtcgggaggactccgggaccattgacctcagctgcacattcctggccccgggctctggccaccctggcccgcccctcgctgctgctactacccgagcccagctacattcctcagctgccaagcactcgagaccatcctggcccctccagaccctgcctgagcccaggagctgagtcacctcctccactcactccagcccaacagaaggaaggaggagggcgcccattcgtctgtcccagagcttattggccactgggtctcactcctgagtggggccagggtgggagggagggacaagggggaggaaaggggcgagcacccacgtgagagaatctgcctgtggccttgcccgccagcctcagtgccacttgacattccttgtcaccagcaacatctcgagccccctggatgtcccctgtcccaccaactctgcactccatggccaccccgtgccacccgtaggcagcctctctgctataagaaaagcagacgcagcagctgggacccctcccaacctcaatgccctgccattaaatccgcaaacagccaaaaaaaaaaaaaaaaaaaa

SEQ ID NO: 480 - protein, 515 aa, Homo sapien
MAEQVALSRTQVCGILREELFQGDAFHQSDTHIFIIMGASGDLAKKKIYPTIWWLFRDGLLPENTFIVGYARSRLTVADIRKQSEPFFKATPEEKLKLEDFFARNSYVAGQYDDAASYQRLNSHMDALHLGSQANRLFYLALPPTVYEAVTKNIHESCMSQIGWNRIIVEKPFGRDLQSSDRLSNHISSLFREDQIYRIDHYLGKEMVQNLMVLRFANRIFGPIWNRDNIACVILTFKEPFGTEGRGGYFDEFGIIRDVMQNHLLQMLCLVAMEKPASTNSDDVRDEKVKVLKCISEVQANNVVLGQYVGNPDGEGEATKGYLDDPTVPRGSTTATFAAVVLYVENERWDGVPFILRCGKALNERKAEVRLQFHDVAGDIFHQQCKRNELVIRVQPNEAVYTKMMTKKPGMFFNPEESELDLTYGNRYKNVKLPDAYERLILDVFCGSQMHFVRSDELREAWRIFTPLLHQIELEKPKPIPYIYGSRGPTEADELMKRVGFQYEGTYKWVNPHKL

SEQ ID NO: 481 - DNA, 2281 bp, Homo sapien
agctgaggtgtgagcagctgccgaagtcagttccttgtggagccggagctgggcgcggattcgccgaggcaccgaggcactcagaggaggtgagagagcggcggcagacaacaggggaccccgggccggcggcccagagccgagccaagcgtgcccgcgtgtgtccctgcgtgtccgcgaggatgcgtgttcgcgggtgtgtgctgcgttcacaggtgtttctgcggcaggcgccatgtcagaaccggctggggatgtccgtcagaacccatgcggcagcaaggcctgccgccgcctcttcggcccagtggacagcgagcagctgagccgcgactgtgatgcgctaatggcgggctgcatccaggaggcccgtgagcgatggaacttcgactttgtcaccgagacaccactggagggtgacttcgcctgggagcgtgtgcggggccttggcctgcccaagctctaccttcccacggggccccggcgaggccgggatgagttgggaggaggcaggcggcctggcacctcacctgctctgctgcaggggacagcagaggaagaccatgtggacctgtcactgtcttgtacccttgtgcctcgctcaggggagcaggctgaagggtccccaggtggacctggagactctcagggtcgaaaacggcggcagaccagcatgacagatttctaccactccaaacgccggctgatcttctccaagaggaagccctaatccgcccacaggaagcctgcagtcctggaagcgcgagggcctcaaaggcccgctctacatcttctgccttagtctcagtttgtgtgtcttaattattatttgtgttttaatttaaacacctcctcatgtacataccctggccgccccctgccccccagcctctggcattagaattatttaaacaaaaactaggcggttgaatgagaggttcctaagagtgctgggcatttttattttatgaaatactatttaaagcctcctcatcccgtgttctccttttcctctctcccggaggttgggtgggccggcttcatgccagctacttcctcctccccacttgtccgctgggtggtaccctctggaggggtgtggctccttcccatcgctgtcacaggcggttatgaaattcaccccctttcctggacactcagacctgaattctttttcatttgagaagtaaacagatggcactttgaaggggcctcaccgagtgggggcatcatcaaaaactttggagtcccctcacctcctctaaggttgggcagggtgaccctgaagtgagcacagcctagggctgagctggggacctggtaccctcctggctcttgatacccccctctgtcttgtgaaggcagggggaaggtggggtcctggagcagaccaccccgcctgccctcatggcccctctgacctgcactggggagcccgtctcagtgttgagccttttccctctttggctcccctgtaccttttgaggagccccagctacccttcttctccagctgggctctgcaattcccctctgctgctgtccctcccccttgtcctttcccttcagtaccctctcagctccaggtggctctgaggtgcctgtcccacccccacccccagctcaatggactggaaggggaagggacacacaagaagaagggcaccctagttctacctcaggcagctcaagcagcgaccgccccctcctctagctgtgggggtgagggtcccatgtggtggcacaggcccccttgagtggggttatctctgtgttaggggtatatgatgggggagtagatctttctaggagggagacactggcccctcaaatcgtccagcgaccttcctcatccaccccatccctccccagttcattgcactttgattagcagcggaacaaggagtcagacattttaagatggtggcagtagaggctatggacagggcatgccacgtgggctcatatggggctgggagtagttgtctttcctggcactaacgttgagcccctggaggcactgaagtgcttagtgtacttggagtattggggtctgaccccaaacaccttccagctcctgtaacatactggcctggactgttttctctcggctccccatgtgtcctggttcccgtttctccacctagactgtaaacctctcgagggcagggaccacaccctgtactgttctgtgtctttcacagctcctcccacaatgctgaatatacagcaggtgctcaataaatgattcttagtgactttaaaaaaaaaaaaaaaaaaaa

SEQ ID NO: 482 - protein, 164 aa, Homo sapien
MSEPAGDVRQNPCGSKACRRLFGPVDSEQLSRDCDALMAGCIQEARERWNFDFVTETPLEGDFAWERVRGLGLPKLYLPTGPRRGRDELGGGRRPGTSPALLQGTAEEDHVDLSLSCTLVPRSGEQAEGSPGGPGDSQGRKRRQTSMTDFYHSKRRLIFSKRKP

SEQ ID NO: 483 - DNA, 3110 bp, Homo sapien
gtggaacctcgatattggtggtgtccatcgtgggcagcggactaataaaggccatggcgccagcagaaatcctgaacgggaaggagatctccgcgcaaataagggcgagactgaaaaatcaagtcactcagttgaaggagcaagtacctggtttcacaccacgcctggcaatattacaggttggcaacagagatgattccaatctttatataaatgtgaagctgaaggctgctgaagagattgggatcaaagccactcacattaagttaccaagaacaaccacagaatctgaggtgatgaagtacattacatctttgaatgaagactctactgtacatgggttcttagtgcagctacctttagattcagagaattccattaacactgaagaagtgatcaatgctattgcacccgagaaggatgtggatggattgactagcatcaatgctgggagacttgctagaggtgacctcaatgactgtttcattccttgtacgcctaagggatgcttggaactcatcaaagagacaggggtgccgattgccggaaggcatgctgtggtggttgggcgcagtaaaatagttggggccccgatgcatgacttgcttctgtggaacaatgccacagtgaccacctgccactccaagactgcccatctggatgaggaggtaaataaaggtgacatcctggtggttgcaactggtcagcctgaaatggttaaaggggagtggatcaaacctggggcaatagtcatcgactgtggaatcaattatgtcccagatgataaaaaaccaaatgggagaaaagttgtgggtgatgtggcatacgacgaggccaaagagagggcgagcttcatcactcctgttcctggcggcgtagggcccatgacagttgcaatgctcatgcagagcacagtagagagtgccaagcgtttcctggagaaatttaagccaggaaagtggatgattcagtataacaaccttaacctcaagacacctgttccaagtgacattgatatatcacgatcttgtaaaccgaagcccattggtaagctggctcgagaaattggtctgctgtctgaagaggtagaattatatggtgaaacaaaggccaaagttctgctgtcagcactagaacgcctgaagcaccggcctgatgggaaatacgtggtggtgactggaataactccaacacccctgggagaagggaaaagcacaactacaatcgggctagtgcaagcccttggtgcccatctctaccagaatgtctttgcgtgtgtgcgacagccttctcagggccccacctttggaataaaaggtggcgctgcaggaggcggctactcccaggtcattcctatggaagagtttaatctccacctcacaggtgacatccatgccatcactgcagctaataacctcgttgctgcggccattgatgctcggatatttcatgaactgacccagacagacaaggctctctttaatcgtttggtgccatcagtaaatggagtgagaaggttctctgacatccaaatccgaaggttaaagagactaggcattgaaaagactgaccctaccacactgacagatgaagagataaacagatttgcaagattggacattgatccagaaaccataacttggcaaagagtgttggataccaatgatagattcctgaggaagatcacgattggacaggctccaacggagaagggtcacacacggacggcccagtttgatatctctgtggccagtgaaattatggctgtcctggctctcaccacttctctagaagacatgagagagagactgggcaaaatggtggtggcatccagtaagaaaggagagcccgtcagtgccgaagatctgggggtgagtggtgcactgacagtgcttatgaaggacgcaatcaagcccaatctcatgcagacactggagggcactccagtgtttgtccatgctggcccgtttgccaacatcgcacatggcaattcctccatcattgcagaccagatcgcactcaagcttgttggcccagaagggtttgtagtgacggaagcaggatttggagcagacattggaatggaaaagttttttaacatcaaatgccggtattccggcctctgcccccacgtggtggtgcttgttgccactgtcagggctctcaagatgcacgggggcggccccacggtcactgctggactgcctcttcccaaggcttacatacaggagaacctggagctggttgaaaaaggcttcagtaacttgaagaaacaaattgaaaatgccagaatgtttggaattccagtagtagtggccgtgaatgcattcaagacggatacagagtctgagctggacctcatcagccgcctttccagagaacatggggcttttgatgccgtgaagtgcactcactgggcagaagggggcaagggtgccttagccctggctcaggccgtccagagagcagcacaagcacccagcagcttccagctcctttatgacctcaagctcccagttgaggataaaatcaggatcattgcacagaagatctatggagcagatgacattgaattacttcccgaagctcaacacaaagctgaagtctacacgaagcagggctttgggaatctccccatctgcatggctaaaacacacttgtctttgtctcacaacccagagcaaaaaggtgtccctacaggcttcattctgcccattcgcgacatccgcgccagcgttggggctggttttctgtaccccttagtaggaacgatgagcacaatgcctggactccccacccggccctgtttttatgatattgatttggaccctgaaacagaacaggtgaatggattattctaaacagatcaccatccatcttcaagaagctactttgaaagtctggccagtgtctattcaggcccactgggagttaggaagtataagtaagccaagagaagtcagcccctgcccagaagatctgaaactaatagtaggagtttccccagaagtcattttcagccttaattctcatcatgtataaattaacataaatcatgcatgtctgtttactttagtgacgttccacagaataaaaggaaacaagtttgc

SEQ ID NO: 484 - protein, 935 aa, Homo sapien
MAPAEILNGKEISAQIRARLKNQVTQLKEQVPGFTPRLAILQVGNRDDSNLYINVKLKAAEEIGIKATHIKLPRTTTESEVMKYITSLNEDSTVHGFLVQLPLDSENSINTEEVINAIAPEKDVDGLTSINAGRLARGDLNDCFIPCTPKGCLELIKETGVPIAGRHAVVVGRSKIVGAPMHDLLLWNNATVTTCHSKTAHLDEEVNKGDILVVATGQPEMVKGEWIKPGAIVIDCGINYVPDDKKPNGRKVVGDVAYDEAKERASFITPVPGGVGPMTVAMLMQSTVESAKRFLEKFKPGKWMIQYNNLNLKTPVPSDIDISRSCKPKPIGKLAREIGLLSEEVELYGETKAKVLLSALERLKHRPDGKYVVVTGITPTPLGEGKSTTTIGLVQALGAHLYQNVFACVRQPSQGPTFGIKGGAAGGGYSQVIPMEEFNLHLTGDIHAITAANNLVAAAIDARIFHELTQTDKALFNRLVPSVNGVRRFSDIQIRRLKRLGIEKTDPTTLTDEEINRFARLDIDPETITWQRVLDTNDRFLRKITIGQAPTEKGHTRTAQFDISVASEIMAVLALTTSLEDMRERLGKMVVASSKKGEPVSAEDLGVSGALTVLMKDAIKPNLMQTLEGTPVFVHAGPFANIAHGNSSIIADQIALKLVGPEGFVVTEAGFGADIGMEKFFNIKCRYSGLCPHVVVLVATVRALKMHGGGPTVTAGLPLPKAYIQENLELVEKGFSNLKKQIENARMFGIPVVVAVNAFKTDTESELDLISRLSREHGAFDAVKCTHWAEGGKGALALAQAVQRAAQAPSSFQLLYDLKLPVEDKIRIIAQKIYGADDIELLPEAQHKAEVYTKQGFGNLPICMAKTHLSLSHNPEQKGVPTGFILPIRDIRASVGAGFLYPLVGTMSTMPGLPTRPCFYDIDLDPETEQVNGLF

SEQ ID NO: 485 - DNA, 3381 bp, Homo sapien
cgcgattctcagggattgatccgcctcttcaggtaagttatcttccggccccgtaccactgtgccacaggcgcagcccgcttcctcaggtgccctatcccgcgcagaagaccacggcttcacagagtgttatttaagggcgtggccagcggaacatcccgccccattctgtgacgcacggggtggcgcgcgtgggacccgaggggtggggctgggtttagtaggagacctggggcaaggccccctgtggacgaccatctgccagcttctctcgttccgtcgattgggaggagcggtggcgacctcggccttcagtgtttccgacggagtgaatggcggcggcggctgggatgctgctgctgggcttgctgcaggcgggtgggtcggtgctgggccaggcgatggagaaggtgacaggcggcaacctcttgtccatgctgctgatcgcctgcgccttcaccctcagcctggtctacctgatccgtctggccgccggccacctggtccagctgcccgcaggggtgaaaagtcctccatacattttctccccaattccattccttgggcatgccatagcatttgggaaaagtccaattgaatttctagaaaatgcatatgagaagtatggacctgtatttagttttaccatggtaggcaagacatttacttaccttctggggagtgatgctgctgcactgctttttaatagtaaaaatgaagacctgaatgcagaagatgtctacagtcgcctgacaacacctgtgtttgggaagggagttgcatacgatgtgcctaatccagttttcttggagcagaagaaaatgttaaaaagtggccttaacatagcccactttaaacagcatgtttctataattgaaaaagaaacaaaggaatactttgagagttggggagaaagtggagaaaaaaatgtgtttgaagctctttctgagctcataattttaacagctagccattgtttgcatggaaaggaaatcagaagtcaactcaatgaaaaggtagcacagctgtatgcagatttggatggaggtttcagccatgcagcctggctcttaccaggttggctgcctttgcctagtttcagacgcagggacagagctcatcgggaaatcaaggatattttctataaggcaatccagaaacgcagacagtctcaagaaaaaattgatgacattctccaaactttactagatgctacatacaaggatgggcgtcctttgactgatgatgaagtagcagggatgcttattggattactcttggcagggcagcatacatcctcaactactagtgcttggatgggcttctttttggccagagacaaaacacttcaaaaaaaatgttatttagaacagaaaacagtctgtggagagaatctgcctcctttaacttatgaccagctcaaggatctaaatttacttgatcgctgtataaaagaaacattaagacttagacctcctataatgatcatgatgagaatggccagaactcctcagactgtggcagggtataccattcctccaggacatcaggtgtgtgtttctcccactgtcaatcaaagacttaaagactcatgggtagaacgcctggactttaatcctgatcgctacttacaggataacccagcatcaggggaaaagtttgcctatgtgccatttggagctgggcgtcatcgttgtattggggaaaattttgcctatgttcaaattaagacaatttggtccactatgcttcgtttatatgaatttgatctcattgatggatactttcccactgtgaattatacaactatgattcacacccctgagaacccagttatccgttacaaacgaagatcaaaatgaaaaaggttgcaaggaacgaatatatgtgattatcactgtaagccacaaaggcattcgaagagaatgaagtgtacaaaacaactcttgtagtttactgtttttttaagtgtgtaattctaaaagccagtttatgatttaggattttgttaactgaatggttctatcaaatataatagcatttgacacattttctaatagttatgatacttatacatgtgctttcaggaagttccttggtgaaacaattgttgaggggggatctaggtaattggcagattctaaataatataatttccagatagtaattttaagagtactcatcgctcttgccaaataagttcagggtattcaaatcttggactagtcctgcaaggtataaagaataaaaatcccagtgagatacttggaaaccacagtttattattatttatctgggcaattattgtgtgtgtgaggatggaagggtagggaataatcgaacatctaaagccttgaataagagaatactaattgttttggtatgatgatactcagaaatggagatattataggaaaaagaaatcctttggaattttaactaaaatcactgcatatgggaaattaagagatccaggaccatatttgataagagttcctaaaaataatgtaattattaatgctaaagactgctcatgtatcttgatctaattactaaataaattacatatttatttacctgataaatatgtatctagttctacaaggtcacatttatgtggaagtccaaagtcaagtccttaggggataattttgttttgggctcagttgttccctgcttccttttttttttttttttttttttgagatggagtctcgctctgttgcccaggctggagtgcagtggtgcgatctcagctcactgcatcctctgcctcccgggttcaagcaattctctgcctcagcctcccaagtagttgggattacaggcacctgccaccatgcctggctaattttttgtatttttagtagagacgggggtttcactatgttggctaggctggtcttgaactcctgagcctcgtgagtccacccgccttggcctcccaaagtgctgggattacaggcatgagccaccgcacctggccttccctgcttcctctctagaatccaattagggatgtttgttactactcatattgattaaaacagttaacaaacttttttctttttaaaatgtgagatcagtgaactctggttttaagataatctgaaacaaggtccttgggagtaataaaattggtcacattctgtaaagcacattctgtttaggaatcaacttatctcaaattgtaactcggggcctaactatatgagatggctgaaaaaataccacatcgtctgttttcactaggtgatgccaaaatattttgctttatgtatattacagttctttttaaaacactggaagactcatgttaaactctaattgtgaaggcagaatctctgctaatttttcagattaaaattctctttgaaaaaat

SEQ ID NO: 486 - protein, 509 aa, Homo sapien
MAAAAGMLLLGLLQAGGSVLGQAMEKVTGGNLLSMLLIACAFTLSLVYLIRLAAGHLVQLPAGVKSPPYIFSPIPFLGHAIAFGKSPIEFLENAYEKYGPVFSFTMVGKTFTYLLGSDAAALLFNSKNEDLNAEDVYSRLTTPVFGKGVAYDVPNPVFLEQKKMLKSGLNIAHFKQHVSIIEKETKEYFESWGESGEKNVFEALSELIILTASHCLHGKEIRSQLNEKVAQLYADLDGGFSHAAWLLPGWLPLPSFRRRDRAHREIKDIFYKAIQKRRQSQEKIDDILQTLLDATYKDGRPLTDDEVAGMLIGLLLAGQHTSSTTSAWMGFFLARDKTLQKKCYLEQKTVCGENLPPLTYDQLKDLNLLDRCIKETLRLRPPIMIMMRMARTPQTVAGYTIPPGHQVCVSPTVNQRLKDSWVERLDFNPDRYLQDNPASGEKFAYVPFGAGRHRCIGENFAYVQIKTIWSTMLRLYEFDLIDGYFPTVNYTTMIHTPENPVIRYKRRSK

SEQ ID NO: 487 - DNA, 662 bp, Homo sapien
accgccgacgcagacccctctctgcacgccagcccgcccgcacccaccatggccacagttcagcagctggaaggaagatggcgcctggtggacagcaaaggctttgatgaatacatgaaggagctaggagtgggaatagctttgcgaaaaatgggcgcaatggccaagccagattgtatcatcacttgtgatggtaaaaacctcaccataaaaactgagagcactttgaaaacaacacagttttcttgtaccctgggagagaagtttgaagaaaccacagctgatggcagaaaaactcagactgtctgcaactttacagatggtgcattggttcagcatcaggagtgggatgggaaggaaagcacaataacaagaaaattgaaagatgggaaattagtggtggagtgtgtcatgaacaatgtcacctgtactcggatctatgaaaaagtagaataaaaattccatcatcactttggacaggagttaattaagagaatgaccaagctcagttcaatgagcaaatctccatactgtttctttcttttttttttcattactgtgttcaattatctttatcataaacattttacatgcagctatttcaaagtgtgttggattaattaggatcatccctttggttaataaataaatgtgtttgtgct

SEQ ID NO: 488 - protein, 135 aa, Homo sapien
MATVQQLEGRWRLVDSKGFDEYMKELGVGIALRKMGAMAKPDCIITCDGKNLTIKTESTLKTTQFSCTLGEKFEETTADGRKTQTVCNFTDGALVQHQEWDGKESTITRKLKDGKLVVECVMNNVTCTRIYEKVE

SEQ ID NO: 489 - DNA, 477 bp, Homo sapien
  Unsure 406: Unknown base
  Unsure 434: Unknown base
  Unsure 471: Unknown base
tttttttttttttaccatatgcttatgtttattgtacagtcacaagttacatgttgtaaatcaagcagaacactgtaccagttttcactaactcaaatcaagttagcaaattacaaattttagaacagattcattttctgtctcacccaatgtgggtgaccacaaagatatttactttctatgttattaggtagcaaattaatttgatatactacacagcttccaagttaccttaggatatttcaaagtgtttcaaaactggtaaagaataattcatttccagcctgaaatacaatgcagaatggaccatttaggggtaaataacctcacttaatcactctttcctggctaacaaaaataataccaaatatttgggttataattagggcttactaaaattaatggnccactttggaaattatccaggattgggntacattgggtaaaatggcccctgggggaccattggcnaaaaac

SEQ ID NO: 490 - DNA, 3548 bp, Homo sapien
tggccgaagcagggggacagcaagggacgctcaggcggggaccatggcggacggcggctcggagcgggctgacgggcgcatcgtcaagatggaggtggactacagcgccacggtggatcagcgcctacccgagtgtgcgaagctagccaaggaaggaagacttcaagaagtcattgaaacccttctctctctggaaaagcagactcgtactgcttccgatatggtatcgacatcccgtatcttagttgcagtagtgaagatgtgctatgaggctaaagaatgggatttacttaatgaaaatattatgcttttgtccaaaaggcggagtcagttaaaacaagctgttgccaaaatggttcaacagtgctgtacttatgttgaggaaatcacagaccttcctatcaaacttcgattaattgatactctacgaatggttaccgaaggcaagatttatgttgaaattgagcgtgcgcgactgactaaaacattagcaactataaaagaacaaaatggtgatgtgaaagaggcagcctccattttacaggagttacaggtggaaacctacgggtcaatggaaaagaaagagcgagtggaatttattttggagcaaatgaggctctgcctagctgtgaaggattacattcgaacacaaatcatcagcaagaaaattaacaccaaatttttccaggaagaaaatacagagaaattaaagttgaagtactataatttaatgattcagctggatcaacatgagggatcctatttgtctatttgtaagcactacagagcaatatatgatactccctgtatacaggcagaaagtgaaaaatggcagcaggctctgaagagtgttgtactctatgttatcctggctccttttgacaatgaacagtcagatttggttcaccgaataagtggtgacaagaagttagaagaaattcccaaatacaaggatcttttaaagctttttaccacaatggagttgatgcgttggtccacacttgttgaggactatggaatggaattaagaaaaggttcccttgagagtcctgcaacggatgtttttggttctacagaggaaggtgaaaaaaggtggaaagacttgaagaacagagttgttgaacataatattagaataatggccaagtattatactcggataacaatgaaaaggatggcacagcttctggatctatctgttgatgagtccgaagcctttctctcaaatctagtagttaacaagaccatctttgctaaagtagacagattagcaggaattatcaacttccagagacccaaggatccaaataatttattaaatgactggtctcagaaactgaactcattaatgtctctggttaacaaaactacgcatctcatagccaaagaggagatgatacataatctacaataagggtcttagtgctttagaaaaaagttaaaattggaagtcattaaaaaaagactgttataatggtgtatatgttggggttttttttctaagcttctttgtcttaaattttaaaatagtgaatatgtttgagactccctttgacctttcagttccccaagttcattgttaactttgcatttgcaattggtgcaaaaatacagatttctgtcgtctgaatacacaaaaagttgtgtcataacttacccagatatgtttttctatcatttgaaacctttttagctactgtttgttttcattcaactaacaaacatattccaataataaaagcagtatatacatatttcctttctacagttacctctgattctcaacattttgtggggtagtgatttggcaagtgttttttaaataaaacaaatctcattgtaaagttatcagtcatttagtagaatagaaaagcaacatagagcatacaagaacatttgggatagagttgtgatttgtgaagaatttgtactttgatattgtggcggaaagtctagactgagtgtgtatgctggtaaactgtagacttttttttttttttttgagtccggctggttccaatcacagtagcttgattgctttcagccctcatcctctcacttgatcagttgttcaacagaatcagctgacataattgacacagtttattgggtgttaagtccgctctatagggatagtgactacttttttttttttttttttttttgctcttcttcctctcccctttctttatatgggtttaaatttaacataaagttgtttttataaggcttatttgtggctttaacttgtaagtctgattacatcattattgttccaaattcattatctctgtaggaacttttagttccattatatgaacactggataacctaattttttttaatgctttaaaaaaatggcaaaaagacgtcaggccaccctcatagtaagtggtgtagtattaaaatattttcacggaattaaaagtagcttgctgtcaaagaaacacctgagatgaattggtgtgaacgaattttgcaagtttaatttgatttatttcagagaaaatagaaaaaacaatgttagaaggttatttaaaatgatacttaaataaagaaagtgtgaggtctactttaaaaaaattcaaatgaagagaaaaagaaaaacagcattctagaaatggcatttctcctaattaattttccacttaatggaagattatcaattgtcctattttatgatcccaggactgaagacagttgtgggatatctgtcatatttatcctgtgagtcattgtgaataatgacatacagtactgaagtaatctgattttattctttggaaattcaatgcattggtcacactaataacatcaacatctgctatcacttatctttttaaaactaaccaaaaaaggctgggattacaggcatgagccactgcacccaactcctctttcgtctttctttaacacacactaggctctttgtgtattatgattcagtgctatttgtaactgtgtcccagtgaccaaattgcactcgactcgatcagctgttcatccatttcgtgttttttcctgtcaaacattaatccagcaaatatatgaggtatttaccaatttattttcttagtattacaaaataattcattagcataaagtacaatagtgaaatatttgagttgttcggaacctcaattaatcctgttttacatttcagacctaaagctggcaatcaggagaagaagcactttgttttaaatgtggagaagataacacttgattccatttcattgtcattagtgtattaaccagcaggagaggtgatgagccatttttcaaatgaaataccttttatttccatataatttttttattttagagttcaatagctgtttctatgattatcctcaatttccatatgttactgaatctgaaaaacatctttaaaattcaaacagttccattttctctcttgtaagtgttaaatgtgataaaagtacatattttaaattgttttcagctcttggatatagcagcaataaaaacactaatttgtgggtatttaagaaaacctggagaataaactcatactttaaaagatc

SEQ ID NO: 491 - protein, 456 aa, Homo sapien
MADGGSERADGRIVKMEVDYSATVDQRLPECAKLAKEGRLQEVIETLLSLEKQTRTASDMVSTSRILVAVVKMCYEAKEWDLLNENIMLLSKRRSQLKQAVAKMVQQCCTYVEEITDLPIKLRLIDTLRMVTEGKIYVEIERARLTKTLATIKEQNGDVKEAASILQELQVETYGSMEKKERVEFILEQMRLCLAVKDYIRTQIISKKINTKFFQEENTEKLKLKYYNLMIQLDQHEGSYLSICKHYRAIYDTPCIQAESEKWQQALKSVVLYVILAPFDNEQSDLVHRISGDKKLEEIPKYKDLLKLFTTMELMRWSTLVEDYGMELRKGSLESPATDVFGSTEEGEKRWKDLKNRVVEHNIRIMAKYYTRITMKRMAQLLDLSVDESEAFLSNLVVNKTIFAKVDRLAGIINFQRPKDPNNLLNDWSQKLNSLMSLVNKTTHLIAKEEMIHNLQ

SEQ ID NO: 492 - DNA, 1516 bp, Homo sapien
ttggtctaagacatgggctgacaaactttttccataaagggccagaaagtaaatatttcaggctttgtgggatatctatttatgatttattttactcctagtattatttcatcttttatacaggttattaaggttagtattgctgcataacaaattactccaaaatttaatcatttatattcaagaagagttcagctgctaggttcttattttgggactctcatgatgctgaggtcaagatgccagctggaggccaggcgccgcagctcacgcctgtaatcccagcgttttgggaggccaggggcctcccaaattcaaaaggaagagacaaagtccacatctgtcaatgcgaagaatggaaaggtcacatatcatatgtggagcgggacataacaacttcggaaattaaatctcttccccaggtcagtgtgcgggccttccacgctgccagcggaacactggaatggcggaaggggaacgggtacggcagggggaaaggctgggggtggggtcgggtcgagtcgagggaagctggcccgagtgtggacagagatggcggtctgcgcgtctgttgttcccagcgctctgcgaagcctgaaaaggaggagcaacctgtccagaatccccgcaggtccgtgaaagacaggaaaaggaggggaaatctcgacatggaaaaactctacagtgaaaatgaaggaatggcttcaaaccaaggaaagatggaaaatgaagaacagccacaagacgagagaaagccagaagtaacttgtactctggaagacaagaagttagaaaacgagggaaagacagaaaacaagggcaaaacaggagatgaggaaatgttaaaggataaaggaaagccagagagtgagggagaggcaaaagaaggaaagtcagagagggagggagagtcagagatggagggaggatcagagagagagggaaaaccagagatagagggaaagccagagagtgaaggagagccagggagtgaaacaagggctgcaggaaagcgcccagctgaggatgatgtacccaggaaagccaaaagaaaaactaataaggggctggctcattacctcaaggagtataaagaggccatacatgatatgaatttcagcaatgaggacatgataagagaatttgacaatatggctaaggtgcaggatgagaagagaaaaagcaaacagaaattgggggcgtttttgtggatgcaaagaaatttacaggaccccttctaccctagaggtccaagggaattcaggggtggctgcagggccccacgaagggacattgaagacattccttatgtgtagtgtccctggcaggcatttaccaggccatgtgctttaacgttacggtaatactttactttaggcatccctcctgttgctagcagccttttgacctatctgcaatgcagtgttctcagtaggaaatgttcatctgttacatggaaaaaatgttgatggtgcattgtaaaattaaaaaacacaacttgcagaaccaaaaaaaa

SEQ ID NO: 493 - protein, 358 aa, Homo sapien
MPAGGQAPQLTPVIPAFWEARGLPNSKGRDKVHICQCEEWKGHISYVERDITTSEIKSLPQVSVRAFHAASGTLEWRKGNGYGRGKGWGWGRVESREAGPSVDRDGGLRVCCSQRSAKPEKEEQPVQNPRRSVKDRKRRGNLDMEKLYSENEGMASNQGKMENEEQPQDERKPEVTCTLEDKKLENEGKTENKGKTGDEEMLKDKGKPESEGEAKEGKSEREGESEMEGGSEREGKPEIEGKPESEGEPGSETRAAGKRPAEDDVPRKAKRKTNKGLAHYLKEYKEAIHDMNFSNEDMIREFDNMAKVQDEKRKSKQKLGAFLWMQRNLQDPFYPRGPREFRGGCRAPRRDIEDIPYV

SEQ ID NO: 494 - DNA, 565 bp, Homo sapien
  Unsure 288: Unknown base
ataaatattggaaatgacaactttaacaattctatatgtacacaggacactgaaaacataaaatcatgaacaaggccaaaaaataacgttgcacattaaccctttagttattactttctattttccagtcccagcatcatacctgctaattactcagatcacaagcctcaaggattaagtgttttgaatgtatttcagtttcatactttaacaatgcttaaagactattggttgtattctgatcaaatggttctccttcccatatttccctttctcaatagatcttanacaaaaaggtgagcagggaaaactgtgattacaggatccaacatgacaggtatacccaatgattcatttaagggtggcataaagttatatagaaaagacctacaggacggaagacaagtacatcaacatgtagtgaaattaagcagttcacccactgcgtgcttacatggctcctatatctcttcgggaagaagccagagccgtagaagaagtcagggcaaaccagaactgttgaggagtatgggtgggggggcagaaggaagggactgggggaaaa

SEQ ID NO: 495 - DNA, 7137 bp, Homo sapien
gtactctcgcggtatttgtcccgactctcgcggggtttagcgtggcattgggaggcccggcctgggggaggagacggcgttccgttagcggcgttggggtttggctgcagtggcagtgctttctcttctgctcacggggacccgctcaggctggaggccagccagctcttgccgccacctcggtcgcgatgggggcgcaggaccggccgcagtgccacttcgacatcgagatcaaccgggagccggttggtcgcattatgtttcagctcttctcagacatatgtccaaaaacatgcaaaaacttcctttgcttgtgctcaggagagaaaggccttgggaaaacaactgggaagaagttatgttataaaggttctacgttccatcgtgtggttaaaaactttatgattcagggtggggacttcagtgaaggtaatggaaaaggtggagaatcaatttatggtggatattttaaagatgaaaactttattctcaaacatgacagagcgttccttttatcaatggcaaatcgagggaaacataccaatggttcccagtttttcattaccacaaagcctgctccacacctggatggggtgcatgtagtctttggactggttatttctggttttgaagtaatcgaacaaattgaaaatctgaagaccgatgctgcaagcagaccatatgcagatgtgcgagttattgactgtggagtacttgccacaaaatcaataaaagatgtttttgagaaaaaaaggaagaaaccaactcattcagaaggctcggattcctcttccaattcctcctcttcttcagaatcatcttcagaaagtgaacttgaacatgagagaagcagaaggaggaaacataagaggaggccaaaagttaaacgttctaaaaagaggcgaaaggaagcaagcagttcagaagagccaaggaataaacatgcaatgaacccaaaaggtcactctgagaggagtgataccaatgaaaaaaggtcagttgattccagtgctaaaagggaaaaacctgtggtccgcccagaagagattcctccagtgcctgagaaccgatttttactgagaagagatatgcctgttgttactgcagaacctgaaccgaagattcctgatgttgcacccattgtaagtgatcagaaaccatctgtatcaaagtctggacggaagattaaaggaaggggcacaattcgctatcacacacctccaagatcaagatcctgttctgagtcagatgatgatgacagcagtgaaactcctcctcactggaaagaggaaatgcagagattaagagcatatagaccacctagtggagaaaaatggagtaaaggagataagttaagtgacccctgttcaagccgatgggatgaaagaagcttgtctcagagatccagatcatggtcctataatggatattattcagaccttagtacagcaagacactctggccaccataaaaaacgcagaaaagaaaaaaaggttaagcataaaaagaaagggaaaaagcagaaacactgcagaagacacaaacaaacaaagaagagaaggattcttataccgtctgacatagaatcctcaaaatcttccactcgaagaatgaaatcctcttgtgatagagaaaggagttctcgttcttcctcattgtcatctcatcactcatcaaagagagactggtctaaatctgataaggatgtccagagctctttaacccattccagcagagactcatacagatcaaaatctcactcacagtcttattctagaggaagctcaagatcaaggactgcgtcaaagtcctcatcacattctcgaagtagatcaaagtccagatctagttccaagtctgggcaccgaaagagagcatcaaaatcaccaagaaaaacagcttctcagttaagtgaaaataaaccagttaaaacagaacctttaagagcaaccatggcacaaaatgaaaatgtagtagtacaaccagttgtagcagaaaatattcctgtaataccactgagtgacagtccccccccttcaagatggaagcctggacagaaaccttggaagccctcttatgagcgaattcaggaaatgaaagctaaaacaacccatttgctacccatccaaagcacttacagtttagcaaatattaaagagactggtagctcatcatcctaccataaaagagaaaaaaattcggaaagtgatcagagcacttattcaaaatacagtgatagaagttcagaaagctcaccaaggtcaaggagcagatcttctaggagtagatcttattccagatcatatacaagatcacgtagtctagctagttcacattcaaggtctaggtctccatcatctagatctcattcacgaaataaatacagtgatcattcacagtgtagtagatcatcttcatatacttctattagcagtgatgatggaaggcgagctaagaggagacttagatccagtgggaaaaaaaatagcgtttcacataaaaagcatagcagcagctctgaaaagacacttcacagtaaatatgtcaaaggtagagacaggtcttcatgtgtgagaaagtatagcgagagcagatcatctttagattattcttcagacagtgagcagtcaagtgttcaggccacacagtcagcccaggaaaaagagaagcagggccaaatggaaagaacacataataaacaagaaaaaaacagaggtgaagaaaaatccaagtctgaacgggaatgccctcattcaaaaaaaagaactttgaaagagaatctttctgatcaccttagaaatggcagtaagcccaaaaggaagaattatgctggtagtaaatgggactctgagtcaaattcagaacgagatgtcactaaaaacagtaaaaatgactcccatccatcctctgacaaggaagaaggtgaggccacatccgattctgaatcagaggttagtgaaattcacatcaaagtcaaacccacaaccaagtcgtccacaaatacttcactgcctgatgataatggtgcttggaaatcaagcaaacagcgcacatcaacttctgactctgaggggtcctgttccaattcggaaaacaataggggaaagccacaaaagcacaaacatgggtcaaaggaaaatcttaaaagagaacacaccaaaaaagtgaaagagaaattgaaagggaaaaaagacaaaaagcataaggctccaaaacgaaagcaagcatttcactggcagcctccactagaatttggtgaagaggaggaggaggagattgatgacaagcaagttactcaggaatcaaaagagaaaaaagtttctgaaaacaatgaaaccataaaagataatattctaaaaactgagaaatccagtgaagaggacctttcaggtaaacatgatacagtgactgtttcatcagatcttgatcagtttactaaagatgatagtaaactcagtatttctcccacagctttaaatactgaggaaaatgtggcctgtttacaaaacattcagcacgttgaagaaagtgttcccaatggagtggaagatgtgcttcaaacagatgacaacatggagatctgcactcctgataggagttccccagcaaaagtagaggagacttcccctctaggaaatgcacggcttgataccccagatataaacattgttttgaagcaggatatggcaacggaacatcctcaagcagaggtagtaaaacaggaaagcagcatgtccgaaagtaaagtgttgggtgaagtggggaaacaggacagcagctctgctagcttggctagtgctggagaaagtaccgggaagaaggaggtggctgagaagagccagatcaacctcattgataagaaatggaagcccctgcaaggtgtggggaacctggcagcacctaatgctgccacatccagtgctgtggaagttaaggtgttgaccactgtgcctgaaatgaaaccacaaggcttgagaatagaaattaaaagcaaaaataaagttcggcctgggtctctctttgatgaagtaagaaagacagcacgcttaaaccgtagaccaagaaatcaggagagttcaagtgatgagcagacgcctagtcgggatgatgatagccagtccaggagtccaagtagatctcgaagtaaatctgaaaccaaatcaagacacagaacaaggtctgtctcctatagtcactcaagaagtcgatcgagaagttccacatcatcttatcgatcaagaagctactctagaagtcggagcagaggatggtacagcagaggccgaaccagaagccggagcagttcctaccggagttacaaaagtcacaggacgtccagcaggagcagatccaggagcagctcatatgatccccacagtcgatccaggtcctacacctacgatagctactatagcaggagtcggagtcgaagtagaagccagagaagtgacagttaccaccgaggcagaagttataatcggcggtccaggagttgtagatcttatggctctgacagtgaaagtgaccgaagttactctcatcaccggagccccagtgagagcagcagatacagttgaaaacgtccggatacaaattatatcttatttgtaaatatctggcaacttagcttaagaaatgtaatgacagtctgttgttctatttcaatatcagaggtgaatttcaaaaatagacacttcttaattgttactggttcatttacatgtggggagaagaatttaaaatacagatatgtctcctaaaaatatttttatgccacattttacagtagccaactatggaaatgaatttcattttcttgaatcaagaaatcgtgaaatttatctatgtataatttgcaatattattttaagtctatttcactctatcttacgtatcccttagaatacagattctttttgcctgtttttccagttttagcatatatgctgccaagcatagaactgtgaaggagaactgttaaaggcggccaaatatttatatactgattacatagagtcttgtacatatgtgctctaaaaacaaaccacccagaattgatactgttggtaaccaggagtataaggcagtggctctggggttcttaattcattcctaacttctttgatacttcacaggattaggaaagtggtcatcatacatcccacacagtctgtattacttcaggcttgtgggcaaggttaggaagaatcaatcagccttaactataaatacctgcactgtctctgaggacttactattttatgttctttttaatcaataccgatcagaagtttaggttataaaaacaattctacttcatgctttggtgcttggtaatttttggtgcgtctttaagcattactcttatatatcatatattaaaataccataaaaatgaaattcagacaaaatcactggcaccaaaaatggtttattctgagctgtcttcactttgactatttggggggcttctctcaagtacagatgtgggttggggtcccctggagcaggcaggattggcagtaagagatattggccactcaagtctactgtgtgtgtgtgcctctggaagagtgaagaatggacttcaaaagtaacatcaaaaatctaactgccaccatcctggagacattttgcagggctttcctttcaagtctttcaagtacaggatattaccacaacagcagctgaactgttgtaaccagcatgtttttcctatttccactgtgacctgcagctgactcaaagccttgcgtgacctgacccaggtgcaagagacaggggaagagggatagagggtatagcataaattacatattttcatggctttgggtggttcctccaaaaataattggacctgtaaaaactagtgtgtgtgtgtgtgtgtgtgtgtgtgtgtgtgtggtttttttttttaatctttactttgaatttgttccccaagtgtacttaatcaccttagtgccagtttaatccagttatgcagaagaaattcatattggttgcctgatgtagagctcagcaccaccctaccacaggccttgtctggtgtatttgggaagtggaaaagagccctcagttggagggagctgacaacccttggtggagggagggtgcccttgaatgtattaaaactatcacccaaagaaggtatgaaaacagggtaaggtggtcagttgtttgccaggtcaatagacagaaagtacattagaaaacaggacttaggccaaacaaacaatactggatactgaatacaaaacagtatgatttatattaaaggtttccaaaggttgcctgcaaaggagaatattactactagtcagcaggaaaaaaatgcattcagaacccaagcagaaactgccaaatgtaattaggttaagaaaagttacccttgggcagtgtattagttttctattgctgtgtgacaaattaccccaaatttagcagtttaaaaaacaatacccatagcagttctgtagctcatgagtctggcacagtgtggctggattctctgctcagggtcttaaaggctgaaataagggttggcaggacaacattccttcatggaggctctggggaagaatctgcttctaagttcattcaggttgttggcggaattcagttctttgctggctctcagctggaggcccctctctcacctcaaggctgcctgcattccttcttatgtggtcccctccagcttcaaaccagccttcctgctctttctcatgcttcatatctctctcccgtcctcctgttttaggggcatatgattagctcaagcccacagatatattttaaggttgattgtgcgatagaacataattgcaggagtactgtctcatctcatcatattcacgggttctggagattagctcattgaaagtgggaggggcattttcaaattctgcctaccacaggcaataactgcccatctcagctgtaggtggaatttttacccagaaaagataggccctagaagcctcatttcttttctccatggaaaaggacagccctctgctgcagcgttcaacttgtgtgtttactgacagagtgaactacagaaatagcttttcttcctaaaggggattgttctacattttgaagttattttttaataaaattgaattatgttgt

SEQ ID NO: 496 - protein, 1462 aa, Homo sapien
MGAQDRPQCHFDIEINREPVGRIMFQLFSDICPKTCKNFLCLCSGEKGLGKTTGKKLCYKGSTFHRVVKNFMIQGGDFSEGNGKGGESIYGGYFKDENFILKHDRAFLLSMANRGKHTNGSQFFITTKPAPHLDGVHVVFGLVISGFEVIEQIENLKTDAASRPYADVRVIDCGVLATKSIKDVFEKKRKKPTHSEGSDSSSNSSSSSESSSESELEHERSRRRKHKRRPKVKRSKKRRKEASSSEEPRNKHAMNPKGHSERSDTNEKRSVDSSAKREKPVVRPEEIPPVPENRFLLRRDMPVVTAEPEPKIPDVAPIVSDQKPSVSKSGRKIKGRGTIRYHTPPRSRSCSESDDDDSSETPPHWKEEMQRLRAYRPPSGEKWSKGDKLSDPCSSRWDERSLSQRSRSWSYNGYYSDLSTARHSGHHKKRRKEKKVKHKKKGKKQKHCRRHKQTKKRRILIPSDIESSKSSTRRMKSSCDRERSSRSSSLSSHHSSKRDWSKSDKDVQSSLTHSSRDSYRSKSHSQSYSRGSSRSRTASKSSSHSRSRSKSRSSSKSGHRKRASKSPRKTASQLSENKPVKTEPLRATMAQNENVVVQPVVAENIPVIPLSDSPPPSRWKPGQKPWKPSYERIQEMKAKTTHLLPIQSTYSLANIKETGSSSSYHKREKNSESDQSTYSKYSDRSSESSPRSRSRSSRSRSYSRSYTRSRSLASSHSRSRSPSSRSHSRNKYSDHSQCSRSSSYTSISSDDGRRAKRRLRSSGKKNSVSHKKHSSSSEKTLHSKYVKGRDRSSCVRKYSESRSSLDYSSDSEQSSVQATQSAQEKEKQGQMERTHNKQEKNRGEEKSKSERECPHSKKRTLKENLSDHLRNGSKPKRKNYAGSKWDSESNSERDVTKNSKNDSHPSSDKEEGEATSDSESEVSEIHIKVKPTTKSSTNTSLPDDNGAWKSSKQRTSTSDSEGSCSNSENNRGKPQKHKHGSKENLKREHTKKVKEKLKGKKDKKHKAPKRKQAFHWQPPLEFGEEEEEEIDDKQVTQESKEKKVSENNETIKDNILKTEKSSEEDLSGKHDTVTVSSDLDQFTKDDSKLSISPTALNTEENVACLQNIQHVEESVPNGVEDVLQTDDNMEICTPDRSSPAKVEETSPLGNARLDTPDINIVLKQDMATEHPQAEVVKQESSMSESKVLGEVGKQDSSSASLASAGESTGKKEVAEKSQINLIDKKWKPLQGVGNLAAPNAATSSAVEVKVLTTVPEMKPQGLRIEIKSKNKVRPGSLFDEVRKTARLNRRPRNQESSSDEQTPSRDDDSQSRSPSRSRSKSETKSRHRTRSVSYSHSRSRSRSSTSSYRSRSYSRSRSRGWYSRGRTRSRSSSYRSYKSHRTSSRSRSRSSSYDPHSRSRSYTYDSYYSRSRSRSRSQRSDSYHRGRSYNRRSRSCRSYGSDSESDRSYSHHRSPSESSRYS

SEQ ID NO: 497 - DNA, 3865 bp, Homo sapien
cggcagggttggaaaatgatggaagaggcggaggtggaggcgaccgagtgctgagaggaacctgcggaatcggccgagatggggtctggcgcgcgctttccctcggggacccttcgtgtccggtggttgctgttgcttggcctggtgggcccagtcctcggtgcggcgcggccaggctttcaacagacctcacatctttcttcttatgaaattataactccttggagattaactagagaaagaagagaagcccctaggccctattcaaaacaagtatcttatgttattcaggctgaaggaaaagagcatattattcacttggaaaggaacaaagaccttttgcctgaagattttgtggtttatacttacaacaaggaagggactttaatcactgaccatcccaatatacagaatcattgtcattatcggggctatgtggagggagttcataattcatccattgctcttagcgactgttttggactcagaggattgctgcatttagagaatgcgagttatgggattgaacccctgcagaacagctctcattttgagcacatcatttatcgaatggatgatgtctacaaagagcctctgaaatgtggagtttccaacaaggatatagagaaagaaactgcaaaggatgaagaggaagagcctcccagcatgactcagctacttcgaagaagaagagctgtcttgccacagacccggtatgtggagctgttcattgtcgtagacaaggaaaggtatgacatgatgggaagaaatcagactgctgtgagagaagagatgattctcctggcaaactacttggatagtatgtatattatgttaaatattcgaattgtgctagttggactggagatttggaccaatggaaacctgatcaacatagttgggggtgctggtgatgtgctggggaacttcgtgcagtggcgggaaaagtttcttatcacacgtcggagacatgacagtgcacagctagttctaaagaaaggttttggtggaactgcaggaatggcatttgtgggaacagtgtgttcaaggagccacgcaggcgggattaatgtgtttggacaaatcactgtggagacatttgcttccattgttgctcatgaattgggtcataatcttggaatgaatcacgatgatgggagagattgttcctgtggagcaaagagctgcatcatgaattcaggagcatcgggttccagaaactttagcagttgcagtgcagaggactttgagaagttaactttaaataaaggaggaaactgccttcttaatattccaaagcctgatgaagcctatagtgctccctcctgtggtaataagttggtggacgctggggaagagtgtgactgtggtactccaaaggaatgtgaattggacccttgctgcgaaggaagtacctgtaagcttaaatcatttgctgagtgtgcatatggtgactgttgtaaagactgtcggttccttccaggaggtactttatgccgaggaaaaaccagtgagtgtgatgttccagagtactgcaatggttcttctcagttctgtcagccagatgtttttattcagaatggatatccttgccagaataacaaagcctattgctacaacggcatgtgccagtattatgatgctcaatgtcaagtcatctttggctcaaaagccaaggctgcccccaaagattgtttcattgaagtgaattctaaaggtgacagatttggcaattgtggtttctctggcaatgaatacaagaagtgtgccactgggaatgctttgtgtggaaagcttcagtgtgagaatgtacaagagatacctgtatttggaattgtgcctgctattattcaaacgcctagtcgaggcaccaaatgttggggtgtggatttccagctaggatcagatgttccagatcctgggatggttaacgaaggcacaaaatgtggtgctggaaagatctgtagaaacttccagtgtgtagatgcttctgttctgaattatgactgtgatgttcagaaaaagtgtcatggacatggggtatgtaatagcaataagaattgtcactgtgaaaatggctgggctcccccaaattgtgagactaaaggatacggaggaagtgtggacagtggacctacatacaatgaaatgaatactgcattgagggacggacttctggtcttcttcttcctaattgttccccttattgtctgtgctatttttatcttcatcaagagggatcaactgtggagaagctacttcagaaagaagagatcacaaacatatgagtcagatggcaaaaatcaagcaaacccttctagacagccggggagtgttcctcgacatgtttctccagtgacacctcccagagaagttcctatatatgcaaacagatttgcagtaccaacctatgcagccaagcaacctcagcagttcccatcaaggccacctccaccacaaccgaaagtatcatctcagggaaacttaattcctgcccgtcctgctcctgcacctcctttatatagttccctcacttgatttttttaaccttctttttgcaaatgtcttcagggaactgagctaatactttttttttttcttgatgttttcttgaaaagcctttctgttgcaactatgaatgaaaacaaaacaccacaaaacagacttcactaacacagaaaaacagaaactgagtgtgagagttgtgaaatacaaggaaatgcagtaaagccagggaatttacaataacatttccgtttccatcattgaataagtcttattcagtcatcggtgaggttaatgcactaatcatggattttttgaacatgttattgcagtgattctcaaattaactgtattggtgtaagatttttgtcattaagtgtttaagtgttattctgaattttctaccttagttatcattaatgtagttcctcattgaacatgtgataatctaatacctgtgaaaactgactaatcagctgccaataatatctaatatttttcatcatgcacgaattaataatcatcatactctagaatcttgtctgtcactcactacatgaataagcaaatattgtcttcaaaagaatgcacaagaaccacaattaagatgtcatattattttgaaagtacaaaatatactaaaagagtgtgtgtgtattcacgcagttactcgcttccatttttatgacctttcaactataggtaataactcttagagaaattaatttaatattagaatttctattatgaatcatgtgaaagcatgacattcgttcacaatagcactattttaaataaattataagctttaaggtacgaagtatttaatagatctaatcaaatatgttgattcatggctataataaagcaggagcaattataaaatcttcaatcaattgaacttttacaaaaccacttgagaatttcatgagcactttaaaatctgaactttcaaagcttgctattaaatcatttagaatgtttacatttactaaggtgtgctgggtcatgtaaaatattagacactaatattttcatagaaattaggctggagaaagaaggaagaaatggttttcttaaatacctacaaaaaagttactgtggtatctatgagttatcatcttagctgtgttaaaaatgaatttttactatggcagatatggtatggatcgtaaaattttaagcactaaaaattttttcataacctttcataataaagtttaataataggtttattaactgaatttcattagttttttaaaagtgtttttggtttgtgtatatatacatatacaaatacaacatttacaataaataaaatacttgaaattctcaaaaaaaaaaaaaaaaaaaaaaaaaa

SEQ ID NO: 498 - protein, 819 aa, Homo sapien
MGSGARFPSGTLRVRWLLLLGLVGPVLGAARPGFQQTSHLSSYEIITPWRLTRERREAPRPYSKQVSYVIQAEGKEHIIHLERNKDLLPEDFVVYTYNKEGTLITDHPNIQNHCHYRGYVEGVHNSSIALSDCFGLRGLLHLENASYGIEPLQNSSHFEHIIYRMDDVYKEPLKCGVSNKDIEKETAKDEEEEPPSMTQLLRRRRAVLPQTRYVELFIVVDKERYDMMGRNQTAVREEMILLANYLDSMYIMLNIRIVLVGLEIWTNGNLINIVGGAGDVLGNFVQWREKFLITRRRHDSAQLVLKKGFGGTAGMAFVGTVCSRSHAGGINVFGQITVETFASIVAHELGHNLGMNHDDGRDCSCGAKSCIMNSGASGSRNFSSCSAEDFEKLTLNKGGNCLLNIPKPDEAYSAPSCGNKLVDAGEECDCGTPKECELDPCCEGSTCKLKSFAECAYGDCCKDCRFLPGGTLCRGKTSECDVPEYCNGSSQFCQPDVFIQNGYPCQNNKAYCYNGMCQYYDAQCQVIFGSKAKAAPKDCFIEVNSKGDRFGNCGFSGNEYKKCATGNALCGKLQCENVQEIPVFGIVPAIIQTPSRGTKCWGVDFQLGSDVPDPGMVNEGTKCGAGKICRNFQCVDASVLNYDCDVQKKCHGHGVCNSNKNCHCENGWAPPNCETKGYGGSVDSGPTYNEMNTALRDGLLVFFFLIVPLIVCAIFIFIKRDQLWRSYFRKKRSQTYESDGKNQANPSRQPGSVPRHVSPVTPPREVPIYANRFAVPTYAAKQPQQFPSRPPPPQPKVSSQGNLIPARPAPAPPLYSSLT

SEQ ID NO: 499 - DNA, 2239 bp, Homo sapien
cgtccgtgacaagatgaagctcatcatcctggagcactattctcaggcgagcgagtgggcggctaaatacatcaggaaccgtatcatccagtttaacccagggccagagaagtacttcaccctggggctccccactgggagtaccccacttggctgctacaagaagctgattgaatactataagaatggggacctgtcctttaaatatgtgaagaccttcaacatggatgagtacgtgggccttcctcgagaccacccggagagttaccactccttcatgtggaacaacttcttcaagcacattgacatccacccagaaaacacccacattctggatgggaatgcagtcgacctacaggcagaatgtgatgcctttgaagagaagatcaaggctgcaggtgggatcgagctatttgttggaggcatcggccctgatggacacattgccttcaacgagccaggctccagtctggtgtccaggacccgtgtgaagacgctggccatggataccatcctggccaatgctaggttcttcgatggagaactcaccaaggtgcccaccatggccttgacggtgggggtgggcactgtcatggatgctagagaggtgatgatccttatcacaggtgctcacaaggcatttgctctgtacaaggccatcgaggagggagtgaaccacatgtggaccgtgtctgccttccagcagcatccccgcaccgtgtttgtgtgtgacgaggatgccaccttggagctgaaagtgaagactgtcaagtatttcaaaggtttaatgcttgttcataacaagttggtggaccccttgtacagtatcaaagagaaagaaactgagaaaagccaatcttcgaagaaaccatacagcgattagcctgtgctgggacctagtgtcaagtacccatagggaaaggcaggtctttctggaaattgtctttagaagaaagaattgtatttctttaatctagtatggttactccagataagtgggtgaacttattgttcttggccatgaggctgggagcctagtcacggagtttagctatagggagaatgtttgtaacttaatcagaaaaaaaatatctgcaaaatgtactccatcattttgatgtctgccaaacccaggttgggagttttaaactttttgttctgcttcagccatggttcacacatatgacacactcccgtcaggaatttctctccttacacgcactgattttcaagtgggagggaattaggggcttatgtatattggataccacctcttgagagtccttcttgcacaggcctgccccttggttgagaaccattgttccaagtgaaggcacaaactctcaatatctaaaataagtgcaaggaagcagtctctttggtcagtaacaagtgcaatggaaagaaaacgatcccttccttcttccactttcacagcttttctctgaactaggagaacctgggggtggatttgggtgggtggggccaaagaggaggcttctattgataaatccagagcctcaaggggcccagccacgtcaaacttctctccctcagggactctccagcaccaaaaggcagaaggtggaagccgtttttcccccagagccctgtgtttttgtgaaaggcctcactgtggctcctctgttttacatactcattagtaagtgggaggtccactggggcaacagacactgccacaatttcagtgttgtgttcagccaaggggacggtctggacaggcagcttaagtgtgagtttagtcacaactcctgagtgtcccgctctcctgcttacctaggaggtgagtgccaggaaaatacaccaaatgcttctagtattgtttccccacttaaaatagtcctgcttaaattcacatggtgtggtctgatgttctgagagcatcaggaaatacaacccttttgcccatttacccttctccccggatcccaaggtggtctgttgctctggcttcctttcattgtcttaggccttcatggagtggatgctgcctcctcctggctgtttttgtgcctgtttgaagctactgctgcctccatttctgggaaagacctttgagagcctagcccaggcctaagggctatgtttggtaccagtgttttgtctttagcttttctatgtgattgtgccgtcattctgttttaagctcatggatcaatggatttgtttacaatgtgatattttctattaaatccagtattttcaaaaaaaaaaaaaa

SEQ ID NO: 500 - protein, 289 aa, Homo sapien
MKLIILEHYSQASEWAAKYIRNRIIQFNPGPEKYFTLGLPTGSTPLGCYKKLIEYYKNGDLSFKYVKTFNMDEYVGLPRDHPESYHSFMWNNFFKHIDIHPENTHILDGNAVDLQAECDAFEEKIKAAGGIELFVGGIGPDGHIAFNEPGSSLVSRTRVKTLAMDTILANARFFDGELTKVPTMALTVGVGTVMDAREVMILITGAHKAFALYKAIEEGVNHMWTVSAFQQHPRTVFVCDEDATLELKVKTVKYFKGLMLVHNKLVDPLYSIKEKETEKSQSSKKPYSD

SEQ ID NO: 501 - DNA, 1345 bp, Homo sapien
aaaacagccggggctccagcgggagaacgataatgcaaagtgctatgttcttggctgttcaacacgactgcagacccatggacaagagcgcaggcagtggccacaagagcgaggagaagcgagaaaagatgaaacggacccttttaaaagattggaagacccgtttgagctacttcttacaaaattcctctactcctgggaagcccaaaaccggcaaaaaaagcaaacagcaagctttcatcaagccttctcctgaggaagcacagctgtggtcagaagcatttgacgagctgctagccagcaaatatggtcttgctgcattcagggcttttttaaagtcggaattctgtgaagaaaatattgaattctggctggcctgtgaagacttcaaaaaaaccaaatcaccccaaaagctgtcctcaaaagcaaggaaaatatatactgacttcatagaaaaggaagctccaaaagagataaacatagattttcaaaccaaaactctgattgcccagaatatacaagaagctacaagtggctgctttacaactgcccagaaaagggtatacagcttgatggagaacaactcttatcctcgtttcttggagtcagaattctaccaggacttgtgtaaaaagccacaaatcaccacagagcctcatgctacatgaaatgtaaaagggagcccagaaatggaggacatttcattctttttcctgaggggaaggactgtgacctgccataaagactgaccttgaattcagcctgggtgttcaggaaacatcactcagaactattgattcaaagttgggtagtgaatcaggaagccagtaactgactaggagaagctggtatcagaacagcttccctcactgtgtacagaacgcaagaagggaataggtggtctgaacgtggtgtctcactctgaaaagcaggaatgtaagatgatgaaagagacaatgtaatactgttggtccaaaagcatttaaaatcaatagatctgggattatgtggccttaggtagctggttgtacatctttccctaaatcgatccatgttaccacatagtagttttagtttaggattcagtaacagtgaagtgtttactatgtgcaagggtattgaagttcttatgaccacagatcatcagtactgttgtctcatgtaatgctaaaactgaaatggtccgtgtttgcattgttaaaaatgatgtgtgaaatagaatgagtgctatggtgttgaaaactgcagtgtccgttatgagtgccaaaaatctgtcttgaaggcagctacactttgaagtggtctttgaatacttttaataaatttattttgataaataatattg

SEQ ID NO: 502 - protein, 211 aa, Homo sapien
MQSAMFLAVQHDCRPMDKSAGSGHKSEEKREKMKRTLLKDWKTRLSYFLQNSSTPGKPKTGKKSKQQAFIKPSPEEAQLWSEAFDELLASKYGLAAFRAFLKSEFCEENIEFWLACEDFKKTKSPQKLSSKARKIYTDFIEKEAPKEINIDFQTKTLIAQNIQEATSGCFTTAQKRVYSLMENNSYPRFLESEFYQDLCKKPQITTEPHAT

SEQ ID NO: 503 - DNA, 2899 bp, Homo sapien
cagacggcgctgagcgcggcggcggcgggagcggcgtcgagtgtctccgtgcgcccgtctgtggccaagcagccagcagcctagcagccagtcagcttgccgccggcggccaagcagccaaccatgctcaacttcggtgcctctctccagcagactgcggaggaaagaatggaaatgatttctgaaaggccaaaagagagtatgtattcctggaacaaaactgcagagaaaagtgattttgaagctgtagaagcacttatgtcaatgagctgcagttggaagtctgattttaagaaatacgttgaaaacagacctgttacaccagtatctgatttgtcagaggaagagaatctgcttccgggaacacctgattttcatacaatcccagcattttgtttgactccaccttacagtccttctgactttgaaccctctcaagtgtcaaatctgatggcaccagcgccatctactgtacacttcaagtcactctcagatactgccaaacctcacattgccgcacctttcaaagaggaagaaaagagcccagtatctgcccccaaactccccaaagctcaggcaacaagtgtgattcgtcatacagctgatgcccagctatgtaaccaccagacctgcccaatgaaagcagccagcatcctcaactatcagaacaattcttttagaagaagaacccacctaaatgttgaggctgcaagaaagaacataccatgtgccgctgtgtcaccaaacagatccaaatgtgagagaaacacagtggcagatgttgatgagaaagcaagtgctgcactttatgacttttctgtgccttcctcagagacggtcatctgcaggtctcagccagcccctgtgtccccacaacagaagtcagtgttggtctctccacctgcagtatctgcagggggagtgccacctatgccggtcatctgccagatggttccccttcctgccaacaaccctgttgtgacaacagtcgttcccagcactcctcccagccagccaccagccgtttgcccccctgttgtgttcatgggcacacaagtccccaaaggcgctgtcatgtttgtggtaccccagcccgttgtgcagagttcaaagcctccggtggtgagcccgaatggcaccagactctctcccattgcccctgctcctgggttttccccttcagcagcaaaagtcactcctcagattgattcatcaaggataaggagtcacatctgtagccacccaggatgtggcaagacatactttaaaagttcccatctgaaggcccacacgaggacgcacacaggagaaaagcctttcagctgtagctggaaaggttgtgaaaggaggtttgcccgttctgatgaactgtccagacacaggcgaacccacacgggtgagaagaaatttgcgtgccccatgtgtgaccggcggttcatgaggagtgaccatttgaccaagcatgcccggcgccatctatcagccaagaagctaccaaactggcagatggaagtgagcaagctaaatgacattgctctacctccaacccctgctcccacacagtgacagaccggaaagtgaagagtcagaactaactttggtctcagcgggagccagtggtgatgtaaaaatgcttccactgcaagtctgtggccccacaacgtgggcttaaagcagaagccccacagcctggcacgaaggccccgcctgggttaggtgactaaaagggcttcggccacaggcaggtcacagaaaggcaggtttcatttcttatcacataagagagatgagaaagcttttattcctttgaatattttttgaaggtttcagatgaggtcaacacaggtagcacagattttgaatctgtgtgcatatttgttactttacttttgctgtttatacttgagaccaacttttcaatgtgattcttctaaagcactggtttcaagaatatggaggctggaaggaaataaacattacggtacagacatggagatgtaaaatgagtttgtattattacaaatattgtcatctttttctagagttatcttctttattattcctagtctttccagtcaacatcgtggatgtagtgattaaatatatctagaactatcatttttacactattgtgaatatttggaattgaacgactgtatattgctaagagggcccaaagaattggaatcctccttaatttaattgctttgaagcatagctacaatttgtttttgcatttttgttttgaaagtttaacaaatgactgtatctaggcatttcattatgctttgaactttagtttgcctgcagtttcttgtgtagatttgaaaattgtataccaatgtgttttctgtagactctaagatacactgcactttgtttagaaaaaaaactgaagatgaaatatatattgtaaagaagggatattaagaatcttagataacttcttgaaaaagatggcttatgtcatcagtaaagtacctttatgttatgaggatataatgtgtgctttattgaattagaaaattagtgaccattattcacaggtggacaaatgttgtcctgttaatttataggagttttttggggatgtggaggtagttgggtagaaaaattattagaacattcacttttgttaacagtatttctcttttattctgttatatagtggatgatatacacagtggcaaaacaaaagtacattgcttaaaatatatagtgaaaaatgtcactatatcttcccatttaacattgtttttgtatattgggtgtagatttctgacatcaaaacttggacccttggaaaacaaaagttttaattaaaaaaaatccttgtgacttacaatttgcacaatatttcttttgttgtactttatatcttgtttacaataaagaattc

SEQ ID NO: 504 - protein, 480 aa, Homo sapien
MLNFGASLQQTAEERMEMISERPKESMYSWNKTAEKSDFEAVEALMSMSCSWKSDFKKYVENRPVTPVSDLSEEENLLPGTPDFHTIPAFCLTPPYSPSDFEPSQVSNLMAPAPSTVHFKSLSDTAKPHIAAPFKEEEKSPVSAPKLPKAQATSVIRHTADAQLCNHQTCPMKAASILNYQNNSFRRRTHLNVEAARKNIPCAAVSPNRSKCERNTVADVDEKASAALYDFSVPSSETVICRSQPAPVSPQQKSVLVSPPAVSAGGVPPMPVICQMVPLPANNPVVTTVVPSTPPSQPPAVCPPVVFMGTQVPKGAVMFVVPQPVVQSSKPPVVSPNGTRLSPIAPAPGFSPSAAKVTPQIDSSRIRSHICSHPGCGKTYFKSSHLKAHTRTHTGEKPFSCSWKGCERRFARSDELSRHRRTHTGEKKFACPMCDRRFMRSDHLTKHARRHLSAKKLPNWQMEVSKLNDIALPPTPAPTQ

SEQ ID NO: 505 - DNA, 811 bp, Homo sapien
gggacagcgggcagggaaagccgcgggaagggtactccaggcgagaggcggacgcgagtcgtcgtggcaggaaaagtgactagctccccttcgttgtcagccagggacgagaacacagccacgctcccacccggctgccaacgatccctcggcggcgatgtcggccgccggtgcccgaggcctgcgggccacctaccaccggctcctcgataaagtggagctgatgctgcccgagaaattgaggccgttgtacaaccatccagcaggtcccagaacagttttcttctgggctccaattatgaaatgggggttggtgtgtgctggattggctgatatggccagacctgcagaaaaacttagcacagctcaatctgctgttttgatggctacagggtttatttggtcaagatactcacttgtaattattccaaaaaattggagtctgtttgctgttaatttctttgtgggggcagcaggagcctctcagctttttcgtatttggagatataaccaagaactaaaagctaaagcacacaaataaaagagttcctgatcacctgaacaatctagatgtggacaaaaccattgggacctagtttattatttggttattgataaagcaaagctaactgtgtgtttagaaggcactgtaactggtagctagttcttgattcaatagaaaaatgcagcaaacttttaataacagtctctctacatgacttaaggaacttatctatggatattagtaacatttttctaccatttgtccgtaataaaccatacttgctcgtaaaaaaaaaaaaaaaaaaaa

SEQ ID NO: 506 - protein, 127 aa, Homo sapien [sequence omitted]

SEQ ID NO: 507 - DNA, 537 bp, Homo sapien
atgtggggcgacctctggctcctcccgcctgcctctgccaatccgggcactgggacagaggctgagtttgagaaagctgcagaggaggttaggcaccttaagaccaagccatcggatgaggagatgctgttcatctatggccactacaaacaagcaactgtgggcgacataaatacagaacggcccgggatgttggacttcacgggcaaggccaagtgggatgcctggaatgagctgaaagggacttccaaggaagatgccatgaaagcttacatcaacaaagtagaagagctaaagaaaaaatacgggatatgagagactggatttggttactgtgccatgtgtttatcctaaactgagacaatgccttgtttttttctaataccgtggatggtgggaattcgggaaaataaccagttaaaccagctactcaaggctgctcaccatacggctctaacagattaggggctaaaacgattactgactttccttgagtagtttttatctgaaatcaattaaaagtgtatttgttacttt

SEQ ID NO: 508 - protein, 104 aa, Homo sapien
MWGDLWLLPPASANPGTGTEAEFEKAAEEVRHLKTKPSDEEMLFIYGHYKQATVGDINTERPGMLDFTGKAKWDAWNELKGTSKEDAMKAYINKVEELKKKYGI

SEQ ID NO: 509 - DNA, 5128 bp, Homo sapien
actctggagtgggagtgggagcgagcgcttctgcgactccagttgtgagagccgcaagggcatgggaattgacgccactcaccgacccccagtctcaatctcaacgctgtgaggaaacctcgactttgccaggtccccaagggcagcggggctcggcgagcgaggcacccttctccgtccccatcccaatccaagcgctcctggcactgacgacgccaagagactcgagtgggagttaaagcttccagtgagggcagcaggtgtccaggccgggcctgcgggttcctgttgacgtcttgccctaggcaaaggtcccagttccttctcggagccggctgtcccgcgccactggaaaccgcacctccccgcagcatgggcaccagcctcagcccgaacgacccttggccgctaaacccgctgtccatccagcagaccacgctcctgctactcctgtcggtgctggccactgtgcatgtgggccagcggctgctgaggcaacggaggcggcagctccggtccgcgcccccgggcccgtttgcgtggccactgatcggaaacgcggcggcggtgggccaggcggctcacctctcgttcgctcgcctggcgcggcgctacggcgacgttttccagatccgcctgggcagctgccccatagtggtgctgaatggcgagcgcgccatccaccaggccctggtgcagcagggctcggccttcgccgaccggccggccttcgcctccttccgtgtggtgtccggcggccgcagcatggctttcggccactactcggagcactggaaggtgcagcggcgcgcagcccacagcatgatgcgcaacttcttcacgcgccagccgcgcagccgccaagtcctcgagggccacgtgctgagcgaggcgcgcgagctggtggcgctgctggtgcgcggcagcgcggacggcgccttcctcgacccgaggccgctgaccgtcgtggccgtggccaacgtcatgagtgccgtgtgtttcggctgccgctacagccacgacgaccccgagttccgtgagctgctcagccacaacgaagagttcgggcgcacggtgggcgcgggcagcctggtggacgtgatgccctggctgcagtacttccccaacccggtgcgcaccgttttccgcgaattcgagcagctcaaccgcaacttcagcaacttcatcctggacaagttcttgaggcactgcgaaagccttcggcccggggccgccccccgcgacatgatggacgcctttatcctctctgcggaaaagaaggcggccggggactcgcacggtggtggcgcgcggctggatttggagaacgtaccggccactatcactgacatcttcggcgccagccaggacaccctgtccaccgcgctgcagtggctgctcctcctcttcaccaggtatcctgatgtgcagactcgagtgcaggcagaattggatcaggtcgtggggagggaccgtctgccttgtatgggtgaccagcccaacctgccctatgtcctggccttcctttatgaagccatgcgcttctccagctttgtgcctgtcactattcctcatgccaccactgccaacacctctgtcttgggctaccacattcccaaggacactgtggtttttgtcaaccagtggtctgtgaatcatgacccagtgaagtggcctaacccggagaactttgatccagctcgattcttggacaaggatggcctcatcaacaaggacctgaccagcagagtgatgattttttcagtgggcaaaaggcggtgcattggcgaagaactttctaagatgcagctttttctcttcatctccatcctggctcaccagtgcgatttcagggccaacccaaatgagcctgcgaaaatgaatttcagttatggtctaaccattaaacccaagtcatttaaagtcaatgtcactctcagagagtccatggagctccttgatagtgctgtccaaaatttacaagccaaggaaacttgccaataagaagcaagaggcaagctgaaattttagaaatattcacatcttcggagatgaggagtaaaattcagtttttttccagttcctcttttgtgctgcttctcaattagcgtttaaggtgagcataaatcaactgtccatcaggtgaggtgtgctccatacccagcggttcttcatgagtagtgggctatgcaggagcttctgggagatttttttgagtcaaagacttaaagggcccaatgaattattatatacatactgcatcttggttatttctgaaggtagcattctttggagttaaaatgcacatatagacacatacacccaaacacttacaccaaactactgaatgaagaagtattttggtaaccaggccatttttggtgggaatccaagattggtctcccatatgcagaaatagacaaaaagtatattaaacaaagtttcagagtatattgttgaagagacagagacaagtaatttcagtgtaaagtgtgtgattgaaggtgataagggaaaagataaagaccagaaattcccttttcaccttttcaggaaaataacttagactctagtatttatgggtggatttatccttttgccttctggtatacttccttacttttaaggataaatcataaagtcagttgctcaaaaagaaatcaatagttgaattagtgagtatagtggggttccatgagttatcatgaattttaaagtatgcattattaaattgtaaaactccaaggtgatgttgtacctcttttgcttgccaaagtacagaatttgaattatcagcaaagaaaaaaaaaaaagccagccaagctttaaattatgtgaccataatgtactgatttcagtaagtctcataggttaaaaaaaaaagtcaccaaatagtgtgaaatatattacttaactgtccgtaagcagtatattagtattatcttgttcaggaaaaggttgaataatatatgccttgtgtaatattgaaaattgaaaagtacaactaacgcaaccaagtgtgctaaaaatgagcttgattaaatcaaccacctatttttgacatggaaatgaagcagggtttcttttcttcactcaaattttggcgaatctcaaaattagatcctaagatgtgttcttatttttataacatctttattgaaattctatttataatacagaatcttgttttgaaaataacctaattaatatattaaaattccaaattcatggcatgcttaaattttaactaaattttaaagccattctgattattgagttccagttgaagttagtggaaatctgaacattctcctgtggaaggcagagaaatctaagctgtgtctgcccaatgaataatggaaaatgccatgaattacctggatgttctttttacgaggtgacaagagttggggacagaactcccattacaactgaccaagtttctcttctagatgattttttgaaagttaacattaatgcctgctttttggaaagtcagaatcagaagatagtcttggaagctgtttggaaaagacagtggagatgaggtcagttgtgttttttaagatggcaattactttggtagctgggaaagcataaagctcaaatgaaatgtatgcattcacatttagaaaagtgaattgaagtttcaagttttaaagttcattgcaattaaacttccaaagaaagttctacagtgtcctaagtgctaagtgcttattacattttattaagctttttggaatctttgtaccaaaattttaaaaaagggagtttttgatagttgtgtgtatgtgtgtgtggggtggggggatggtaagagaaaagagagaaacactgaaaagaaggaaagatggttaaacattttcccactcattctgaattaattaatttggagcacaaaattcaaagcatggacatttagaagaaagatgtttggcgtagcagagttaaatctcaaataggctattaaaaaagtctacaacatagcagatctgttttgtggtttggaatattaaaaaacttcatgtaattttattttaaaatttcatagctgtacttcttgaatataaaaaatcatgccagtatttttaaaggcattagagtcaactacacaaagcaggcttgcccagtacatttaaattttttggcacttgccattccaaaatattatgccccaccaaggctgagacagtgaatttgggctgctgtagcctatttttttagattgagaaatgtgtagctgcaaaaataatcatgaaccaatctggatgcctcattatgtcaaccaggtccagatgtgctataatctgtttttacgtatgtaggcccagtcgtcatcagatgcttgcggcaaaagaaagctgtgtttatatggaagaaagtaaggtgcttggagtttacctggcttatttaatatgcttataacctagttaaagaaaggaaaagaaaacaaaaaacgaatgaaaataactgaatttggaggctggagtaatcagattactgctttaatcagaaaccctcattgtgtttctaccggagagagaatgtatttgctgacaaccattaaagtcagaagttttactccaggttattgcaataaagtataatgtttattaaatgcttcatttgtatgtcaaagctttgactctataagcaaattgcttttttccaaaacaaaaagatgtctcaggtttgttttgtgaattttctaaaagctttcatgtcccagaacttagcctttacctgtgaagtgttactacagccttaatattttcctagtagatctatattagatcaaatagttgcatagcagtatatgttaatttgtgtgtttttagctgtgacacaactgtgtgattaaaaggtatactttagtagacatttataactcaaggataccttcttatttaatcttttcttatttttgtactttatcatgaatgcttttagtgtgtgcataatagctacagtgcatagttgtagacaaagtacattctggggaaacaacatttatatgtagcctttactgtttgatataccaaattaaaaaaaaattgtatctcattacttatactgggacaccattaccaaaataataaaaatcactttcataatcttgaaaaaa

SEQ ID NO: 510 - protein, 543 aa, Homo sapien
MGTSLSPNDPWPLNPLSIQQTTLLLLLSVLATVHVGQRLLRQRRRQLRSAPPGPFAWPLIGNAAAVGQAAHLSFARLARRYGDVFQIRLGSCPIVVLNGERAIHQALVQQGSAFADRPAFASFRVVSGGRSMAFGHYSEHWKVQRRAAHSMMRNFFTRQPRSRQVLEGHVLSEARELVALLVRGSADGAFLDPRPLTVVAVANVMSAVCFGCRYSHDDPEFRELLSHNEEFGRTVGAGSLVDVMPWLQYFPNPVRTVFREFEQLNRNFSNFILDKFLRHCESLRPGAAPRDMMDAFILSAEKKAAGDSHGGGARLDLENVPATITDIFGASQDTLSTALQWLLLLFTRYPDVQTRVQAELDQVVGRDRLPCMGDQPNLPYVLAFLYEAMRFSSFVPVTIPHATTANTSVLGYHIPKDTVVFVNQWSVNHDPVKWPNPENFDPARFLDKDGLINKDLTSRVMIFSVGKRRCIGEELSKMQLFLFISILAHQCDFRANPNEPAKMNFSYGLTIKPKSFKVNVTLRESMELLDSAVQNLQAKETCQ

SEQ ID NO: 511 - DNA, 11189 bp, Homo sapien
gcgaccgagaagatgcccgccctgcgccccgctctgctgtgggcgctgctggcgctctggctgtgctgcgcgacccccgcgcatgcattgcagtgtcgagatggctatgaaccctgtgtaaatgaaggaatgtgtgttacctaccacaatggcacaggatactgcaaatgtccagaaggcttcttgggggaatattgtcaacatcgagacccctgtgagaagaaccgctgccagaatggtgggacttgtgtggcccaggccatgctggggaaagccacgtgccgatgtgcctcagggtttacaggagaggactgccagtactcgacatctcatccatgctttgtgtctcgaccctgcctgaatggcggcacatgccatatgctcagccgggatacctatgagtgcacctgtcaagtcgggtttacaggtaaggagtgccaatggaccgatgcctgcctgtctcatccctgtgcaaatggaagtacctgtaccactgtggccaaccagttctcctgcaaatgcctcacaggcttcacagggcagaaatgtgagactgatgtcaatgagtgtgacattccaggacactgccagcatggtggcacctgcctcaacctgcctggttcctaccagtgccagtgccttcagggcttcacaggccagtactgtgacagcctgtatgtgccctgtgcaccctcgccttgtgtcaatggaggcacctgtcggcagactggtgacttcacttttgagtgcaactgccttccaggttttgaagggagcacctgtgagaggaatattgatgactgccctaaccacaggtgtcagaatggaggggtttgtgtggatggggtcaacacttacaactgccgctgtcccccacaatggacaggacagttctgcacagaggatgtggatgaatgcctgctgcagcccaatgcctgtcaaaatgggggcacctgtgccaaccgcaatggaggctatggctgtgtatgtgtcaacggctggagtggagatgactgcagtgagaacattgatgattgtgccttcgcctcctgtactccaggctccacctgcatcgaccgtgtggcctccttctcttgcatgtgcccagaggggaaggcaggtctcctgtgtcatctggatgatgcatgcatcagcaatccttgccacaagggggcactgtgtgacaccaaccccctaaatgggcaatatatttgcacctgcccacaaggctacaaaggggctgactgcacagaagatgtggatgaatgtgccatggccaatagcaatccttgtgagcatgcaggaaaatgtgtgaacacggatggcgccttccactgtgagtgtctgaagggttatgcaggacctcgttgtgagatggacatcaatgagtgccattcagacccctgccagaatgatgctacctgtctggataagattggaggcttcacatgtctgtgcatgccaggtttcaaaggtgtgcattgtgaattagaaataaatgaatgtcagagcaacccttgtgtgaacaatgggcagtgtgtggataaagtcaatcgtttccagtgcctgtgtcctcctggtttcactgggccagtttgccagattgatattgatgactgttccagtactccgtgtctgaatggggcaaagtgtatcgatcacccgaatggctatgaatgccagtgtgccacaggtttcactggtgtgttgtgtgaggagaacattgacaactgtgaccccgatccttgccaccatggtcagtgtcaggatggtattgattcctacacctgcatctgcaatcccgggtacatgggcgccatctgcagtgaccagattgatgaatgttacagcagcccttgcctgaacgatggtcgctgcattgacctggtcaatggctaccagtgcaactgccagccaggcacgtcaggggttaattgtgaaattaattttgatgactgtgcaagtaacccttgtatccatggaatctgtatggatggcattaatcgctacagttgtgtctgctcaccaggattcacagggcagagatgtaacattgacattgatgagtgtgcctccaatccctgtcgcaagggtgcaacatgtatcaacggtgtgaatggtttccgctgtatatgccccgagggaccccatcaccccagctgctactcacaggtgaacgaatgcctgagcaatccctgcatccatggaaactgtactggaggtctcagtggatataagtgtctctgtgatgcaggctgggttggcatcaactgtgaagtggacaaaaatgaatgcctttcgaatccatgccagaatggaggaacttgtgacaatctggtgaatggatacaggtgtacttgcaagaagggctttaaaggctataactgccaggtgaatattgatgaatgtgcctcaaatccatgcctgaaccaaggaacctgctttgatgacataagtggctacacttgccactgtgtgctgccatacacaggcaagaattgtcagacagtattggctccctgttccccaaacccttgtgagaatgctgctgtttgcaaagagtcaccaaattttgagagttatacttgcttgtgtgctcctggctggcaaggtcagcggtgtaccattgacattgacgagtgtatctccaagccctgcatgaaccatggtctctgccataacacccagggcagctacatgtgtgaatgtccaccaggcttcagtggtatggactgtgaggaggacattgatgactgccttgccaatccttgccagaatggaggttcctgtatggatggagtgaatactttctcctgcctctgccttccgggtttcactggggataagtgccagacagacatgaatgagtgtctgagtgaaccctgtaagaatggagggacctgctctgactacgtcaacagttacacttgcaagtgccaggcaggatttgatggagtccattgtgagaacaacatcaatgagtgcactgagagctcctgtttcaatggtggcacatgtgttgatgggattaactccttctcttgcttgtgccctgtgggtttcactggatccttctgcctccatgagatcaatgaatgcagctctcatccatgcctgaatgagggaacgtgtgttgatggcctgggtacctaccgctgcagctgccccctgggctacactgggaaaaactgtcagaccctggtgaatctctgcagtcggtctccatgtaaaaacaaaggtacttgcgttcagaaaaaagcagagtcccagtgcctatgtccatctggatgggctggtgcctattgtgacgtgcccaatgtctcttgtgacatagcagcctccaggagaggtgtgcttgttgaacacttgtgccagcactcaggtgtctgcatcaatgctggcaacacgcattactgtcagtgccccctgggctatactgggagctactgtgaggagcaactcgatgagtgtgcgtccaacccctgccagcacggggcaacatgcagtgacttcattggtggatacagatgcgagtgtgtcccaggctatcagggtgtcaactgtgagtatgaagtggatgagtgccagaatcagccctgccagaatggaggcacctgtattgaccttgtgaaccatttcaagtgctcttgcccaccaggcactcggggcctactctgtgaagagaacattgatgactgtgcccggggtccccattgccttaatggtggtcagtgcatggataggattggaggctacagttgtcgctgcttgcctggctttgctggggagcgttgtgagggagacatcaacgagtgcctctccaacccctgcagctctgagggcagcctggactgtatacagctcaccaatgactacctgtgtgtttgccgtagtgcctttactggccggcactgtgaaaccttcgtcgatgtgtgtccccagatgccctgcctgaatggagggacttgtgctgtggccagtaacatgcctgatggtttcatttgccgttgtcccccgggattttccggggcaaggtgccagagcagctgtggacaagtgaaatgtaggaagggggagcagtgtgtgcacaccgcctctggaccccgctgcttctgccccagtccccgggactgcgagtcaggctgtgccagtagcccctgccagcacgggggcagctgccaccctcagcgccagcctccttattactcctgccagtgtgccccaccattctcgggtagccgctgtgaactctacacggcaccccccagcacccctcctgccacctgtctgagccagtattgtgccgacaaagctcgggatggcgtctgtgatgaggcctgcaacagccatgcctgccagtgggatgggggtgactgttctctcaccatggagaacccctgggccaactgctcctccccacttccctgctgggattatatcaacaaccagtgtgatgagctgtgcaacacggtcgagtgcctgtttgacaactttgaatgccaggggaacagcaagacatgcaagtatgacaaatactgtgcagaccacttcaaagacaaccactgtgaccaggggtgcaacagtgaggagtgtggttgggatgggctggactgtgctgctgaccaacctgagaacctggcagaaggtaccctggttattgtggtattgatgccacctgaacaactgctccaggatgctcgcagcttcttgcgggcactgggtaccctgctccacaccaacctgcgcattaagcgggactcccagggggaactcatggtgtacccctattatggtgagaagtcagctgctatgaagaaacagaggatgacacgcagatcccttcctggtgaacaagaacaggaggtggctggctctaaagtctttctggaaattgacaaccgccagtgtgttcaagactcagaccactgcttcaagaacacggatgcagcagcagctctcctggcctctcacgccatacaggggaccctgtcataccctcttgtgtctgtcgtcagtgaatccctgactccagaacgcactcagctcctctatctccttgctgttgctgttgtcatcattctgtttattattctgctgggggtaatcatggcaaaacgaaagcgtaagcatggctctctctggctgcctgaaggtttcactcttcgccgagatgcaagcaatcacaagcgtcgtgagccagtgggacaggatgctgtggggctgaaaaatctctcagtgcaagtctcagaagctaacctaattggtactggaacaagtgaacactgggtcgatgatgaagggccccagccaaagaaagtaaaggctgaagatgaggccttactctcagaagaagatgaccccattgatcgacggccatggacacagcagcaccttgaagctgcagacatccgtaggacaccatcgctggctctcacccctcctcaggcagagcaggaggtggatgtgttagatgtgaatgtccgtggcccagatggctgcaccccattgatgttggcttctctccgaggaggcagctcagatttgagtgatgaagatgaagatgcagaggactcttctgctaacatcatcacagacttggtctaccagggtgccagcctccaggcccagacagaccggactggtgagatggccctgcaccttgcagcccgctactcacgggctgatgctgccaagcgtctcctggatgcaggtgcagatgccaatgcccaggacaacatgggccgctgtccactccatgctgcagtggcagctgatgcccaaggtgtcttccagattctgattcgcaaccgagtaactgatctagatgccaggatgaatgatggtactacacccctgatcctggctgcccgcctggctgtggagggaatggtggcagaactgatcaactgccaagcggatgtgaatgcagtggatgaccatggaaaatctgctcttcactgggcagctgctgtcaataatgtggaggcaactcttttgttgttgaaaaatggggccaaccgagacatgcaggacaacaaggaagagacacctctgtttcttgctgcccgggaggggagctatgaagcagccaagatcctgttagaccattttgccaatcgagacatcacagaccatatggatcgtcttccccgggatgtggctcgggatcacatgcaccatgacattgtgcgccttctggatgaatacaatgtgaccccaagccctccaggcaccgtgttgacttctgctctctcacctgtcatctgtgggcccaacagatctttcctcagcctgaagcacaccccaatgggcaagaagtctagacggcccagtgccaagagtaccatgcctactagcctccctaaccttgccaaggaggcaaaggatgccaagggtagtaggaggaagaagtctctgagtgagaaggtccaactgtctgagagttcagtaactttatcccctgttgattccctagaatctcctcacacgtatgtttccgacaccacatcctctccaatgattacatcccctgggatcttacaggcctcacccaaccctatgttggccactgccgcccctcctgccccagtccatgcccagcatgcactatctttttctaaccttcatgaaatgcagcctttggcacatggggccagcactgtgcttccctcagtgagccagttgctatcccaccaccacattgtgtctccaggcagtggcagtgctggaagcttgagtaggctccatccagtcccagtcccagcagattggatgaaccgcatggaggtgaatgagacccagtacaatgagatgtttggtatggtcctggctccagctgagggcacccatcctggcatagctccccagagcaggccacctgaagggaagcacataaccacccctcgggagcccttgccccccattgtgactttccagctcatccctaaaggcagtattgcccaaccagcgggggctccccagcctcagtccacctgccctccagctgttgcgggccccctgcccaccatgtaccagattccagaaatggcccgtttgcccagtgtggctttccccactgccatgatgccccagcaggacgggcaggtagctcagaccattctcccagcctatcatcctttcccagcctctgtgggcaagtaccccacacccccttcacagcacagttatgcttcctcaaatgctgctgagcgaacacccagtcacagtggtcacctccagggtgagcatccctacctgacaccatccccagagtctcctgaccagtggtcaagttcatcaccccactctgcttctgactggtcagatgtgaccaccagccctacccctgggggtgctggaggaggtcagcggggacctgggacacacatgtctgagccaccacacaacaacatgcaggtttatgcgtgagagagtccacctccagtgtagagacataactgacttttgtaaatgctgctgaggaacaaatgaaggtcatccgggagagaaatgaagaaatctctggagccagcttctagaggtaggaaagagaagatgttcttattcagataatgcaagagaagcaattcgtcagtttcactgggtatctgcaaggcttattgattattctaatctaataagacaagtttgtggaaatgcaagatgaatacaagccttgggtccatgtttactctcttctatttggagaataagatggatgcttattgaagcccagacattcttgcagcttggactgcattttaagccctgcaggcttctgccatatccatgagaagattctacactagcgtcctgttgggaattatgccctggaattctgcctgaattgacctacgcatctcctcctccttggacattcttttgtcttcatttggtgcttttggttttgcacctctccgtgattgtagccctaccagcatgttatagggcaagacctttgtgcttttgatcattctggcccatgaaagcaactttggtctcctttcccctcctgtcttcccggtatcccttggagtctcacaaggtttactttggtatggttctcagcacaaacctttcaagtatgttgtttctttggaaaatggacatactgtattgtgttctcctgcatatatcattcctggagagagaaggggagaagaatacttttcttcaacaaattttgggggcaggagatcccttcaagaggctgcaccttaatttttcttgtctgtgtgcaggtcttcatataaactttaccaggaagaagggtgtgagtttgttgtttttctgtgtatgggcctggtcagtgtaaagttttatccttgatagtctagttactatgaccctccccacttttttaaaaccagaaaaaggtttggaatgttggaatgaccaagagacaagttaactcgtgcaagagccagttacccacccacaggtccccctacttcctgccaagcattccattgactgcctgtatggaacacatttgtcccagatctgagcattctaggcctgtttcactcactcacccagcatatgaaactagtcttaactgttgagcctttcctttcatatccacagaagacactgtctcaaatgttgtacccttgccatttaggactgaactttccttagcccaagggacccagtgacagttgtcttccgtttgtcagatgatcagtctctactgattatcttgctgcttaaaggcctgctcaccaatctttctttcacaccgtgtggtccgtgttactggtatacccagtatgttctcactgaagacatggactttatatgttcaagtgcaggaattggaaagttggacttgttttctatgatccaaaacagccctataagaaggttggaaaaggaggaactatatagcagcctttgctattttctgctaccatttcttttcctctgaagcggccatgacattccctttggcaactaacgtagaaactcaacagaacattttcctttcctagagtcaccttttagatgataatggacaactatagacttgctcattgttcagactgattgcccctcacctgaatccactctctgtattcatgctcttggcaatttctttgactttcttttaagggcagaagcattttagttaattgtagataaagaatagttttcttcctcttctccttgggccagttaataattggtccatggctacactgcaacttccgtccagtgctgtgatgcccatgacacctgcaaaataagttctgcctgggcattttgtagatattaacaggtgaattcccgactcttttggtttgaatgacagttctcattccttctatggctgcaagtatgcatcagtgcttcccacttacctgatttgtctgtcggtggccccatatggaaaccctgcgtgtctgttggcataatagtttacaaatggttttttcagtcctatccaaatttattgaaccaacaaaaataattacttctgccctgagataagcagattaagtttgttcattctctgctttattctctccatgtggcaacattctgtcagcctctttcatagtgtgcaaacattttatcattctaaatggtgactctctgcccttggacccatttattattcacagatggggagaacctatctgcatggacctctgtggaccacagcgtacctgcccctttctgccctcctgctccagccccacttctgaaagtatcagctactgatccagccactggatattttatatcctcccttttccttaagcacaatgtcagaccaaattgcttgtttctttttcttggactactttaatttggatcctttgggtttggagaaagggaatgtgaaagctgtcattacagacaacaggtttcagtgatgaggaggacaacactgcctttcaaactttttactgatctcttagattttaagaactcttgaattgtgtggtatctaataaaagggaaggtaagatggataatcactttctcatttgggttctgaattggagactcagtttttatgagacacatcttttatgccatgtatagatcctcccctgctatttttggtttatttttattgttataaatgctttctttctttgactcctcttctgcctgcctttggggataggtttttttgtttgtttatttgcttcctctgttttgttttaagcatcattttcttatgtgaggtggggaagggaaaggtatgagggaaagagagtctgagaattaaaatattttagtataagcaattggctgtgatgctcaaatccattgcatcctcttattgaatttgccaatttgtaatttttgcataataaagaaccaaaggtgtaatgttttgttgagaggtggtttagggattttggccctaaccaatacattgaatgtatgatgactatttgggaggacacatttatgtacccagaggcccccactaataagtggtactatggttacttccttgtgtacatttctcttaaaagtgatattatatctgtttgtatgagaaacccagtaaccaataaaatgaccgcatattcctgactaaacgtagtaaggaaaatgcacactttgtttttacttttccgtttcattctaaaggtagttaagatgaaatttatatgaaagcatttttatcacaaaataaaaaaggtttgccaagctcagtggtgttgtattttttattttccaatactgcatccatggcctggcagtgttacctcatgatgtcataatttgctgagagagcaaattttcttttctttctgaatcccacaaagcctagcaccaaacttctttttttcttcctttaattagatcataaataaatgatcctggggaaaaagcatctgtcaaataggaaacatcacaaaactgagcactcttctgtgcactagccatagctggtgacaaacagatggttgctcagggacaaggtgccttccaatggaaatgcgaagtagttgctatagcaagaattgggaactgggatataagtcataatattaattatgctgttatgtaaatgattggtttgtaacattccttaagtgaaatttgtgtagaacttaatatacaggattataaaataatattttgtgtataaatttgttataagttcacattcatacatttatttataaagtcagtgagatatttgaacatgaaaaaaaaaa

SEQ ID NO: 512 - protein, 2000 aa, Homo sapien
MPALRPALLWALLALWLCCATPAHALQCRDGYEPCVNEGMCVTYHNGTGYCKCPEGFLGEYCQHRDPCEKNRCQNGGTCVAQAMLGKATCRCASGFTGEDCQYSTSHPCFVSRPCLNGGTCHMLSRDTYECTCQVGFTGKECQWTDACLSHPCANGSTCTTVANQFSCKCLTGFTGQKCETDVNECDIPGHCQHGGTCLNLPGSYQCQCLQGFTGQYCDSLYVPCAPSPCVNGGTCRQTGDFTFECNCLPGFEGSTCERNIDDCPNHRCQNGGVCVDGVNTYNCRCPPQWTGQFCTEDVDECLLQPNACQNGGTCANRNGGYGCVCVNGWSGDDCSENIDDCAFASCTPGSTCIDRVASFSCMCPEGKAGLLCHLDDACISNPCHKGALCDTNPLNGQYICTCPQGYKGADCTEDVDECAMANSNPCEHAGKCVNTDGAFHCECLKGYAGPRCEMDINECHSDPCQNDATCLDKIGGFTCLCMPGFKGVHCELEINECQSNPCVNNGQCVDKVNRFQCLCPPGFTGPVCQIDIDDCSSTPCLNGAKCIDHPNGYECQCATGFTGVLCEENIDNCDPDPCHHGQCQDGIDSYTCICNPGYMGAICSDQIDECYSSPCLNDGRCIDLVNGYQCNCQPGTSGVNCEINFDDCASNPCIHGICMDGINRYSCVCSPGFTGQRCNIDIDECASNPCRKGATCINGVNGFRCICPEGPHHPSCYSQVNECLSNPCIHGNCTGGLSGYKCLCDAGWVGINCEVDKNECLSNPCQNGGTCDNLVNGYRCTCKKGFKGYNCQVNIDECASNPCLNQGTCFDDISGYTCHCVLPYTGKNCQTVLAPCSPNPCENAAVCKESPNFESYTCLCAPGWQGQRCTIDIDECISKPCMNHGLCHNTQGSYMCECPPGFSGMDCEEDIDDCLANPCQNGGSCMDGVNTFSCLCLPGFTGDKCQTDMNECLSEPCKNGGTCSDYVNSYTCKCQAGFDGVHCENNINECTESSCFNGGTCVDGINSFSCLCPVGFTGSFCLHEINECSSHPCLNEGTCVDGLGTYRCSCPLGYTGKNCQTLVNLCSRSPCKNKGTCVQKKAESQCLCPSGWAGAYCDVPNVSCDIAASRRGVLVEHLCQHSGVCINAGNTHYCQCPLGYTGSYCEEQLDECASNPCQHGATCSDFIGGYRCECVPGYQGVNCEYEVDECQNQPCQNGGTCIDLVNHFKCSCPPGTRGLLCEENIDDCARGPHCLNGGQCMDRIGGYSCRCLPGFAGERCEGDINECLSNPCSSEGSLDCIQLTNDYLCVCRSAFTGRHCETFVDVCPQMPCLNGGTCAVASNMPDGFICRCPPGFSGARCQSSCGQVKCRKGEQCVHTASGPRCFCPSPRDCESGCASSPCQHGGSCHPQRQPPYYSCQCAPPFSGSRCELYTAPPSTPPATCLSQYCADKARDGVCDEACNSHACQWDGGDCSLTMENPWANCSSPLPCWDYINNQCDELCNTVECLFDNFECQGNSKTCKYDKYCADHFKDNHCDQGCNSEECGWDGLDCAADQPENLAEGTLVIVVLMPPEQLLQDARSFLRALGTLLHTNLRIKRDSQGELMVYPYYGEKSAAMKKQRMTRRSLPGEQEQEVAGSKVFLEIDNRQCVQDSDHCFKNTDAAAALLASHAIQGTLSYPLVSVVSESLTPERTQLLYLLAVAVVIILFIILLGVIMAKRKRKHGSLWLPEGFTLRRDASNHKRREPVGQDAVGLKNLSVQVSEANLIGTGTSEHWVDDEGPQPKKVKAEDEALLSEEDDPIDRRPWTQQHLEAADIRRTPSLALTPPQAEQEVDVLDVNVRGPDGCTPLMLASLRGGSSDLSDEDEDAEDSSANIITDLVYQGASLQAQTDRTGEMALHLAARYSRADAAKRLLDAGADANAQDNMGRCPLHAAVAADAQGVFQILIRNRVTDLDARMNDGTTPLILAARLAVEGMVAELINCQADVNAVDDHGKSALHWAAAVNNVEATLLLLKNG

SEQ ID NO: 513 - DNA, 1669 bp, Homo sapien
gaaacaagcactggattccatatcccactgccaaaaccgcatggttcagattatcgctattgcagctttcatcataatacacacctttgctgccgaaacgaagccagacaacagatttccatcagcaggatgtgggggctcaaggttctgctgctacctgtggtgagctttgctctgtaccctgaggagatactggacacccactgggagctatggaagaagacccacaggaagcaatataacaacaaggtggatgaaatctctcggcgtttaatttgggaaaaaaacctgaagtatatttccatccataaccttgaggcttctcttggtgtccatacatatgaactggctatgaaccacctgggggacatgaccagtgaagaggtggttcagaagatgactggactcaaagtacccctgtctcattcccgcagtaatgacaccctttatatcccagaatgggaaggtagagccccagactctgtcgactatcgaaagaaaggatatgttactcctgtcaaaaatcagggtcagtgtggttcctgttgggcttttagctctgtgggtgccctggagggccaactcaagaagaaaactggcaaactcttaaatctgagtccccagaacctagtggattgtgtgtctgagaatgatggctgtggagggggctacatgaccaatgccttccaatatgtgcagaagaaccggggtattgactctgaagatgcctacccatatgtgggacaggaagagagttgtatgtacaacccaacaggcaaggcagctaaatgcagagggtacagagagatccccgaggggaatgagaaagccctgaagagggcagtggcccgagtgggacctgtctctgtggccattgatgcaagcctgacctccttccagttttacagcaaaggtgtgtattatgatgaaagctgcaatagcgataatctgaaccatgcggttttggcagtgggatatggaatccagaagggaaacaagcactggataattaaaaacagctggggagaaaactggggaaacaaaggatatatcctcatggctcgaaataagaacaacgcctgtggcattgccaacctggccagcttccccaagatgtgactccagccagccaaatccatcctgctcttccatttcttccacgatggtgcagtgtaacgatgcactttggaagggagttggtgtgctatttttgaagcagatgtggtgatactgagattgtctgttcagtttccccatttgtttgtgcttcaaatgatccttcctactttgcttctctccacccatgacctttttcactgtggccatcaggactttccctgacagctgtgtactcttaggctaagagatgtgactacagcctgcccctgactgtgttgtcccagggctgatgctgtacaggtacaggctggagattttcacataggttagattctcattcacgggactagttagctttaagcaccctagaggactagggtaatctgacttctcacttcctaagttcccttctatatcctcaaggtagaaatgtctatgttttctactccaattcataaatctattcataagtctttggtacaagtttacatgataaaaagaaatgtgatttgtcttcccttctttgcacttttgaaataaagtatttatc

SEQ ID NO: 514 - protein, 329 aa, Homo sapien
MWGLKVLLLPVVSFALYPEEILDTHWELWKKTHRKQYNNKVDEISRRLIWEKNLKYISIHNLEASLGVHTYELAMNHLGDMTSEEVVQKMTGLKVPLSHSRSNDTLYIPEWEGRAPDSVDYRKKGYVTPVKNQGQCGSCWAFSSVGALEGQLKKKTGKLLNLSPQNLVDCVSENDGCGGGYMTNAFQYVQKNRGIDSEDAYPYVGQEESCMYNPTGKAAKCRGYREIPEGNEKALKRAVARVGPVSVAIDASLTSFQFYSKGVYYDESCNSDNLNHAVLAVGYGIQKGNKHWIIKNSWGENWGNKGYILMARNKNNACGIANLASFPKM

SEQ ID NO: 515 - DNA, 2446 bp, Homo sapien
gcgccgcggcgcggagtcccggctgcgggatagaccgagggccatggccgcctctcccggacccgccggcgttggcggcgccggagcagtctacggctccggctcttcgggcttcgccctcgactcgggactggagatcaaaactcgctcggtggagcagacgctactcccgctggtttctcagatcaccacgcttattaatcataaagataataccaaaaagtctgataaaactctgcaagcaattcagcgtgtaggacaagctgtcaacttggcagttggaagatttgttaaagtaggagaagctatagccaatgaaaactgggatttgaaagaagaaataaatattgcttgtattgaagctaaacaagcaggagaaacaattgcagcacttacagacataaccaacttgaaccatctggaatctgatgggcagatcacaatttttacagacaaaacaggagtgataaaggctgcaagattacttctttcttcagtgacaaaagtgttgttgctggcagaccgagtagtcattaaacagataataacatcaagaaataaggttctcgcaactatggaaagactagagaaagtgaatagctttcaagagtttgtccaaatattcagtcaatttggaaatgaaatggtggagtttgcacatctgagtggagatagacaaaatgatttgaaagatgaaaagaaaaaggcaaaaatggcagcagctagggcagttcttgaaaagtgtacaatgatgcttctcacagcttcaaagacatgtctgaggcatcctaactgcgaatcagcccataaaaacaaagaaggagtatttgaccgtatgaaagtggcattggataaggtcattgaaattgtgactgactgtaaaccgaatggagagactgacatttcatctatcagtatttttactggaattaaggaattcaagatgaatattgaagctcttcgggagaatctttattttcagtccaaagagaacctttctgtgacattggaagtcatcttggagcgtatggaggactttactgattctgcctacaccagccatgagcacagagaacgcatcttggaactgtcaactcaggcgagaatggaactgcagcagttaatttctgtgtggattcaagctcaaagcaagaaaacaaaaagcatcgctgaagaactggaactcagtattttgaaaatcagtcacagtcttaatgaacttaagaaagaacttcatagtacagcgacacagctggcagcagatctattaaaataccatgctgatcatgtggttctaaaagcattaaaacttactggagtagaaggaaatttagaagctttggctgaatatgcctgtaaactctctgaacagaaagagcagcttgttgagacctgtcgattgttacgacacatatctgggacagaacctctggaaataacctgtatacatgcagaggagacatttcaggtgactggccaacagataatttctgctgctgaaacattgacattgcatccatctagtaaaattgctaaagaaaacctagatgtattttgtgaagcttgggaatcccaaattagtgacatgtcaacactgctgagagaaatcaatgacgtgtttgaaggaagacgaggagagaagtatggctacctttcacttccaaagccaatgaagaataatgcaaacctgaaatcattaaagccagacaagcctgactctgaggagcaagccaagatagcaaagcttggacttaagctgggtttgctcacctctgacgctgactgcgaaattgagaagtgggaagatcaggagaatgagattgttcaatatggacggaacatgtccagtatggcctattctctgtatttatttactagaggagaggggccactgaaaacttcccaggatttaattcatcaactagaggtttttgctgcagagggtttaaagcttacttccagtgttcaagctttttcaaaacagctgaaagacgatgacaagcttatgcttctcctggaaataaacaagctaattcctctatgccaccagctccagacagtaactaagacttctttgcagaataaagtatttctaaaggttgacaagtgtattacgaagacaagatccatgatggctctcttagtccaacttctttcactttgttataaactgctgaagaagcttcagatggaaaataacggatgggtctcagttacaaataaggacactatggatagtaaaacttgagaagcttttggggtcagatctctggaacatcatgtgatgaagctgacatttttaaaaatcaaatgatcctttatcttttcagaaattcatcaattttataaagaaaacaatattgaaattttgctctattttctgatcatgaaactgattgtaaagctttttgacaactaataaatgtcttggtaattgctagattct

SEQ ID NO: 516 - protein, 734 aa, Homo sapien
MAASPGPAGVGGAGAVYGSGSSGFALDSGLEIKTRSVEQTLLPLVSQITTLINHKDNTKKSDKTLQAIQRVGQAVNLAVGRFVKVGEAIANENWDLKEEINIACIEAKQAGETIAALTDITNLNHLESDGQITIFTDKTGVIKAARLLLSSVTKVLLLADRVVIKQIITSRNKVLATMERLEKVNSFQEFVQIFSQFGNEMVEFAHLSGDRQNDLKDEKKKAKMAAARAVLEKCTMMLLTASKTCLRHPNCESAHKNKEGVFDRMKVALDKVIEIVTDCKPNGETDISSISIFTGIKEFKMNIEALRENLYFQSKENLSVTLEVILERMEDFTDSAYTSHEHRERILELSTQARMELQQLISVWIQAQSKKTKSIAEELELSILKISHSLNELKKELHSTATQLAADLLKYHADHVVLKALKLTGVEGNLEALAEYACKLSEQKEQLVETCRLLRHISGTEPLEITCIHAEETFQVTGQQIISAAETLTLHPSSKIAKENLDVFCEAWESQISDMSTLLREINDVFEGRRGEKYGYLSLPKPMKNNANLKSLKPDKPDSEEQAKIAKLGLKLGLLTSDADCEIEKWEDQENEIVQYGRNMSSMAYSLYLFTRGEGPLKTSQDLIHQLEVFAAEGLKLTSSVQAFSKQLKDDDKLMLLLEINKLIPLCHQLQTVTKTSLQNKVFLKVDKCITKTRSMMALLVQLLSLCYKLLKKLQMENNGWVSVTNKDTMDSKT

SEQ ID NO: 517 - DNA, 862 bp, Homo sapien
ggcacgagcaggccctggccgtggcgaaagagccggcggagccggagacccgctcccggagacgccgcctcgcgatccccgcgcgggcgggaccgggcggccggcatcatgaccctgtttcacttcgggaactgcttcgctcttgcctacttcccctacttcatcacctacaagtgcaccgacctatccgagtacaacgccttctggaaatgcgtccaggctggagtcacctacctctttgtccaactctgcaagatgctgttcttggccactttctttcccacctgggaaggcggcatctatgacttcattggggagttcatgaaggccagcgtggatgtggcagacctgataggtctaaaccttgtcatgtcccggaatgccggcaagggagagtacaagatcatggttgctgccctgggctgggccactgctgagcttattatgtcccgctgcattcccctatgggtcggagcccggggcattgagtttgactggaagtacatccagatgagcatagactccaacatcagtctgggtccatacatcgtcgcgtctgctcaggtctggatgataacacgctatgatctgtaccacaccttccggccagctgtcctcctgctgatgttcctcagagtttacaaggcctttgttatggagacgtttgtccacctatgctcgctgggcagttgggcagttttaatggcgggagtagtggttaaggggctgctggttatcagaaatttggccatgtatgttgccgttgtcaatgtgcactcctaggcttggtgtctcagacattgatgtaccttttccctgcctcgctccaggttttagtgaagtaaacagtatttggaaagtt

SEQ ID NO: 518 - protein, 224 aa, Homo sapien
MTLFHFGNCFALAYFPYFITYKCTDLSEYNAFWKCVQAGVTYLFVQLCKMLFLATFFPTWEGGIYDFIGEFMKASVDVADLIGLNLVMSRNAGKGEYKIMVAALGWATAELIMSRCIPLWVGARGIEFDWKYIQMSIDSNISLGPYIVASAQVWMITRYDLYHTFRPAVLLLMFLRVYKAFVMETFVHLCSLGSWAVLMAGVVVKGLLVIRNLAMYVAVVNVHS

SEQ ID NO: 519 - DNA, 1401 bp, Homo sapien
cgtattgctcggcccggggagtttcgccccctgcccggctccgcggcgcggaggatggcgtggaaacggctgggcgcgctggtgatgttccctctacagatgatctatctggtggtgaaagcagccgtcggactggtgctgcccgccaagctgcgggacctgtcgcgggagaacgtcctcatcaccggcggcgggagaggcatcgggcgtcagctcgcccgcgagttcgcggagcgcggcgccagaaagattgttctctggggccggactgagaaatgcctgaaggagacgacggaggagatccggcagatgggcactgagtgccattacttcatctgtgatgtgggcaaccgggaggaggtgtaccagacggccaaggccgtccgggagaaggtgggtgacatcaccatcctggtgaacaatgccgccgtggtccatgggaagagcctaatggacagtgatgatgatgccctcctcaagtcccaacacatcaacaccctgggccagttctggaccaccaaggccttcctgccgcgtatgctggagctgcagaatggccacatcgtgtgcctcaactccgtgctggcactgtctgccatccccggtgccatcgactactgcacatccaaagcgtcagccttcgccttcatggagagcctgaccctggggctgctggactgtccgggagtcagcgccaccacagtgctgcccttccacaccagcaccgagatgttccagggcatgagagtcaggtttcccaacctctttcccccactgaagccggagacggtggcccggaggacagtggaagctgtgcagctcaaccaggccctcctcctcctcccatggacaatgcatgccctcgttatcttgaaaagcatacttccacaggctgcactcgaggagatccacaaattctcaggaacctacacctgcatgaacactttcaaagggcggacatagagacaggatgaagacatgcttgaggagccacggagtttgggggccacagcacctgggcacacacccgagcacctgtccattggcatgcttctgctgggtgagcaggacagctcctgtccccagcgaagaatccggctgcccctgggccagtcccaggacctttgcacaggactgatgggtgtaactgacccccacagggaggcaggaaaacagccagaagccaccttgacacttttgaacatttccagttctgtagagtttattgtcaattgcttctcaagtctaaccagcctcagcagtgtgcatagaccatttccaggagggtctgtccccagatgctctgcctcccgttccaaaacccactcatcctcagcttgcacaaactggttgaacggcaggaatgaaaaataaagagagatggcttttgtgaaaaaaaaa

SEQ ID NO: 520 - protein, 302 aa, Homo sapien
MAWKRLGALVMFPLQMIYLVVKAAVGLVLPAKLRDLSRENVLITGGGRGIGRQLAREFAERGARKIVLWGRTEKCLKETTEEIRQMGTECHYFICDVGNREEVYQTAKAVREKVGDITILVNNAAVVHGKSLMDSDDDALLKSQHINTLGQFWTTKAFLPRMLELQNGHIVCLNSVLALSAIPGAIDYCTSKASAFAFMESLTLGLLDCPGVSATTVLPFHTSTEMFQGMRVRFPNLFPPLKPETVARRTVEAVQLNQALLLLPWTMHALVILKSILPQAALEEIHKFSGTYTCMNTFKGRT

SEQ ID NO: 521 - DNA, 3915 bp, Homo sapien
gtggggtggggtggggctgggggcttgtcgccctttcaggctccaccctttgcggagattataaatagtcatgatcccagcgagacccagagatgcctgtaatggtgagactttggatccttcctgaggacgtggagaaaactttctgctgagaaggacattttgaaggttttgttggctgaaaaagctgtttctggaatcacccctagatctttcttgaagacttgaattagattacagcgatggggacacagaaggtcaccccagctctgatatttgccatcacagttgctacaatcggctctttccaatttggctacaacactggggtcatcaatgctcctgagaagatcataaaggaatttatcaataaaactttgacggacaagggaaatgccccaccctctgaggtgctgctcacgtctctctggtccttgtctgtggccatattttccgtcgggggtatgatcggctccttttccgtcggactcttcgtcaaccgctttggcaggcgcaattcaatgctgattgtcaacctgttggctgtcactggtggctgctttatgggactgtgtaaagtagctaagtcggttgaaatgctgatcctgggtcgcttggttattggcctcttctgcggactctgcacaggttttgtgcccatgtacattggagagatctcgcctactgccctgcggggtgcctttggcactctcaaccagctgggcatcgttgttggaattctggtggcccagatctttggtctggaattcatccttgggtctgaagagctatggccgctgctactgggttttaccatccttcctgctatcctacaaagtgcagcccttccattttgccctgaaagtcccagatttttgctcattaacagaaaagaagaggagaatgctaagcagatcctccagcggttgtggggcacccaggatgtatcccaagacatccaggagatgaaagatgagagtgcaaggatgtcacaagaaaagcaagtcaccgtgctagagctctttagagtgtccagctaccgacagcccatcatcatttccattgtgctccagctctctcagcagctctctgggatcaatgctgtgttctattactcaacaggaatcttcaaggatgcaggtgttcaagagcccatctatgccaccatcggcgcgggtgtggttaatactatcttcactgtagtttctctatttctggtggaaagggcaggaagaaggactctgcatatgataggccttggagggatggctttttgttccacgctcatgactgtttctttgttattaaaggataactataatgggatgagctttgtctgtattggggctatcttggtctttgtagccttctttgaaattggaccaggccccattccctggtttattgtggccgaactcttcagccagggcccccgcccagctgcgatggcagtggccggctgctccaactggacctccaacttcctagtcggattgctcttcccctccgctgctcactatttaggagcctacgtttttattatcttcaccggcttcctcattaccttcttggcttttaccttcttcaaagtccctgagacccgtggcaggacttttgaggatatcacacgggcctttgaagggcaggcacacggtgcagatagatctggaaaggacggcgtcatggagatgaacagcatcgagcctgctaaggagaccaccaccaatgtctaagtcgtgcctccttccacctccctcccggcatgggaaagccacctctccctcaacaagggagagacctcatcaggatgaacccaggacgcttctgaatgctgctacttaattcctttctcatcccacgcactccatgagcaccccaaggctgcggtttgttggatcttcaatggctttttaaattttatttcctggacatcctcttctgcttaggagagaccgagtgaacctaccttcatttcaggagggattggccgcttggcacatgacaactttgccagcttttcctcccttgggttctgatattgccgcactaggggatataggagaggaaaagtaaggtgcagttcccccaacctcagacttaccaggaagcagatacatatgagtgtggaagccggagggtgtttatgtaagagcaccttcctcacttccatacagctctacgtggcaaattaacttgagttttatttattttatcctctggtttaattacataatttttttttttttactttaagtttcaggatacatgtgccgaatgtgcaggtttgttacataggtatatatatgccatgatggaaatatttatttttttaagcgtaattttgccaaataataaaaacagaaggaaattgagattagagggaggtgtttaaagagaggttatagagtagaagatttgatgctggagaggttaaggtgcaataagaatttagggagaaatgttgttcattattggagggtaaatgatgtggtgcctgaggtctgtacgttacctcttaacaatttctgtccttcagatggaaactctttaacttctcgtaaaagtcatatacctatataataaagctactgatttccttggagcttttttctttaagataatagtttacatgtagtagtacttgaaatctaggattattaactaatatgggcattgtagttaatgatggttgatgggttctaattttggatggagtccagggaagagaaagtgatttctagaaagcctgttcccctcactggatgaaataactccttcttgtagtagtctcattacttttgaagtaatcccgccacctatctcgtgggagagccatccaaataagaaacctaaaataattggttcttggtagagattcattatttttccactttgttctttaggagattttaggtgttgattttctgttgtattttaactcatacctttaaaggaattccccaaagaatgtttatagcaaacttggaatttgtaacctcagctctgggagaggatttttttctgagcgattattatctaaagtgtgttgttgctttaggctcacggcacgcttgcgtatgtctgttaccatgtcactgtggtcctatgccgaatgccctcaggggacttgaatctttccaataaaccaggtttagacagtatgagtcaatgtgcagtgtagcccacacttgagaggatgaatgtatgtgcactgtcactttgctctgggtggaagtacgttattgttgacttattttctctgtgtttgttcctacagcccctttttcatatgttgctcagtctccctttcccttcttggtgcttacacatctcagaccctttagccaaacccttgtcagtgacagtattttggttcttagttctcactgttccctctgctcctggagcctttgaataaaaatgcacgtagctgaggccggatgcggtggctcacgcctgtaatcccagcactttgggaggcctaggcgggcggtcaggggttcgagaccagtctggccaacatcgtgaaaccctgtctctactaaaaatgcaaaaattagccgggcgtggtggcgggcgcctgtaatcccagctacttgggaagctgaggcgggagaatcatgtgaacccgggacgcaggggttgcagtgagcggagatcgcatcattgcactctagcctgggccacagggcgagactccgtctcaaaaaaaaaaaaatgcacatagctatcgagtgtgctttagcttgaaaaggtgaccttgcaacttcatgtcaactttctggctcctcaaacagtaggttggcagtaaggcagggtcccatttctcactgagaagattgtgaatatttccatatggattttctattgttactctggttctttgttttaaaataaaaattctgaatgtacacg

SEQ ID NO: 522 - protein, 496 aa, Homo sapien
MGTQKVTPALIFAITVATIGSFQFGYNTGVINAPEKIIKEFINKTLTDKGNAPPSEVLLTSLWSLSVAIFSVGGMIGSFSVGLFVNRFGRRNSMLIVNLLAVTGGCFMGLCKVAKSVEMLILGRLVIGLFCGLCTGFVPMYIGEISPTALRGAFGTLNQLGIVVGILVAQIFGLEFILGSEELWPLLLGFTILPAILQSAALPFCPESPRFLLINRKEEENAKQILQRLWGTQDVSQDIQEMKDESARMSQEKQVTVLELFRVSSYRQPIIISIVLQLSQQLSGINAVFYYSTGIFKDAGVQEPIYATIGAGVVNTIFTVVSLFLVERAGRRTLHMIGLGGMAFCSTLMTVSLLLKDNYNGMSFVCIGAILVFVAFFEIGPGPIPWFIVAELFSQGPRPAAMAVAGCSNWTSNFLVGLLFPSAAHYLGAYVFIIFTGFLITFLAFTFFKVPETRGRTFEDITRAFEGQAHGADRSGKDGVMEMNSIEPAKETTTNV

SEQ ID NO: 523 - DNA, 2192 bp, Homo sapien
cggcgccggggaccgctgccaccccgcctagcgcagcgccccgtccttccgcagcccaaccgcctcttcccgccccgccccatcccgcccacgggctccagtgggcgggaccagaggagtcccgcgttcggggagtatgtcaaggccgtgacccgtgtattattgtccgagtggccggaacgggagccaacatggcagcggggttcgggcgatgctgcagggtcctgagaagtatttctcgttttcattggagatcacagcatacaaaagccaatcgacaacgtgaaccaggattaggatttagttttgagttcaccgaacagcagaaagaatttcaagctactgctcgtaaatttgccagagaggaaatcatcccagtggctgcagaatatgataaaactggtgaatatccagtccccctaattagaagagcctgggaacttggtttaatgaacacacacattccagagaactgtggaggtcttggacttggaacttttgatgcttgtttaattagtgaagaattggcttatggatgtacaggggttcagactgctattgaaggaaattctttggggcaaatgcctattattattgctggaaatgatcaacaaaagaagaagtatttggggagaatgactgaggagccattgatgtgtgcttattgtgtaacagaacctggagcaggctctgatgtagctggtataaagaccaaagcagaaaagaaaggagatgagtatattattaatggtcagaagatgtggataaccaacggaggaaaagctaattggtattttttattggcacgttctgatccagatcctaaagctcctgctaataaagcctttactggattcattgtggaagcagataccccaggaattcagattgggagaaaggaattaaacatgggccagcgatgttcagatactagaggaattgtcttcgaagatgtgaaagtgcctaaagaaaatgttttaattggtgacggagctggtttcaaagttgcaatgggagcttttgataaaaccagacctgtagtagctgctggtgctgttggattagcacaaagagctttggatgaagctaccaagtatgccctggaaaggaaaactttcggaaagctacttgtagagcaccaagcaatatcatttatgctggctgaaatggcaatgaaagttgaactagctagaatgagttaccagagagcagcttgggaggttgattctggtcgtcgaaatacctattatgcttctattgcaaaggcatttgctggagatattgcaaatcagttagctactgatgctgtgcagatacttggaggcaatggatttaatacagaatatcctgtagaaaaactaatgagggatgccaaaatctatcagatttatgaaggtacttcacaaattcaaagacttattgtagcccgtgaacacattgacaagtacaaaaattaaaaaaattactgtagaaatattgaataactagaacacaagccactgtttcagctccagaaaaaagaaagggctttaacgttttttccagtgaaaacaaatcctcttatattaaatctaagcaactgcttattatagtagtttatacttttgcttaactctgttatgtctcttaagcaggtttggtttttattaaaatgatgtgttttctttagtaccactttacttgaattacattaacctagaaaactacataggttattttgatctcttaagattaatgtagcagaaatttcttggaattttatttttgtaatgacagaaaagtgggcttagaaagtattcaagatgttacaaaatttacatttagaaaatattgtagtatttgaatactgtcaacttgacagtaactttgtagacttaatggtattattaaagttctttttattgcagtttggaaagcatttgtgaaactttctgtttggcacagaaacagtcaaaattttgacattcatattctcctattttacagctacaagaactttcttgaaaatcttatttaattctgagcccatatttcacttaccttatttaaaataaatcaataaagcttgccttaaattatttttatatgactgttggtctctaggtagcctttggtctattgtacacaatctcatttcatatgtttgcattttggcaaagaacttaataaaattgttcagtgcttattatcat

SEQ ID NO: 524 - protein, 421 aa, Homo sapien
MAAGFGRCCRVLRSISRFHWRSQHTKANRQREPGLGFSFEFTEQQKEFQATARKFAREEIIPVAAEYDKTGEYPVPLIRRAWELGLMNTHIPENCGGLGLGTFDACLISEELAYGCTGVQTAIEGNSLGQMPIIIAGNDQQKKKYLGRMTEEPLMCAYCVTEPGAGSDVAGIKTKAEKKGDEYIINGQKMWITNGGKANWYFLLARSDPDPKAPANKAFTGFIVEADTPGIQIGRKELNMGQRCSDTRGIVFEDVKVPKENVLIGDGAGFKVAMGAFDKTRPVVAAGAVGLAQRALDEATKYALERKTFGKLLVEHQAISFMLAEMAMKVELARMSYQRAAWEVDSGRRNTYYASIAKAFAGDIANQLATDAVQILGGNGFNTEYPVEKLMRDAKIYQIYEGTSQIQRLIVAREHIDKYKN

SEQ ID NO: 525 - DNA, 4180 bp, Homo sapien
ccagggtgatgctgaagatgatgaccttcttccaaggcctctagagccatcagcctgtgccaggcaccctcgacttgcctagaggcccccaaaagttgcagtccacatcagaggcagagtcagaggcctccatgtcggaggcctcctctgaggacctggtgccacccctggaggctggggcagccccatatagggaggaggaagaggcggcgaagaagaagaaggagaagaagaagaagtccaaaggcctggccaatgtgttctgcgtcttcaccaaagggaagaagaagaagggtcagcccagctcagcggagcccgaggacgcagccgggtccaggcaggggctggatggcccgccccccacagtggaggagctgaaggcggcgctggagcgcgggcagctggaggcggcgcggccgctgctggcgctggagcgggagctggcggcggcggcggcggcgggcggtgtgagcgaggaggagctggtgcggcgccagagcaaggtggaggcgctgtacgagctgctgcgcgaccaggtgctgggcgtgctgcggcggccgctggaggcgccgcccgagcggctgcgccaggcgctggccgtggtggcggagcaggagcgcgaggaccgccaggcggcggcggcggggccggggacctcggggctggcggccacgcgcccgcggcgctggctgcagctgtggcggcgcggcgtggcggaggcggccgaggagcgcatgggccagcggccggccgcgggcgccgaggtccccgagagcgtctttctgcacttgggccgcaccatgaaggaggacctggaggccgtggtggagcggctgaagccgctgttccccgccgagttcggcgtcgtggcggcctacgccgagagctaccaccagcacttcgcggcccacctggccgccgtggcgcagttcgagctgtgcgagcgcgacacctacatgctgctgctctgggtggagaacctctaccccaatgacatcatcaacagccccaagctggtgggtgagctgcagggtatggggctcgggagcctcctgccccccaggcagatccgactgctggaggccacattcctgtccagtgaggcggccaatgtgagggagttgatggaccgagctctggagctagaggcacggcgctgggctgaggatgtgcctccccagaggctggacggccactgccacagcgagctggccatcgacatcatccagatcacctcccaggcccaggccaaggccgagagcatcacgctggacttgggctcacagataaagcgggtgctgctggtggagctgcctgcgttcctgaggagctaccagcgcgcctttaatgaatttctggagagaggcaagcagctgacgaattacagggccaatgttattgccaacatcaacaactgcctgtccttccggatgtccatggagcagaattggcaggtaccccaggacaccctgagcctcctgctgggccccctgggtgagctcaagagccacggctttgacaccctgctccagaacctgcatgaggacctgaagccactgttcaagaggttcacgcacacccgctgggcggcccctgtggagaccctggaaaacatcatcgccactgtagacacgaggctgcctgagttctcagagctgcagggctgtttccgggaggagctcatggaggccttgcacctgcacctggtgaaggagtacatcatccaactcagcaaggggcgcctggtcctcaagacggccgagcagcagcagcagctggctgggtacatcctggccaatgctgacaccatccagcacttctgcacccagcacggctccccggcgacctggctgcagcctgctctccctacgctggccgagatcattcgcctgcaggaccccagtgccatcaagattgaggtggccacttatgccacctgctaccctgacttcagcaaaggccacctgagcgctatcctggccatcaaggggaacctatccaacagtgaggtcaagcgcatccggagcatcttggacgtcagcatgggggcgcaggagccctcccggcccctattttcccttataaaggttggttagcttttcctgtggcctgacctgcctgtgagtgcccagcaagccttgggcacaccccgctgggagctgttaagagcagcgctggttctcggttcctcccgggtctcctgtgctctgatgctacttctgcctagccctggcggaggtgcaggccctgtcagctggaactggacagaccttggtttgtttacatgtccgatgggggcaggagctcccatcctgggcagccaaccaggcaacaccaaggactctttgtaaacgatagctgatcgtgtgcacgcaaggaaagaaccaggagggagagtgcagccaggctcagggatccccggacacctctgtccagagcccctccacagtcggcctcatgactgtcctcctcgtgggtggggccgagggccctcttcagctctctggagacaggggccgagcctcacccatctgccctctgcagcccagggccgccgtgagcgggattcagcaatggtggaatggaagacagaactggaagagaaagaaggaaaagatgagctctcgtctggcaggggcttttagggtcctgtggcgagctgtgagcaccgccagcgttagacgtcacatccaggtggccccacggcccctacaggctggccctgcaatggggccctgagccctccctcttcatcccccaaggcctcaactagagggtggtcccccgagggcttggtgtctactaccgaagggcccaagacctcctgggtcctctcaggctcccccttccccaaggcagggacaggccctgggggtgccaccgtgggccctgccacccagaagtctggctgaggtctgggcaggggcagggcaagcttgacctctcactgttgaccctttggcctctgtatttgtttcctattgccgtgacaggtttccacaaacttcgtggatcaaaacgaggtcttccagttctgcgggtcagaaggctgacctggggctcaaatctgggtgtcggcagtcctgcactccttctggaggctctaggggagaattcatttctggccttttcatttttagaggctgaccgtaattcttgacttcaggctcctccatcttcagagccagctgtgggtagttgaatctttttcccgtcacctcattgaggcctcccctctcctgcctccctccaccacttttttttttttttttttgagacagggtcttgctgtgttgcccaggctggagtgcagtggcctggtcatggcatcaaggctcactgcagcctggacctcctggttcaagtgatcctcttgtctcagtcccctgagacaatcccccacgcccagctacatatttttgtggatacagggtctcattctgttgcctaggcttgtctggaactcctgggctcaagggatcttgtagccttagcctcctaaagtgctgggattataggcatgagtcactcgtacccggcctgctctaccgcttttaaggacgcttatgatcacattgcgcctacccagagaacccaggtcgtctttctattttcaggtcagctgattagccaccttagttccatctgcaactttagttcccactggctgtgtaacctaacatagtcacaggctctggggactgtcacgtggacatctttgggaggccgttattctgcccaccgcaccctccgttcatcccctgccctgccgggcacctcgctctaccccaggaaaatgtgagctcgttttcctgctcggcatgtgctccccctaaggctctgctcctccctgggcctgaaagttccttctcagcctgagagggggcccttcgatctcaggcatgactcagcccggctgatgcctctgcagtgctgagtcaggatttggggccggctctcttgggtctgtccccttttcccaggtactgccttacaaagctgtggccaggaagtggccggtataaaggatgcccaaggtctttgtacgtgtgtaggagttagcgtgtttgatattgttaatataataataattattttttagagtactgcttttgtatgtatgttgaacaggatccaggtttttatagcttgatataaaacagaattcaaaagtgaaaaa

SEQ ID NO: 526 - protein, 654 aa, Homo sapien [sequence omitted]

SEQ ID NO: 527 - DNA, 1471 bp, Homo sapien
gactctccagtcctcagtcaccttggacaaagaagtgtggatcctcagattccatcttttccaactccaaggtgccatggcagagaaggtgctggtaacaggtggggctggctacattggcagccacacggtgctggagctgctggaggctggctacttgcctgtggtcatcgataacttccataatgccttccgtggagggggctccctgcctgagagcctgcggcgggtccaggagctgacaggccgctctgtggagtttgaggagatggacattttggaccagggagccctacagcgtctcttcaaaaagtacagctttatggcggtcatccactttgcggggctcaaggccgtgggcgagtcggtgcagaagcctctggattattacagagttaacctgaccgggaccatccagcttctggagatcatgaaggcccacggggtgaagaacctggtgttcagcagctcagccactgtgtacgggaacccccagtacctgccccttgatgaggcccaccccacgggtggttgtaccaacccttacggcaagtccaagttcttcatcgaggaaatgatccgggacctgtgccaggcagacaagacttggaacgtagtgctgctgcgctatttcaaccccacaggtgcccatgcctctggctgcattggtgaggatccccagggcatacccaacaacctcatgccttatgtctcccaggtggcgatcgggcgacgggaggccctgaatgtctttggcaatgactatgacacagaggatggcacaggtgtccgggattacatccatgtcgtggatctggccaagggccacattgcagccttaaggaagctgaaagaacagtgtggctgccggatctacaacctgggcacgggcacaggctattcagtgctgcagatggtccaggctatggagaaggcctctgggaagaagatcccgtacaaggtggtggcacggcgggaaggtgatgtggcagcctgttacgccaaccccagcctggcccaagaggagctggggtggacagcagccttagggctggacaggatgtgtgaggatctctggcgctggcagaagcagaatccttcaggctttggcacgcaagcctgaggaccctcccctaccaaggaccaggaaaagcagcagctgcctgctctccagcctctggaggaactcagggccctggagctgctggggccaagccaagggcctcccctacctcaaaccccagctgggcccgcttagcccaccaggcatgaggccaaggctccactgaccaggaggccgaggtctctaactcttatcttccacagggtccaagagttcatcaggacccccaagagtgagtgagggggcaaggctctggcacaaaacctcctcctcccaggcactcatttatattgctctgaaagagctttccaaagtatttaaaaataaaaacaagttttcttacactgg

SEQ ID NO: 528 - protein, 348 aa, Homo sapien
MAEKVLVTGGAGYIGSHTVLELLEAGYLPVVIDNFHNAFRGGGSLPESLRRVQELTGRSVEFEEMDILDQGALQRLFKKYSFMAVIHFAGLKAVGESVQKPLDYYRVNLTGTIQLLEIMKAHGVKNLVFSSSATVYGNPQYLPLDEAHPTGGCTNPYGKSKFFIEEMIRDLCQADKTWNVVLLRYFNPTGAHASGCIGEDPQGIPNNLMPYVSQVAIGRREALNVFGNDYDTEDGTGVRDYIHVVDLAKGHIAALRKLKEQCGCRIYNLGTGTGYSVLQMVQAMEKASGKKIPYKVVARREGDVAACYANPSLAQEELGWTAALGLDRMCEDLWRWQKQNPSGFGTQA

SEQ ID NO: 529 - DNA, 2035 bp, Homo sapien
cgagccccgccgaaccgaggccacccggagccgtgcccagtccacgccggccgtgcccggcggccttaagaaccaggcaacctctgccttcttccctcttccactcggagtcgcgctccgcgcgccctcactgcagcccctgcgtcgccgggaccctcgcgcgcgaccagccgaatcgctcctgcagcagagccaacatgcccatcactcggatgcgcatgagaccctggctagagatgcagattaattccaaccaaatcccggggctcatctggattaataaagaggagatgatcttccagatcccatggaagcatgctgccaagcatggctgggacatcaacaaggatgcctgtttgttccggagctgggccattcacacaggccgatacaaagcaggggaaaaggagccagatcccaagacgtggaaggccaactttcgctgtgccatgaactccctgccagatatcgaggaggtgaaagaccagagcaggaacaagggcagctcagctgtgcgagtgtaccggatgcttccacctctcaccaagaaccagagaaaagaaagaaagtcgaagtccagccgagatgctaagagcaaggccaagaggaagtcatgtggggattccagccctgataccttctctgatggactcagcagctccactctgcctgatgaccacagcagctacacagttccaggctacatgcaggacttggaggtggagcaggccctgactccagcactgtcgccatgtgctgtcagcagcactctccccgactggcacatcccagtggaagttgtgccggacagcaccagtgatctgtacaacttccaggtgtcacccatgccctccacctctgaagctacaacagatgaggatgaggaagggaaattacctgaggacatcatgaagctcttggagcagtcggagtggcagccaacaaacgtggatgggaaggggtacctactcaatgaacctggagtccagcccacctctgtctatggagactttagctgtaaggaggagccagaaattgacagcccagggggggatattgggctgagtctacagcgtgtcttcacagatctgaagaacatggatgccacctggctggacagcctgctgaccccagtccggttgccctccatccaggccattccctgtgcaccgtagcagggcccctgggcccctcttattcctctaggcaagcaggacctggcatcatggtggatatggtgcagagaagctggacttctgtgggcccctcaacagccaagtgtgaccccactgccaagtggggatgggcctccctccttgggtcattgacctctcagggcctggcaggccagtgtctgggtttttcttgtggtgtaaagctggccctgcctcctgggaagatgaggttctgagaccagtgtatcaggtcagggacttggacaggagtcagtgtctggctttttcctctgagcccagctgcctggagagggtctcgctgtcactggctggctcctaggggaacagaccagtgaccccagaaaagcataacaccaatcccagggctggctctgcactaagcgaaaattgcactaaatgaatctcgttccaaagaactaccccttttcagctgagccctggggactgttccaaagccagtgaatgtgaaggaaactcccctccttcggggcaatgctccctcagcctcagaggagctctaccctgctccctgctttggctgaggggcttgggaaaaaaacttggcactttttcgtgtggatcttgccacatttctgatcagaggtgtacactaacatttcccccgagctcttggcctttgcatttatttatacagtgccttgctcggggcccaccaccccctcaagccccagcagccctcaacaggcccagggagggaagtgtgagcgccttggtatgacttaaaattggaaatgtcatctaaccattaagtcatgtgtgaacacataaggacgtgtgtaaatatgtacatttgtctttttataaaaagtaaaattgtt

SEQ ID NO: 530 - protein, 325 aa, Homo sapien
MPITRMRMRPWLEMQINSNQIPGLIWINKEEMIFQIPWKHAAKHGWDINKDACLFRSWAIHTGRYKAGEKEPDPKTWKANFRCAMNSLPDIEEVKDQSRNKGSSAVRVYRMLPPLTKNQRKERKSKSSRDAKSKAKRKSCGDSSPDTFSDGLSSSTLPDDHSSYTVPGYMQDLEVEQALTPALSPCAVSSTLPDWHIPVEVVPDSTSDLYNFQVSPMPSTSEATTDEDEEGKLPEDIMKLLEQSEWQPTNVDGKGYLLNEPGVQPTSVYGDFSCKEEPEIDSPGGDIGLSLQRVFTDLKNMDATWLDSLLTPVRLPSIQAIPCAP

SEQ ID NO: 531 - DNA, 4131 bp, Homo sapien
ctgggccaggcgccggggcaggaagggaggcggccgccgtggccattcttaaaggcgcccgagtgtaggcgacaggccgctgacggcgggaaggaaaatgagtgagtctttggttgtttgtgatgttgccgaagatttagtggaaaagctgagaaagtttcgttttcgcaaagaaacgaacaacgctgctattataatgaagattgacaaggataaacgcctggtggtactggatgaggagcttgagggcatttcaccagatgaacttaaagatgaactacctgaacgacaacctcgcttcattgtgtatagttataaatatcaacatgatgatggaagagtttcatatcctctgtgctttattttctccagtcctgttggatgtaagcctgaacaacagatgatgtatgctggaagtaagaataagctagtccagacagctgaactaaccaaggtatttgaaataagaaataccgaagacctaactgaagaatggttacgtgagaaacttggattttttcactaatgtgaacttctgtgtttctaaagtatttatgtattaacctgaccatactggaatcagacataaatacttatttatgcctaaaaatgcactgttacttacagtttgtttcctgcagtaaagaaaaattcttcatttgtgcaaaatttgaacaaagaggaaatcatcttcatagtaatgaaactttgtaaagtgtttccttatattggtaattgttaggtggactacttttctccagggactttttgcactcttgtgactaatttctataacttatggttcggaatttgttactatttacagacaccattggaaagtggatatattagattgtgagagacaacagttgcctccttttgacaaatactggatattagcagtttatttatgaaaatagcgtattatcacttgtcaaatcattgaaattcatttggggtcaaagacttgagtgacccagtattgagccatgaataatttagtgtaacctgtattacaagtacattgatgaattctgtatcttctttggtttcctgtatctttttaatcaagtctagaaactatgttcatcagtcactcatttttaaggtcgggagttagattttatgatagaattatgactgttagcttttctccttatagcatcttagtcttagaaattggtgggttgtaataatcaagggcttcattccttttatgtcatttctagacagttttgaatctaggttaataacactttatttataaagcacctcaatgtcctgtgaacactaattattttaaatgtgttaatactgtgcctttgatttgttagctttaaagttagtttaagacttttacactgccagtattccacatttggtgaaattaatacttttttaaagggtccaaataaaataattttctaatgtgtatatctgaaatttgtaataaaatcaacttcatattttaaaaattccaactatctgcttgcattggtgtaatatatggcagtcgagagttataattttgggtatacttgtggttagttttgtgccataggaaaaaattatcttaaaactttggccatagttaataacattaacacttcaatagcaatcacatcttatatcctaaatgtcagaagatattctgaactggatgcctgaatagttaactaaaccagtcttggttagatgatggtactcttggcataaagcgtaggattctgatatttggcatacttgtaaaaacaaatacataagtaaccattgaacattaatttgataataggtctagagactctaaaaactaaccaaacttggtgagtgtattcttatattaagaatatcttagtcatctcaaaactagcaaaatttaaattttggcatgttttccattcatatgttctttgcattttatttttgaggtttctgtgagaagtaaagatagttggaatttttgcgatattgaatagaacatcttctgttcccaacactgtttggcttcactaatttagaagtcaggaagcaatagaaagttggagatgaggaagtgctagagtaggtgtttgttttggttcttggagggaaaagattctttattccaatttccagagagaagagaaaactcacccaggaagtttaaaaattctttaaacaggtattttgatattggagaataacatgcatataattctgtaggaatgcacatgtaatccaagtgagtggagagtgtttttaatgtttttgaatgaaggaaatgaggttttgtttcacctgttttgcagcagtaagagaaactagtgctgcaagaatgtattttttaatgaagttccttattttgtcttgcatgttttagttttgcttatttttaaatttggaggtcctccataatgtcagataatattgacctgccatacgttagcactcttagttccgctactgtctttaacaggagcaaagagctgtgataaaccatgcttttttgagcttgtctgactcctaattaataacatgtttttggcaagacaacagattgaggttagaggatcagtaggacatttttattccatctgtcctatggggaaatttacaaatcccgtgctctaaaatgttctcaaacatttatatagatttccctttcatcttactaaattttgcattgttcttttcaagtatgtttcgtatttactgtctttttttctgccatttcccaaataataactccagatttcataattccagtttttacattccgttatctttctggtacaaccattcccattcagccttaaatctgagtcctttttagcagcaacttttttcctgggatcctccttcgtggtcttctaagtcagtgttagttttgaaatttttggccctgcataagttctgcatagcatctaatgtcaaaatagaaccaactggtaatcacagtattatttagtgtggtttccatgacaacaaaaatacatacgaagaaaacttctcaggttactatgctgaaattccaaaatgtctgagttttgaatagtgatcactttgttctggtattgacgcaattatattaggaaaaaagttggttgactgtttttgtttaattgacttctaaaatgttcaaattgtctagttctaaaagtttactaaatgcctagtgcagttaaacatactcttgtttaagtgtgtgttgctaaattttttactgtcattactaaataatctgtgtggcaaaatgtgtgtcagcacttttccctccttttttatctcctattttcaggagtcaaatgtagccataaactgtatccttgtctgacactttagctaaaaatttccagttaggggagtttattgccaaattaaatttggctgttccccccaacccatatagatattaaggaaggtgtacttaaaaaatgtttggactgcttttaaaacctgagcaatgtcattaatccatatgtggactagtgatgaatagatattttcataagagtttaaatgactgatatttggtggaagtagagagtaactcaatattctatcaattcaagtattcttactatggttgcctttccctatttgttcaatagactgataatactggtatttatagagtttgagccattacaacttttgtgaggatgtgtttcaaacatttctggacaaatcttattttgtatttctggaagaatgtagtaatcttctagaccgcttaaaaccaatgctcccaagctgaatattcttgagcaaatttgttttttattatgccatttgacatttcaaatcagtgctcatatacagtaaacttgtgatagaaattgtattttattgctttttggattataattcatataaatataattacttgaatattgtttgagatcattaacatgccagggcagttcccactgatttagatggtccaagataatctcattcaggaggcttgaaacattaatggtttagtcttgtgaattttaacagttctctgtcatcgtttaacaaaaccaacaactgacacaactccttaagctgtggtttcagtctctgctagttcatattgcatgtttattttggacagtcttttgttaagcatggtgcttgtactggtttaaataaaatgttaacatt

SEQ ID NO: 532 - protein, 142 aa, Homo sapien
MSESLVVCDVAEDLVEKLRKFRFRKETNNAAIIMKIDKDKRLVVLDEELEGISPDELKDELPERQPRFIVYSYKYQHDDGRVSYPLCFIFSSPVGCKPEQQMMYAGSKNKLVQTAELTKVFEIRNTEDLTEEWLREKLGFFH

SEQ ID NO: 533 - DNA, 702 bp, Homo sapien
aggaagccgactaggcgaattcacttactgaccggcctgggctgctctgagacatggaggaagccagtgaaggtggaggaaatgatcgtgtgcggaacctgcaaagtgaggtggagggagttaagaatattatgacccagaatgtggagcggatcctggcccggggggaaaacttggaacatctccgcaacaagacagaggatctggaagccacatctgagcacttcaagacgacatcgcagaaggtggctcggaaattctggtggaagaacgtgaagatgattgtccttatctgcgtgattgtttttatcatcatcctcttcattgtgctctttgccactggtgccttctcttaagtaacagggaacctctcccacctgcccttcttttcagggacaaccctccataaatgtgtgccaagagggtctcctttcctgtcttcctctacagagaatgctgctcggtcctcctacccctcttcccgaggccctgctgccacgttgtatgccccagaaggtaccttggtcccccggaaggagagaaaaaagagagatggactgtggctgcatttcttgggtccttagagtgggctggagagacctagagggcccagcatgtggctgggaaactgttggtggccagtgggtaataaagacctttcagtatccctaaaaaaaaaaaaaaaaaaaaaaaaaaaaaaaa

SEQ ID NO: 534 - protein, 100 aa, Homo sapien
MEEASEGGGNDRVRNLQSEVEGVKNIMTQNVERILARGENLEHLRNKTEDLEATSEHFKTTSQKVARKFWWKNVKMIVLICVIVFIIILFIVLFATGAFS

SEQ ID NO: 535 - DNA, 5601 bp, Homo sapien
ggcccggctgcgaggaggaggcggcggcggcgcaggaggatgtacttggtggcgggggacagggggttggccggctgcgggcacctcctggtctcgctgctggggctgctgctgctgctggcgcgctccggcacccgggcgctggtctgcctgccctgtgacgagtccaagtgcgaggagcccaggaactgcccggggagcatcgtgcagggcgtctgcggctgctgctacacgtgcgccagccagaggaacgagagctgcggcggcaccttcgggatttacggaacctgcgaccgggggctgcgttgtgtcatccgccccccgctcaatggcgactccctcaccgagtacgaagcgggcgtttgcgaagatgagaactggactgatgaccaactgcttggttttaaaccatgcaatgaaaaccttattgctggctgcaatataatcaatgggaaatgtgaatgtaacaccattcgaacctgcagcaatccctttgagtttccaagtcaggatatgtgcctttcagctttaaagagaattgaagaagagaagccagattgctccaaggcccgctgtgaagtccagttctctccacgttgtcctgaagattctgttctgatcgagggttatgctcctcctggggagtgctgtcccttacccagccgctgcgtgtgcaaccccgcaggctgtctgcgcaaagtctgccagccgggaaacctgaacatactagtgtcaaaagcctcagggaagccgggagagtgctgtgacctctatgagtgcaaaccagttttcggcgtggactgcaggactgtggaatgccctcctgttcagcagaccgcgtgtcccccggacagctatgaaactcaagtcagactaactgcagatggttgctgtactttgccaacaagatgcgagtgtctctctggcttatgtggtttccccgtgtgtgaggtgggatccactccccgcatagtctctcgtggcgatgggacacctggaaagtgctgtgatgtctttgaatgtgttaatgatacaaagccagcctgcgtatttaacaatgtggaatattatgatggagacatgtttcgaatggacaactgtcggttctgtcgatgccaagggggcgttgccatctgcttcactgcccagtgtggtgagataaactgcgagaggtactacgtgcccgaaggagagtgctgcccagtgtgtgaagatccagtgtatccttttaataatcccgctggctgctatgccaatggcctgatccttgcccacggagaccggtggcgggaagacgactgcacattctgccagtgcgtcaacggtgaacgccactgcgttgcgaccgtctgcggacagacctgcacaaaccctgtgaaagtgcctggggagtgttgccctgtgtgcgaagaaccaaccatcatcacagttgatccacctgcatgtggggagttatcaaactgcactctgacagggaaggactgcattaatggtttcaaacgcgatcacaatggttgtcggacctgtcagtgcataaacaccgaggaactatgttcagaacgtaaacaaggctgcaccttgaactgtcccttcggtttccttactgatgcccaaaactgtgagatctgtgagtgccgcccaaggcccaagaagtgcagacccataatctgtgacaagtattgtccacttggattgctgaagaataagcacggctgtgacatctgtcgctgtaagaaatgtccagagctctcatgcagtaagatctgccccttgggtttccagcaggacagtcacggctgtcttatctgcaagtgcagagaggcctctgcttcagctgggccacccatcctgtcgggcacttgtctcaccgtggatggtcatcatcataaaaatgaggagagctggcacgatgggtgccgggaatgctactgtctcaatggacgggaaatgtgtgccctgatcacctgcccggtgcctgcctgtggcaaccccaccattcaccctggacagtgctgcccatcatgtgcagatgactttgtggtgcagaagccagagctcagtactccctccatttgccacgcccctggaggagaatactttgtggaaggagaaacgtggaacattgactcctgtactcagtgcacctgccacagcggacgggtgctgtgtgagacagaggtgtgcccaccgctgctctgccagaacccctcacgcacccaggattcctgctgcccacagtgtacagatcaaccttttcggccttccttgtcccgcaataacagcgtacctaattactgcaaaaatgatgaaggggatatattcctggcagctgagtcctggaagcctgacgtttgtaccagctgcatctgcattgatagcgtaattagctgtttctctgagtcctgcccttctgtatcctgtgaaagacctgtcttgagaaaaggccagtgttgtccctactgcatagaagacacaattccaaagaaggtggtgtgccacttcagtgggaaggcctatgccgacgaggagcggtgggaccttgacagctgcacccactgctactgcctgcagggccagaccctctgctcgaccgtcagctgcccccctctgccctgtgttgagcccatcaacgtggaaggaagttgctgcccaatgtgtccagaaatgtatgtcccagaaccaaccaatatacccattgagaagacaaaccatcgaggagaggttgacctggaggttcccctgtggcccacgcctagtgaaaatgatatcgtccatctccctagagatatgggtcacctccaggtagattacagagataacaggctgcacccaagtgaagattcttcactggactccattgcctcagttgtggttcccataattatatgcctctctattataatagcattcctattcatcaatcagaagaaacagtggataccactgctttgctggtatcgaacaccaactaagccttcttccttaaataatcagctagtatctgtggactgcaagaaaggaaccagagtccaggtggacagttcccagagaatgctaagaattgcagaaccagatgcaagattcagtggcttctacagcatgcaaaaacagaaccatctacaggcagacaatttctaccaaacagtgtgaagaaaggcaactaggatgaggtttcaaaagacggaagacgactaaatctgctctaaaaagtaaactagaatttgtgcacttgcttagtggattgtattggattgtgacttgatgtacagcgctaagaccttactgggatgggctctgtctacagcaatgtgcagaacaagcattcccacttttcctcaagataactgaccaagtgttttcttagaaccaaagtttttaaagttgctaagatatatttgcctgtaagatagctgtagagatatttggggtggggacagtgagtttggatggggaaatgggtgggagggtggtgttgggaagaaaaattggtcagcttggctcggggagaaacctggtaacataaaagcagttcagtggcccagaggttatttttttcctattgctctgaagactgcactggttgctgcaaagctcaggcctgaatgagcaggaaacaaaaaaggccttgcgacccagctgccataaccaccttagaactaccagacgagcacatcagaaccctttgacagccatcccaggtctaaagccacaagtttcttttctatacagtcacaactgcagtaggcagtgaggaagccagagaaatgcgatagcggcatttctctaaagcgggttattaaggatatatacagttacactttttgctgcttttattttcttccaagccaatcaatcagccagttcctagcagagtcagcacatgaacaagatctaagtcatttcttgatgtgagcactggagcttttttttttttacaacgtgacaggaagaggagggagagggtgacgaacaccaggcatttccaggggctatatttcactgtttgttgttgctttgttctgttatattgttggttgttcatagtttttgttgaagctctagcttaagaagaaactttttttaaaaagactgtttggggattctttttccttattatatactgattctacaaaatagaaactacttcattttaattgtatattattcaagcacctttgttgaagctcaaaaaaaatgatgcctctttaaactttagcaattataggagtatttatgtaactatcttatgcttcaaaaaacaaaagtatttgtgtgcatgtgtatataatatatatatatacatatatatttatacacatacaatttatgttttcctgttgaatgtatttttatgagattttaaccagaacaaaggcagataaacaggcattccatagcagtgcttttgatcacttacaaattttttgaataacacaaaatctcattctacctgcagtttaattggaaagatgtgtgtgtgagagtatgtatgtgtgtgtgtgtgtgtgtgtgtgtgcgcgcgcacgcacgccttgagcagtcagcattgcacctgctatggagaagggtattcctttattaaaatcttcctcatttggatttgctttcagttggttttcaatttgctcactggccagagacattgatggcagttcttatctgcatcactaatcagctcctggattttttttttttttttttcaaacaatggtttgaaacaactactggaatattgtccacaataagctggaagtttgttgtagtatgcctcaaatataactgactgtatactatagtggtaacttttcaaacagcccttagcacttttatactaattaacccatttgtgcattgagttttcttttaaaaatgcttgttgtgaaagacacagatacccagtatgcttaacgtgaaaagaaaatgtgttctgttttgtaaaggaactttcaagtattgttgtaaatacttggacagaggttgctgaactttaaaaaaaattaatttattattataatgacctaatttattaatctgaagattaaccatttttttgtcttagaatatcaaaaagaaaaagaaaaaggtgttctagctgtttgcatcaaaggaaaaaaagatttattatcaaggggcaatatttttatcttttccaaaataaatttgttaatgatacattacaaaaatagattgacatcagcctgattagtataaattttgttggtaattaatccattcctggcataaaaagtctttatcaaaaaaaattgtagatgcttgctttttgttttttcaatcatggccatattatgaaaatactaacaggatataggacaaggtgtaaatttttttattattattttaaagatatgatttatcctgagtgctgtatctattactcttttactttggttcctgttgtgctcttgtaaaagaaaaatataatttcctgaagaataaaatagatatatggcacttggagtgcatcatagttctacagtttgtttttgttttcttcaaaaaagctgtaagagaattatctgcaacttgattcttggcaggaaataaacattttgagttgaaatcaaaaaaaaaaaaaaaaaa

SEQ ID NO: 536 - protein, 1036 aa, Homo sapien
MYLVAGDRGLAGCGHLLVSLLGLLLLLARSGTRALVCLPCDESKCEEPRNCPGSIVQGVCGCCYTCASQRNESCGGTFGIYGTCDRGLRCVIRPPLNGDSLTEYEAGVCEDENWTDDQLLGFKPCNENLIAGCNIINGKCECNTIRTCSNPFEFPSQDMCLSALKRIEEEKPDCSKARCEVQFSPRCPEDSVLIEGYAPPGECCPLPSRCVCNPAGCLRKVCQPGNLNILVSKASGKPGECCDLYECKPVFGVDCRTVECPPVQQTACPPDSYETQVRLTADGCCTLPTRCECLSGLCGFPVCEVGSTPRIVSRGDGTPGKCCDVFECVNDTKPACVFNNVEYYDGDMFRMDNCRFCRCQGGVAICFTAQCGEINCERYYVPEGECCPVCEDPVYPFNNPAGCYANGLILAHGDRWREDDCTFCQCVNGERHCVATVCGQTCTNPVKVPGECCPVCEEPTIITVDPPACGELSNCTLTGKDCINGFKRDHNGCRTCQCINTEELCSERKQGCTLNCPFGFLTDAQNCEICECRPRPKKCRPIICDKYCPLGLLKNKHGCDICRCKKCPELSCSKICPLGFQQDSHGCLICKCREASASAGPPILSGTCLTVDGHHHKNEESWHDGCRECYCLNGREMCALITCPVPACGNPTIHPGQCCPSCADDFVVQKPELSTPSICHAPGGEYFVEGETWNIDSCTQCTCHSGRVLCETEVCPPLLCQNPSRTQDSCCPQCTDQPFRPSLSRNNSVPNYCKNDEGDIFLAAESWKPDVCTSCICIDSVISCFSESCPSVSCERPVLRKGQCCPYCIEDTIPKKVVCHFSGKAYADEERWDLDSCTHCYCLQGQTLCSTVSCPPLPCVEPINVEGSCCPMCPEMYVPEPTNIPIEKTNHRGEVDLEVPLWPTPSENDIVHLPRDMGHLQVDYRDNRLHPSEDSSLDSIASVVVPIIICLSIIIAFLFINQKKQWIPLLCWYRTPTKPSSLNNQLVSVDCKKGTRVQVDSSQRMLRIAEPDARFSGFYSMQKQNHLQADNFYQTV

SEQ ID NO: 537 - DNA, 1266 bp, Homo sapien
ctcggaagcccgtcaccatgtcgtgcgagtcgtctatggttctcgggtactgggatattcgtgggctggcgcacgccatccgcctgctcctggagttcacggatacctcttatgaggagaaacggtacacgtgcggggaagctcctgactatgatcgaagccaatggctggatgtgaaattcaagctagacctggactttcctaatctgccctacctcctggatgggaagaacaagatcacccagagcaatgccatcttgcgctacatcgctcgcaagcacaacatgtgtggtgagactgaagaagaaaagattcgagtggacatcatagagaaccaagtaatggatttccgcacacaactgataaggctctgttacagctctgaccacgaaaaactgaagcctcagtacttggaagagctacctggacaactgaaacaattctccatgtttctgtggaaattctcatggtttgccggggaaaagctcacctttgtggattttctcacctatgatatcttggatcagaaccgtatatttgaccccaagtgcctggatgagttcccaaacctgaaggctttcatgtgccgttttgaggctttggagaaaatcgctgcctacttacagtctgatcagttctgcaagatgcccatcaacaacaagatggcccagtggggcaacaagcctgtatgctgagcaggaggcagacttgcagagcttgttttgtttcatcctgtccgtaaggggtcagcgctcttgctttgctcttttcaatgaatagcacttatgttactggtgtccagctgagtttctcttgggtataaaggctaaaagggaaaaaggatatgtggagaatcatcaagatatgaattgaatcgctgcgatactgtggcatttccctactccccaactgagttcaagggctgtaggttcatgcccaagccctgagagtgggtactagaaaaaacgagattgcacagttggagagagcaggtgtgttaaatggactggagtccctgtgaagactgggtgaggataacacaagtaaaactgtggtactgatggacttaaccggagttcggaaaccgtcctgtgtacacatgggagtttagtgtgataaaggcagtatttcagactggtgggctagccaatagagttggcaattgcttattgaaactcattaaaaataatagagccccacttgacactattcactaaaattaatctggaatttaaggcccaacattaaacacaaagctgtattgat

SEQ ID NO: 538 - protein, 225 aa, Homo sapien
MSCESSMVLGYWDIRGLAHAIRLLLEFTDTSYEEKRYTCGEAPDYDRSQWLDVKFKLDLDFPNLPYLLDGKNKITQSNAILRYIARKHNMCGETEEEKIRVDIIENQVMDFRTQLIRLCYSSDHEKLKPQYLEELPGQLKQFSMFLWKFSWFAGEKLTFVDFLTYDILDQNRIFDPKCLDEFPNLKAFMCRFEALEKIAAYLQSDQFCKMPINNKMAQWGNKPVC

SEQ ID NO: 539 - DNA, 2274 bp, Homo sapien
cggctgctgctgccactgctgtgctgggggcccggtcgccaggcaaaaagccctccacgtttgaggggagtcatgagccgtttcctgaatgtgttaagaagttggctggttatggtgtccatcatagccatggggaacacgctgcagagcttccgagaccacacttttctctatgaaaagctctacactggcaagccaaaccttgtgaatggcctccaagctcggacctttgggatctggacgctgctctcatcagtgattcgctgcctctgtgccattgacattcacaacaagacgctctatcacatcacactctggaccttcctccttgccctggggcatttcctctctgagttgtttgtctatggaactgcagctcccacgattggcgtcctggcacccctgatggtggcaagtttctccatcctgggtatgctggtcgggctccggtatctagaagtagaaccagtatccagacagaagaagagaaactgaggccagcattatcacctccaggactttctcgttttccaccttggccatcttcttccttcgtcgtctctcctctttaatttcttttctattccatcatctgcccttttattcacttttagcctctttttttaatttttaaaatttaaagatatgcatactgaaaagtatataacatgtacgtacaatttaaagaataattttaaagtgaatactacgtaactccatccaagtcaagaaattgccagcttctcggaagcccactgtgtctccttcccctacctgcaacctcttccaggctcccttttccagccttcccctttttcccttttattttcatgccttgatttgacttgtgtggtgggaacatgtgaactatgaaacttaaacctgctgcccacccagagcagctgtgaccaagggctgcctcaaggggttgtccacgcaggttgggctcctctctgctgctggacccaagactctgaaccttccaagggacaggcagttcttctaagaagggctcccctgtgtgtgagcaagaccacagctctccttctatctacagatgcatgagggttggaagagtctgggctgtttttagaccttctggtcagctgtatttgtgtaacaacttttgtaataaatagaaaaaccctctgctctgatcagttcttgtactttgacctctgctaagacaagagcatggctgcctcctctgagccctaggagaatcacagctttatgcctgattgaatacaccatagtgagtaggacagctcatgacacaggtcagcctggctgcctccggctccttactgtcatttgctcattcctcttgtattcttgaagtcaaatcttcttttttctcaccttcaagagtctgcgttcacaactaaacactaagtgccctttcttatttcctcctaaagaagaaacagattcttgagagagcagagacaaaaaaatagaactaggcagcatagatgaaacaactgcatgacatgggaagaagacaactaaaccccgaggagaatgcactggaatggacagttgctcttaaaccctacccagagggcctcccccagctggaccctcatacacagtgtgtgtatccaaaaggccattgctatttcagcaaatatttgttgagtacttctccatgccggacacttgggaaagagaaatgaacgacacaggcaatgcccctgccctgtgggccttatattatagtcaaggtaacagaatcaacaagccaacacaaaaataaagaacttcaaatagggataagaactctaacaaacacaaggtattttggtcaagaaggaatgtggggtgggcagtggggaacgtaacttaaattagatcatcagaaagtcctccctgaggagatggatttttttttgtttttttagagacggggtttcactctgtcacccaggctgggaattgcagtggcacaatccctcactgctgcctcaacttcctgggctcaagtgaccctcctgcatcagcttcccaagtagctgggactgcaagtgtgtaccaccacatccagctaacatttttgggggtgggaagagatggggtcttactatgttgtccaggctaagaggtgggatttgagctgagacttgaatgcccaggagttaaatgtcttaagatatggagcaggccgttagaaaggagggagcagcaactggaaggtagaatagtcttattcaaggaataagaactatgtaatcacagcatggtgaagagttaggaagtgaaaaaaaaaaaaaa

SEQ ID NO: 540 - protein, 140 aa, Homo sapien
MSRFLNVLRSWLVMVSIIAMGNTLQSFRDHTFLYEKLYTGKPNLVNGLQARTFGIWTLLSSVIRCLCAIDIHNKTLYHITLWTFLLALGHFLSELFVYGTAAPTIGVLAPLMVASFSILGMLVGLRYLEVEPVSRQKKRN

SEQ ID NO: 541 - DNA, 1615 bp, Homo sapien
agtacatcgaccccgagaccaagaagcacatcccgtaccgcgagcacaagagcctgacgggcacggcgcgctacatgagcatcaacacgcacctgggcaaggagcagagccgccgcgacgacctggaggcgctgggccacatgttcatgtacttcctgcgcggcagcctcccctggcaggggctcaaggccgacacgctcaaggagcggtaccagaagatcggggacaccaaacgcgccacgcccatcgaggtgctctgcgagaacttcccagaggagatggccacgtacctgcgctatgtgcggcgcctggacttcttcgagaagcccgactatgactacctgcggaagctcttcaccgacctcttcgaccgcagtggcttcgtgttcgactatgagtacgactgggccgggaagcccctgccgacccccatcggcaccgtccacaccgacctgccctcccagcctcagctccgggacaaaacccagccccctgaatcttctccgtgcagccccttggggcgcgaccttgtgcgaggccctcggggcccacccacagcggcccagggccagaccctggctggaagccagaacgcagactgcaggggccgcgcctggctcaggcggccccacccccgggacgtggggtcacttccttcatgtaagactttggccgaaatttctacacctgtgtctagtcctcccctccaagagcattaactatttaaaacaaggaaaagaggaaaaaaaaaacagaggcccgccctaccccactcctgcccctccgtttctttgctgaagtgagtagtgtgatcctggaggccccccggcctggccccgccccgccagccgcccccgttagcgtcataaagtccagcttgtctccctcgatccaaaggccgttttctcgaggggagggcaggcccggcctggaggggtgctgtggagctgtcttgcccaggccctcctgggagggggacaggcattgttgccaggggtgaggccgtgccccaggcctccccgaaaccaaaggggaaggcaggggtggggccgtggctgaagccggctccccaaccaaaatgctgcaccaaagctcgggcgccgcgggcacggctgctgcagtctcttcccagcctggccctggcaaggggcgggtgggcgctgccaggcgggtgcttctcgacgcacttgctcccggaggctgcgccccggcgcctggaacccgaggtgggaggaccggttggtgtcaccctgctcggccctcagccctgccgcgtggggcgcgtgggcacggagcttcctgcctctctgctccgacacccggcaagcagccggagacaaaacgccttaaagcccccggcccagccctgcaggtatattgcaggggcctgggggcggccctggactggcgggcggttccccagtggggtgccctggaggctgccgggcagagtggagcagcttggggccgtgcccagggcggtggctgtgagtctagtttttgctttaccaagtgtacagaaatggcatttacgtttctctgatgctcccttgaagccatagaatttaggggcttttttaaaaaaaataaaagaaaaatgaaaccaaaaaaaaaa

SEQ ID NO: 542 - protein, 214 aa, Homo sapien
MSINTHLGKEQSRRDDLEALGHMFMYFLRGSLPWQGLKADTLKERYQKIGDTKRATPIEVLCENFPEEMATYLRYVRRLDFFEKPDYDYLRKLFTDLFDRSGFVFDYEYDWAGKPLPTPIGTVHTDLPSQPQLRDKTQPPESSPCSPLGRDLVRGPRGPPTAAQGQTLAGSQNADCRGRAWLRRPHPRDVGSLPSCKTLAEISTPVSSPPLQEH

SEQ ID NO: 543 - DNA, 969 bp, Homo sapien
agctttggggttgtccctggacttgtcttggttccagaacctgacgacccggcgacggcgacgtctcttttgactaaaagacagtgtccagtgctccagcctaggagtctacggggaccgcctcccgcgccgccaccatgcccaacttctctggcaactggaaaatcatccgatcggaaaacttcgaggaattgctcaaagtgctgggggtgaatgtgatgctgaggaagattgctgtggctgcagcgtccaagccagcagtggagatcaaacaggagggagacactttctacatcaaaacctccaccaccgtgcgcaccacagagattaacttcaaggttggggaggagtttgaggagcagactgtggatgggaggccctgtaagagcctggtgaaatgggagagtgagaataaaatggtctgtgagcagaagctcctgaagggagagggccccaagacctcgtggaccagagaactgaccaacgatggggaactgatcctgaccatgacggcggatgacgttgtgtgcaccagggtctacgtccgagagtgagtggccacaggtagaaccgcggccgaagcccaccactggccatgctcaccgccctgcttcactgccccctccgtcccaccccctccttctaggatagcgctccccttaccccagtcacttctgggggtcactgggatgcctcttgcagggtcttgctttctttgacctcttctctcctcccctacaccaacaaagaggaatggctgcaagagcccagatcacccattccgggttcactccccgcctccccaagtcagcagtcctagccccaaaccagcccagagcagggtctctctaaaggggacttgagggcctgagcaggaaagactggccctctagcttctaccctttgtccctgtagcctatacagtttagaatatttatttgttaattttattaaaatgctttaaaaaaa

SEQ ID NO: 544 - protein, 138 aa, Homo sapien
MPNFSGNWKIIRSENFEELLKVLGVNVMLRKIAVAAASKPAVEIKQEGDTFYIKTSTTVRTTEINFKVGEEFEEQTVDGRPCKSLVKWESENKMVCEQKLLKGEGPKTSWTRELTNDGELILTMTADDVVCTRVYVRE

SEQ ID NO: 545 - DNA, 2271 bp, Homo sapien
gcacgcactggccccggcgcccacccgcacccctccccagagagcactgacacggctcccgggacctcggcaggatggaagagaagctgaagaaaaccaagatcatctttgtggtgggtgggcctggctcagggaagggcacccagtgtgagaagatcgtgcagaagtatggctacacccacctctccaccggggacctcctgcggtccgaggtcagctcaggctcggccaggggcaagaagctgtcggaaatcatggagaaggggcagctggttccactggagacagtgttggacatgctccgggatgccatggtggccaaagtcaatacttccaaaggcttcctgattgatggctacccgcgggaggtgcagcaaggagaagagtttgagcgacggattggacagcccacactgctgctgtatgtggacgcaggccctgagaccatgacccagcggctcttgaaacgtggagagaccagcgggcgtgtggacgacaatgaggagaccatcaaaaagcggctggagacctattacaaggccacagaacccgtcatcgccttctatgagaaacgtggcattgtgcgcaaggtcaacgctgagggctccgtggacagtgtcttctcccaggtctgcacccacctggacgccctaaagtagcaacgctggagccgcttccccagctcagagccccgccccaccccgtcctgattagaggtcctcctggcctgagcgcagcgcctccaccctgccctgctgagcacagacggaggaagccgcttatcctgttttcatggacagctgagcactaaaggaatttctaaggacatttggttttactgctttttctctgcttccagttggagttgattcatgtgcttgtgcctacctggccgcaagtccccagcccctcaaccctccgttcctcctcagcctccctttgccagccacccctcctctagctctggtgggaggcccggggcccttcctcgcacagggcatgcctggcctgaggacccggcgctgagtggcggggcccctgctccgaggggctcatgttcaggcagaaccggtcccagcctgggctcctctgcatcttgctctgtgccttggccctgacccccatcgctctgagcatatgttccatgcctgccttgccggggcctggactgcacaggcagcaaggtcatggtctgagtggggcttcctgggcagttggggcggcccacgccagctggcccagtgggtagtgaattggcttccttgacgcgagaggctctgagggtctgaaaagggcatctcaatggcatgggtgggtggggagtcagtcatgtcactgaaattgaatgggggaggcccaatgaggtggctcatgcctgtaatcccagcactttgggaagctgaggcaggaggatcacctgaggtcaggagttcgagagcagcctggccaacatggcaaaaccccttatttactaaaaatacaaaaacttagccgggcatggtggcatgtgcctgtattcccagctactcatgaggctgaggcaggagaatggcgtgaacccgggagtggagcttgcaatgagccaagattgcgccactgcactccagcctgggtgacagagcaagactccgtctcaaaaaaaaaaaaaaaaaaaaagaaattaattgggggagtcatggtcaggggtgagacctgaaggacctccccctgtgtggccctggacacagcccaccctctgtgagccgtttccaattctaaaacagactcaatgtccccctcacccccacctcaaggtcaggatgcgaacacactgagtgaggagtggacgctgtccattgccacggccatgagggctggagaccagaacagcatggcccgaagcgtgcggggccccggatgacttggggacaccccagaatcccctggggagaacccttcctgcgcgctttcattttttgacctcatcactgagaaaggctcaatttggtgctcacgtgtccttaacacctgatctggcccaagctgcgtgccctttaagccaagagagcctcttgtggaccccgcctgcccgaatgaaatccgaacagttggggctgttatggcaagtggggctggtttttcatttccattggttatttaaagtttcctttaaaataaacgattttaagttataaaaggtgaatctattgaaagaagaacatcaaagaaataaacaggagttcagcggagtagcagaagacaaggcatgtagggggagccattctgtcccag

SEQ ID NO: 546 - protein, 194 aa, Homo sapien
MEEKLKKTKIIFVVGGPGSGKGTQCEKIVQKYGYTHLSTGDLLRSEVSSGSARGKKLSEIMEKGQLVPLETVLDMLRDAMVAKVNTSKGFLIDGYPREVQQGEEFERRIGQPTLLLYVDAGPETMTQRLLKRGETSGRVDDNEETIKKRLETYYKATEPVIAFYEKRGIVRKVNAEGSVDSVFSQVCTHLDALK

SEQ ID NO: 547 - DNA, 2749 bp, Homo sapien
cggtttcctcccccatccccttgactctcccctcccagccctcgctctctcgctcgccctcagcgcggcccccgccatgacggaggcgggtgccggtgccgttgccgccgctgccgtcgcagggggggagtcgggttcccagaaagtagcttgatgagtgtccaaagtagcagtggaagtttggaggggccgccatcttggtcccagctctccacgtctccaaccccgggctcggcggcggcggccaggtccctgctgaatcacacgccgccatccgggaggcccagggaaggtgcaatggatgagcttcatagtctggatccaagaaggcaagagttattggaagctagatttactggagttgcaagtgggagcactggaagtacgggcagttgcagtgttggtgctaaagccacaacaaataacgaaagctctaatcacagttttggaagcttgggatctttaagtgacaaagaatcagagacaccggagaagaaacaatcggaatcatccaggggaagaaagagaaaagcagaaaaccagaatgaaagtagtcagggaaaaagtattgggggacgtggccacaaaattagcgactattttgaataccagggtggaaatggctcaagtccagtaagaggcatacctcctgcaatccgttctcctcaaaattcacattcacattccactccttcctcatctgttcgaccgaatagcccttctcctactgcattagcatttggggaccaccctattgtacaaccaaagcaattatcctttaaaattattcagactgatctcacaatgctgaaattagcagcattagaaagtaataaaatccaggacctggaaaagaaggagggacgtatagatgatttgctcagggctaactgtgatctcagacggcaaatagatgaacaacaaaaattacttgaaaaatacaaagaacgattaaataagtgcatatcaatgagcaagaaacttcttattgaaaagagtacacaagaaaagctgtcaagcagagagaagagtatgcaagatcgattacgcctcgggcactttacaacagttagacatggcgcttcatttactgaacaatggacagatggttttgcatttcagaatcttgtgaagcaacaagaatgggtgaatcagcaaagggaagatattgaaaggcaaaggaaacttctagccaaacgcaaacctcccacagctaataattctcaggcaccctctaccaattctgaaccaaaacaaaggaaaaacaaagcagtcaatggagcagagaatgatccctttgttagaccaaatttaccacaactgttgactttggcagaatatcatgaacaggaagaaattttcaaacttagactaggacatctcaaaaaggaagaggcagaaatccaggcagaacttgaacgtttggaaagagtcagaaatcttcacatacgtgagctgaaaagaataaacaatgaagataattcacagttcaaagatcacccaacattaaatgaaagatatttattacttcatctgcttggtagaggtggctttagtgaagtgtataaggcttttgacctttatgaacaaagatatgctgctgtgaagatacatcagcttaataaaagctggagagatgagaagaaagaaaactaccacaaacatgcctgcagagagtatagaatacacaaagaactggatcaccccagaatagttaaactctatgattatttctccttggatacagatacgttttgtacagtgttagaatactgtgaaggcaatgacttggatttctatctgaagcaacacaagttaatgtcagagaaagaagctcggtctattgtaatgcagattgtaaatgcactaagatatctcaatgagatcaaaccccctattatacattatgatcttaagccaggaaacatcctactggtagatggaacagcatgtggtgaaatcaaaatcactgattttggtctgtccaagattatggatgatgatagctatggtgtagatggaatggatctaacttcccagggggcaggcacttactggtatttacctcctgagtgttttgtagttggaaaagagccaccaaagatttccaacaaggttgatgtatggtcggttggagtcatcttctttcagtgtctttatggtagaaagccatttggtcacaatcaatctcaacaagacattcttcaagaaaatacaatattaaaagccacagaagtccagttccctgtaaaaccggttgtaagcagtgaagccaaggcatttataagacgctgtttggcatatcgaaaagaagatcgatttgatgtgcaccagctggcaaatgacccataccttctcccacacatgagaagatcaaattcttcaggaaacctacacatggctgggctgacagcatcccctacacccccttcttcaagcataattacttactgactttcctccaagattggcatgatatctttgaatttgcttccagatgcacacttaagtttgagagcatttgagtgtttgttttctttttctttttttttttttttttttttttacacaagacgtggttaaagaactgtttgtgactgaagttcctcatagtgtcattggtatgagagaggatcatggacaatgaataaatgcacacttctgactataattttgagcagtgaaggaaggatgactgcctgttacacagaaacaggaataccatgttaagatagaggaaaaaaaaaaa

SEQ ID NO: 548 - protein, 787 aa, Homo sapien
MSVQSSSGSLEGPPSWSQLSTSPTPGSAAAARSLLNHTPPSGRPREGAMDELHSLDPRRQELLEARFTGVASGSTGSTGSCSVGAKASTNNESSNHSFGSLESLSDKESETPEKKQSESSRGRKRKAENQNESSQGFPNLPVFQSLAYWEMGRTAGGKSIGGRGHKISDYFEYQGGNGSSPVRGIPPAIRSPQNSHSHSTPSSSVRPNSPSPTALAFGDHPIVQPKQLSFKIIQTDLTMLKLAALESNKILDLEKKEGRIDDLLRANCDLRRQIDEQQKLLDKYKERLNKCISMSKKLLIEKSTQEKLSSREKSMQDRLRLGHFTTVRHGASFTEQWTDGFAFQNLVKQQEWVNQQREDIERQRKLLAKRKPPTANNSQAPSTNSEPKQRKNKAVNGAENDPFVRPNLPQLLTLAEYHEQEEIFKLRLGHLKKEEAGIQAELERLERVRNLHIRELKRIHNEDNSQFKDHPTLNERYLLLHLLGRGGFSEVDKAFDLSEQRYAAVKIHQLNKSWRDEKKENYHKHACREYRIHKELDHPRIVKLYDYFSLDTDTFCTVLEYCEGNDLDFYLKQHKLMSEKEARSIVMQIVNALRYLNEIKPPIIHYDLKPGNILLVDGTACGEIKITDFGLSKIMDDDSYGVDGMVLTSQGAGTYWYLPPECFVVGKEPPKISNKVDVWSVGVIFYQCLYGRKPFGHNQSQQDILQENTILKATEVQFPVKPVVSSEAKAFIRRCLAYRKEDRFDVHQLACDPYLLPHMRRSNSSGNLHMAGLTASPTPPSSSIITY

SEQ ID NO: 549 - DNA, 2298 bp, Homo sapien
tcggccgagcccagagacagccagttcctctcccgccgcgccgggccgcgtgccgctcgctccccggccgtggcgcctccgggccagacgcgctgcagcctccagcccgcggcaagcgggcggggcggccgcgccacccccggccccgcgccagcagcccctcgccgcgcgtccagcgttcccggccagcagcctccccatacgcagtcctgctggaccgccccgtcgcgccccccactctgaactcaagtcaccgtggagctccgccgccccgaaactttcacgcgagcgggaaatatgggatgtataaaatcaaaagggaaagacagcttgagtgacgatggagtagatttgaagactcaaccagtacgtaatactgaaagaactatttatgtgagagatccaacgtccaataaacagcaaaggccagttccagaatctcagcttttacctggacagaggtttcaaactaaagatccagaggaacaaggagacattgtggtagccttgtacccctatgatggcatccacccggacgacttgtctttcaagaaaggagagaagatgaaagtcctggaggagcatggagaatggtggaaagcaaagtcccttttaacaaaaaaagaaggcttcatccccagcaactatgtggccaaactcaacaccttagaaacagaagagtggtttttcaaggatataaccaggaaggacgcagaaaggcagcttttggcaccaggaaatagcgctggagctttccttattagagaaagtgaaacattaaaaggaagcttctctctgtctgtcagagactttgaccctgtgcatggtgatgttattaagcactacaaaattagaagtctggataatgggggctattacatctctccacgaatcacttttccctgtatcagcgacatgattaaacattaccaaaagcaggcagatggcttgtgcagaagattggagaaggcttgtattagtcccaagccacagaagccatgggataaagatgcctgggagatcccccgggagtccatcaagttggtgaaaaggcttggcgctgggcagtttggggaagtctggatgggttactataacaacagtaccaaggtggctgtgaaaaccctgaagccaggaactatgtctgtgcaagccttcctggaagaagccaacctcatgaagaccctgcagcatgacaagctcgtgaggctctacgctgtggtcaccagggaggagcccatttacatcatcaccgagtacatggccaagggcagtttgctggatttcctgaagagcgatgaaggtggcaaagtgctgcttccaaagctcattgacttttctgctcagattgcagagggaatggcatacatcgagcggaagaactacattcaccgggacctgcgagcagctaatgttctggtctccgagtcactaatgtgcaaaattgcagattttggccttgctagagtaattgaagataatgagtacacagcaagggaaggtgctaagttccctattaagtggacggctccagaagcaatcaactttggatgtttcactattaagtctgatgtgtggtcctttggaatcctcctatacgaaattgtcacctatgggaaaattccctacccagggagaactaatgccgacgtgatgaccgccctgtcccagggctacaggatgccccgtgtggagaactgcccagatgagctctatgacattatgaaaatgtgctggaaagaaaaggcagaagagagaccaacgtttgactacttacagagcgtcctggatgatttctacacagccacggaagggcaataccagcagcagccttagagcacagggagacccgtccatttggcaggggtggctgcctcatttagagaggaaaagtaaccatcactggttgcacttatgatttcatgtgcggggatcatctgccgtgcctggatcctgaaatagaggctaaattactcaggaagaacaccctctaaatgggaaagtattctgtactcttagatggattctccactcagttgcaacttggacttgtcctcagcagctggtaatcttgctctgcttgacaacatctgagtgcagccgtttgagaagaaaacatctattctctccaaaaatgcacccaactagctctatgtttacaaatggacataggactcaaagtttcagagaccattgcaatgaatccccaataattgcagaactaaactcatttataaagctaaaataaccggatatatacatagcatgacatttctttgtgctttggcttacttgttt

SEQ ID NO: 550 - protein, 512 aa, Homo sapien
MGCIKSKGKDSLSDDGVDLKTQPVRNTERTIYVRDPTSNKQQRPVPESQLLPGQRFQTKDPEEQGDIVVALYPYDGIHPDDLSFKKGEKMKVLEEHGEWWKAKSLLTKKEGFIPSNYVAKLNTLETEEWFFKDITRKDAERQLLAPGNSAGAFLIRESETLKGSFSLSVRDFDPVHGDVIKHYKIRSLDNGGYYISPRITFPCISDMIKHYQKQADGLCRRLEKACISPKPQKPWDKDAWEIPRESIKLVKRLGAGQFGEVWMGYYNNSTKVAVKTLKPGTMSVQAFLEEANLMKTLQHDKLVRLYAVVTREEPIYIITEYMAKGSLLDFLKSDEGGKVLLPKLIDFSAQIAEGMAYIERKNYIHRDLRAANVLVSESLMCKIADFGLARVIEDNEYTAREGAKFPIKWTAPEAINFGCFTIKSDVWSFGILLYEIVTYGKIPYPGRTNADVMTALSQGYRMPRVENCPDELYDIMKMCWKEKAEERPTFDYLQSVLDDFYTATEGQYQQQP

SEQ ID NO: 551 - DNA, 2876 bp, Homo sapien
gaattcctgcagctcagcagccgccgccagagcaggacgaaccgccaatcgcaaggcacctctgagaacttcaggatgcagatgtctccagccctcacctgcctagtcctgggcctggcccttgtctttggtgaagggtctgctgtgcaccatcccccatcctacgtggcccacctggcctcagacttcggggtgagggtgtttcagcaggtggcgcaggcctccaaggaccgcaacgtggttttctcaccctatggggtggcctcggtgttggccatgctccagctgacaacaggaggagaaacccagcagcagattcaagcagctatgggattcaagattgatgacaagggcatggcccccgccctccggcatctgtacaaggagctcatggggccatggaacaaggatgagatcagcaccacagacgcgatcttcgtccagcgggatctgaagctggtccagggcttcatgccccacttcttcaggctgttccggagcacggtcaagcaagtggacttttcagaggtggagagagccagattcatcatcaatgactgggtgaagacacacacaaaaggtatgatcagcaacttgcttgggaaaggagccgtggaccagctgacacggctggtgctggtgaatgccctctacttcaacggccagtggaagactcccttccccgactccagcacccaccgccgcctcttccacaaatcagacggcagcactgtctctgtgcccatgatggctcagaccaacaagttcaactatactgagttcaccacgcccgatggccattactacgacatcctggaactgccctaccacggggacaccctcagcatgttcattgctgccccttatgaaaaagaggtgcctctctctgccctcaccaacattctgagtgcccagctcatcagccactggaaaggcaacatgaccaggctgccccgcctcctggttctgcccaagttctccctggagactgaagtcgacctcaggaagcccctagagaacctgggaatgaccgacatgttcagacagtttcaggctgacttcacgagtctttcagaccaagagcctctccacgtcgcgcaggcgctgcagaaagtgaagatcgaggtgaacgagagtggcacggtggcctcctcatccacagctgtcatagtctcagcccgcatggcccccgaggagatcatcatggacagacccttcctctttgtggtccggcacaaccccacaggaacagtccttttcatgggccaagtgatggaaccctgaccctggggaaagacgccttcatctgggacaaaactggagatgcatcgggaaagaagaaactccgaagaaaagaattttagtgttaatgactctttctgaaggaagagaagacatttgccttttgttaaaagatggtaaaccagatctgtctccaagaccttggcctctccttggaggacctttaggtcaaactccctagtctccacctgagaccctgggagagaagtttgaagcacaactcccttaaggtctccaaaccagacggtgacgcctgcgggaccatctggggcacctgcttccacccgtctctctgcccactcgggtctgcagacctggttcccactgaggccctttgcaggatggaactacggggcttacaggagcttttgtgtgcctggtagaaactatttctgttccagtcacattgccatcactcttgtactgcctgccaccgcggaggaggctggtgacaggccaaaggccagtggaagaaacaccctttcatctcagagtccactgtggcactggccacccctccccagtacaggggtgctgcaggtggcagagtgaatgtcccccatcatgtggcccaactctcctggcctggccatctccctccccagaaacagtgtgcatgggttattttggagtgtaggtgacttgtttactcattgaagcagatttctgcttccttttatttttataggaatagaggaagaaatgtcagatgcgtgcccagctcttcaccccccaatctcttggtggggaggggtgtacctaaatatttatcatatccttgcccttgagtgcttgttagagagaaagagaactactaaggaaaataatattatttaaactcgctcctagtgtttctttgtggtctgtgtcaccgtatctcaggaagtccagccacttgactggcacacacccctccggacatccagcgtgacggagcccacactgccaccttgtggccgcctgagaccctcgcgccccccgcgccccccgcgcccctctttttccccttgatggaaattgaccatacaatttcatcctccttcaggggatcaaaaggacggagtggggggacagagactcagatgaggacagagtggtttccaatgtgttcaatagatttaggagcagaaatgcaaggggctgcatgacctaccaggacagaactttccccaattacagggtgactcacagccgcattggtgactcacttcaatgtgtcatttccggctgctgtgtgtgagcagtggacacgtgaggggggggtgggtgagagagacaggcagctcggattcaactaccttagataatatttctgaaaacctaccagccagagggtagggcacaaagatggatgtaatgcactttgggaggccaaggcgggaggattgcttgagcccaggagttcaagaccagcctgggcaacataccaagacccccgtctctttaaaaatatatatattttaaatatacttaaatatatatttctaatatctttaaatatatatatatattttaaagaccaatttatgggagaattgcacacagatgtgaaatgaatgtaatctaatagaagc

SEQ ID NO: 552 - protein, 402 aa, Homo sapien [sequence omitted]

SEQ ID NO: 553 - DNA, 1103 bp, Homo sapien
cttcggtcctgctgtagtgccttctgcgccaggcccggttcaatcagcggccacaactgtctagggctcagacaccaccagccaatgagggagggcacgtggagccgcgtctgggctcgcggctcctgaccaatggggaagtggcatgtgggagggcgccggggttccccccgccaatggggagctacggcgcgcggccgggacttggaggcggtgcggcgcggcgggtgcggttcagtcggtcggcggcggcagcggaggaggaggaggaggaggaggatgaggaggatgaggaggatgtgggccacgcaggggctggcggtgcgcgtggctctgagcgtgctgccgggcagccgggcgctgcggccgggcgactgcgaagtttgtatttcttatctgggaagattttaccaggacctcaaagacagagatgtcacattctcaccagccactattgaaaacgaacttataaagttctgccgggaagcaagaggcaaagagaatcggttgtgctactatatcggggccacagatgatgcagccaccaaaatcatcaatgaggtatcaaagcctctggcccaccacatccctgtggagaagatctgtgagaagcttaagaagaaggacagccagatatgtgagcttaagtatgacaagcagatcgacctgagcacagtggacctgaagaagctccgagttaaagagctgaagaagattctggatgactggggggagacatgcaaaggctgtgcagaaaagtctgactacatccggaagataaatgaactgatgcctaaatatgcccccaaggcagccagtgcaccgaccgatttgtagtctgctcaatctctgttgcacctgagggggaaaaaacagttcaactgcttactcccaaaacagcctttttgtaatttattttttaagtgggctcctgacaatactgtatcagatgtgaagcctggagctttcctgatgatgctggccctacagtacccccatgaggggattcccttccttctgttgctggtgtactctaggacttcaaagtgtgtctgggatttttttattaaagaaaaaaaatttctagctgtcaaaaaaaaaaa

SEQ ID NO: 554 - protein, 234 aa, Homo sapien
MGKWHVGGRRGSPRQWGATARGRDLEAVRRGGCGSVGRRRQRRRRRRRRMRRMRRMWATQGLAVRVALSVLPGSRALRPGDCEVCISYLGRFYQDLKDRDVTFSPATIENELIKFCREARGKENRLCYYIGATDDAATKIINEVSKPLAHHIPVEKICEKLKKKDSQICELKYDKQIDLSTVDLKKLRVKELKKILDDWGETCKGCAEKSDYIRKINELMPKYAPKAASAPTDL

SEQ ID NO: 555 - DNA, 996 bp, Homo sapien
agcagaggactttttagctgctcactggccccgcttgtctgaccgactcatccgcccgcgacccctaatcccctctgcctgccccaagatgctgaagccagccctggagccccgagggggcttctccttcgagaactgccaaagaaatgcatcattggaacgcgtcctcccggggctcaaggtccctcacgcacgcaagaccgggaccaccatcgcgggcctggtgttccaagacggggtcattctgggcgccgatacgcgagccactaacgattcggtcgtggcggacaagagctgcgagaagatccacttcatcgcccccaaaatctactgctgtggggctggagtagccgcggacgccgagatgaccacacggatggtggcgtccaagatggagctacacgcgttatctacgggccgcgagccccgcgtggccacggtcactcgcatcctgcgccagacgctcttcaggtaccagggccacgtgggtgcatcgctgatcgtgggcggcgtagacctgactggaccgcagctctacggcgtgcatccccatggctcctacagccgtctgcccttcacagccctgggctctggtcaggacgcggccctggcggtgctagaagaccggttccagccgaacatgacgctggaggctgctcaggggctgctggtggaagccgtcaccgccgggatcttgggtgacctgggctccgggggcaatgtggacgcatgtgtgatcacaaagactggcgccaagctgctgcggacactgagctcacccacagagcccgtgaagaggtctggccgctaccactttgtgcctggaaccacagctgtcctgacccagacagtgaagccactaaccctggagctagtggaggaaactgtgcaggctatggaggtggagtaagctgaggcttagagcttggaacaagggggaataaacccagaaaatacagttaaaaaaaaaaaaaacaaaaaaaaaaaaaaaaaaaa

SEQ ID NO: 556 - protein, 273 aa, Homo sapien
MLKPALEPRGGFSFENCQRNASLERVLPGLKVPHARKTGTTIAGLVFQDGVILGADTRATNDSVVADKSCEKIHFIAPKIYCCGAGVAADAEMTTRMVASKMELHALSTGREPRVATVTRILRQTLFRYQGHVGASLIVGGVDLTGPQLYGVHPHGSYSRLPFTALGSGQDAALAVLEDRFQPNMTLEAAQGLLVEAVTAGILGDLGSGGNVDACVITKTGAKLLRTLSSPTEPVKRSGRYHFVPGTTAVLTQTVKPLTLELVEETVQAMEVE

SEQ ID NO: 557 - DNA, 1331 bp, Homo sapien
cggagccgcccgctgaggtcagaaggaggcgtctgcgctgatcgggtccgccgcgcgccagagccagagtcgcagccgaggggagccggggccggagcccgagcccgagccgagccggagcccgagcgagcggcggagaccgtgcccccgcctcggccccgcgccgccgcggccaggcccggcatggaggaggagtgccgggtgctctccatacagagccacgtcatccgcggctacgtgggcaaccgggcggccacgttcccgctgcaggttttgggatttgagattgacgcggtgaactctgtccagttttcaaaccacacaggctatgcccactggaagggccaagtgctgaattcagatgagctccaggagttgtacgaaggcctgaggctgaacaacatgaataaatatgactacgtgctcacaggttatacgagggacaagtcgttcctggccatggtggtggacattgtgcaggagctgaagcagcagaaccccaggctggtgtacgtgtgtgatccagtcttgggtgacaagtgggacggcgaaggctcgatgtacgtcccggaggacctccttcccgtctacaaagaaaaagtggtgccgcttgcagacattatcacgcccaaccagtttgaggccgagttactgagtggccggaagatccacagccaggaggaagccttgcgggtgatggacatgctgcactctatgggccccgacaccgtggtcatcaccagctccgacctgccctccccgcagggcagcaactacctgattgtgctggggagtcagaggaggaggaatcccgctggctccgtggtgatggaacgcatccggatggacattcgcaaagtggacgccgtctttgtgggcactggggacctgtttgctgccatgctcctggcgtggacacacaagcaccccaataacctcaaggtggcctgtgagaagaccgtgtctaccttgcaccacgttctgcagaggaccatccagtgtgcaaaagcccaggccggggaaggagtgaggcccagccccatgcagctggagctgcggatggtgcagagcaaaagggacatcgaggacccagagatcgtcgtccaggccacggtgctgtgagggccccgccgcttgcccgtgacacgcagcgcgttggtgtctccgtgtttgtccctgtgaaaacatgtaacgtctgccttagagccatgaccgaaacttgatatttttttctttcatgagtgtccggcatctgctggtcttcattgtgaaacgtgccagtcgtgctttgtgaaaaataacaaagtggtcacaaaaaaaaaaaaaaaaaa

SEQ ID NO: 558 - protein, 312 aa, Homo sapien
MEEECRVLSIQSHVIRGYVGNRAATFPLQVLGFEIDAVNSVQFSNHTGYAHWKGQVLNSDELQELYEGLRLNNMNKYDYVLTGYTRDKSFLAMVVDIVQELKQQNPRLVYVCDPVLGDKWDGEGSMYVPEDLLPVYKEKVVPLADIITPNQFEAELLSGRKIHSQEEALRVMDMLHSMGPDTVVITSSDLPSPQGSNYLIVLGSQRRRNPAGSVVMERIRMDIRKVDAVFVGTGDLFAAMLLAWTHKHPNNLKVACEKTVSTLHHVLQRTIQCAKAQAGEGVRPSPMQLELRMVQSKRDIEDPEIVVQATVL

SEQ ID NO: 559 - DNA, 2056 bp, Homo sapien
gcagccaggcgcgcactgcacagctctcttctctcgccgccgcccgagcgcacccttcagcccgcgcgccggccgtgagtcctcggtgctcgcccgccggccagacaaacagcccgcccgaccccgtcccgaccctggccgccccgagcggagcctggagcaaaatgatgcttcaacacccaggccaggtctctgcctcggaagtgagtgcttctgccatcgtcccctgcctgtcccctcctgggtcactggtgtttgaggattttgctaacctgacgccctttgtcaaggaagagctgaggtttgccatccagaacaagcacctctgccaccggatgtcctctgcgctggaatcagtcactgtcagcgacagacccctcggggtgtccatcacaaaagccgaggtagcccctgaagaagatgaaaggaaaaagaggcgacgagaaagaaataagattgcagctgcaaagtgccgaaacaagaagaaggagaagacggagtgcctgcagcttcagtattagcagagccacaggccgcctctgtggcatcaccagggtttctctgaagaagagggtctgcattttcctaaacccagtgctgctctcccatctcccatcttcctctcgcagcttgatgagccccggtgtgtcccaggagtcggagaagctggaaagtgtgaatgctgaactgaaggctcagattgaggagctcaagaacgagaagcagcatttgatatacatgctcaaccttcatcggcccacgtgtattgtccgggctcagaatgggaggactccagaagatgagagaaacctctttatccaacagataaaagaaggaacattgcagagctaagcagtcgtggtatgggggcgactggggagtcctcattgaatcctcattttatacccaaaaccctgaagccattggagagctgtcttcctgtgtacctctagaatcccagcagcagagaaccatcaaggcgggagggcctgcagtgattcagcaggcccttcccattctgccccagagtgggtcttggaccagggcaagtgcatctttgcctcaactccaggatttaggccttaacacactggccattcttatgttccagatggcccccagctggtgtcctgcccgcctttcatctggattctacaaaaaaccaggatgcccaccgttagattcaggcagcagtgtctgtacctcgggtgggagggatggggccatctccttcaccgtggctaccattgtcactcgtaggggatgtggagtgagaacagcatttagtgaagttgtgcaacggccagggttgtgctttctagcaaatatgctgttatgtccagaaattgtgtgtgcaagaaaactaggcaatgtactcttccgatgtttgtgtcacacaacactgatgtgacttttatatgctttttctcagatctggtttctaagagttttggggggcggggctgtcaccacgtgcagtatctcaagatattcaggtggccagaagagcttgtcagcaagaggaggaacagaattctcccagcgttaacacaaaatccatgggcagcatgatggcaggtcctctgttgcaaactcagttccaaagtcacaggaagaaagcagaaagttcaacttccaaagggttaggactctccactcaatgtcttaggtcaggagttgtgtctaggctggaagagccaaagaaatattccattttcctttccttgtggttgaaaccacagtcagtggagagatgtttggaacacagtcagtggagctggtggtaccaggtttagcattattggatgtcaaaagcattttttttgtcatgtagctgttttaagaaatctggcccagggtgtttgcagctgtgagaagtcactcacactggccacaaggacgctggctactgtctattaaaattctgatgtttctgtgaaattctcagagtgtttaattgtactcaatggtatcattacaattttctgtaagagaaaatattacttatttatcctagtattcctaacctgtcagaataataaatattgtggtaaaa

SEQ ID NO: 560 - protein, 118 aa, Homo sapien
MMLQHPGQVSASEVSASAIVPCLSPPGSLVFEDFANLTPFVKEELRFAIQNKHLCHRMSSALESVTVSDRPLGVSITKAEVAPEEDERKKRRRERNKIAAAKCRNKKKEKTECLQLQY

SEQ ID NO: 561 - DNA, 1100 bp, Homo sapien
ggcctcccacttggttgctcgtacgcggctagtgggtcctcagtggatgtaggctgggcgccgcgatgttcgacgggacaccggcggagagcgacctcggggttaaggggtggggctggacgtcaggagccaagatggcggcggtggtcgcactctccttgaggcgccggttgccggccacaacccttggcggagcctgcctgcaggcctcccgaggagcccagacagctgcagccacagctccccgtatcaagaaatttgccatctatcgatgggacccagacaaggctggagacaaacctcatatgcagacttataaggttgaccttaataaatgtggccccatggtattggatgctttaatcaagattaagaatgaagttgactctactttgaccttccgaagatcatgcagagaaggcatctgtggctcttgtgcaatgaacatcaatggaggcaacactctagcttgcacccgaaggattgacaccaacctcaataaggtctcaaaaatctaccctcttccacacatgtatgtgataaaggatcttgttcccgatttgagcaacttctatgcacagtacaaatccattgagccttatttgaagaagaaggatgaatctcaggaaggcaagcagcagtatctgcagtccatagaagagcgtgagaaactggacgggctctacgagtgcattctctgtgcctgctgtagcaccagctgccccagctactggtggaacggagacaaatatctggggcctgcagttcttatgcaggcctatcgctggatgattgactccagagatgacttcacagaggagcgcctggccaagctgcaggacccattctctctataccgctgccacaccatcatgaactgcacaaggacctgtcctaagggtctgaatccagggaaagctattgcagagatcaagaaaatgatggcaacctataaggagaagaaagcttcagtttaactgtttccatgctaaacatgatttataaccagctcagagctgaacataatttatatctaatttgagttcctttaaagatcttggttttccatgaatacagcatgtataataaaaattttaaga

SEQ ID NO: 562 - protein, 280 aa, Homo sapien
MAAVVALSLRRRLPATTLGGACLQASRGAQTAAATAPRIKKFAIYRWDPDKAGDKPHMQTYKVDLNKCGPMVLDALIKIKNEVDSTLTFRRSCREGICGSCAMNINGGNTLACTRRIDTNLNKVSKIYPLPHMYVIKDLVPDLSNFYAQYKSIEPYLKKKDESQEGKQQYLQSIEEREKLDGLYECILCACCSTSCPSYWWNGDKYLGPAVLMQAYRWMIDSRDDFTEERLAKLQDPFSLYRCHTIMNCTRTCPKGLNPGKAIAEIKKMMATYKEKKASV

SEQ ID NO: 563 - DNA, 2158 bp, Homo sapien
ccagagccgcagccgcagccgccgctacagtccgggccgggctccaccgcgcatcctgctccactctggcgaccgcccccggggtccccgccgcgggcgcggcgcccgccatgggcgaggaggactactatctggagctgtgcgagcggccggtgcagttcgagaaggcgaaccctgtcaactgcgtcttcttcgatgaggccaacaagcaggtttttgctgttcgatctggtggagctactggcgtggtagttaaaggcccagatgataggaatcccatctcatttagaatggatgacaaaggagaagtgaagtgcattaagttttccttagaaaataagatattggctgttcagaggacctcaaagactgtggatttttgtaattttatccctgataattcccagctggaatacacacaggagtgcaagactaagaatgccaacattctaggattctgctggactagttcaactgaaattgtcttcataacagatcaaggaatcgaattttaccaggtattaccagagaaacggagtctgaaactcttgaagagccacaatctcaatgtgaattggtacatgtactgccccgagcgcgccgtgatcttgctgtctaccacggtcctggagaatgtcctgcagccttttcactttagggctggcactatgtcgaagctgcccaagtttgagattgaattaccagctgcgcctaagtcaactaaacccagcctttccgaaagagacatcgcaatggctaccatatacgggcagctgtatgttctcttcttgaggcatcattctcggacctccaacagcacaggagcggaggtggtcctctatcatctaccacgagaaggtgcctgtaaaaagatgcacatattgaagttaaataggacgggaaagtttgccctgaacgtggtggacaacctggtagtcgtgcatcatcaggatacagagacatcggtaatattcgatatcaagttacggggagagtttgacggctccgttaccttccaccaccccgtgcttcctgctcgatcgatccagccctatcagatccccatcacaggtcctgctgccgtgaccagccagtctcctgttccatgtaaactctattcttcatcttggattgtctttcaacctgacatcattatcagcgcaagccaaggttacctctggaacctccaagtgaaacttgagcccatagtaaatctcttaccagacaaaggaagactcatggactttctcctccagagaaaggaatgcaagatggtcatcctgtctgtctgttcacagatgttaagtgagtcagacagagcatcgctgcccgtgatagccactgtttttgataaactcaaccatgagtataaaaagtacctggatgccgagcagagttatgcgatggcggtggaagcagggcagagccgaagcagcccgctcctcaagaggccggtgcggacccaggcggtgctggaccagtcagatgtgtacacccatgtcctgtcagccttcgtggaaaagaaggagatgcctcataaatttgtgatagccgtgctgatggaatacattcgttctcttaaccagtttcagattgcagtacagcattacctacatgaacttgttatcaaaacccttgtccagcacaacctcttttatatgctgcatcagttcctgcagtaccacgtcctcagcgactccaaacctttggcttgtctgctgttatccctagagagtttctatcctcctgctcatcagctatctctggacatgctgaagcgactttcaacagcaaatgatgaaatagtagaagttctcctttccaaacaccaagtgttagctgccttaaggtttatccggggcattggtggccatgacaacatttctgcacgaaaatttttagatgctgcaaagcagactgaagacaacatgcttttctatacaatattccgcttttttgaacagcgaaaccagcgtttgcgagggagccccaatttcacaccaggggaacactgtgaagaacatgttgcttttttcaaacagatttttggagaccaagctctaatgaggcctacaacattctgaaatcacttgctgtttttttatataaaaatgtgtacaaagttaatttattgcattaataaagctctttaaactat

SEQ ID NO: 564 - protein, 657 aa, Homo sapien
MGEEDYYLELCERPVQFEKANPVNCVFFDEANKQVFAVRSGGATGVVVKGPDDRNPISFRMDDKGEVKCIKFSLENKILAVQRTSKTVDFCNFIPDNSQLEYTQECKTKNANILGFCWTSSTEIVFITDQGIEFYQVLPEKRSLKLLKSHNLNVNWYMYCPERAVILLSTTVLENVLQPFHFRAGTMSKLPKFEIELPAAPKSTKPSLSERDIAMATIYGQLYVLFLRHHSRTSNSTGAEVVLYHLPREGACKKMHILKLNRTGKFALNVVDNLVVVHHQDTETSVIFDIKLRGEFDGSVTFHHPVLPARSIQPYQIPITGPAAVTSQSPVPCKLYSSSWIVFQPDIIISASQGYLWNLQVKLEPIVNLLPDKGRLMDFLLQRKECKMVILSVCSQMLSESDRASLPVIATVFDKLNHEYKKYLDAEQSYAMAVEAGQSRSSPLLKRPVRTQAVLDQSDVYTHVLSAFVEKKEMPHKFVIAVLMEYIRSLNQFQIAVQHYLHELVIKTLVQHNLFYMLHQFLQYHVLSDSKPLACLLLSLESFYPPAHQLSLDMLKRLSTANDEIVEVLLSKHQVLAALRFIRGIGGHDNISARKFLDAAKQTEDNMLFYTIFRFFEQRNQRLRGSPNFTPGEHCEEHVAFFKQIFGDQALMRPTTF

SEQ ID NO: 565 - DNA, 1769 bp, Homo sapien
cctcactgactataaaagaatagagaaggaagggcttcagtgaccggctgcctggctgacttacagcagtcagactctgacaggatcatggctatgatggaggtccaggggggacccagcctgggacagacctgcgtgctgatcgtgatcttcacagtgctcctgcagtctctctgtgtggctgtaacttacgtgtactttaccaacgagctgaagcagatgcaggacaagtactccaaaagtggcattgcttgtttcttaaaagaagatgacagttattgggaccccaatgacgaagagagtatgaacagcccctgctggcaagtcaagtggcaactccgtcagctcgttagaaagatgattttgagaacctctgaggaaaccatttctacagttcaagaaaagcaacaaaatatttctcccctagtgagagaaagaggtcctcagagagtagcagctcacataactgggaccagaggaagaagcaacacattgtcttctccaaactccaagaatgaaaaggctctgggccgcaaaataaactcctgggaatcatcaaggagtgggcattcattcctgagcaacttgcacttgaggaatggtgaactggtcatccatgaaaaagggttttactacatctattcccaaacatactttcgatttcaggaggaaataaaagaaaacacaaagaacgacaaacaaatggtccaatatatttacaaatacacaagttatcctgaccctatattgttgatgaaaagtgctagaaatagttgttggtctaaagatgcagaatatggactctattccatctatcaagggggaatatttgagcttaaggaaaatgacagaatttttgtttctgtaacaaatgagcacttgatagacatggaccatgaagccagttttttcggggcctttttagttggctaactgacctggaaagaaaaagcaataacctcaaagtgactattcagttttcaggatgatacactatgaagatgtttcaaaaaatctgaccaaaacaaacaaacagaaaacagaaaacaaaaaaacctctatgcaatctgagtagagcagccacaaccaaaaaattctacaacacacactgttctgaaagtgactcacttatcccaagaaaatgaaattgctgaaagatctttcaggactctacctcatatcagtttgctagcagaaatctagaagactgtcagcttccaaacattaatgcaatggttaacatcttctgtctttataatctactccttgtaaagactgtagaagaaagcgcaacaatccatctctcaagtagtgtatcacagtagtagcctccaggtttccttaagggacaacatccttaagtcaaaagagagaagaggcaccactaaaagatcgcagtttgcctggtgcagtggctcacacctgtaatcccaacattttgggaacccaaggtgggtagatcacgagatcaagagatcaagaccatagtgaccaacatagtgaaaccccatctctactgaaagtgcaaaaattagctgggtgtgttggcacatgcctgtagtcccagctacttgagaggctgaggcaggagaatcgtttgaacccgggaggcagaggttgcagtgtggtgagatcatgccactacactccagcctggcgacagagcgagacttggtttcaaaaaaaaaaaaaaaaaaaaacttcagtaagtacgtgttatttttttcaataaaattctattacagtatgtcaaaaaaaaaaaaaaaaaa

SEQ ID NO: 566 - protein, 281 aa, Homo sapien [sequence omitted]

SEQ ID NO: 567 - DNA, 2641 bp, Homo sapien
ggggagagcgggtgtttgaaggctccgcggaccggcactaggagccgggggcgggtccgtgaccctccggctgctcggagtgaacaggcggccaggaaagaagcgggcctgaacaccatgatccctttggagaagccaggcagcggcggctcctccccaggcgccacctcaggctcgggccgggcaggccggggtctgagcgggccgtgccggccgccgccgccgccccaggcccgcgggctgctgacagagatacgcgccgtggtgcgcaccgagcccttccaggacggctacagcctgtgcccgggccgggagctgggcagggggaaatttgcagtggtgagaaaatgtataaagaaagattctgggaaagaatttgctgcaaagttcatgagaaaaagaagaaaaggccaagattgtcggatggaaataattcatgagattgctgtacttgaactagcacaagacaatccttgggtcattaatttacatgaagtttatgagactgcatcagaaatgatcttagttctggaatatgctgctgggggtgaaatctttgaccagtgtgttgcagacagagaagaagcctttaaagaaaaagatgttcaaagacttatgcgacagattttagaaggtgttcactttttacacactcgtgatgtagttcatcttgatttgaagcctcagaatattctgttgacaagtgaatctccattgggtgacattaagattgttgattttggcctttcaagaatattgaagaacagtgaagagctccgagaaattatgggtacccctgaatatgtggctcctgaaattcttagttatgatcctataagcatggcaacagatatgtggagcattggagtgttaacatatgtcatgcttacaggaatatcacctttcttaggcaatgataaacaagaaacattcttaaacatctcacagatgaatttaagttattctgaggaagaatttgatgttttgtctgagtcggctgttgatttcatcaggacacttttagttaagaaacctgaagatcgagccactgctgaagaatgtctaaagcacccctggttgacacagagcagtattcaagagccttctttcaggatggaaaaggcactagaagaagcaaatgccctccaagaaggtcattctgtgcctgaaattaattcggataccgacaaatcagaaaccgaggaatccattgtaaccgaagagttaattgtagttacttcatatactctaggacaatgcagacagtctgaaaaagagaaaatggagcaaaaggccatttccaaacgatttaaatttgaggaacctttgctacaagaaattccaggagaatttatctactgagcaatatttccctttagaacttcaagatttctacactgaaaatgttaatattatttatggacctctggccaaatggtacatgtactggaagtggataaccagtatcacttacacaaacaaaaataactttgtcaaatttgtggagttaggtggaagccagattttaaaagttgccaaccaggatatttaacaggtacagttacccgtttcaatgttatttttaagaagggagatgttggcacctttgaattctacatcctgtttctccagaatgagaatttgtgtacaaagatatttgtattcactttctttaaaaaatccaagtaaaagtgccaaaactacatttctgtaaatctcttgcattattcatatgtgtatctatatctgcataatgtttgttaatgtctactaaaattgctactttttcactttggatttgtttttggcaaaattttagtctaaacagacatctaaattttcgagacttagaataacattcactaaagtttgataatgtcttttttaaatattttcttactgctttatagtgacttgatttggtttctgttgtgtttttgcctaaatactagtaacatatcagtgaaaaaccctaattttttttctcttcaatgtcactagtaagagaggtggtaatttttcacctctgaaattattctgggtttaggtgtcagcttttgagctgcttccctcatcacaccacactcacatgcatctgttctctctcacactctatacccctgccacttcctggcacctccccccatgcttgtcatttaattttggccacttgtaggtatcagtgtgatctgatcaacactctggttaccttggtcagtgaaaagatgctactatattgcttttgtcccaaagtgagtaaaatcccctagagcagagagagagagagagagagagtgtcttcatgccaaccacagcctgtttctgctgagtttcttatcagccctcaagctatgctaggaaaagttataaaatgccaaaatatttataaacatttactttgtccataaaaaatttacattggatactctgtaagtaggaggtactttgtcccaaaaagatgtataagaatgtactaatagttttatttgattaggattgaacagttcagttgtatctatgccccacagtgaccagtaaagtccaattaaaatatggaaatgtaaaagtgtatgccgaataccttaaagtaactaattatccttacacacaaaaggctcagtgcattaaatatttgcctatc

SEQ ID NO: 568 - protein, 414 aa, Homo sapien
MIPLEKPGSGGSSPGATSGSGRAGRGLSGPCRPPPPPQARGLLTEIRAVVRTEPFQDGYSLCPGRELGRGKFAVVRKCIKKDSGKEFAAKFMRKRRKGQDCRMEIIHEIAVLELAQDNPWVINLHEVYETASEMILVLEYAAGGEIFDQCVADREEAFKEKDVQRLMRQILEGVHFLHTRDVVHLDLKPQNILLTSESPLGDIKIVDFGLSRILKNSEELREIMGTPEYVAPEILSYDPISMATDMWSIGVLTYVMLTGISPFLGNDKQETFLNISQMNLSYSEEEFDVLSESAVDFIRTLLVKKPEDRATAEECLKHPWLTQSSIQEPSFRMEKALEEANALQEGHSVPEINSDTDKSETEESIVTEELIVVTSYTLGQCRQSEKEKMEQKAISKRFKFEEPLLQEIPGEFIY

SEQ ID NO: 569 - DNA, 4074 bp, Homo sapien
cacgccccgcgctgctgggtcccgccagacacgccgccgccgcaggaaagtctacagtttggtaccccaggactcgctggtcaggaaagccctgcaggacatgagtgttaggcccgacgcctggcccttggcagcttgggaggtggctggggctgcttttgcctttgccagagacagctccaactgaggacctctccaacgggcccatccacagtccttccttcccctagtgtctgggaagacaggcgcgatgatggactccccgttcctggagctgtggcagtccaaggcagtgtccatcagggagcagctgggactcggggaccggcccaacgactcctattgctacaactcggccaaaaacagcaccgtgctccagggggtcacctttggtggcatccccactgtcctgctcatagacgtcagctgcttcctgttcttaatcttggtgttttctattataagaagaagattctgggactatggccgcattgccctggtgtcagaagcagacagcgagtccagatttcagagattgtcatcgacttcctcctcaggtcaacaagactttgaaaatgagctgggatgctgtccctggctgactgccatcttccgtctgcatgatgaccagatcctggaatggtgtggggaggacgccatccactacctgtccttccagaggcacatcatcttcctgttggtggtggtcagctttttgtccctgtgtgtcatcctgcctgtcaacctctcaggggatttgctggacaaagacccgtatagttttgggaggacaacaatagcaaacctacagactgacaatgacctcctttggctgcacaccatctttgctgtcatttacctcttcttcactgtgggtttcatgcggcaccacactcagtccattaagtacaaagaggagaacctggtgaggcggaccctgttcatcacaggactccccagagatgccaggaaggagactgtggagagccacttccgggacgcgtatcccacgtgtgaggtggttgatgtgcagctgtgctacaacgtggccaaactgatctacctgtgcaaggagaaaaagaagactgagaagagcctgacctattacacaaacctgcaggtgaagacaggccagcggaccctcatcaaccccaagccctgtggccagttttgctgctgtgaagtgctgggctgtgagtgggaagacgccatctcttactacacacggatgaaggacaggctgctggagaggatcacagaggaagaacgccacgtccaggaccagcccctgggaatggccttcgtcaccttccaggagaagtccatggccacctacatcctgaaagatttcaatgcctgcaagtgtcagagccttcagtgcaaaggtgagccccagccgtcctcccatagcagggagctctatacctccaagtggacagtcacctttgctgctgaccctgaggacatctgctggaagaacctctctatccagggcctccgctggtggctacagtggctgggcatcaacttcaccctcttcctggggctatttttcctgaccacaccctccatcatcctgtccaccatggacaagtttaatgtcaccaaacccatccatgcgctgaataacccgatcatcagccagttcttccccaccctcctgctctggtccttctcggccctgctcccctccattgtctactactctacactgctggagtctcactggaccaagtcgggggaaaaccagatcatgatgaccaaagtctacatattcttgatcttcatggtgctgatcctgccctccctgggtctcaccagtctagattttttcttccggtggctctttgacaaaacttcctcggaggcctccatcaggttggagtgcgtcttcctgcctgaccagggtgccttctttgtgaactatgtcatcgcctcggccttcatcggcaatggcatggagctgctgcggctgccaggtctcatcctctataccttccgcatgatcatggccaagacggctgctgaccgcaggaatgtcaagcagaaccaggccttccagtacgagtttggagccatgtatgcatggatgctgtgtgtcttcactgtcatcgtggcctacagcatcacttgtcccatcatcgcgccatttggcctcatctacatcctgctcaagcacatggtggaccggcacaacctctacttcgtctacctcccagccaagctggagaaggggatccactttgccgctgtgaaccaggccttggcagcccccatcctgtgcctcttctggctctacttcttttccttcctgcgcctgggtatgaaggcccccgccactctgttcaccttcctggtgctgctgctcaccatcctggtctgcctggctcacacctgctttggatgcttcaagcacctcagccctctgaactacaaaacagaagagcctgcaagtgacaaaggaagtgaggcagaggcccacatgcccccaccgttcacaccctacgtgcctcggattctgaacggcttggcctcggagaggacagcactgtctccgcagcagcagcagcagcagacctatggtgccatccacaacatcagcgggactatccctggacagtgcttggcgcagagcgccacgggcagtgtggctgctgccccccaggaggcctgaggctgggtctcactgctctgaaaagacacaaccagaatggcctggggctcaggcccttggctgagtgggaatgcgttgggactgcccagctgagctatcaggtgcccatcttttctggtcccagcagtggtgaggagagcacaggcaggcctcgcccctcccttgctcacccagtttcccctccggcacaagcttccagctctgcagctggggtgacatccccagtggtttgtcgccaagaccatgtggtggacttttcgccccccaaactgatgagtccgggagaatatatggagagagagatgtaacaaggggaaggcctcctcccttctgagcacacacacaaccgataaccaaagagatgctgcagtccaggtctgaggtcccgctggcatccagctccctgctccatggccagtccctccccagcccagcagtccctccaggctacatccaggagtaagctatggggaacaggttgggaggtggccagtgctcctgccagctgtgcacacatctctgtatcccgctagagttctgtgtttttgtatcatgttgtcagggacgctagctgggtcagggttaccccatagcaggcagggacaaggaccactcataatatgcccattggaccacagttaagatccagcctctctcacctcttcagggctgagtgcatgagtctgcacctccaggcaggctctgtgcagtactcaccccctccgtctgctccctccaaggtgtgggggtgggcagtgctcagggcctcctcggagccaaaggacagcatggtcggcacagaggaaggggtacctgggctgggtgcagggccatcccactgcccttgagctgtggctctggcaggaaggaggggcagcccatccctcttctccctcctggggattctggggaatgggatgcaacttaagacttctgcctgagaagcctcctccctgctgcctccagggggcaccaaggcacaagcctgtgcagtaggggcgggatgggggtgtggaagagcaggtccaggctcctagcacaactggcctggggccttggcacctctgtaggccctgcctgtgcctgtccgctggcctggggggcctgggcttatctgggccttctcactcagggactctcttgacgctgacttgcccccgcagcggtggccagtgctgcctctgctccaagctgcccctgcgctgggaggggtgggggcggtgccattggtctggtgcagcatagccctggccagtggcctcatccccagcaggcctcccgtgcctctgccagcaaggaggggccggccagctctgcttgcacagggggccccatgtggggtcagcgcacgctcatgtcactgagttccagccgcttttagagtaaagtcgtttatcatc

SEQ ID NO: 570 - protein, 807 aa, Homo sapien
MMDSPFLELWQSKAVSIREQLGLGDRPNDSYCYNSAKNSTVLQGVTFGGIPTVLLIDVSCFLFLILVFSIIRRRFWDYGRIALVSEADSESRFQRLSSTSSSGQQDFENELGCCPWLTAIFRLHDDQILEWCGEDAIHYLSFQRHIIFLLVVVSFLSLCVILPVNLSGDLLDKDPYSFGRTTIANLQTDNDLLWLHTIFAVIYLFFTVGFMRHHTQSIKYKEENLVRRTLFITGLPRDARKETVESHFRDAYPTCEVVDVQLCYNVAKLIYLCKEKKKTEKSLTYYTNLQVKTGQRTLINPKPCGQFCCCEVLGCEWEDAISYYTRMKDRLLERITEEERHVQDQPLGMAFVTFQEKSMATYILKDFNACKCQSLQCKGEPQPSSHSRELYTSKWTVTFAADPEDICWKNLSIQGLRWWLQWLGINFTLFLGLFFLTTPSIILSTMDKFNVTKPIHALNNPIISQFFPTLLLWSFSALLPSIVYYSTLLESHWTKSGENQIMMTKVYIFLIFMVLILPSLGLTSLDFFFRWLFDKTSSEASIRLECVFLPDQGAFFVNYVIASAFIGNGMELLRLPGLILYTFRMIMAKTAADRRNVKQNQAFQYEFGAMYAWMLCVFTVIVAYSITCPIIAPFGLIYILLKHMVDRHNLYFVYLPAKLEKGIHFAAVNQALAAPILCLFWLYFFSFLRLGMKAPATLFTFLVLLLTILVCLAHTCFGCFKHLSPLNYKTEEPASDKGSEAEAHMPPPFTPYVPRILNGLASERTALSPQQQQQQTYGAIHNISGTIPGQCLAQSATGSVAAAPQEA

SEQ ID NO: 571 - DNA, 6972 bp, Homo sapien
cgcccccgcctctgagctcccttcccatggcggccctagtgttggaggacgggtcggtcctgcggggccagccctttggggccgccgtgtcgactgccggggaagtggtgtttcaaaccggcatggtcggctaccccgaggccctcactgatccctcctacaaggcacagatcttagtgctcacctatcctctgatcggcaactatggcatccccccagatgaaatggatgagttcggtctctgcaagtggtttgaatcctcgggcatccacgtagcagcactggtagtgggagagtgctgtcctactcccagccactggagtgccacccgcaccctgcatgagtggctgcagcagcatggcatccctggcttgcaaggagtagacactcgggagctgaccaagaagttgcgggaacaggggtctctgctggggaagctggtccagaatggaacagaaccttcatccctgccattcttggaccccaatgcccgccccctggtaccagaggtctccattaagactccacgggtattcaatacagggggtgcccctcggatccttgctttggactgtggcctcaagtataatcagatccgatgcctctgccagcgtggggctgaggtcactgtggtaccctgggaccatgcactagacagccaagagtatgagggtctcttcttaagtaatgggcctggtgaccctgcctcctatcccagtgtcgtatccacactgagccgtgttttatctgagcctaatccccgacctgtctttgggatctgcctgggacaccagctattggccttagccattggggccaagacttacaagatgagatatgggaaccgaggccataaccagccctgcttgttggtgggctctgggcgctgctttctgacatcccagaaccatgggtttgctgtggagacagactcactgccagcagactgggctcctctcttcaccaacgccaatgatggttccaatgaaggcattgtgcacaacagcttgcctttcttcagtgtccagtttcacccagagcaccaagctggcccttcagatatggaactgcttttcgatatctttctggaaactgtgaaagaggccacagctgggaaccctgggggccagacagttagagagcggctgactgagcgcctctgtccccctgggattcccactcccggctctggacttccaccaccacgaaaggttctgatcctgggctcagggggcctctccattggccaagctggagaatttgactactcgggctctcaggcaattaaggccctgaaggaggaaaacatccagacgttgctgatcaaccccaatattgccacagtgcagacctcccaggggctggccgacaaggtctattttcttcccataacacctcattatgtaacccaggtgatacgtaatgaacgccccgatggtgtgttactgacttttgggggccagactgctctgaactgtggtgtggagctgaccaaggccggggtgctggctcggtatggggtccgggtcctgggcacaccagtggagaccattgagctgaccgaggatcgacgggcctttgctgccagaatggcagagatcggagagcatgtggccccgagcgaggcagcaaattctcttgaacaggcccaggcagccgctgaacggctggggtaccctgtgctagtgcgtgcagcctttgccctgggtggcctgggctctggctttgcctctaacagggaggagctctctgctctcgtggccccagcttttgcccataccagccaagtgctagtagacaagtctctgaagggatggaaggagattgagtacgaggtggtgagagacgcctatggcaactgtgtcacggtgtgtaacatggagaacttggacccactgggcatccacactggtgagtccatagtggtggcccctagccagacactgaatgacagggagtatcagctcctgaggcagacagctatcaaggtgacccagcacctgggaattgttggggagtgcaatgtgcagtatgccttgaaccctgagtctgagcagtattacatcattgaagtgaatgccaggctctctcgcagctctgccctggccagtaaggccacaggttatccactggcttatgtggcagccaagctagcattgggcatccctttgcctgagctcaggaactctgtgacagggggtacagcagcctttgaacccagcgtggattattgtgtggtgaagattcctcgatgggaccttagcaagttcctgcgagtcagcacaaagattgggagctgcatgaagagcgttggtgaagtcatgggcattgggcgttcatttgaggaggccttccagaaggccctgcgcatggtggatgagaactgtgtgggctttgatcacacagtgaaaccagtcagcgatatggagttggagactccaacagataagcggatttttgtggtggcagctgctttgtgggctggttattcagtggaccgcctgtatgagctcacacgcatcgaccgctggttcctgcaccgaatgaagcgtatcatcgcacatgcccagctgctagaacaacaccgtggacagcctttgccgccagacctgctgcaacaggccaagtgtcttggcttctcagacaaacagattgcccttgcagttctgagcacagagctggctgttcgcaagctgcgtcaggaactggggatctgtccagcagtgaaacagattgacacagttgcagctgagtggccagcccagacaaattacctatacctaacgtattggggcaccacccatgacctcacctttcgaacacctcatgtcctagtccttggctctggcgtctaccgtattggctctagcgttgaatttgactggtgtgctgtaggctgcatccagcagctccgaaagatgggatataagaccatcatggtgaactataacccagagacagtcagcaccgactatgacatgtgtgatcgactctactttgatgagatctcttttgaggtggtgatggacatctatgagctcgagaaccctgaaggtgtgatcctatccatgggtggacagctgcccaacaacatggccatggcgttgcatcggcagcagtgccgggtgctgggcacctcccctgaagccattgactcggctgagaaccgtttcaagttttcccggctccttgacaccattggtatcagccagcctcagtggagggagctcagtgacctcgagtctgctcgccaattctgccagaccgtggggtacccctgtgtggtgcgcccctcctatgtgctgagcggtgctgctatgaatgtggcctacacggatggagacctggagcgcttcctgagcagcgcagcagccgtctccaaagagcatcccgtggtcatctccaagttcatccaggaggctaaggagattgacgtggatgccgtggcctctgatggtgtggtggcagccatcgccatctctgagcatgtggagaatgcaggtgtgcattcaggtgatgcgacgctggtgacccccccacaagatatcactgccaaaaccctggagcggatcaaagccattgtgcatgctgtgggccaggagctacaggtcacaggacccttcaatctgcagctcattgccaaggatgaccagctgaaagttattgaatgcaacgtacgtgtctctcgctccttccccttcgtttccaagacactgggtgtggacctagtagccttggccacgcgggtcatcatgggggaagaagtggaacctgtggggctaatgactggttctggagtcgtgggagtaaaggtgcctcagttctccttctcccgcttggcgggtgctgacgtggtgttgggtgtggaaatgaccagtactggggaggtggccggctttggggagagccgctgtgaggcatacctcaaggccatgctaagcactggctttaagatccccaagaagaatatcctgctgaccattggcagctataagaacaaaagcgagctgctcccaactgtgcggctactggagagcctgggctacagcctctatgccagtctcggcacagctgacttctacactgagcatggcgtcaaggtaacagctgtggactggcactttgaggaggctgtggatggtgagtgcccaccacagcggagcatcctggagcagctagctgagaaaaactttgagctggtgattaacctgtcaatgcgtggagctgggggccggcgtctctcttcctttgtcaccaagggctaccgcacccgacgcttggccgctgacttctccgtgcccctaatcatcgatatcaagtgcaccaaactctttgtggaggccctaggccagatcgggccagcccctcctttgaaggtgcatgttgactgtatgacctcccaaaagcttgtgcgactgccgggattgattgatgtccatgtgcacctgcgggaaccaggtgggacacataaggaggactttgcttcaggcacagccgctgccctggctgggggtatcaccatggtgtgtgccatgcctaatacccggccccccatcattgacgcccctgctctggccctggcccagaagctggcagaggctggcgcccggtgcgactttgcgctattccttggggcctcgtctgaaaatgcaggaaccttgggcaccgtggccgggtctgcagccgggctgaagctttacctcaatgagaccttctctgagctgcggctggacagcgtggtccagtggatggagcatttcgagacatggccctcccacctccccattgtggctcacgcagagcagcaaaccgtggctgctgtcctcatggtggctcagctcactcagcgctcagtgcacatatgtcacgtggcacggaaggaggagatcctgctaattaaagctgcaaaggcacggggcttgccagtgacctgcgaggtggctccccaccacctgttcctaagccatgatgacctggagcgcctggggcctgggaagggggaggtccggcctgagcttggctcccgccaggatgtggaagccctgtgggagaacatggctgtcatcgactgctttgcctcagaccatgctccccataccttggaggagaagtgtgggtccaggcccccacctgggttcccagggttagagaccatgctgccactactcctgacggctgtaagcgagggccggctcagcctggacgacctgctgcagcgattgcaccacaatcctcggcgcatctttcacctgcccccgcaggaggacacctatgtggaggtggatctggagcatgagtggacaattcccagccacatgcccttctccaaggcccactggacaccttttgaagggcagaaagtgaagggcaccgtccgccgtgtggtcctgcgaggggaggttgcctatatcgatgggcaggttctggtacccccgggctatggacaggatgtacggaagtggccacagggggctgttcctcagctcccaccctcagcccctgccactagtgagatgaccacgacacctgaaagaccccgccgtggcatcccagggcttcctgatggccgcttccatctgccgccccgaatccatcgagcctccgacccaggtttgccagctgaggagccaaaggagaagtcctctcggaaggtagccgagccagagctgatgggaacccctgatggcacctgctaccctccaccaccagtaccgagacaggcatctccccagaacctggggacccctggcttgctgcacccccagacctcacccctgctgcactcattagtgggccaacatatcctgtccgtccagcagttcaccaaggatcagatgtctcacctgttcaatgtggcacacacactgcgtatgatggtgcagaaggagcggagcctcgacatcctgaaggggaaggtcatggcctccatgttctatgaagtgagcacacggaccagcagctcctttgcagcagccatggcccggctgggaggtgctgtgctcagcttctcggaagccacatcgtccgtccagaagggcgaatccctggctgactccgtgcagaccatgagctgctatgccgacgtcgtcgtgctccggcacccccagcctggagcagtggagctggccgccaagcactgccggaggccagtgatcaatgctggggatggggtcggagagcaccccacccaggccctgctggacatcttcaccatccgtgaggagctgggaactgtcaatggcatgacgatcacgatggtgggtgacctgaagcacggacgcacagtacattccctggcctgcctgctcacccagtatcgtgtcagcctgcgctacgtggcacctcccagcctgcgcatgccacccactgtgcgggccttcgtggcctcccgcggcaccaagcaggaggaattcgagagcattgaggaggcgctgcctgacactgatgtgctctacatgactcgaatccagaaggaacgatttggctctacccaggagtacgaagcttgctttggtcagttcatcctcactccccacatcatgacccgggccaagaagaagatggtggtgatgcacccgatgccccgtgtcaacgagataagcgtggaagtggactcggatccccgcgcagcctacttccgccaggctgagaacggcatgtacatccgcatggctctgttagccaccgtgctgggccgtttctaggggcctggcttcctcagcctcttctctttaggcccagctgctgggcaaggaattccagtgcctcctacgggggcagcacacttagatattcctggacatccagattgctcacatgtgctgaccacacttcaggctctggactggagctctctggcatgggggtggggcctcagatgctggggcccagtctgccccatcttcattcctgcaccttaaacctgtacagtcatttttctactgacttaataaacagccgagctgtcccttg

SEQ ID NO: 572 - protein, 2000 aa, Homo sapien
MAALVLEDGSVLRGQPFGAAVSTAGEVVFQTGMVGYPEALTDPSYKAQILVLTYPLIGNYGIPPDEMDEFGLCKWFESSGIHVAALVVGECCPTPSHWSATRTLHEWLQQHGIPGLQGVDTRELTKKLREQGSLLGKLVQNGTEPSSLPFLDPNARPLVPEVSIKTPRVFNTGGAPRILALDCGLKYNQIRCLCQRGAEVTVVPWDHALDSQEYEGLFLSNGPGDPASYPSVVSTLSRVLSEPNPRPVFGICLGHQLLALAIGAKTYKMRYGNRGHNQPCLLVGSGRCFLTSQNHGFAVETDSLPADWAPLFTNANDGSNEGIVHNSLPFFSVQFHPEHQAGPSDMELLFDIFLETVKEATAGNPGGQTVRERLTERLCPPGIPTPGSGLPPPRKVLILGSGGLSIGQAGEFDYSGSQAIKALKEENIQTLLINPNIATVQTSQGLADKVYFLPITPHYVTQVIRNERPDGVLLTFGGQTALNCGVELTKAGVLARYGVRVLGTPVETIELTEDRRAFAARMAEIGEHVAPSEAANSLEQAQAAAERLGYPVLVRAAFALGGLGSGFASNREELSALVAPAFAHTSQVLVDKSLKGWKEIEYEVVRDAYGNCVTVCNMENLDPLGIHTGESIVVAPSQTLNDREYQLLRQTAIKVTQHLGIVGECNVQYALNPESEQYYIIEVNARLSRSSALASKATGYPLAYVAAKLALGIPLPELRNSVTGGTAAFEPSVDYCVVKIPRWDLSKFLRVSTKIGSCMKSVGEVMGIGRSFEEAFQKALRMVDENCVGFDHTVKPVSDMELETPTDKRIFVVAAALWAGYSVDRLYELTRIDRWFLHRMKRIIAHAQLLEQHRGQPLPPDLLQQAKCLGFSDKQIALAVLSTELAVRKLRQELGICPAVKQIDTVAAEWPAQTNYLYLTYWGTTHDLTFRTPHVLVLGSGVYRIGSSVEFDWCAVGCIQQLRKMGYKTIMVNYNPETVSTDYDMCDRLYFDEISFEVVMDIYELENPEGVILSMGGQLPNNMAMALHRQQCRVLGTSPEAIDSAENRFKFSRLLDTIGISQPQWRELSDLESARQFCQTVGYPCVVRPSYVLSGAAMNVAYTDGDLERFLSSAAAVSKEHPVVISKFIQEAKEIDVDAVASDGVVAAIAISEHVENAGVHSGDATLVTPPQDITAKTLERIKAIVHAVGQELQVTGPFNLQLIAKDDQLKVIECNVRVSRSFPFVSKTLGVDLVALATRVIMGEEVEPVGLMTGSGVVGVKVPQFSFSRLAGADVVLGVEMTSTGEVAGFGESRCEAYLKAMLSTGFKIPKKNILLTIGSYKNKSELLPTVRLLESLGYSLYASLGTADFYTEHGVKVTAVDWHFEEAVDGECPPQRSILEQLAEKNFELVINLSMRGAGGRRLSSFVTKGYRTRRLAADFSVPLIIDIKCTKLFVEALGQIGPAPPLKVHVDCMTSQKLVRLPGLIDVHVHLREPGGTHKEDFASGTAAALAGGITMVCAMPNTRPPIIDAPALALAQKLAEAGARCDFALFLGASSENAGTLGTVAGSAAGLKLYLNETFSELRLDSVVQWMEHFETWPSHLPIVAHAEQQTVAAVLMVAQLTQRSVHICHVARKEEILLIKAAKARGLPVTCEVAPHHLFLSHDDLERLGPGKGEVRPELGSRQDVEALWENMAVIDCFASDHAPHTLEEKCGSRPPPGFPGLETMLPLLLTAVSEGRLSLDDLLQRLHHNPRRIFHLPPQEDTYVEVDLEHEWTIPSHMPFSKAHWTPFEGQKVKGTVRRVVLRGEVAYIDGQVLVPPGYGQDVRKWPQGAVPQLPPSAPATSEMTTTPERPRRGIPGLPDGRFHLPPRIHRASDPGLPAEEPKEKSSRKVAEPELMGTPDGTCYPPPPVPRQASPQNLGTPGLLHPQTSPLLHSLVGQHILSVQQFTKDQMSHLFNVAHTLRMMVQKERSLDILKGKVMASMFYEVSTRTSSSFAAAMARLGGAVLSFSEATSS

SEQ ID NO: 573 - DNA, 3082 bp, Homo sapien
agggagtcgtgtcggcgccaccccggcccccgagcccgcagattgcccaccgaagctcgtgtgtgcacccccgatcccgccagccactcgcccctggcctcgcgggccgtgtctccggcatcatgtgtggtatatttgcttacttaaactaccatgttcctcgaacgagacgagaaatcctggagaccctaatcaaaggccttcagagactggagtacagaggatatgattctgctggtgtgggatttgatggaggcaatgataaagattgggaagccaatgcctgcaaaacccagcttattaagaagaaaggaaaagttaaggcactggatgaagaagttcacaagcaacaagatatggatttggatatagaatttgatgtacaccttggaatagctcatacccgttgggcaacacatggagaacccagtcctgtcaatagccacccccagcgctctgataaaaataatgaatttatcgttattcacaatggaatcatcaccaactacaaagacttgaaaaagtttttggaaagcaaaggctatgacttcgaatctgaaacagacacagagacaattgccaagctcgttaagtatatgtatgacaatcgggaaagtcaagataccagctttactaccttggtggagagagttatccaacaattggaaggtgcttttgcacttgtgtttaaaagtgttcattttcccgggcaagcagttggcacaaggcgaggtagccctctgttgattggtgtacggagtgaacataaactttctactgatcacattcctatactctacagaacaggcaaagacaagaaaggaagctgcaatctctctcgtgtggacagcacaacctgccttttcccggtggaagaaaaagcagtggagtattactttgcttctgatgcaagtgctgtcatagaacacaccaatcgcgtcatctttctggaagatgatgatgttgcagcagtagtggatggacgtctttctatccatcgaattaaacgaactgcaggagatcaccccggacgagctgtgcaaacactccagatggaactccagcagatcatgaagggcaacttcagttcatttatgcagaaggaaatatttgagcagccagagtctgtcgtgaacacaatgagaggaagagtcaactttgatgactatactgtgaatttgggtggtttgaaggatcacataaaggagatccagagatgccggcgtttgattcttattgcttgtggaacaagttaccatgctggtgtagcaacacgtcaagttcttgaggagctgactgagttgcctgtgatggtggaactagcaagtgacttcctggacagaaacacaccagtctttcgagatgatgtttgctttttccttagtcaatcaggtgagacagcagatactttgatgggtcttcgttactgtaaggagagaggagctttaactgtggggatcacaaacacagttggcagttccatatcacgggagacagattgtggagttcatattaatgctggtcctgagattggtgtggccagtacaaaggcttataccagccagtttgtatcccttgtgatgtttgcccttatgatgtgtgatgatcggatctccatgcaagaaagacgcaaagagatcatgcttggattgaaacggctgcctgatttgattaaggaagtactgagcatggatgacgaaattcagaaactagcaacagaactttatcatcagaagtcagttctgataatgggacgaggctatcattatgctacttgtcttgaaggggcactgaaaatcaaagaaattacttatatgcactctgaaggcatccttgctggtgaattgaaacatggccctctggctttggtggataaattgatgcctgtgatcatgatcatcatgagagatcacacttatgccaagtgtcagaatgctcttcagcaagtggttgctcggcaggggcggcctgtggtaatttgtgataaggaggatactgagaccattaagaacacaaaaagaacgatcaaggtgccccactcagtggactgcttgcagggcattctcagcgtgatccctttacagttgctggctttccaccttgctgtgctgagaggctatgatgttgatttcccacggaatcttgccaaatctgtgactgtagagtgaggaatatctatacaaaatgtacgaaactgtatgattaagcaacacaagacaccttttgtatttaaaaccttgatttaaaatatcaccccttgaagcctttttttagtaaatccttatttatatatcagttataattattccactcaatatgtgatttttgtgaagttacctcttacattttcccagtaatttgtggaggactttgaataatggaatctatattggaatctgtatcagaaagattctagctattattttctttaaagaatgctgggtgttgcatttctggaccctccacttcaatctgagaagacaatatgtttctaaaaattggtacttgtttcaccatacttcattcagaccagtgaaagagtagtgcatttaattggagtatctaaagccagtggcagtgtatgctcatacttggacagttagggaagggtttgccaagttttaagagaagatgtgatttattttgaaatttgtttctgttttgtttttaaatcaaactgtaaaacttaaaactgaaaaattttattggtaggatttatatctaagtttggttagccttagtttctcagacttgttgtctattatctgtaggtggaagaaatttaggaagcgaaatattacagtagtgcattggtgggtctcaatccttaacatatttgcacaattttatagcacaaactttaaattcaagctgctttggacaactgacaatatgattttaaatttgaagatgggatgtgtacatgttgggtatcctactactttgtgttttcatctcctaaaagtgttttttatttccttgtatctgtagtcttttattttttaaatgactgctgaatgacatattttatcttgttctttaaaatcacaacacagagctgctattaaattaatattgatat

SEQ ID NO: 574 - protein, 681 aa, Homo sapien
MCGIFAYLNYHVPRTRREILETLIKGLQRLEYRGYDSAGVGFDGGNDKDWEANACKTQLIKKKGKVKALDEEVHKQQDMDLDIEFDVHLGIAHTRWATHGEPSPVNSHPQRSDKNNEFIVIHNGIITNYKDLKKFLESKGYDFESETDTETIAKLVKYMYDNRESQDTSFTTLVERVIQQLEGAFALVFKSVHFPGQAVGTRRGSPLLIGVRSEHKLSTDHIPILYRTGKDKKGSCNLSRVDSTTCLFPVEEKAVEYYFASDASAVIEHTNRVIFLEDDDVAAVVDGRLSIHRIKRTAGDHPGRAVQTLQMELQQIMKGNFSSFMQKEIFEQPESVVNTMRGRVNFDDYTVNLGGLKDHIKEIQRCRRLILIACGTSYHAGVATRQVLEELTELPVMVELASDFLDRNTPVFRDDVCFFLSQSGETADTLMGLRYCKERGALTVGITNTVGSSISRETDCGVHINAGPEIGVASTKAYTSQFVSLVMFALMMCDDRISMQERRKEIMLGLKRLPDLIKEVLSMDDEIQKLATELYHQKSVLIMGRGYHYATCLEGALKIKEITYMHSEGILAGELKHGPLALVDKLMPVIMIIMRDHTYAKCQNALQQVVARQGRPVVICDKEDTETIKNTKRTIKVPHSVDCLQGILSVIPLQLLAFHLAVLRGYDVDFPRNLAKSVTVE

SEQ ID NO: 575 - DNA, 2194 bp, Homo sapien
ggggaaggaacactgtaggggatagctgtccacggacgctgtctacaagaccctggagtgagataacgtgcctggtactgtgccctgcatgtgtaagatgcccagttgaccttcgcagcaggagcctggatcaggcacttcctgcctcaggtattgctggacagcccagacacttccctctgtgaccatgaaactctgggtgtctgcattgctgatggcctggtttggtgtcctgagctgtgtgcaggccgaattcttcacctctattgggcacatgactgacctgatttatgcagagaaagagctggtgcagtctctgaaagagtacatccttgtggaggaagccaagctttccaagattaagagctgggccaacaaaatggaagccttgactagcaagtcagctgctgatgctgagggctacctggctcaccctgtgaatgcctacaaactggtgaagcggctaaacacagactggcctgcgctggaggaccttgtcctgcaggactcagctgcaggttttatcgccaacctctctgtgcagcggcagttcttccccactgatgaggacgagataggagctgccaaagccctgatgagacttcaggacacatacaggctggacccaggcacaatttccagaggggaacttccaggaaccaagtaccaggcaatgctgagtgtggatgactgctttgggatgggccgctcggcctacaatgaaggggactattatcatacggtgttgtggatggagcaggtgctaaagcagcttgatgccggggaggaggccaccacaaccaagtcacaggtgctggactacctcagctatgctgtcttccagttgggtgatctgcaccgtgccctggagctcacccgccgcctgctctcccttgacccaagccacgaacgagctggagggaatctgcggtactttgagcagttattggaggaagagagagaaaaaacgttaacaaatcagacagaagctgagctagcaaccccagaaggcatctatgagaggcctgtggactacctgcctgagagggatgtttacgagagcctctgtcgtggggagggtgtcaaactgacaccccgtagacagaagaggcttttctgtaggtaccaccatggcaacagggccccacagctgctcattgcccccttcaaagaggaggacgagtgggacagcccgcacatcgtcaggtactacgatgtcatgtctgatgaggaaatcgagaggatcaaggagatcgcaaaacctaaacttgcacgagccaccgttcgtgatcccaagacaggagtcctcactgtcgccagctaccgggtttccaaaagctcctggctagaggaagatgatgaccctgttgtggcccgagtaaatcgtcggatgcagcatatcacagggttaacagtaaagactgcagaattgttacaggttgcaaattatggagtgggaggacagtatgaaccgcacttcgacttctctaggaatgatgagcgagatactttcaagcatttagggacggggaatcgtgtggctactttcttaaactacatgagtgatgtagaagctggtggtgccaccgtcttccctgatctgggggctgcaatttggcctaagaagggtacagctgtgttctggtacaacctcttgcggagcggggaaggtgactaccgaacaagacatgctgcctgccctgtgcttgtgggctgcaagtgggtctccaataagtggttccatgaacgaggacaggagttcttgagaccttgtggatcaacagaagttgactgacatccttttctgtccttccccttcctggtccttcagcccatgtcaacgtgacagacacctttgtatgttccttgtatgttcctatcaggctgatttttggagaaatgaatgtttgtctggagcagagggagaccatactagggcgactcctgtgtgactgaagtcccagcccttccattcagcctgtgccatccctggccccaaggctaggatcaaagtggctgcagcagagttagctgtctagcgcctagcaaggtgcctttgtacctcaggtgttttaggtgtgagatgtttcagtgaaccaaagttctgataccttgtttacatgtttgtttttatggcatttctatctattgtggctttaccaaaaaataaaatgtccctaccagaagccttaaa

SEQ ID NO: 576 - protein, 535 aa, Homo sapien
MKLWVSALLMAWFGVLSCVQAEFFTSIGHMTDLIYAEKELVQSLKEYILVEEAKLSKIKSWANKMEALTSKSAADAEGYLAHPVNAYKLVKRLNTDWPALEDLVLQDSAAGFIANLSVQRQFFPTDEDEIGAAKALMRLQDTYRLDPGTISRGELPGTKYQAMLSVDDCFGMGRSAYNEGDYYHTVLWMEQVLKQLDAGEEATTTKSQVLDYLSYAVFQLGDLHRALELTRRLLSLDPSHERAGGNLRYFEQLLEEEREKTLTNQTEAELATPEGIYERPVDYLPERDVYESLCRGEGVKLTPRRQKRLFCRYHHGNRAPQLLIAPFKEEDEWDSPHIVRYYDVMSDEEIERIKEIAKPKLARATVRDPKTGVLTVASYRVSKSSWLEEDDDPVVARVNRRMQHITGLTVKTAELLQVANYGVGGQYEPHFDFSRNDERDTFKHLGTGNRVATFLNYMSDVEAGGATVFPDLGAAIWPKKGTAVFWYNLLRSGEGDYRTRHAACPVLVGCKWVSNKWFHERGQEFLRPCGSTEVD

SEQ ID NO: 577 - DNA, 1073 bp, Homo sapien
cggagccagcgtgggaggccgctgccgtcgcgcgccttggtttttctgttccttttttttttttttttttaacttcctgcctatcacacgcagccatcagcccacaaagacatgactaccaacgcgggccccttgcacccatactggcctcagcacctaagactggacaactttgtacctaatgaccgccccacctggcatatactggctggcctcttctctgtcacaggggtcttagtcgtgaccacatggctgttgtcaggtcgtgctgcggttgtcccattggggacttggcggcgactgtccctgtgctggtttgcagtgtgtgggttcattcacctggtgatcgagggctggttcgttctctactacgaagacctgcttggagaccaagccttcttatctcaactctggaaagagtatgccaagggagacagccgatacatcctgggtgacaacttcacagtgtgcatggaaaccatcacagcttgcctgtggggaccactcagcctgtgggtggtgatcgcctttctccgccagcatcccctccgcttcattctacagcttgtggtctctgtgggccagatctatggggatgtgctctacttcctgacagagcaccgcgacggattccagcacggagagctgggccaccctctctacttctggttttactttgtcttcatgaatgccctgtggctggtgctgcctggagtccttgtgcttgatgctgtgaagcacctcactcatgcccagagcacgctggatgccaaggccacaaaagccaagagcaagaagaactgaggagtggtggaccaggctcgaacactggccgaggaggagctctctgcctgccagaagagtctagtcctgctcccacagtttggagggacaaagctaattgatctgtcacactcaggctcatgggcaggcacaagaaggggaataaaggggctgtgtgaaggcactgctgggagccattagaacacagatacaagagaagccaggaggtctatgatggtgacgatttttaaaatcaggaaataaaagatcttgactctaaaaaaaaaaaa

SEQ ID NO: 578 - protein, 230 aa, Homo sapien [sequence omitted]

SEQ ID NO: 579 - DNA, 4565 bp, Homo sapien
gcactgctgctgccaccgccgtcgccgccgcgccgccgcgccgctgctgctgccggtgctaaggagttcgctggagccctttcctcagacccggcccggtcttcgcgcccggactcctggcgccagcgctaggcgcactcaccgctctgacgggtgcagacgcgggagttgtcccagactgtggagtggcgggcacggccccagccccccttcccttccctgaccccttcttgccatcgccccagacatggggaacgcggcgaccgccaagaaaggcagcgaggtggagagcgtgaaagagtttctagccaaagccaaagaagactttttgaaaaaatgggagaatccaactcagaataatgccggacttgaagattttgaaaggaaaaaaacccttggaacaggttcatttggaagagtcatgttggtaaaacacaaagccactgaacagtattatgccatgaagatcttagataagcagaaggttgttaaactgaagcaaatagagcatactttgaatgagaaaagaatattacaggcagtgaattttcctttccttgttcgactggagtatgcttttaaggataattctaatttatacatggttatggaatatgtccctgggggtgaaatgttttcacatctaagaagaattggaaggttcagtgagccccatgcacggttctatgcagctcagatagtgctaacattcgagtacctccattcactagacctcatctacagagatctaaaacctgaaaatctcttaattgaccatcaaggctatatccaggtcacagactttgggtttgccaaaagagttaaaggcagaacttggacattatgtggaactccagagtatttggctccagaaataattctcagcaagggctacaataaggcagtggattggtgggcattaggagtgctaatctatgaaatggcagctggctatcccccattctttgcagaccaaccaattcagatttatgaaaagattgtttctggaaaggtccgattcccatcccacttcagttcagatctcaaggaccttctacggaacctgctgcaggtggatttgaccaagagatttggaaatctaaagaatggtgtcagtgatataaaaactcacaagtggtttgccacgacagattggattgctatttaccagaggaaggttgaagctccattcataccaaagtttagaggctctggagataccagcaactttgatgactatgaagaagaagatatccgtgtctctataacagaaaaatgtgcaaaagaatttggtgaattttaaagaggaacaagatgacatctgagctcacactcagtgtttgcactctgttgagagataaggtagagctgagaccgtccttgttgaagcagttacctagttccttcattccaacgactgagtgaggtctttattgccatcatcccgtgtgcgcactctgcatccacctatgtaacaaggcaccgctaagcaagcattgtctgtgccataacacagtactagaccactttcttacttctctttgggttgtctttctcctctcctacatccatttcttccttttccaatttcattggttttctctaaacagtgctccattttattttgttggtgtttcagatgggcagtgttatggctacgtgatatttgaagggaaggataagtgttgctttcagtagttattgccaatattgttgttggtcaatggcttgaagataaactttctaataattattatttctttgagtagctcagacttggttttgccaaaactcttggtaatttttgaagatagactgtcttatcaccaaggaaatttatacaaattaagactaactttcttggaattcactattctggcaataaattttggtagactaatacagtacagctagacccagaaatttggaaggctgtagatcagaggttctagttccctttccctccttttatatcctcctctccttgagtaatgaagtgaccagcctgtgtagtgtgacaaacgtgtctcattcagcaggaaaaactaatgatatggatcatcacccagattctctcacttggtaccagcatttctgtaggtattagagaagagttctaagttttctaaaccttaactgttccttaaggattttagccagtattttaatagaacatgattaatgaaagtgacaaattttaaattttctctaatagtcctcatcataaactttttaaaggaaaataagcaaactaaaaagaacattggtttagataaatacttatactttgcaaagtcaaaaatggcttgatttttggaaacaatatagaggtattcatatttaaatgagggtttacatttgttttgttttgtaaccgttaaaaagaagttgtttccagctaattattgtggtgtactatatttgtgagcctagggtaggggcactgctgcaacttctgctttcatcccatgcctcatcaatgaggaaagggaacaaagtgtataaaactgccacaattgtattttaattttgaggtatgatattttcagatatttcataatttctaacctctgttctctcagtaaacagaatgtctgatcgatcatgcagatacaatgttggtatttgagaggttagtttttttcctacacttttttttgccaactgacttaacaacattgctgtcaggtggaaatttcaagcacttttgcacatttagttcagtgtttgttgagaatccatggcttaacccacttgttttgctatttttttctttgcttttaattttccccatctgattttatctctgcgtttcagtgacctaccttaaaacaacacacgagaagagttaaactgggttcattttaatgatcaatttacctgcatataaaatttatttttaatcaagctgatcttaatgtatataatcattctatttgctttattatcggtgcaggtaggtcattaacaccacttcttttcatctgtaccacaccctggtgaaacctttgaagacataaaaaaaacctgtctgagatgttctttctaccaatctatatgtctttcggttatcaagtgtttctgcatggtaatgtcatgtaaatgctgatattgatttcactggtccatctatatttaaaacgtgcaagaaaaaaataaaatactctgctctagcaagttttgtgtaacaaaggcatatcgtcatgttaataaatttaaaacatcattcgtataaaatattttaattttcttgtatttcatttagacccaagaacatgctgaccaatgtgttctatatgtaaactacaaattctatggtagctttgttgtatattattgtaaaattattttaataagtcatggggatgacaatttgattattacaatttagttttcagtaatcaaaaagatttctatgaattctaaaaaatatttttttctatgaaattactagtgcccagctgtagaatctaccttaggtagatgatccctagacatacgttggttttgagggctattcagccattccattttactctctatttaaaggccgtgagcaagcttgtcatgagcaaatatgtcaagggagtcaatttctgaccaatcaagtacactaaattagaatatttttaaagtatgtaacattcccagtttcagccacaatttagccaagaataagataaaaacttgaataagaagtaagtagcataaatcagtatttaacctaaaattacatatttgaaacagaagatattatgttatgctcagtaaataattaagagatggcattgtgtaagaaggagccctagactgaaagtcaagacatctgaatttcaggctggaaaactatcagtatgatctcagcctcagttctcttgtctgtaaaatggaagaactggattaggcagtttgtaagattcctcctaactttcacagtcgatgacaagattgtctttttatctgatattttgaagggtatattgctttgaagtaagtctcaataaggcaatatattttagggcatctttcttcttatctctgacagtgttcttaaaattatttgaatatcataagagccttggtgtctgtcctaattcctttctcactcaccgatgctgaatacccagttgaatcaaactgtcaacctaccaaaaacgatattgtggcttatgggtattgctgtctcattcttggtatattcttgtgttaactgcccattggcctgaaaatactcattgtaagcctgaaaaaaaaaatctttcccactgttttttctgcttgttgtaagaatcaaatgaaataatgtatgtgaaagcaccttgtaaactgtaacctatcaatgtaaaatgttaaggtgtgttgttatttcattaattacttctttgtttagaatggaatttcctatgcactactgtagctaggaaatgctgaaaacaactgtgttttttaattaatcaataactgcaaaattaaagtaccttcaatggataagccaaaaaaatctatgtcgggtgcggagaaagaggtaatgaaatggcaggaattcgatatcagcttatcatacc

SEQ ID NO: 580 - protein, 433 aa, Homo sapien
  unsure 74: unknown amino acid
HCCCHRRRRRAAAPLLLPVLRSSLEPFPQTRPGLRARTPGASARRTHRSDGCRRGSCPRLWSGGHGPSPPSLPXPLLAIAPDMGNAATAKKGSEVESVKEFLAKAKEDFLKKWENPTQNNAGLEDFERKKTLGTGSFGRVMLVKHKATEQYYAMKILDKQKVVKLKQIEHTLNEKRILQAVNFPFLVRLEYAFKDNSNLYMVMEYVPGGEMFSHLRRIGRFSEPHARFYAAQIVLTFEYLHSLDLIYRDLKPENLLIDHQGYIQVTDFGFAKRVKGRTWTLCGTPEYLAPEIILSKGYNKAVDWWALGVLIYEMAAGYPPFFADQPIQIYEKIVSGKVRFPSHFSSDLKDLLRNLLQVDLTKRFGNLKNGVSDIKTHKWFATTDWIAIYQRKVEAPFIPKFRGSGDTSNFDDYEEEDIRVSITEKCAKEFGEF

SEQ ID NO: 581 - DNA, 2945 bp, Homo sapien
ccagccccccttcccttccctgaccccttcttgccatcgccccagacatggggaacgcggcgaccgccaagaaaggcagcgaggtggagagcgtgaaagagtttctagccaaagccaaagaagactttttgaaaaaatgggagaatccaactcagaataatgccggacttgaagattttgaaaggaaaaaaacccttggaacaggttcatttggaagagtcatgttggtaaaacacaaagccactgaacagtattatgccatgaagatcttagataagcagaaggttgttaaactgaagcaaatagagcatactttgaatgagaaaagaatattacaggcagtgaattttcctttccttgttcgactggagtatgcttttaaggataattctaatttatacatggttatggaatatgtccctgggggtgaaatgttttcacatctaagaagaattggaaggttcagtgagccccatgcacggttctatgcagctcagatagtgctaacattcgagtacctccattcactagacctcatctacagagatctaaaacctgaaaatctcttaattgaccatcaaggctatatccaggtcacagactttgggtttgccaaaagagttaaaggcagaacttggacattatgtggaactccagagtatttggctccagaaataattctcagcaagggctacaataaggcagtggattggtgggcattaggagtgctaatctatgaaatggcagctggctatcccccattctttgcagaccaaccaattcagatttatgaaaagattgtttctggaaaggtccgattcccatcccacttcagttcagatctcaaggaccttctacggaacctgctgcaggtggatttgaccaagagatttggaaatctaaagaatggtgtcagtgatataaaaactcacaagtggtttgccacgacagattggattgctatttaccagaggaaggttgaagctccattcataccaaagtttagaggctctggagataccagcaactttgatgactatgaagaagaagatatccgtgtctctataacagaaaaatgtgcaaaagaatttggtgaattttaaagaggaacaagatgacatctgagctcacactcagtgtttgcactctgttgagagataaggtagagctgagaccgtccttgttgaagcagttacctagttccttcattccaacgactgagtgaggtctttattgccatcatccgtgtgcgcactctgcatccacctatgtaacaaggcaccgctaagcaagcattgtctgtgccataacacagtactagaccactttcttacttctctttgggttgtctttctcctctcctacatccatttcttccttttcaatttcattggttttctctaaacagtgctccattttattttgttggtgtttcagatgggcagtgttatggctacgtgatatttgaagggaaggataagtgttgctttcagtagttattgccaatattgttgttggtcaatggcttgaagataaactttctaataattattatttctttgagtagctcagacttggttttgccaaaactcttggtaatttttgaagatagactgtcttatcaccaaggaaatttatacaaattaagactaactttcttggaattcactattctggcaataaattttggtagactaatacagtacagctagacccagaaatttggaaggctgtagatcagaggttctagttccctttccctccttttatatcctcctctccttgagtaatgaagtgaccagcctgtgtagtgtgacaaacgtgtctcattcagcaggaaaaactaatgatatggatcatcacccagattctctcacttggtaccagcatttctgtaggtattagagaagagttctaagttttctaaaccttaactgttccttaaggattttagccagtattttaatagaacatgattaatgaaagtgacaaattttaaattttctctaatagtcctcatcataaactttttaaaggaaaataagcaaactaaaaagaacattggtttagataaatacttatactttgcaaagtcaaaaatggcttgatttttggaaacaatatagaggtattcatatttaaatgagggtttacatttgttttgttttgtaaccgttaaaaagaagttgtttccagctaattattgtggtgtactatatttgtgagcctagggtaggggcactgctgcaacttctgctttcatcccatgcctcatcaatgaggaaagggaacaaagtgtataaaacctgccacaattgtattttaattttgaggtatgatattttcagatatttcataatttctaacctctgttctctcagtaaacagaatgtctgatcgatcatgcagatacaatgttggtatttgagaggttagtttttttcctacacttttttttgccaactgacttaacaacattgctgtcaggtggaaatttcaagcacttttgcacatttagttcagtgtttgttgagaatccatggcttaacccacttgttttgctatttttttctttgcttttaattttccccatctgattttatctctgcgtttcagtgacctaccttaaaacaacacacgagaagagttaaactgggttcattttaatgatcaatttacctgcatataaaatttatttttaatcaagctgatcttaatgtatataatcattctatttgctttattatcggtgcaggtaggtcattaacaccacttcttttcatctgtaccacaccctggtgaaacctttgaagacataaaaaaaacctgtctgagatgttctttctaccaatctatatgtctttcggttatcaagtgtttctgcatggtaatgtcatgtaaatgctgatattgatttcactggtccatctatatttaaaacgtgc

SEQ ID NO: 582 - protein, 351 aa, Homo sapien
MGNAATAKKGSEVESVKEFLAKAKEDFLKKWENPTQNNAGLEDFERKKTLGTGSFGRVMLVKHKATEQYYAMKILDKQKVVKLKQIEHTLNEKRILQAVNFPFLVRLEYAFKDNSNLYMVMEYVPGGEMFSHLRRIGRFSEPHARFYAAQIVLTFEYLHSLDLIYRDLKPENLLIDHQGYIQVTDFGFAKRVKGRTWTLCGTPEYLAPEIILSKGYNKAVDWWALGVLIYEMAAGYPPFFADQPIQIYEKIVSGKVRFPSHFSSDLKDLLRNLLQVDLTKRFGNLKNGVSDIKTHKWFATTDWIAIYQRKVEAPFIPKFRGSGDTSNFDDYEEEDIRVSITEKCAKEFGEF

SEQ ID NO: 583 - DNA, 4237 bp, Homo sapien
tcccgaaaccagagggatggggccggctgtgcagtagaacggggatcgaaaagaggaaaacaagggcacgaagaccagcgagaaagaagaggacacctgggaaaggcggaagcagaagacggggaagggaaaagaaacccatagcaggtggaaaccagatctagagcaacaccgtcaggttcacagtttgtttttctagaagagaagaaagtacctgaggattgctcttttttcctaccgttaatgaaaactacttttgtcttcatcataaaagaaaaaactaaggggaggtaaaggcagtctcctgttttattagggggagaggtgaagggaaatccaggctcactttctgaataagccactgcctggtgcacagagcagaaccatcctggtttctgaagacacatccctttcagcagaattccagccggagtcgctggcacagttctatttttatatttaaatgtatgtctcccctggcctttttttttttttttttttttttttagcaacacttttcttgtttgtaaacgcgagtgaccagaaagtgtgaatgcggagtaggaatatttttcgtgttctcttttatctgcttgccttttttagagagtagcagtggttcctatttcggaaaaggacgttctaattcaaagctctctcccaatatatttacacgaatacgcatttagaaagggaggcagcttttgaggttgcaatcctactgagaaggatggaagaaggagccaggcaccgaaacaacaccgaaaagaaacacccaggtgggggcgagtcggacgccagccccgaggctggttccggagggggcggagtagccctgaagaaagagatcggattggtcagtgcctgtggtatcatcgtagggaacatcatcggctctggaatctttgtctcgccaaagggagtgctggagaatgctggttctgtgggccttgctctcatcgtctggattgtgacgggcttcatcacagttgtgggagccctctgctatgctgaactcggggtcaccatccccaaatctggaggtgactactcctatgtcaaggacatcttcggaggactggctgggttcctgaggctgtggattgctgtgctggtgatctaccccaccaaccaggctgtcatcgccctcaccttctccaactacgtgctgcagccgctcttccccacctgcttccccccagagtctggccttcggctcctggctgccatctgcttattgctcctcacatgggtcaactgttccagtgtgcggtgggccacccgggttcaagacatcttcacagctgggaagctcctggccttggccctgattatcatcatggggattgtacagatatgcaaaggagagtacttctggctggagccaaagaatgcatttgaggatttccaggaacctgacatcggcctcgtcgcactggctttccttcagggctcctttgcctatggaggctggaactttctgaattacgtgactgaggagcttgttgatccctacaagaaccttcccagagccatcttcatctccatcccactggtcacatttgtgtatgtctttgccaatgtcgcttatgtcactgcaatgtccccccaggagctgctggcatccaacgccgtcgctgtgacttttggagagaagctcctaggagtcatggcctggatcatgcccatttctgttgccctgtccacatttggaggagttaatgggtctctcttcacctcctctcggctgttcttcgctggagcccgagagggccaccttcccagtgtgttggccatgatccacgtgaagcgctgcaccccaatcccagccctgctcttcacatgcatctccaccctgctgatgctggtcaccagcgacatgtacacactcatcaactacgtgggcttcatcaactacctcttctatgggggcacggttgctggacagatagtccttcgctggaagaagcctgatatcccccgccccatcaagatcaacctgctgttccccatcatctacttgctgttctgggccttcctgctggtcttcagcctgtggtcagagccggtggtgtgtggcattggcctggccatcatgctgacaggagtgcctgtctatttcctgggtgtttactggcaacacaagcccaagtgtttcagtgacttcattgagctgctaaccctggtgagccagaagatgtgtgtggtcgtgtaccccgaggtggagcggggctcagggacagaggaggctaatgaggacatggaggagcagcagcagcccatgtaccaacccactcccacgaaggacaaggacgtggcggggcagccccagccctgaggaccaccattccctggctactctctccttcctcccccttttatcctacctccctgccttggtcccgccaacacatgcgagtacacacacacccctctctctgcttttgtcaggcagtggtaggactttggtgtgggtggtgagaaattgtaaacaaaaactgacattcatacccaaagaaccagcctctcaccccagggtccatgtcccaggccccactccagtgctgcccacactcccagctgctggaggagaggggagatgccaaggtgccctgcaggacctccctccgggccacaccctcagctgcctcttcaggaaccggagctcattactgccttccctcccagggaggccccttcagagaggagaggccaggagctgcattgtggggggacaggctcaagcaattctgtccccatcaaggggtcagctggagagacccaagaccctatctgttcaccagggacccaaaatccaaggggatgcttccctctgccctctttcctgcccctccccatcatacctgcacccaccccagccagggctccctgtccagaattcggttctcctcaggacgccaactcccagagctaaggaccaaggagaagaacagcctctccacccccaagccaggcggttgaggaacatattgagaaaggttcagattgcagaaacccagccctgcccctgcctcctgcatccagcccccaacatggtgccaaagcttccagaagccaaaaagcttctgatttttaaggtagtgggcatctctctcctaatgacgaagctgctcagcaactccacctgcccgccgcaggaaggagcagtcccctgctatccctgcagccactcccagcacacccgcacacagccagcaccaccgccccaccgtgcacttctcctctctgggccttggcttgggaccaggtacgaaggatccccaagcccttcaggcctgagatcagagccagatcagccttaagtcacctcccatccaagaacttggcctaaaaatactcccctatttctaaccctcaggacggatctgatattaaatgccttccctgggaggaagggtgctttccccctccctagaggtgcccattccataccctgggagactgaggagagcattggctgaagcccagttcctttcccatccatccccaactccaataatcccccactcctcgcaggtctcagtgtcatgctgtcttggggcagggtgaaagggtagtggcagcagggcgcccactctggagatcctcaaaaaaggccctcctctgtggctggcagcctctgacctttccctgggcttcaaaggaaggctatggagtttgctgtgggccctgcaaccttcccagccactcctgctgcactaaggacttaggatccttttatcacaaatcgggattctctcccccaccccgaattctgtctgcttaaactggaatacacaggagcccttcctggcctggatggtgtctcccagcttccccgcccagcttgcccaccccatagttggtgagatgccaagtttggtctgagttgtgaccccttcagagtagatgcccggcaggctggggttggcccctggagggtcaggggaccatcttcttattccctcttttctcattcctccaacttcctcccctccttcaattatttttttgtaaagttgatgccttactttttggataaatatttttgaagctggtatttctatttcttttggattttttttaatgtaaggttgttttgggggatggagttagaaccttaatgataatttctttcgtttggtgtaggttttagagatttgttttgtggagaggtttttttcttttgatgtaataaaatttaaaatggaaatgaaaaaaaaaaaaaaaaaaaaaa

SEQ ID NO: 584 - protein, 535 aa, Homo sapien
MEEGARHRNNTEKKHPGGGESDASPEAGSGGGGVALKKEIGLVSACGIIVGNIIGSGIFVSPKGVLENAGSVGLALIVWIVTGFITVVGALCYAELGVTIPKSGGDYSYVKDIFGGLAGFLRLWIAVLVIYPTNQAVIALTFSNYVLQPLFPTCFPPESGLRLLAAICLLLLTWVNCSSVRWATRVQDIFTAGKLLALALIIIMGIVQICKGEYFWLEPKNAFEDFQEPDIGLVALAFLQGSFAYGGWNFLNYVTEELVDPYKNLPRAIFISIPLVTFVYVFANVAYVTAMSPQELLASNAVAVTFGEKLLGVMAWIMPISVALSTFGGVNGSLFTSSRLFFAGAREGHLPSVLAMIHVKRCTPIPALLFTCISTLLMLVTSDMYTLINYVGFINYLFYGGTVAGQIVLRWKKPDIPRPIKINLLFPIIYLLFWAFLLVFSLWSEPVVCGIGLAIMLTGVPVYFLGVYWQHKPKCFSDFIELLTLVSQKMCVVVYPEVERGSGTEEANEDMEEQQQPMYQPTPTKDKDVAGQPQP

SEQ ID NO: 585 - DNA, 7525 bp, Homo sapien
cccgggcgagcccgccgtgcgcacagctctgcccgccgcccctggagcggatccccagccgtccctgggcgttctcccgggttctagcaaagccccccggggtgcccatcagtttccttgggtgactacagcgtgtgttttttctttcctctttcccctgcctgtgtgcccttctccaggatggcagaggcggaattgcacaaggaaaggctgcaagccatagcagaaaaaagaaagaggcagactgaaatagaaggcaagcgacaacagcttgacgagcagatacttctgctgcagcattccaagtccaaagtgcttcgggagaaatggctgctgcagggcatacccgctggaactgccgaagaggaggaagccaggaggcggcagtctgaagaggatgagttcagagtcaagcaacttgaagataacattcagaggctggagcaagaaatacaaacgctagaaagtgaagagtcccagatatctgccaaagagcaaatcatcctagagaaactgaaggaaacagaaaaatccttcaaggactttcagaagggtttctccagtacggatggagatgcagtaaattacatttcctcccagcttcccgacctgccaatcctctgttcacgaacagcagaaccatcacctgggcaggacgggaccagcagagcggctggagtcgggtgggagaatgtgctgctaaaggaaggtgagtcagcctcgaacgccacagaaacatccggcccagacatgactatcaagaagcctccccagctttctgaggatgatatctggctaaaaagcgagggagacaactatagtgccaccctcctggagcctgctgccagctctctttccccagatcacaaaaacatggaaattgaggtgtctgttgcagaatgtaaaagtgttcctggaatcacctctaccccacatcccatggaccatccctccgctttctattcacccccgcataatggcctccttactgatcaccacgaatccctggataatgatgttgccagagagatccgctatctagatgaggtgctagaggccaactgctgtgattctgctgtggatggaacgtacaatggaacatcctccccagagcctggtgcagtggttctggtgggcggcctaagcccccctgtccacgaggcgacccagccagaacccactgaaagaacagctagccggcaggcacctcctcacatcgagctcagtaatagcagccctgaccccatggcagaggcagaaagaacaaatggccattcccccagccagcctagagatgcgctgggggacagcctgcaggtgcctgtcagccccagctccacaaccagctcacggtgttcttcccgagatggagagttcactctcaccacactgaaaaaggaggccaagtttgagctgcgtgccttccatgaggacaagaagccctccaagctctttgaggatgacgagcatgagaaagaacaatactgcattagaaaagtgaggccttcagaggagatgctggagctggaaaaggagaggagagagctcatccgcagccaggccgtcaagaagaatcctggcattgcagcaaaatggtggaatcccccgcaggaaaaaaccatcgaggagcagctggacgaggaacatctggagtcgcacaaaaagtacaaggagcgcaaagagagaagggcacagcaggaacagttgctgctgcagaagcagttacagcagcagcagcagcagcccccatcgcagctctgcacagcccctgcctcttctcatgaacgcgcaagcatgattgacaaagcaaaggaggacattgtcacagagcagatagatttctctgctgctcgcaaacaatttcagctgatggagaattccaggcaagcggtggccaagggccagagtacacccaggctgttctccatcaagcctttctacaggcctctggggtcagtcaactcagacaagccactgactaatccgagaccaccttctgtcgggggacctccagaagacagtggtgcctcagccgccaagggacagaaatcccccggtgccctggagaccccatcggcagcaggaagccagggcaacacagcctctcaggggaaggaagggccctacagcgagccttctaaacgtgggcccttatctaaactgtgggctgaggatggagaatttacgagcgcccgggctgtcctcactgtggtcaaggatgatgaccatgggattttggatcagttctcaagatctgtcaatgtctccttgacccaagaggagcttgactctggtctggacgaattgtcggtgaggtctcaggataccacagtcctggagaccctatccaatgatttcagcatggacaacatcagtgacagcggggcatccaatgagacaaccaatgccctccaggaaaattcactggctgatttttctctgccccagacaccacaaactgacaacccctcagagggccgaggagaaggcgtctccaagtcatttagtgatcatggtttctattccccttcctccacgctgggggactctccgttggttgatgaccccttggagtatcaggctggcctcctggtgcagaatgccattcaacaagccatagccgagcaggtggataaagctgtgtccaaaaccagcagggatggagcagagcaacagggacctgaagcgactgtagaggaagctgaagctgcggctttcggctcagaaaagcctcagagcatgtttgagccacctcaggtgtcttctcctgttcaagagaaaagggatgtattaccaaagattctgcctgctgaagacagggcgctcagggaaagggggcccccccagccactgccagctgtgcagcccagtggcccgattaacatggaggagaccaggcccgaaggaagctatttcagcaagtactcggaggcagctgagctgagaagcacagcctccctcctggccactcaagaatctgacgtgatggttgggcctttcaagctgaggtccaggaaacagcggactttgtccatgattgaggaagagatccgagcagctcaggaaagggaagaggagctgaagaggcagagacaagtcttgcagagtacgcagagccccaggacaaagaatgccccatcactgccctccagaacatgctacaaaactgctccagggaaaatagagaaagtcaaacctcctccatcccccaccactgaaggccccagcctgcagcctgacttagcccctgaagaggctgccggaacccagcggcccaagaatctgatgcagaccctcatggaagactatgagacacacaaatctaaaaggcgcgagagaatggatgatagtagttacacttctaagttactgtcttgcaaggtgacttccgaggtcctcgaggccacacgggttaatcgaagaaagagcgcactggctttgcgctgggaagcagggatctatgccaaccaggaggaagaagacaacgaataaacttccttcaacccaggaagcgtctttggtgcttgggagaccaagaaaccaagaaattaacaactgaaagcattttaatggactatttattaaagtgcaaacaaactcagcaatccttatgtagaccagaagctgcaatatacaatgatgaaaatgaaacgaaaaggaagtccccccatcagactctggacacccaggaatcaaaagagaaaggacttttttggtgactcaatcccagtgtctggtttggggccaatctacaatggatccaaaaggacaaaacatgttacaagcaaatcaacatagttgctgcaggcggaactgagaccagcctctctgggcgatgaaggacaatggtggtagggccacttagagagcagtagggcccaggctggtgcagcctacatggcacaggatatttccctgcaccagtttcccacctgtcacttgcagcatcagagggtgttgcattaactccattttctccagcagccataaaatgaatggcgtttctctccatatttgcccagaagaggcagttatgattccacttctcctacatttaattatttttaattgagaacaactcatgatcacaattcataaaatccatattttaagacaatagttcttcatgtcacaaacacaatctattctacatgaggaggctgagaaaggggaagagaaaaacaaaccaaatggatgatgttagctttaggatcgtgtctgcttataatattcactgatctgcagtttatgagaacacattttcacagttatgtttcttcataggaaaactatatttagtgggcaacaactatttttatgatgggatgggggagtatatacacgtatagaatctgtacgcgttgaacaacttggttcaagatggtgggggcatttttagagcggcaataattgaaaaaaaaggcgaactctgccttggagaggtagatgataagaaataaaaaggtgtttataactattttgtattataaagtgggccttagagataggaagaagaatgatggattccttttggatcaatcagaaaggaaacacgaaagaaaagtcaggaaggtagagagagaaaaagggagggaaggagaaagaatgggaataaaataaggaggtaagagatactatttttgctgagcaaccagtgtgtttcaggatgatacaaagaaaaatatagaatagaaataagtgcaggcttggaatcagctacaaatcctaaagatggggtgtgtgtggatgtgtgtgtgtgtgtgtgtacaccattgtgtgtttgtaaaatgtgtatgttcatgagtaagggtgtgtgtgtgtgtgtattaaaattccagagtgaccgtggcacttgggtgtacaggtaattcctccagagctgtttgctggcttcaggagtggagtgagaatttcttttttatgaaaagggatataaaggcaccgagctgatgcagtatttgtaatattaagttgacctaacaaggtatttgcatgagtcacaattacaaagttttgagcggttttgtaatttgacatttaggaaagtctcctatttattctcatactttacattcatgcttagtatactatagaggatgccagctttaatctttctgtcatttaaagccatatgataagggtattcaataattgggtgccctaaatttctggatgagaaaattttcaattctggccatgagaaagaaaaaaaaataaacagccttctttttttttcctttgttttaaaactgtggttttttaaaaaagcaataattaactcagacctcactaaaaatcatttttgtttttatattgttatgtcataagctctattatgttattctaacaagtagcaatttcacaaaatttgtatgtagatgttaacgcacatttcctttgcttcttttattagactagtgttgactttggggggggacatttattcacaaatgagaagtaggcacaaagtaaaaaatggaaccatctactaacaaggatcctttaaaactgccaagggagctctaacttgaagccacatcctacagatggcagcccaaatagcacatgggcaattggcaccatctttatatggttgagtctcctgaatattttgaatgaattctcaacaaaatgtgctagccactggggacgcaaaacaagtaagatccctgttgcaagaaattcattttatagtgagggaggttggcatggagactaaaattctcaggaaaatgagatccgtgttagattagaagtcctgatgtgaaatgggaggactcaggaaggaggatcgtctttacctgaggatttctagccagaggtcccagatgcctgggctgagaacccagcgataagggggcgttcccaaagcagacacagggataagaacagaggaggcagcagcattgcacagccccaggcacagtggcagttaggatggctggagagtaggatagttctatgggttgcccaaaaaatgtgatgcgcttcatgttttctctgactcatggatctggtagagaccatagacatgatatagactaacttccccatttttcacaatgaaggtaaaccatccttatgacttaccttaaagttttttgttctgttttgaaggaaaccatgtgcttcatgaaacctacagttgacaagagaatgtacagctaagagaaaagcttaagaggccacactattcgcggaatggctttagaggcagatgaagtggtctttgaccacagttgattgaaccagagcacttattgcttaaagaataacagagttctagagctgggggttcttgggccatgctccgtgtgtggataaggaaagaaatactgtttctgggactctcccacagtcacaaagctgttttcactgtggcccctacatctcttaacttttgctattactcctatgctgccttccggattactgctgtctatcttcttgctccactcactgaagatcctattataatcccatgaaaatgtaaattacagtttacttgggagagccagattttctctgtgctcttgagttttttattcattcaagaaaccttgggccaccgctttgtacatagcaccgtgctaggctctgggatcccaaatggacccttttaactttctgaagatgggaccgtcccctggaggaaagtcattcctgcctaatccatcgagagaaagaggcttacgaaaaactttgcctctgatgctcagccccacccccaaatagcacacaagcttgttaaccccacctcttacaaaatgtttagattctgtaggtgttaaaagcctttctggaagtattgcattctgccgtgtttataggtgttcactttcctccagagctgattaactactgacatgacttggctttctcatccagaaattatggaaacagggtctgtcagtggcaggaggccgtgctgtgttttacttggatgacacaatgcagtttacttgcctcttcatacccatgcatgctgctcaccctagacaatgacatataagccgtatatagatcaatgtccacatatatatacacacacacatatatatatataaagtgtaacaaggaacactaaaacagtgttgattcttgtctctgaagacaaataattaaaccttttttttcccaactaaagaatggatttaattaaactatgtattgaaaaaaaagtagcctaagtgttagagatggtgaatatattccattttagttaaagaacaaatttcctgaattttaagcattcagtgagctgccaattttgattttgtgttgctctttacccaaattattttttctttgtttttctttttttgggggaggaggggaaaaaagcagcaatactgtgtttggaaattatactctgtatctggttttcctgtgtatgttaaccacttaaatgttattatcctgctttggttttagagtgattgtgaggcattcaatgcaagtatacagttattttctcattaaaatccaatgtgtgttgagtttttataaaaaaaaaaaaaaaaaa

SEQ ID NO: 586 - protein, 1103 aa, Homo sapien
MAEAELHKERLQAIAEKRKRQTEIEGKRQQLDEQILLLQHSKSKVLREKWLLQGIPAGTAEEEEARRRQSEEDEFRVKQLEDNIQRLEQEIQTLESEESQISAKEQIILEKLKETEKSFKDFQKGFSSTDGDAVNYISSQLPDLPILCSRTAEPSPGQDGTSRAAGVGWENVLLKEGESASNATETSGPDMTIKKPPQLSEDDIWLKSEGDNYSATLLEPAASSLSPDHKNMEIEVSVAECKSVPGITSTPHPMDHPSAFYSPPHNGLLTDHHESLDNDVAREIRYLDEVLEANCCDSAVDGTYNGTSSPEPGAVVLVGGLSPPVHEATQPEPTERTASRQAPPHIELSNSSPDPMAEAERTNGHSPSQPRDALGDSLQVPVSPSSTTSSRCSSRDGEFTLTTLKKEAKFELRAFHEDKKPSKLFEDDEHEKEQYCIRKVRPSEEMLELEKERRELIRSQAVKKNPGIAAKWWNPPQEKTIEEQLDEEHLESHKKYKERKERRAQQEQLLLQKQLQQQQQQPPSQLCTAPASSHERASMIDKAKEDIVTEQIDFSAARKQFQLMENSRQAVAKGQSTPRLFSIKPFYRPLGSVNSDKPLTNPRPPSVGGPPEDSGASAAKGQKSPGALETPSAAGSQGNTASQGKEGPYSEPSKRGPLSKLWAEDGEFTSARAVLTVVKDDDHGILDQFSRSVNVSLTQEELDSGLDELSVRSQDTTVLETLSNDFSMDNISDSGASNETTNALQENSLADFSLPQTPQTDNPSEGRGEGVSKSFSDHGFYSPSSTLGDSPLVDDPLEYQAGLLVQNAIQQAIAEQVDKAVSKTSRDGAEQQGPEATVEEAEAAAFGSEKPQSMFEPPQVSSPVQEKRDVLPKILPAEDRALRERGPPQPLPAVQPSGPINMEETRPEGSYFSKYSEAAELRSTASLLATQESDVMVGPFKLRSRKQRTLSMIEEEIRAAQEREEELKRQRQVLQSTQSPRTKNAPSLPSRTCYKTAPGKIEKVKPPPSPTTEGPSLQPDLAPEEAAGTQRPKNLMQTLMEDYETHKSKRRERMDDSSYTSKLLSCKVTSEVLEATRVNRRKSALALRWEAGIYANQEEEDNE

SEQ ID NO: 587 - DNA, 7525 bp, Homo sapien; identical to SEQ ID NO: 585

SEQ ID NO: 588 - protein, 1103 aa, Homo sapien; identical to SEQ ID NO: 586

SEQ ID NO: 589 - DNA, 2109 bp, Homo sapien
ttgctgcatagattacaacggtgatggcgggcaagcggtccggctggagccgggcggctctcctccagctccttctcggcgtgaacctggtggtgatgccgcccacccgggcccggagtctgcgcttcgttaccttgctgtaccgccatggagaccgttcaccagtgaagacatatcccaaggacccctatcaggaagaagaatggccccaggggtttggtcagttaaccaaggaggggatgctacagcactgggaactgggccaggccctgcggcagcgctatcacggcttcctaaacacctcttatcaccggcaagaggtttatgtgcgaagcacagactttgaccggactctcatgagtgctgaggccaacctggctggactcttccctcccaacgggatgcagcgcttcaacccgaacatctcgtggcagcctattcctgtgcacactgtgcccatcactgaggacaggctgctgaagttcccgttgggcccatgtccccgttatgagcagctgcagaacgagacccggcagacaccagagtatcagaatgagagttctcggaatgcacaatttctggacatggtggccaacgagacagggcttacagacctgacactggagaccgtctggaatgtctatgacacactcttctgtgagcaaacgcacgggctgcgcctgccgccctgggcctcaccccaaaccatgcagcgtctcagccggctaaaggacttcagcttccgcttcctcttcggaatctaccagcaggcggagaaggcccggcttcaggggggagtcctgctggctcagataaggaagaacctgaccctaatggcgaccacctcccagctccccaagctgctggtttactctgcgcacgacactaccctggttgccctgcaaatggcactggatgtctacaatggtgaacaagccccctacgcctcctgccacatatttgaactgtaccaggaagattctgggaatttctcagtggagatgtactttcggaacgagagtgacaaggccccctggccgctcagcctgcctggctgccctcaccgctgcccactgcaggacttccttcgcctcacagagcccgtcgtgcccaaggattggcagcaggagtgccagctggcaagcggtcctgcagacacagaggtgattgtggccttggctgtatgtggctccatcctcttcctcctcatagtgctgctcctcaccgtcctcttccggatgcaggcccagcctcctggctaccgccacgtcgcagatggggaggaccacgcctgacaaccactcagcccccttccctccacctcctaggggaggtgggctgggccctcgctcctgactgttgctgctccccagcccatggacaggagatcctgggttgggcctccctctgatgaccccagccagatgagcgagtggggctcagcgtggcccatggtgcctgtcactcagcattcccatgcctgatgtttaccaagtgctgtgttggacactggctttctccaaacaggatttgcctcctccacgctccctacacacctgagatgtaaactggcagtcagtgttcactcaggacctaggattagaaaatggcagagttggtgctggatccaccttgcacttctatcaagccctgttctttttcctccagcctgaagtcttcggcaaatagctcagagggacacggtcttgcctctcagtgcttattttagtgggaaaaacagctaataccaggggtacaaacattggctcccaaggaactggatcacccaacagccagccagccacatttccctgtgtctggctagagccaccattagactcagacagaatgcttcaggaatcgttgtcaccccttcaactggagcaggacggaaggttgtctgtacttgggagggagtggggagtggtgggaagggagttgcttgtcacacgaatcaggaaactgctctccctcagctgggctggggtctccagggacctgagctacatgcaggttgtgagctggaaaagaaagttctagactgtggcccagaatagggctggggcagctcccagagaatgaatagtgctgtttcctattggactgata

SEQ ID NO: 590 - protein, 423 aa, Homo sapien
MAGKRSGWSRAALLQLLLGVNLVVMPPTRARSLRFVTLLYRHGDRSPVKTYPKDPYQEEEWPQGFGQLTKEGMLQHWELGQALRQRYHGFLNTSYHRQEVYVRSTDFDRTLMSAEANLAGLFPPNGMQRFNPNISWQPIPVHTVPITEDRLLKFPLGPCPRYEQLQNETRQTPEYQNESSRNAQFLDMVANETGLTDLTLETVWNVYDTLFCEQTHGLRLPPWASPQTMQRLSRLKDFSFRFLFGIYQQAEKARLQGGVLLAQIRKNLTLMATTSQLPKLLVYSAHDTTLVALQMALDVYNGEQAPYASCHIFELYQEDSGNFSVEMYFRNESDKAPWPLSLPGCPHRCPLQDFLRLTEPVVPKDWQQECQLASGPADTEVIVALAVCGSILFLLIVLLLTVLFRMQAQPPGYRHVADGEDHA

SEQ ID NO: 591 - DNA, 3775 bp, Homo sapien
cattcataagactcagagctacggccacggcagggacacgcggaaccaagacttggaaacttgattgttgtggttcttcttgggggttatgaaatttcattaatcttttttttttccggggagaaagtttttggaaagattcttccagatatttcttcattttcttttggaggaccgacttactttttttggtcttctttattactcccctccccccgtgggacccgccggacgcgtggaggagaccgtagctgaagctgattctgtacagcgggacagcgctttctgcccctgggggagcaacccctccctcgcccctgggtcctacggagcctgcactttcaagaggtacagcggcatcctgtgggggcctgggcaccgcaggaagactgcacagaaactttgccattgttggaacgggacgttgctccttccccgagcttccccggacagcgtactttgaggactcgctcagctcaccggggactcccacggctcaccccggacttgcaccttacttccccaacccggccatagccttggcttcccggcgacctcagcgtggtcacaggggcccccctgtgcccagggaaatgtttcaggctttccccggagactacgactccggctcccggtgcagctcctcaccctctgccgagtctcaatatctgtcttcggtggactccttcggcagtccacccaccgccgcggcctcccaggagtgcgccggtctcggggaaatgcccggttccttcgtgcccacggtcaccgcgatcacaaccagccaggacctccagtggcttgtgcaacccaccctcatctcttccatggcccagtcccaggggcagccactggcctcccagcccccggtcgtcgacccctacgacatgccgggaaccagctactccacaccaggcatgagtggctacagcagtggcggagcgagtggcagtggtgggccttccaccagcggaactaccagtgggcctgggcctgcccgcccagcccgagcccggcctaggagaccccgagaggagacgctcaccccagaggaagaggagaagcgaagggtgcgccgggaacgaaataaactagcagcagctaaatgcaggaaccggcggagggagctgaccgaccgactccaggcggagacagatcagttggaggaagaaaaagcagagctggagtcggagatcgccgagctccaaaaggagaaggaacgtctggagtttgtgctggtggcccacaaaccgggctgcaagatcccctacgaagaggggcccgggccgggcccgctggcggaggtgagagatttgccgggctcagcaccggctaaggaagatggcttcagctggctgctgccgcccccgccaccaccgcccctgcccttccagaccagccaagacgcaccccccaacctgacggcttctctctttacacacagtgaagttcaagtcctcggcgaccccttccccgttgttaacccttcgtacacttcttcgtttgtcctcacctgcccggaggtctccgcgttcgccggcgcccaacgcaccagcggcagtgaccagccttccgatcccctgaactcgccctccctcctcgctcggtgaactctttagacacacaaaacaaacaaacacatgggggagagagacttggaagaggaggaggaggaggagaaggaggagagagaggggaagagacaaagtgggtgtgtggcctccctggctcctccgtctgaccctctgcggccactgcgccactgccatcggacaggaggattccttgtgttttgtcctgcctcttgtttctgtgccccggcgaggccggagagctggtgactttggggacagggggtgggaaggggatggacacccccagctgactgttggctctctgacgtcaacccaagctctggggatgggtggggaggggggcgggtgacgcccaccttcgggcagtcctgtgtgaggatgaagggacgggggtgggaggtaggctgtggggtgggctggagtcctctccagagaggctcaacaaggaaaaatgccactccctacccaatgtctcccacacccaccctttttttggggtgcccaggttggtttcccctgcactcccgaccttagcttattgatcccacatttccatggtgtgagatcctctttactctgggcagaagtgagcccccccttaaagggaattcgatgcccccctagaataatctcatccccccacccgacttcttttgaaatgtgaacgtccttccttgactgtctagccactccctcccagaaaaactggctctgattggaatttctggcctcctaaggctccccaccccgaaatcagcccccagccttgtttctgatgacagtgttatcccaagaccctgccccctgccagccgaccctcctggccttcctcgttgggccgctctgatttcaggcagcaggggctgctgtgatgccgtcctgctggagtgatttatactgtgaaatgagttggccagattgtggggtgcagctgggtggggcagcacacctctggggggataatgtccccactcccgaaagcctttcctcggtctcccttccgtccatcccccttcttcctcccctcaacagtgagttagactcaagggggtgacagaaccgagaagggggtgacagtcctccatccacgtggcctctctctctctcctcaggaccctcagccctggcctttttctttaaggtcccccgaccaatccccagcctaggacgccaacttctcccaccccttggcccctcacatcctctccaggaaggcagtgaggggctgtgacatttttccggagaagatttcagagctgaggctttggtacccccaaacccccaatatttttggactggcagactcaaggggctggaatctcatgattccatgcccgagtccgcccatccctgaccatggttttggctctcccaccccgccgttccctgcgcttcatctcatgaggatttctttatgaggcaaatttatattttttaatatcggggggtggaccacgccgccctccatccgtgctgcatgaaaaacattccacgtgccccttgtcgcgcgtctcccatcctgatcccagacccattccttagctatttatccctttcctggtttccgaaaggcaattatatctattatgtataagtaaatatattatatatggatgtgtgtgtgtgcgtgcgcgtgagtgtgtgagcgcttctgcagcctcggcctaggtcacgttggccctcaaagcgagccgttgaattggaaactgcttctagaaactctggctcagcctgtctcgggctgacccttttctgatcgtctcggcccctctgattgttcccgatggtctctctccctctgtcttttctcctccgcctgtgtccatctgaccgttttcacttgtctcctttctgactgtccctgccaatgctccagctgtcgtctgactctgggttcgttggggacatgagattttattttttgtgagtgagactgagggatcgtagatttttacaatctgtatctttgacaattctgggtgcgagtgtgagagtgtgagcagggcttgctcctgccaaccacaattcaatgaatccccgacccccctaccccatgctgtacttgtggttctctttttgtattttgcatctgaccccggggggctgggacagattggcaatgggccgtcccctctccccttggttctgcactgttgccaataaaaagctcttaaaaacgc

SEQ ID NO: 592 - protein, 338 aa, Homo sapien
MFQAFPGDYDSGSRCSSSPSAESQYLSSVDSFGSPPTAAASQECAGLGEMPGSFVPTVTAITTSQDLQWLVQPTLISSMAQSQGQPLASQPPVVDPYDMPGTSYSTPGMSGYSSGGASGSGGPSTSGTTSGPGPARPARARPRRPREETLTPEEEEKRRVRRERNKLAAAKCRNRRRELTDRLQAETDQLEEEKAELESEIAELQKEKERLEFVLVAHKPGCKIPYEEGPGPGPLAEVRDLPGSAPAKEDGFSWLLPPPPPPPLPFQTSQDAPPNLTASLFTHSEVQVLGDPFPVVNPSYTSSFVLTCPEVSAFAGAQRTSGSDQPSDPLNSPSLLAR

SEQ ID NO: 593 - DNA, 5398 bp, Homo sapien
cgtgcggcggtgggctggtcttccgcggccggcgttgcgccgcggcggagggtgggcgcgcggggagcgggatggagctggggcgacccttgctggaggtactggcctcagccctttctcccgcttccccacccctcttacccccagattacattctctgtgtggtgtctttactgcagatgaaggatttgggggcagagcacttggcaggtcatgaaggggtccaacttctcgggttgttgaacgtctacctggaacaagaagagagattccaacctcgagaaaaagggctgagtttgattgaggctaccccggagaatgataacactttgtgtccaggattgagaaatgccaaagttgaagatttaaggagtttagccaacttttttggatcttgcactgaaacttttgtcctggctgtcaatattttggacaggttcttggctcttatgaaggtgaaacctaaacatttgtcttgcattggagtctgttcttttttgctggctgctagaatagttgaagaagactgcaatattccatccactcatgatgtgatccggattagtcagtgtaaatgtactgcttctgacataaaacggatggaaaaaataatttcagaaaaattgcactatgaattggaagctactactgccttaaactttttgcacttataccatactattatactttgtcatacttcagaaaggaaagaaatactgagccttgataaactagaagctcagctgaaagcttgcaactgccgactcatcttttcaaaagcaaaaccatctgtattagccttgtgccttctcaatttggaagtggaaactttgaaatctgttgaattactggaaattctcttgctagttaaaaaacattccaagattaatgacactgagttcttctactggagagagttggtttctaaatgcctagccgagtattcttctcctgaatgttgcaaaccagatcttaagaagttggtttggatcgtttcaaggcgcacagcccagaacctccacaacagctactatagtgttcctgagctgccaacgatacctgaggggggttgttttgatgaaagtgaaagtgaggactcttgtgaagatatgagttgtggagaggagagtctcagcagctctcctcccagtgatcaagagtgcaccttctttttcaacttcaaagtggcacaaacactgtgctttccatcttagaaatctgattgttctgtcagaatttatatttacaggtttcaaagcaataaatgggggaataggtagtttcctggtttagcccccatctagtcaggaattaatatactggaatacctaccttctatttgttattcagatcagatctggcctattttcatatttatcctaagccatcaaatggggtagtgcctcttaaaccattaacagtactttagacattggcactttatttttctcgtagatctttagctactttggggaggagggaaggtgctgataccttcaatttgttacttttcaagatttttaaaaataactagtgtagcttatcttaaacattttataaaaccttcagatgtctttaagcagattggaagtatgcaagtgcttccttagcagggacagtggataatccttaatggtttatcatagatttcaccctccccccttctcagaagagtgagtatgctcttaaatgtcaaacacatttttgttgttttgttttttaaatgatcagtgtctatttgatgtgatgcagatcttataaatttgggaattataatattgacatttctgtgatttttatatatgtaatgtcttaattgagatttctgttaaggcagaaataattaggctagggctcttagttttcattcctattgcccaagtattgtcaaactatggtattattttaatgttactttaaaaatccataatctgctagttttgcatgtacttatatgaaaacagtgcagtaagttgaaaactcagtatctatggaattgataaatgttgatctggtgtagtatattttatcgcattttcttatattaaaaaatgtctgcatgattacattttatttcctttgtaatttacatttcagaatagtgtattgctatatgggtgccaagattgaatatgaagaacccgagtgtttgtagtattatagttttaagcaaatctgtgtggtgatacagccataagaatggggcttatataaactctgtacatgtaagattttgtacagagaatttttaactttataaattgtatatgaacatgtaaatcttttaaaatgtacataaaatactgtatttttttaccttgtgtgtgatagtctagtcattgcatgtaaatataatttattatgtattctgtagtataaatcatacattgatgacttacatttttactggtaagtcaacatccgttggatgttttctgaagtggctctttttgaagtgataatagattgtaattcaaaataaaattattaatgaattctccttgtttgggatcacatcttaatttttaatctgttaaaagttcttgatgtattttaatgagaagactttaggtgaggctacagtgattccagagtgagccttctaactggctagcagaagttctctaggtttggcatctgtgccttggagatactgaaagagaatctgtcatttgacaattgacctctttgtgggatggactcattaagtatgctctcagagactggtatattaccagaatgcctattaattttcagtgagaggcaacaggtattaagtagaacagaatgctcaggttggcagattagaacgatctttcaggagacaaagcaagttttaatcagttgtttggttaataagtatggggtgttcgctgtgatagggccccgccagcttctggctcttgtggacctcaaaagtatcaggtggttttgcaagtggtggtcctttcccctgccccaccccaataggttccccatctgtctagtttgatttttgtagacctttgttttctctagttagaaaatcaggtacactgaatatggttttcatgtaacacctcttctctggagataggggtatgttttcctacccttctagtggagaatcctacttgaggatgacctttcctctcttactaaataatattagtaaatagtgggcaatatattctgctttcagattttgatttgttgagatgtaaaagttgtttggggcttaccaaatctcaagactctctttagctcctgcaggattgtattgcttttcttactggatatttttcctgggtaagcatctttgtggcttcatctcttccccctgtggttttcagtgtatttagtcgagacctctctgctgagcttgcaacctgtttattcacatggcctgccatgccacttggaggtttctgattactcccaaacctgctggttctttatgtctttctcagcgaataattccatctgttcatgttggaaacttaggtgatatgctcatctccttttgcctgtttatggaggtcaccagcctctatcatttgtatgatttcgtttacactgtttatatctctctgtcccccctttttctgccattggcatggtttagacctgtactctttatcagcagaggtactgtaatatatttgtgatccctcagcttccaggcttactcctggtctctgccttcctatctacatatccttttaaaataaaattttaactatctcctgaaaaattgttgagtaggtcacgcacaatcaggagaaaaatctattcatgacatacaagtctctgtctaatctgaacactgcacctgtctctggcctttttttcttgtcatttcctagaccttaaaaaatgtgtattgagaaagaactctgttagctatacagaagatgaactgggcaatatagagtagcagcatggagaccagtctgactgaactaaggcagtggaagtgtggatgaggaagagaggtgaaaattgagaagcgctatcctttctctttgggcattattaggaggctcacagacaagtccaggagtctggttataccctcctgtgccattcaaccaggtggctttcccatgactgtgatgaataaaattgagaagcccctgcccttttcagagcagagggtgaggagaaagctaccattttgtcctcatccttacccccgttgacttggcgagagatttgacctttcaggttttgatcctgtcattttctaggatgtggtgcacgcactttgctgttgcgcatggtgaagtattgtgcctaggtcctgggtcttcatctgtttggctctgctactgtttcctcctcccaggaagtgtggttagacaaataatgtgttttaattacctgtcacactcaggattaatacatactcaggttaactgtagagaggcattggcttcagaacactcctcgtgacaattttaaccattttctttgtctagagtctgcctttttcttttttacaatttcttttatttcaacactaggtttcaatatggtgttcctgctacctcccacctccctcctccctcatcacacatgcaaattgtcagcttattgagacaacccacttagattcatatatggacaaggacaaggtattttgcatttgttactggaattcagttttcctaactatttactaccagaaatggtcaataacttactttgtggttagcaaatcaaattgtgtgatagatagtttcccagtatgatggccagtcagtctttccatccctgtgcctacatgctgctcttcccgtccacaagtggagtctgtttctcttgagttttggctggccttatgaatggctttgcttactgaagtgcagcagaagaaatttagtatatgtccaagcctaggctttaagagactggcagctttccttttatcctttttggaagctagccaccatgctgcaaagaagctcagctggattactgaaagatgagaggccatgtggagagagactcttgaggatgagagattatcttggatgttccagccttaagctcccagctgaatgtgggtgtatcctcagctacaccacagaaaacagaggaactactcagtcgatcccaatcaacccacagactcactagaaataacaaattattgttttaagccacgaggttttgggggagggttgttaaacagtaatagataagtgagacagattgcttgttatttatggtcaaatggtgattatctctggtgagattacaggtgatgttttttttaagttatgcctatctgtagtttcctttttttcctaaaattgatttgaattattagtgtattaacagaataaagaatgaactttaaaacacacacgctggttatatgcttcctctaattaaaattcatggctctcaccac

SEQ ID NO: 594 - protein, 403 aa, Homo sapien
CGGGLVFRGRRCAAAEGGRAGSGMELGRPLLEVLASALSPASPPLLPPDYILCVVSLLQMKDLGAEHLAGHEGVQLLGLLNVYLEQEERFQPREKGLSLIEATPENDNTLCPGLRNAKVEDLRSLANFFGSCTETFVLAVNILDRFLALMKVKPKHLSCIGVCSFLLAARIVEEDCNIPSTHDVIRISQCKCTASDIKRMEKIISEKLHYELEATTALNFLHLYHTIILCHTSERKEILSLDKLEAQLKACNCRLIFSKAKPSVLALCLLNLEVETLKSVELLEILLLVKKHSKINDTEFFYWRELVSKCLAEYSSPECCKPDLKKLVWIVSRRTAQNLHNSYYSVPELPTIPEGGCFDESESEDSCEDMSCGEESLSSSPPSDQECTFFFNFKVAQTLCFPS

SEQ ID NO: 595 - DNA, 2044 bp, Homo sapien
ccggtcggatgccggaccgggggcaccgctgaggcggtgggtccccgacctgcgagacaggtttggaagcccccgctgcgcccagtccgtgcggaccgcgaggccgcgggcgggtggaggcgcgtctccggcacgatgaaggatttgggggcagagcacttggcaggtcatgaaggggtccaacttctcgggttgttgaacgtctacctggaacaagaagagagattccaacctcgagaaaaagggctgagtttgattgaggctaccccggagaatgataacactttgtgtccaggattgagaaatgccaaagttgaagatttaaggagtttagccaacttttttggatcttgcactgaaacttttgtcctggctgtcaatattttggacaggttcttggctcttatgaaggtgaaacctaaacatttgtcttgcattggagtctgttcttttttgctggctgctagaatagttgaagaagactgcaatattccatccactcatgatgtgatccggattagtcagtgtaaatgtactgcttctgacataaaacggatggaaaaaataatttcagaaaaattgcactatgaattggaagctactactgccttaaactttttgcacttataccatactattatactttgtcatacttcagaaaggaaagaaatactgagccttgataaactagaagctcagctgaaagcttgcaactgccgactcatcttttcaaaagcaaaaccatctgtattagccttgtgccttctcaatttggaagtggaaactttgaaatctgttgaattactggaaattctcttgctagttaaaaaacattccaagattaatgacactgagttcttctactggagagagttggtttctaaatgcctagccgagtattcttctcctgaatgttgcaaaccagatcttaagaagttggtttggatcgtttcaaggcgcacagcccagaacctccacaacagctactatagtgttcctgagctgccaacgatacctgaggggggttgttttgatgaaagtgaaagtgaggactcttgtgaagatatgagttgtggagaggagagtctcagcagctctcctcccagtgatcaagagtgcaccttctttttcaacttcaaagtggcacaaacactgtgctttccatcttagaaatctgattgttctgtcagaatttatatttacagggtttcaaagcaataaatgggggaataggtagtttcctggtttagcccccatctagtcaggaattaatatactggaatacctaccttctatttgttattcagatcagatctggcctattttcatatttatcctaagccatcaaatggggtagtgcctcttaaaccattaacagtactttagacattggcactttatttttctcgtagatctttagctactttggggaggagggaaggtgctgataccttcaatttgttacttttcaagatttttaaaaataactagtgtagcttatcttaaacattttataaaaccttcagatgtctttaagcagattggaagtatgcaagtgcttccttagcagggacagtggataatccttaatggtttatcatagatttcaccctccccccttctcagaagagtgagtatgctcttaaatgtcaaacacatttttgttgttttgttttttaaatgatcagtgtctatttgatgtgatgcagatcttataaatttgggaattataatattgacatttctgtgatttttatatatgtaatgtcttaattgagatttgtgttaaggcagaaataattaggctagggctcttagttttcattcctattgccccaagtattgtcaaactatggtattattttaatgttactttaaaaatccataatctgctagttttgcatgtacttatatgaaaacagtgcagtaagttgaaaactcagtatctatggaattgataaatgttgatctggtgtagtatattttatccgcattttcttatattaaaaaatgttctgcatgattacattttatttgcctttgt

SEQ ID NO: 596 - protein, 344 aa, Homo sapien
MKDLGAEHLAGHEGVQLLGLLNVYLEQEERFQPREKGLSLIEATPENDNTLCPGLRNAKVEDLRSLANFFGSCTETFVLAVNILDRFLALMKVKPKHLSCIGVCSFLLAARIVEEDCNIPSTHDVIRISQCKCTASDIKRMEKIISEKLHYELEATTALNFLHLYHTIILCHTSERKEILSLDKLEAQLKACNCRLIFSKAKPSVLALCLLNLEVETLKSVELLEILLLVKKHSKINDTEFFYWRELVSKCLAEYSSPECCKPDLKKLVWIVSRRTAQNLHNSYYSVPELPTIPEGGCFDESESEDSCEDMSCGEESLSSSPPSDQECTFFFNFKVAQTLCFPS

SEQ ID NO: 597 - DNA, 3871 bp, Homo sapien
gcggattgttgctccgttgtacctgctggggaattcacctcgttactgcttgatatcttccaccccttacaaaatcagaaaagttgtgttttctaataccaaagaggaggtttggctttctgtgggtgattcccagacactgaagtgcaaagaagagaccctcctagaaaagtaaaatatgactaaaagcaatggagaagagcccaagatggggggcaggatggagagattccagcagggagtccgtaaacgcacacttttggccaagaagaaagtgcagaacattacaaaggaggatgttaaaagttacctgtttcggaatgcttttgtgctgctcacagtcaccgctgtcattgtgggtacaatccttggatttaccctccgaccatacagaatgagctaccgggaagtcaagtacttctcctttcctggggaacttctgatgaggatgttacagatgctggtcttaccacttatcatctccagtcttgtcacaggaatggcggcgctagatagtaaggcatcagggaagatgggaatgcgagctgtagtctattatatgactaccaccatcattgctgtggtgattggcataatcattgtcatcatcatccatcctgggaagggcacaaaggaaaacatgcacagagaaggcaaaattgtacgagtgacagctgcagatgccttcctggacttgatcaggaacatgttccctccaaatctggtagaagcctgctttaaacagtttaaaaccaactatgagaagagaagctttaaagtgcccatccaggccaacgaaacgcttgtgggtgctgtgataaacaatgtgtctgaggccatggagactcttacccgaatcacagaggagctggtcccagttccaggatctgtgaatggagtcaatgccctgggtctagttgtcttctccatgtgcttcggttttgtgattggaaacatgaaggaacaggggcaggccctgagagagttctttgattctcttaacgaagccatcatgagactggtagcagtaataatgtggtatgcccccgtgggtattctcttcctgattgctgggaagattgtggagatggaagacatgggtgtgattggggggcagcttgccatgtacaccgtgactgtcattgttggcttactcattcacgcagtcatcgtcttgccactcctctacttcttggtaacacggaaaaacccttgggtttttattggagggttgctgcaagcactcatcaccgctctggggacctcttcaagttctgccaccctacccatcaccttcaagtgcctggaagagaacaatggcgtggacaagcgcgtcaccagattcgtgctccccgtaggagccaccattaacatggatgggactgccctctatgaggctttggctgccattttcattgctcaagttaacaactttgaactgaacttcggacaaattattacaatcagcatcacagccacagctgccagtattggggcagctggaattcctcaggcgggcctggtcactatggtcattgtgctgacatctgtcggcctgcccactgacgacatcacgctcatcatcgcggtggactggttcctggatcgcctccggaccaccaccaacgtactgggagactccctgggagctgggattgtggagcacttgtcacgacatgaactgaagaacagagatgttgaaatgggtaactcagtgattgaagagaatgaaatgaagaaaccatatcaactgattgcacaggacaatgaaactgagaaacccatcgacagtgaaaccaagatgtagactaacataaagaaacactttcttgagcaccaggtgttaaaaaccattataaaatctttccatctcattacagctcattcgctccagcaagcccgtcatcttccctttcctcccttctgataagactggaaaatagtcctccaaaacacaagggaggattttgggtggccaaagtgtacaattttcatcccacaattgaaatttttaaatcatttcatgttagtcttaccgaataaggtaccaagatcacaaatagtgttgatcagatcttacaagtttatgtggcacacaattcctataaatgtgatttttttatataagttaaagagacaaatagtaggctaaaaacattttaaaatcaacttttgaaatttaaaaatctttcagaatacaattcagttttagtttcaaaatgttaacaacttgaattacaaccggttatcagttggacagtaagattttatccctttctcttctgactggtatacctatttcattagtagctaggtgcacatatacatctagcacagctgtgaggacagacagaaggcaaagtttccatgtggccttgagcaagtcccatctcacctctaggcctcagtgtcctcatctataaaatgagggacttccctagaagtcttcatggtctcttccagcccagacatcctgtgatgtcatgaaagcacctgccctctgtttcccctcagaacaccctgtaccatccatggagcacgaggccttcagaaaagacacttcaatgggagtgaacatttctaactaaggacaggatggctgtgtgtggtggtcaccaggtcctgtgagcaaagtgcaggttatgcaagtcgccaggcaggaggccattccaggagtgggattattcatcaaactctttgcccagttcatcccaatgggggaagtattcccttctttcctactctgggaagaatgtctcctgccactcctcaactgatgatagacttcgaaaacagatgagaagactagcagctagcaagggtgcttgtagtcacactgtggaacactaaagagctaggaaagagttgagcacaggcaacattacaaacaaaggatttgaaaacaccaagagtacaggtcttctttaaggaagaataaaaaagaagaggttcatttttctggctttttttttcacctgaaacactttttctcgagtccaaaatcattccccccgtgaagtctgcttaccaaaacataagacgacttatatatttgaaagaagtcaaatgaatgagctctctaatagaagtccatgagttgagtgggtatttcttatttgaaagtgtttttctttaatcaaaagtccttagaatgagggaaacaaaatatttatttgttttggaatcccacttatcaaatcattcaaaactttcagctggagtggggtttgcttttgttttgtttgtgtccataagagaaatggtagaagatgaatcagtatgaagacactgtcaatgaggttatgagaaaaaaacagcaggggcattagtttcaggcaaggcagctcccaggtttagagattaatttttaccccctaaggaatatccagtcaaagacgctgagtgggagctgtcaggcagtagcagctgtgtttgagtttctggctgaaaatggtgaagaatggacttaattatgctaacaaactgaaaaatctagacatagatcctctgatatacaattagagatatttttatatagaccccaagcattctgtgcataaaagttaacattaggctgtggtgcagtaaccatttaatgtcgaggctctatttcggaaatacactacaaatgttaaagtacgtggctgtcctcttaagacactagtagagcaaagacttaatcatatcaacttaattctgttacacaatatgtgttttttaatatactaaccatttcttatggaaaggtcctgtggggagcccatcctctcgccaagccatcacaggctctgcatacacatgcactcagtgtggactgggaagcattactttgtagatgtattttcaataaagaaaaaaatagttttacatt

SEQ ID NO: 598 - protein, 542 aa, Homo sapien
MTKSNGEEPKMGGRMERFQQGVRKRTLLAKKKVQNITKEDVKSYLFRNAFVLLTVTAVIVGTILGFTLRPYRMSYREVKYFSFPGELLMRMLQMLVLPLIISSLVTGMAALDSKASGKMGMRAVVYYMTTTIIAVVIGIIIVIIIHPGKGTKENMHREGKIVRVTAADAFLDLIRNMFPPNLVEACFKQFKTNYEKRSFKVPIQANETLVGAVINNVSEAMETLTRITEELVPVPGSVNGVNALGLVVFSMCFGFVIGNMKEQGQALREFFDSLNEAIMRLVAVIMWYAPVGILFLIAGKIVEMEDMGVIGGQLAMYTVTVIVGLLIHAVIVLPLLYFLVTRKNPWVFIGGLLQALITALGTSSSSATLPITFKCLEENNGVDKRVTRFVLPVGATINMDGTALYEALAAIFIAQVNNFELNFGQIITISITATAASIGAAGIPQAGLVTMVIVLTSVGLPTDDITLIIAVDWFLDRLRTTTNVLGDSLGAGIVEHLSRHELKNRDVEMGNSVIEENEMKKPYQLIAQDNETEKPIDSETKM

SEQ ID NO: 599 - DNA, 5780 bp, Homo sapien
ccaggcggcgttgcggccccggccccggctccctgcgccgccgccgccgccgccgccgccgccgccgccgccgccgccagcgctagcgccagcagccgggcccgatcacccgccgcccggtgcccgccgccgcccgcgccagcaaccgggcccgatcacccgccgcccggtgcccgccgccgcccgcgccaccggcatggcgctccggggcttctgcagcgccgatggctccgacccgctctgggactggaatgtcacgtggaataccagcaaccccgacttcaccaagtgctttcagaacacggtcctcgtgtgggtgccttgtttttacctctgggcctgtttccccttctacttcctctatctctcccgacatgaccgaggctacattcagatgacacctctcaacaaaaccaaaactgccttgggatttttgctgtggatcgtctgctgggcagacctcttctactctttctgggaaagaagtcggggcatattcctggccccagtgtttctggtcagcccaactctcttgggcatcaccacgctgcttgctacctttttaattcagctggagaggaggaagggagttcagtcttcagggatcatgctcactttctggctggtagccctagtgtgtgccctagccatcctgagatccaaaattatgacagccttaaaagaggatgcccaggtggacctgtttcgtgacatcactttctacgtctacttttccctcttactcattcagctcgtcttgtcctgtttctcagatcgctcacccctgttctcggaaaccatccacgaccctaatccctgcccagagtccagcgcttccttcctgtcgaggatcaccttctggtggatcacagggttgattgtccggggctaccgccagcccctggagggcagtgacctctggtccttaaacaaggaggacacgtcggaacaagtcgtgcctgttttggtaaagaactggaagaaggaatgcgccaagactaggaagcagccggtgaaggttgtgtactcctccaaggatcctgcccagccgaaagagagttccaaggtggatgcgaatgaggaggtggaggctttgatcgtcaagtccccacagaaggagtggaacccctctctgtttaaggtgttatacaagacctttgggccctacttcctcatgagcttcttcttcaaggccatccacgacctgatgatgttttccgggccgcagatcttaaagttgctcatcaagttcgtgaatgacacgaaggccccagactggcagggctacttctacaccgtgctgctgtttgtcactgcctgcctgcagaccctcgtgctgcaccagtacttccacatctgcttcgtcagtggcatgaggatcaagaccgctgtcattggggctgtctatcggaaggccctggtgatcaccaattcagccagaaaatcctccacggtcggggagattgtcaacctcatgtctgtggacgctcagaggttcatggacttggccacgtacattaacatgatctggtcagcccccctgcaagtcatccttgctctctacctcctgtggctgaatctgggcccttccgtcctggctggagtggcggtgatggtcctcatggtgcccgtcaatgctgtgatggcgatgaagaccaagacgtatcaggtggcccacatgaagagcaaagacaatcggatcaagctgatgaacgaaattctcaatgggatcaaagtgctaaagctttatgcctgggagctggcattcaaggacaaggtgctggccatcaggcaggaggagctgaaggtgctgaagaagtctgcctacctgtcagccgtgggcaccttcacctgggtctgcacgccctttctggcgagtgtctccctcaaacgcctgaggatctttctctcccatgaggagctggaacctgacagcatcgagcgacggcctgtcaaagacggcgggggcacgaacagcatcaccgtgaggaatgccacattcacctgggccaggagcgaccctcccacactgaatggcatcaccttctccatccccgaaggtgctttggtggccgtggtgggccaggtgggctgcggaaagtcgtccctgctctcagccctcttggctgagatggacaaagtggaggggcacgtggctatcaagggctccgtggcctatgtgccacagcaggcctggattcagaatgattctctccgagaaaacatcctttttggatgtcagctggaggaaccatattacaggtccgtgatacaggcctgtgccctcctcccagacctggaaatcctgcccagtggggatcggacagagattggcgagaagggcgtgaacctgtctgggggccagaagcagcgcgtgagcctggcccgggccgtgtactccaacgctgacatttacctcttcgatgatcccctctcagcagtggatgcccatgtgggaaaacacatctttgaaaatgtgattggccccaaggggatgctgaagaacaagacgcggatcttggtcacgcacagcatgagctacttgccgcaggtggacgtcatcatcgtcatgagtggcggcaagatctctgagatgggctcctaccaggagctgctggctcgagacggcgccttcgctgagttcctgcgtacctatgccagcacagagcaggagcaggatgcagaggagaacggggtcacgggcgtcagcggtccagggaaggaagcaaagcaaatggagaatggcatgctggtgacggacagtgcagggaagcaactgcagagacagctcagcagctcctcctcctatagtggggacatcagcaggcaccacaacagcaccgcagaactgcagaaagctgaggccaagaaggaggagacctggaagctgatggaggctgacaaggcgcagacagggcaggtcaagctttccgtgtactgggactacatgaaggccatcggactcttcatctccttcctcagcatcttccttttcatgtgtaaccatgtgtccgcgctggcttccaactattggctcagcctctggactgatgaccccatcgtcaacgggactcaggagcacacgaaagtccggctgagcgtctatggagccctgggcatttcacaagggatcgccgtgtttggctactccatggccgtgtccatcggggggatcttggcttcccgctgtctgcacgtggacctgctgcacagcatcctgcggtcacccatgagcttctttgagcggacccccagtgggaacctggtgaaccgcttctccaaggagctggacacagtggactccatgatcccggaggtcatcaagatgttcatgggctccctgttcaacgtcattggtgcctgcatcgttatcctgctggccacgcccatcgccgccatcatcatcccgccccttggcctcatctacttcttcgtccagaggttctacgtggcttcctcccggcagctgaagcgcctcgagtcggtcagccgctccccggtctattcccatttcaacgagaccttgctgggggtcagcgtcattcgagccttcgaggagcaggagcgcttcatccaccagagtgacctgaaggtggacgagaaccagaaggcctattaccccagcatcgtggccaacaggtggctggccgtgcggctggagtgtgtgggcaactgcatcgttctgtttgctgccctgtttgcggtgatctccaggcacagcctcagtgctggcttggtgggcctctcagtgtcttactcattgcaggtcaccacgtacttgaactggctggttcggatgtcatctgaaatggaaaccaacatcgtggccgtggagaggctcaaggagtattcagagactgagaaggaggcgccctggcaaatccaggagacagctccgcccagcagctggccccaggtgggccgagtggaattccggaactactgcctgcgctaccgagaggacctggacttcgttctcaggcacatcaatgtcacgatcaatgggggagaaaaggtcggcatcgtggggcggacgggagctgggaagtcgtccctgaccctgggcttatttcggatcaacgagtctgccgaaggagagatcatcatcgatggcatcaacatcgccaagatcggcctgcacgacctccgcttcaagatcaccatcatcccccaggaccctgttttgttttcgggttccctccgaatgaacctggacccattcagccagtactcggatgaagaagtctggacgtccctggagctggcccacctgaaggacttcgtgtcagcccttcctgacaagctagaccatgaatgtgcagaaggcggggagaacctcagtgtcgggcagcgccagcttgtgtgcctagcccgggccctgctgaggaagacgaagatccttgtgttggatgaggccacggcagccgtggacctggaaacggacgacctcatccagtccaccatccggacacagttcgaggactgcaccgtcctcaccatcgcccaccggctcaacaccatcatggactacacaagggtgatcgtcttggacaaaggagaaatccaggagtacggcgccccatcggacctcctgcagcagagaggtcttttctacagcatggccaaagacgccggcttggtgtgagccccagagctggcatatctggtcagaactgcagggcctatatgccagcgcccagggaggagtcagtacccctggtaaaccaagcctcccacactgaaaccaaaacataaaaaccaaacccagacaaccaaaacatattcaaagcagcagccaccgccatccggtcccctgcctggaactggctgtgaagacccaggagagacagagatgcgaaccacccaaaacacgcacaccctgcccctggtgccctgagacagacacacagcctcacgcccccaggaatgcaagtggtttcctggtgcttcccacggaggagttttggcagccagacttctggaggaattggttgtatagaagatcctagtgaccaaattcagcctactgcctcggatctctccagccgaagtctgtggactgcaagtctttgagatgcttctggctcccatcacctctaacatccttgtctgggtctaccaggaacgcttcatttccttggggctgcagttttgtggttgaggggcctggagaaaatcattttctccccttggcagtgtcccagggccctggatggtcctcttaccaacatctggtcttccaggcactcaaaagctgggaaccagcatctcagcgccagctctaccagttctcgttttgggccagaggcagcctctgcactcccacgcctgtcctcctggaagggacctggttggactaacggctaacctggacctggaactgtagggccaggggattgtctcagggccgacgttccacctggggcttccctccccacccaccccgactccaggctttcccttttttcttttgttcaacattgtaagaacaatcaatgctgttattactgatcccaccatgattgatgtggggtaaatattaaggagatggcctcatgggaatttgaccttgactagaaatagagactgagagtgagcaaccagctggaaggtactatgccagtcctagcagaaaaatgtgttaggggcctggcccaaagcagtgttggttgcttacagtgttgattgattttgttcttttttcttaccacctcttttctttccctctcatggtacctgctcatggttatgaagctttcaaagtaaagaacacgaaatac

SEQ ID NO: 600 - protein, 1482 aa, Homo sapien
MALRGFCSADGSDPLWDWNVTWNTSNPDFTKCFQNTVLVWVPCFYLWACFPFYFLYLSRHDRGYIQMTPLNKTKTALGFLLWIVCWADLFYSFWERSRGIFLAPVFLVSPTLLGITTLLATFLIQLERRKGVQSSGIMLTFWLVALVCALAILRSKIMTALKEDAQVDLFRDITFYVYFSLLLIQLVLSCFSDRSPLFSETIHDPNPCPESSASFLSRITFWWITGLIVRGYRQPLEGSDLWSLNKEDTSEQVVPVLVKNWKKECAKTRKQPVKVVYSSKDPAQPKESSKVDANEEVEALIVKSPQKEWNPSLFKVLYKTFGPYFLMSFFFKAIHDLMMFSGPQILKLLIKFVNDTKAPDWQGYFYTVLLFVTACLQTLVLHQYFHICFVSGMRIKTAVIGAVYRKALVITNSARKSSTVGEIVNLMSVDAQRFMDLATYINMIWSAPLQVILALYLLWLNLGPSVLAGVAVMVLMVPVNAVMAMKTKTYQVAHMKSKDNRIKLMNEILNGIKVLKLYAWELAFKDKVLAIRQEELKVLKKSAYLSAVGTFTWVCTPFLASVSLKRLRIFLSHEELEPDSIERRPVKDGGGTNSITVRNATFTWARSDPPTLNGITFSIPEGALVAVVGQVGCGKSSLLSALLAEMDKVEGHVAIKGSVAYVPQQAWIQNDSLRENILFGCQLEEPYYRSVIQACALLPDLEILPSGDRTEIGEKGVNLSGGQKQRVSLARAVYSNADIYLFDDPLSAVDAHVGKHIFENVIGPKGMLKNKTRILVTHSMSYLPQVDVIIVMSGGKISEMGSYQELLARDGAFAEFLRTYASTEQEQDAEENGVTGVSGPGKEAKQMENGMLVTDSAGKQLQRQLSSSSSYSGDISRHHNSTAELQKAEAKKEETWKLMEADKAQTGQVKLSVYWDYMKAIGLFISFLSIFLFMCNHVSALASNYWLSLWTDDPIVNGTQEHTKVRLSVYGALGISQGIAVFGYSMAVSIGGILASRCLHVDLLHSILRSPMSFFERTPSGNLVNRFSKELDTVDSMIPEVIKMFMGSLFNVIGACIVILLATPIAAIIIPPLGLIYFFVQRFYVASSRQLKRLESVSRSPVYSHFNETLLGVSVIRAFEEQERFIHQSDLKVDENQKAYYPSIVANRWLAVRLECVGNCIVLFAALFAVISRHSLSAGLVGLSVSYSLQVTTYLNWLVRMSSEMETNIVAVERLKEYSETEKEAPWQIQETAPPSSWPQVGRVEFRNYCLRYREDLDFVLRHINVTINGGEKVGIVGRTGAGKSSLTLGLFRINESAEGEIIIDGINIAKIGLHDLRFKITIIPQDPVLFSGSLRMNLDPFSQYSDEEVWTSLELAHLKDFVSALPDKLDHECAEGGENLSVGQRQLVCLARALLRKTKILVLDEATAAVDLETDDLIQSTIRTQFEDCTVLTIAHRLNTIMDYTRVIVLDKGEIQEYGAPSDLLQQRGLFYSMAKDAGLV

SEQ ID NO: 601 - DNA, 668 bp, Homo sapien
cggggacccggctgcggtggctgcgggactgacgagaaactactaaagttcctggggaagcaaagtagaatttcataagaacaaaatggatggagaggagaaaacctatggtggctgtgaaggacctgatgccatgtatgtcaaattgatatcatctgatggccatgaatttattgtaaaaagagaacatgcattaacatcaggcacgataaaagccatgttgagtggcccaggtcagtttgctgagaacgaaaccaatgaggtcaattttagagagataccttcacatgtgctatcgaaagtatgcatgtattttacgtacaaggttcgctacactaacagctccaccgagattcctgaattcccaattgcacctgaaattgcactggaactgctgatggctgcgaacttcttagattgttaaataaaataaattataataaactgttaactcttttcagtatttaatacctgtagttcagttagtaactttttcatatatagcatgttgcctgtatgcagttgaactatataaagttcattgcaaagcagattatcttgtttttttgcatagcaatcaaagttgaaatttgtttgctacatcaacaaattaaggacattttcacaaactgagaaataaacaaatatgccaattaaaaaaaaaaaaa

SEQ ID NO: 602 - protein, 112 aa, Homo sapien
MDGEEKTYGGCEGPDAMYVKLISSDGHEFIVKREHALTSGTIKAMLSGPGQFAENETNEVNFREIPSHVLSKVCMYFTYKVRYTNSSTEIPEFPIAPEIALELLMAANFLDC

SEQ ID NO: 603 - DNA, 3558 bp, Homo sapien
cagaccccagttcgccgactaagcagaagaaagatcaaaaaccggaaaagaggagaagagcaaacaggcactttgaggaacaatcccctttaactccaagccgacagcggtctaggaattcaagttcagtgcctaccgaagacaaaggcgccccgagggagtggcggtgcgaccccagggcgtgggcccggccgcggagcccacactgcccggctgacccggtggtctcggaccatgtctcccgccccaagacccccccgttgtctcctgctccccctgctcacgctcggcaccgcgctcgcctccctcggctcggcccaaagcagcagcttcagccccgaagcctggctacagcaatatggctacctgcctcccggggacctacgtacccacacacagcgctcaccccagtcactctcagcggccatcgctgccatgcagaagttttacggcttgcaagtaacaggcaaagctgatgcagacaccatgaaggccatgaggcgcccccgatgtggtgttccagacaagtttggggctgagatcaaggccaatgttcgaaggaagcgctacgccatccagggtctcaaatggcaacataatgaaatcactttctgcatccagaattacacccccaaggtgggcgagtatgccacatacgaggccattcgcaaggcgttccgcgtgtgggagagtgccacaccactgcgcttccgcgaggtgccctatgcctacatccgtgagggccatgagaagcaggccgacatcatgatcttctttgccgagggcttccatggcgacagcacgcccttcgatggtgagggcggcttcctggcccatgcctacttcccaggccccaacattggaggagacacccactttgactctgccgagccttggactgtcaggaatgaggatctgaatggaaatgacatcttcctggtggctgtgcacgagctgggccatgccctggggctcgagcattccagtgacccctcggccatcatggcacccttttaccagtggatggacacggagaattttgtgctgcccgatgatgaccgccggggcatccagcaactttatgggggtgagtcagggttccccaccaagatgccccctcaacccaggactacctcccggccttctgttcctgataaacccaaaaaccccacctatgggcccaacatctgtgacgggaactttgacaccgtggccatgctccgaggggagatgtttgtcttcaaggagcgctggttctggcgggtgaggaataaccaagtgatggatggatacccaatgcccattggccagttctggcggggcctgcctgcgtccatcaacactgcctacgagaggaaggatggcaaattcgtcttcttcaaaggagacaagcattgggtgtttgatgaggcgtccctggaacctggctaccccaagcacattaaggagctgggccgagggctgcctaccgacaagattgatgctgctctcttctggatgcccaatggaaagacctacttcttccgtggaaacaagtactaccgtttcaacgaagagctcagggcagtggatagcgagtaccccaagaacatcaaagtctgggaagggatccctgagtctcccagagggtcattcatgggcagcgatgaagtcttcacttacttctacaaggggaacaaatactggaaattcaacaaccagaagctgaaggtagaaccgggctaccccaagtcagccctgagggactggatgggctgcccatcgggaggccggccggatgaggggactgaggaggagacggaggtgatcatcattgaggtggacgaggagggcggcggggcggtgagcgcggctgccgtggtgctgcccgtgctgctgctgctcctggtgctggcggtgggccttgcagtcttcttcttcagacgccatgggacccccaggcgactgctctactgccagcgttccctgctggacaaggtctgacgcccaccgccggcccgcccactcctaccacaaggactttgcctctgaaggccagtggcagcaggtggtggtgggtgggctgctcccatcgtcccgagccccctccccgcagcctccttgcttctctctgtcccctggctggcctccttcaccctgaccgcctccctccctcctgccccggcattgcatcttccctagataggtcccctgagggctgagtgggagggcggccctttccagcctctgcccctcaggggaaccctgtagctttgtgtctgtccagccccatctgaatgtgttgggggctctgcacttgaaggcaggaccctcagacctcgctggtaaaggtcaaatggggtcatctgctccttttccatcccctgacataccttaacctctgaactctgacctcaggaggctctgggcactccagccctgaaagccccaggtgtacccaattggcagcctctcactactctttctggctaaaaggaatctaatcttgttgagggtagagaccctgagacagtgtgagggggtggggactgccaagccaccctaagaccttgggaggaaaactcagagagggtcttcgttgctcagtcagtcaagttcctcggagatctgcctctgcctcacctaccccagggaacttccaaggaaggagcctgagccactggggactaagtgggcagaagaaacccttggcagccctgtgcctctcgaatgttagccttggatggggctttcacagttagaagagctgaaaccaggggtgcagctgtcaggtagggtggggccggtgggagaggcccgggtcagagccctgggggtgagcctgaaggccacagagaaagaaccttgcccaaactcaggcagctggggctgaggcccaaaggcagaacagccagagggggcaggaggggaccaaaaaggaaaatgaggacgtgcagcagcattggaaggctggggccgggcaggccaggccaagccaagcagggggccacagggtgggctgtggagctctcaggaagggccctgaggaaggcacacttgctcctgttggtccctgtccttgctgcccaggcagcgtggaggggaagggtagggcagccagagaaaggagcagagaaggcacacaaacgaggaatgaggggcttcacgagaggccacagggcctggctggccacgctgtcccggcctgctcaccatctcagtgaggggcaggagctggggctcgcttaggctgggtccacgcttccctggtgccagcacccctcaagcctgtctcaccagtggcctgccctctcgctcccccacccagcccacccattgaagtctccttgggccaccaaaggtggtggccatggtaccggggacttgggagagtgagacccagtggagggagcaagaggagagggatgtcgggggggtggggcacggggtaggggaaatggggtgaacggtgctggcagttcggctagatttctgtcttgtttgtttttttgttttgtttaatgtatatttttattataattattatatatgaattccaaaaaaaaaaaaaaaaaaaaa

SEQ ID NO: 604 - protein, 582 aa, Homo sapien
MSPAPRPPRCLLLPLLTLGTALASLGSAQSSSFSPEAWLQQYGYLPPGDLRTHTQRSPQSLSAAIAAMQKFYGLQVTGKADADTMKAMRRPRCGVPDKFGAEIKANVRRKRYAIQGLKWQHNEITFCIQNYTPKVGEYATYEAIRKAFRVWESATPLRFREVPYAYIREGHEKQADIMIFFAEGFHGDSTPFDGEGGFLAHAYFPGPNIGGDTHFDSAEPWTVRNEDLNGNDIFLVAVHELGHALGLEHSSDPSAIMAPFYQWMDTENFVLPDDDRRGIQQLYGGESGFPTKMPPQPRTTSRPSVPDKPKNPTYGPNICDGNFDTVAMLRGEMFVFKERWFWRVRNNQVMDGYPMPIGQFWRGLPASINTAYERKDGKFVFFKGDKHWVFDEASLEPGYPKHIKELGRGLPTDKIDAALFWMPNGKTYFFRGNKYYRFNEELRAVDSEYPKNIKVWEGIPESPRGSFMGSDEVFTYFYKGNKYWKFNNQKLKVEPGYPKSALRDWMGCPSGGRPDEGTEEETEVIIIEVDEEGGGAVSAAAVVLPVLLLLLVLAVGLAVFFFRRHGTPRRLLYCQRSLLDKV

SEQ ID NO: 605 - DNA, 2007 bp, Homo sapien
gaattccgggctccggggatgaggtcgcggccggcgggtcccgcgctgttgctgctgctgctcttcctcggagcggccgagtcggtgcgtcgggcccagcctccgcgccgctacaccccagactggccgagcctggattctcggccgctgccggcctggttcgacgaagccaagttcggggtgttcatccactggggcgtgttctcggtgcccgcctggggcagcgagtggttctggtggcactggcagggcgaggggcggccgcagtaccagcgcttcatgcgcgacaactacccgcccggcttcagctacgccgacttcggaccgcagttcactgcgcgcttcttccacccggaggagtgggccgacctcttccaggccgcgggcgccaagtatgtagttttgacgacaaagcatcacgaaggcttcacaaactggccgagtcctgtgtcttggaactggaactccaaagacgtggggcctcatcgggatttggttggtgaattgggaacagctctccggaagaggaacatccgctatggactataccactcactcttagagtggttccatccactctatctacttgataagaaaaatggcttcaaaacacagcattttgtcagtgcaaaaacaatgccagagctgtacgaccttgttaacagctataaacctgatctgatctggtctgatggggagtgggaatgtcctgatacttactggaactccacaaattttctttcatggctctacaatgacagccctgtcaaggatgaggtggtagtaaatgaccgatggggtcagaactcttcctgtcaccatggaggatactataactgtgaagataaattcaagccacagagcttgccagatcacaagtgggagatgtgcaccagcattgacaagttttcctggggctatcgtcgtgacatggcattgtctgatgttacagaagaatctgaaatcatttcggaactggttcagacagtaagtttgggaggcaactatcttctgaacattggaccaactaaagatggactgattgttcccatcttccaagaaaggcttcttgctgttgggaaatggctgagcatcaatggggaggctatctatgcctccaaaccatggcgggtgcaatgggaaaagaacacaacatctgtatggtatacctcaaagggatcggctgtttatgccatttttctgcactggccagaaaatggagtcttaaaccttgaatcccccataactacctcaactacaaagataacaatgctgggaattcaaggagatctgaagtggtccacagatccagataaaggtctcttcatctctctaccccagttgccaccctctgctgtccccgcagagtttgcttggactataaagctgacaggagtgaagtaatcatttgagtgcaagaagaaagaggcgctgctcactgttttcctgcttcagtttttctcttatagtaccatcactataatcaacgaacttctcttctccacccagagatggcttttccaacacattttaattaaaggaactgagtacattaccctgatgtctaaatggaccaaagatctgagatccattgtgattatatctgtatcaggtcagcagaagaaggaactgagcagttgaactctgagttcatcaattctaatatttggaaattatctacaatggaatcttccctctgttctctgataacctacttgcttactcaatgcctttaagccaagtcaccctgttgcctatgggaggaggtggaaggatttggcaagctcaaccacatgctatttagttagcatcagttgtcaccaacagtctttctgcaaagggcaggagagctttgggggaaaggaaaaggcttaccaggctgctatggtcaactcttcagaaattttcagagcaatctaaaagcgccaaaattcgctatgtttacagtgatactattaagaaaatgaatgtgattctgctctgtctttttaagtatgatcaaataaa

SEQ ID NO: 606 - protein, 461 aa, Homo sapien
MRSRPAGPALLLLLLFLGAAESVRRAQPPRRYTPDWPSLDSRPLPAWFDEAKFGVFIHWGVFSVPAWGSEWFWWHWQGEGRPQYQRFMRDNYPPGFSYADFGPQFTARFFHPEEWADLFQAAGAKYVVLTTKHHEGFTNWPSPVSWNWNSKDVGPHRDLVGELGTALRKRNIRYGLYHSLLEWFHPLYLLDKKNGFKTQHFVSAKTMPELYDLVNSYKPDLIWSDGEWECPDTYWNSTNFLSWLYNDSPVKDEVVVNDRWGQNSSCHHGGYYNCEDKFKPQSLPDHKWEMCTSIDKFSWGYRRDMALSDVTEESEIISELVQTVSLGGNYLLNIGPTKDGLIVPIFQERLLAVGKWLSINGEAIYASKPWRVQWEKNTTSVWYTSKGSAVYAIFLHWPENGVLNLESPITTSTTKITMLGIQGDLKWSTDPDKGLFISLPQLPPSAVPAEFAWTIKLTGVK

SEQ ID NO: 607 - DNA, 2165 bp, Homo sapien
cccgccttccatacctccccggctccgctcggttcctggccaccccgcagcccctgcccaggtgccatggccgcattgtaccgccctggcctgcggcttaactggcatgggctgagccccttgggctggccatcatgccgtagcatccagaccctgcgagtgcttagtggagatctgggccagcttcccactggcattcgagattttgtagagcacagtgcccgcctgtgccaaccagagggcatccacatctgtgatggaactgaggctgagaatactgccacactgaccctgctggagcagcagggcctcatccgaaagctccccaagtacaataactgctggctggcccgcacagaccccaaggatgtggcacgagtagagagcaagacggtgattgtaactccttctcagcgggacacggtaccactcccgcctggtggggcctgtgggcagctgggcaactggatgtccccagctgatttccagcgagctgtggatgagaggtttccaggctgcatgcagggccgcaccatgtatgtgcttccattcagcatgggtcctgtgggctccccgctgtcccgcatcggggtgcagctcactgactcagcctatgtggtggcaagcatgcgtattatgacccgactggggacacctgtgcttcaggccctgggagatggtgactttgtcaagtgtctgcactccgtgggccagcccctgacaggacaaggggagccagtgagccagtggccgtgcaacccagagaaaaccctgattggccacgtgcccgaccagcgggagatcatctccttcggcagcggctatggtggcaactccctgctgggcaagaagtgctttgccctacgcatcgcctctcggctggcccgggatgagggctggctggcagagcacatgctgatcctgggcatcaccagccctgcagggaagaaggcgctatgtgcagccgccttccctagtgcctgtggcaagaccaacctggctatgatgcggcctgcactgccaggctggaaagtggagtgtgtgggggatgatattgcttggatgaggtttgacagtgaaggtcgactccgggccatcaaccctgagaacggcttctttggggttgcccctggtacctctgccaccaccaatcccaacgccatggctacaatccagagtaacactatttttaccaatgtggctgagaccagtgatggtggcgtgtactgggagggcattgaccagcctcttccacctggtgttactgtgacctcctggctgggcaaaccctggaaacctggtgacaaggagccctgtgcacatcccaactctcgattttgtgccccggctcgccagtgccccatcatggacccagcctgggaggccccagagggtgtccccattgacgccatcatctttggtggccgcagacccaaaggggtacccctggtatacgaggccttcaactggcgtcatggggtgtttgtgggcagagccatgcgctctgagtccactgctgcagcagaacacaaagggaagatcatcatgcacgacccatttgccatgcggcccttttttggctacaacttcgggcactacctggaacactggctgagcatggaagggcgcaagggggcccagctgccccgtatcttccatgtcaactggttccggcgtgacgaggcagggcacttcctgtggccaggctttggggagaatgctcgggtgctagactggatctgccggcggttagagggggaggacagtgcccgagagacacccattgggctggtgccaaaggaaggagccttggatctcagcggcctcagagctatagacaccactcagctgttctccctccccaaggacttctgggaacaggaggttcgtgacattcggagctacctgacagagcaggtcaaccaggatctgcccaaagaggtgttggctgagcttgaggccctggagagacgtgtgcacaaaatgtgacctgaggcctagtctagcaagaggacatagcaccctcatctgggaatagggaaggcaccttgcagaaaatatgagcaattgatattaactaacatcttcaatgtgccatagaccttcccacaaagactgtccaataataagagatgcttatctattttaaaaaaaaaaaaaaaaaa

SEQ ID NO: 608 - protein, 640 aa, Homo sapien
MAALYRPGLRLNWHGLSPLGWPSCRSIQTLRVLSGDLGQLPTGIRDFVEHSARLCQPEGIHICDGTEAENTATLTLLEQQGLIRKLPKYNNCWLARTDPKDVARVESKTVIVTPSQRDTVPLPPGGACGQLGNWMSPADFQRAVDERFPGCMQGRTMYVLPFSMGPVGSPLSRIGVQLTDSAYVVASMRIMTRLGTPVLQALGDGDFVKCLHSVGQPLTGQGEPVSQWPCNPEKTLIGHVPDQREIISFGSGYGGNSLLGKKCFALRIASRLARDEGWLAEHMLILGITSPAGKKALCAAAFPSACGKTNLAMMRPALPGWKVECVGDDIAWMRFDSEGRLRAINPENGFFGVAPGTSATTNPNAMATIQSNTIFTNVAETSDGGVYWEGIDQPLPPGVTVTSWLGKPWKPGDKEPCAHPNSRFCAPARQCPIMDPAWEAPEGVPIDAIIFGGRRPKGVPLVYEAFNWRHGVFVGRAMRSESTAAAEHKGKIIMHDPFAMRPFFGYNFGHYLEHWLSMEGRKGAQLPRIFHVNWFRRDEAGHFLWPGFGENARVLDWICRRLEGEDSARETPIGLVPKEGALDLSGLRAIDTTQLFSLPKDFWEQEVRDIRSYLTEQVNQDLPKEVLAELEALERRVHKM

SEQ ID NO: 609 - DNA, 1982 bp, Homo sapien
ggcgagaggcgggctgaggcggcccagcggcggcaggtgaggcggaaccaaccctcctggccatgggaggggccgtggtggacgagggccccacaggcgtcaaggcccctgacggcggctggggctgggccgtgctcttcggctgtttcgtcatcactggcttctcctacgccttccccaaggccgtcagtgtcttcttcaaggagctcatacaggagtttgggatcggctacagcgacacagcctggatctcctccatcctgctggccatgctctacgggacaggtccgctctgcagtgtgtgcgtgaaccgctttggctgccggcccgtcatgcttgtggggggtctctttgcgtcgctgggcatggtggctgcgtccttttgccggagcatcatccaggtctacctcaccactggggtcatcacggggttgggtttggcactcaacttccagccctcgctcatcatgctgaaccgctacttcagcaagcggcgccccatggccaacgggctggcggcagcaggtagccctgtcttcctgtgtgccctgagcccgctggggcagctgctgcaggaccgctacggctggcggggcggcttcctcatcctgggcggcctgctgctcaactgctgcgtgtgtgccgcactcatgaggcccctggtggtcacggcccagccgggctcggggccgccgcgaccctcccggcgcctgctagacctgagcgtcttccgggaccgcggctttgtgctttacgccgtggccgcctcggtcatggtgctggggctcttcgtcccgcccgtgttcgtggtgagctacgccaaggacctgggcgtgcccgacaccaaggccgccttcctgctcaccatcctgggcttcattgacatcttcgcgcggccggccgcgggcttcgtggcggggcttgggaaggtgcggccctactccgtctacctcttcagcttctccatgttcttcaacggcctcgcggacctggcgggctctacggcgggcgactacggcggcctcgtggtcttctgcatcttctttggcatctcctacggcatggtgggggccctgcagttcgaggtgctcatggccatcgtgggcacccacaagttctccagtgccattggcctggtgctgctgatggaggcggtggccgtgctcgtcgggcccccttcgggaggcaaactcctggatgcgacccacgtctacatgtacgtgttcatcctggcgggggccgaggtgctcacctcctccctgattttgctgctgggcaacttcttctgcattaggaagaagcccaaagagccacagcctgaggtggcggccgcggaggaggagaagctccacaagcctcctgcagactcgggggtggacttgcgggaggtggagcatttcctgaaggctgagcctgagaaaaacggggaggtggttcacaccccggaaacaagtgtctgagtggctgggcggggccggcaggcacagggaggaggtacagaagccggcaacgcttgctatttattttacaaactggactggctcaggcagggccacggctgggctccagctgccggcccagcggatcgtcgcccgatcagtgttttgagggggaaggtggcggggtgggaaccgtgtcattccagagtggatctgcggtgaagccaagccgcaaggttacaaggcatcctcaccaggggccccgcctgctgctcccaggtggcctgcggccactgctatgctcaaggacctggaaacccatgcttcgagacaacgtgactttaatgggagggtgggtgggccgcagacaggctggcagggcaggtgctgcgtggggccctctccagcccgtcctaccctgggctcacatggggcctgtgcccacccctcttgagtgtcttggggacagctctttccacccctggaagatggaaataaacctgcgtgtgggtggagtgttctcgtgccgaattcaaaaagctt

SEQ ID NO: 610 - protein, 465 aa, Homo sapien
MGGAVVDEGPTGVKAPDGGWGWAVLFGCFVITGFSYAFPKAVSVFFKELIQEFGIGYSDTAWISSILLAMLYGTGPLCSVCVNRFGCRPVMLVGGLFASLGMVAASFCRSIIQVYLTTGVITGLGLALNFQPSLIMLNRYFSKRRPMANGLAAAGSPVFLCALSPLGQLLQDRYGWRGGFLILGGLLLNCCVCAALMRPLVVTAQPGSGPPRPSRRLLDLSVFRDRGFVLYAVAASVMVLGLFVPPVFVVSYAKDLGVPDTKAAFLLTILGFIDIFARPAAGFVAGLGKVRPYSVYLFSFSMFFNGLADLAGSTAGDYGGLVVFCIFFGISYGMVGALQFEVLMAIVGTHKFSSAIGLVLLMEAVAVLVGPPSGGKLLDATHVYMYVFILAGAEVLTSSLILLLGNFFCIRKKPKEPQPEVAAAEEEKLHKPPADSGVDLREVEHFLKAEPEKNGEVVHTPETSV

SEQ ID NO: 611 - DNA, 1447 bp, Homo sapien
agtcctgctctccgcacgccaccttaggcccgcagccgtgccgggtgctcttcagcatgtccttcatcccggtggccgaggattccgacttccccatccacaacctgccctacggcgtcttctcgaccagaggcgacccaagaccgaggataggtgtggccattggcgaccagatcctggacctcagcatcatcaagcacctctttactggtcctgtcctctccaaacaccaggatgtcttcaatcagcctacactcaacagcttcatgggcctgggtcaggctgcctggaaggaggcgagagtgttcttgcagaacttgctgtctgtgagccaagccaggctcagagatgacaccgaacttcggaagtgtgcattcatctcccaggcttctgccacgatgcaccttccagccaccataggagactacacagacttctattcctctcggcagcatgctaccaacgtcggaatcatgttcagggacaaggagaatgcgttgatgccaaattggctgcacttaccagtgggctaccatggccgtgcctcctctgtcgtggtgtctggcaccccaatccgaaggcccatgggacagatgaaacctgatgactctaagcctcccgtatatggtgcctgcaagctcttggacatggagctggaaatggctttttttgtaggccctggaaacagattgggagagccgatccccatttccaaggcccatgagcacatttttggaatggtccttatgaacgactggagtgcacgagacattcagaagtgggagtatgtccctctcgggccattccttgggaagagttttgggaccactgtctctccgtgggtggtgcccatggatgctctcatgccctttgctgtgcccaacccgaagcaggaccccaggcccctgccgtatctgtgccatgacgagccctacacatttgacatcaacctctctgttaacctgaaaggagaaggaatgagccaggcggctaccatatgcaagtccaattttaagtacatgtactggacgatgctgcagcagctcactcaccactctgtcaacggctgcaacctgcggccgggggacctcctggcttctgggaccatcagcgggccggagccagaaaacttcggctccatgttggaactgtcgtggaagggaacgaagcccatagacctggggaatggtcagaccaggaagtttctgctggacggggatgaagtcatcataacagggtactgccagggggatggttaccgcatcggctttggccagtgtgctggaaaagtgctgcctgctctcctgccatcatgagattttctctgctcttctggaaacaaagggctcaagcacccctttcaaccctgtgactggggtcctccctcgggctgtaggcctggtccgccattcagtgacaaataaagccattgtgctctgaggcctgc

SEQ ID NO: 612 - protein, 419 aa, Homo sapien
MSFIPVAEDSDFPIHNLPYGVFSTRGDPRPRIGVAIGDQILDLSIIKHLFTGPVLSKHQDVFNQPTLNSFMGLGQAAWKEARVFLQNLLSVSQARLRDDTELRKCAFISQASATMHLPATIGDYTDFYSSRQHATNVGIMFRDKENALMPNWLHLPVGYHGRASSVVVSGTPIRRPMGQMKPDDSKPPVYGACKLLDMELEMAFFVGPGNRLGEPIPISKAHEHIFGMVLMNDWSARDIQKWEYVPLGPFLGKSFGTTVSPWVVPMDALMPFAVPNPKQDPRPLPYLCHDEPYTFDINLSVNLKGEGMSQAATICKSNFKYMYWTMLQQLTHHSVNGCNLRPGDLLASGTISGPEPENFGSMLELSWKGTKPIDLGNGQTRKFLLDGDEVIITGYCQGDGYRIGFGQCAGKVLPALLPS

SEQ ID NO: 613 - DNA, 3579 bp, Homo sapien
ctgaggcccacgcagggcctagggtgggaagatggcaggtgggggcggcgacctgagcaccaggaggctgaatgaatgtatttcaccagtagcaaatgagatgaaccatcttcctgcacacagccacgatttgcaaaggatgttcacggaagaccagggtgtagatgacaggctgctctatgacattgtattcaagcacttcaaaagaaataaggtggagatttcaaatgcaataaaaaagacatttccattcctcgagggcctccgtgatcgtgatctcatcacaaataaaatgtttgaagattctcaagattcttgtagaaacctggtccctgtacagagagtggtgtacaatgttcttagtgaactggagaagacatttaacctgccagttctggaagcactgttcagcgatgtcaacatgcaggaataccccgatttaattcacatttataaaggctttgaaaatgtaatccatgacaaattgcctctccaagaaagtgaagaagaagagagggaggagaggtctggcctccaactaagtcttgaacaaggaactggtgaaaactcttttcgaagcctgacttggccaccttcgggttccccatctcatgctggtacaaccccacctgaaaatggactctcagagcacccctgtgaaacagaacagataaatgcaaagagaaaagatacaaccagtgacaaagatgattcgctaggaagccaacaaacaaatgaacaatgtgctcaaaaggctgagccaacagagtcctgcgaacaaattgctgtccaagtgaataatggggatgctggaagggagatgccctgcccgttgccctgtgatgaagaaagcccagaggcagagctacacaaccatggaatccaaattaattcctgttctgtgcgactggtggatataaaaaaggaaaagccattttctaattcaaaagttgagtgccaagcccaagcaagaactcatcataaccaggcatctgacataatagtcatcagcagtgaggactctgaaggatccactgacgttgatgagcccttagaagtcttcatctcagcaccgagaagtgagcctgtgatcaataatgacaaccctttagaatcaaatgatgaaaaggagggccaagaagccacttgctcacgaccccagattgtaccagagcccatggatttcagaaaattatctacattcagagaaagttttaagaaaagagtgataggacaagaccacgacttttcagaatccagtgaggaggaggcgcccgcagaagcctcaagcggggcactgagaagcaagcatggtgagaaggctcctatgacttctagaagtacatctacttggagaatacccagcaggaagagacgtttcagcagtagtgacttttcagacctgagtaatggagaagagcttcaggaaacctgcagctcatccctaagaagagggtcaggatcacagccacaagaacctgaaaataagaagtgctcctgtgtcatgtgttttccaaaaggtgtgccaagaagccaagaagcaaggactgaaagtagtcaagcatctgacatgatggataccatggatgttgaaaacaattctactttggaaaaacacagtgggaaaagaagaaaaaagagaaggcatagatctaaagtaaatggtctccaaagagggagaaagaaagacagacctagaaaacatttaactctgaataacaaagtccaaaagaaaagatggcaacaaagaggaagaaaagccaacactagacctttgaaaagaagaagaaaaagaggtccaagaattcccaaagatgaaaatattaattttaaacaatctgaacttcctgtgacctgtggtgaggtgaagggcactctatataaggagcgattcaaacaaggaacctcaaagaagtgtatacagagtgaggataaaaagtggttcactcccagggaatttgaaattgaaggagaccgcggagcatccaagaactggaagctaagtatacgctgcggtggatataccctgaaagtcctgatggagaacaaatttctgccagaaccaccaagcacaagaaaaaagagaatactggaatctcacaacaataccttagttgacccttgtgaggagcataagaagaagaacccagatgcttcagtcaagttctcagagtttttaaagaagtgctcagagacatggaagaccatttttgctaaagagaaaggaaaatttgaagatatggcaaaggcggacaaggcccattatgaaagagaaatgaaaacctatatccctcctaaaggggagaaaaaaaagaagttcaaggatcccaatgcacccaagaggcctcctttggcctttttcctgttctgctctgagtatcgcccaaaaatcaaaggagaacatcctggcctgtccattgatgatgttgtgaagaaactggcagggatgtggaataacaccgctgcagctgacaagcagttttatgaaaagaaggctgcaaagctgaaggaaaaatacaaaaaggatattgctgcatatcgagctaaaggaaagcctaattcagcaaaaaagagagttgtcaaggctgaaaaaagcaagaaaaagaaggaagaggaagaagatgaagaggatgaacaagaggaggaaaatgaagaagatgatgataaataagttgcttctagtgcagtttttttcttgtctataaagcatttaagctgcctgtacacaactcactccttttaaagaaaaaaacttcaacgtaagactgtgtaagatttgtttttaaaccgtacactgtgtttttttgtatagttaaccactaccgaatgtgtcttcagatagccctgtcctggtggtatttagccactaacctttgcctggtacagtatgggggttgtaaattggcatggaaatttaaagcaggttcttgttagtgcacagcacaaattagttgtataggaggatggtagttttttcaccttcagttgtctctgatgtagcttatacaaaacatttgttgttctgttaactgaatgccactctgtaattgcaaaaaaaaaaaacagttgcagctgttttgttgacattctgaatgcttctaagtaaatacaatttttaaaaaaccgtatgagggaactgtgtagacaaggtaccaggtcagtcttcttccatgttctattagctccacaaagccaatctcaatccctcaaaacaatcttgtcatacttgaaaatatgacactctagtcaaagccttggtaaaataatcagtgtttccaatctgtcctgttacaaaagaaacagattattattgaacttatgcaaataaccattgtcataagaatgtttatgaatagtttccaaattatggcaaattcatgtagagagagaaaagtaactgttttggttttgctcacaaaagtctactttacctaagggctgtcagatataagtaacttaaaagaaagagaagttttcttgacttttgaaaacaaaatatgaaaagaatcggcaatgtttcaaacaaaaagtcataaaagtcactttattcctccatcaaaaaaaaaaaaaaaaaaaaaa

SEQ ID NO: 614 - protein, 879 aa, Homo sapien
MAGGGGDLSTRRLNECISPVANEMNHLPAHSHDLQRMFTEDQGVDDRLLYDIVFKHFKRNKVEISNAIKKTFPFLEGLRDRDLITNKMFEDSQDSCRNLVPVQRVVYNVLSELEKTFNLPVLEALFSDVNMQEYPDLIHIYKGFENVIHDKLPLQESEEEEREERSGLQLSLEQGTGENSFRSLTWPPSGSPSHAGTTPPENGLSEHPCETEQINAKRKDTTSDKDDSLGSQQTNEQCAQKAEPTESCEQIAVQVNNGDAGREMPCPLPCDEESPEAELHNHGIQINSCSVRLVDIKKEKPFSNSKVECQAQARTHHNQASDIIVISSEDSEGSTDVDEPLEVFISAPRSEPVINNDNPLESNDEKEGQEATCSRPQIVPEPMDFRKLSTFRESFKKRVIGQDHDFSESSEEEAPAEASSGALRSKHGEKAPMTSRSTSTWRIPSRKRRFSSSDFSDLSNGEELQETCSSSLRRGSGSQPQEPENKKCSCVMCFPKGVPRSQEARTESSQASDMMDTMDVENNSTLEKHSGKRRKKRRHRSKVNGLQRGRKKDRPRKHLTLNNKVQKKRWQQRGRKANTRPLKRRRKRGPRIPKDENINFKQSELPVTCGEVKGTLYKERFKQGTSKKCIQSEDKKWFTPREFEIEGDRGASKNWKLSIRCGGYTLKVLMENKFLPEPPSTRKKRILESHNNTLVDPCEEHKKKNPDASVKFSEFLKKCSETWKTIFAKEKGKFEDMAKADKAHYEREMKTYIPPKGEKKKKFKDPNAPKRPPLAFFLFCSEYRPKIKGEHPGLSIDDVVKKLAGMWNNTAAADKQFYEKKAAKLKEKYKKDIAAYRAKGKPNSAKKRVVKAEKSKKKKEEEEDEEDEQEEENEEDDDK

SEQ ID NO: 615 - DNA, 1590 bp, Homo sapien
gaggcagttctgttgccactctctctcctgtcaatgatggatctcagaaataccccagccaaatctctggacaagttcattgaagactatctcttgccagacacgtgtttccgcatgcaaatcgaccatgccattgacatcatctgtgggttcctgaaggaaaggtgcttccgaggtagctcctaccctgtgtgtgtgtccaaggtggtaaagggtggctcctcaggcaagggcaccaccctcagaggccgatctgacgctgacctggttgtcttcctcagtcctctcaccacttttcaggatcagttaaatcgccggggagagttcatccaggaaattaggagacagctggaagcctgtcaaagagagagagcactttccgtgaagtttgaggtccaggctccacgctggggcaacccccgtgcgctcagcttcgtactgagttcgctccagctcggggagggggtggagttcgatgtgctgcctgcctttgatgccctgggtcagttgactggcagctataaacctaacccccaaatctatgtcaagctcatcgaggagtgcaccgacctgcagaaagagggcgagttctccacctgcttcacagaactacagagagacttcctgaagcagcgccccaccaagctcaagagcctcatccgcctagtcaagcactggtaccaaaattgtaagaagaagcttgggaagctgccacctcagtatgccctggagctcctgacggtctatgcttgggagcgagggagcatgaaaacacatttcaacacagcccaaggatttcggacggtcttggaattagtcataaactaccagcaactctgcatctactggacaaagtattatgactttaaaaaccccattattgaaaagtacctgagaaggcagctcacgaaacccaggcctgtgatcctggacccggcggaccctacaggaaacttgggtggtggagacccaaagggttggaggcagctggcacaagaggctgaggcctggctgaattacccatgctttaagaattgggatgggtccccagtgagctcctggattctgctggctgaaagcaacagtacagacgatgagaccgacgatcccaggacgtatcagaaatatggttacattggaacacatgagtaccctcatttctctcatagacccagcacgctccaggcagcatccaccccacaggcagaagaggactggacctgcaccatcctctgaatgccagtgcatcttgggggaaagggctccagtgttatctggaccagttccttcattttcaggtgggactcttgatccagagaagacaaagctcctcagtgagctggtgtataatccaagacagaacccaagtctcctgactcctggccttctatgccctctatcctatcatagataacattctccacagcctcacttcattccacctattctctgaaaatattccctgagagagaacagagagatttagataagagaatgaaattccagccttgactttcttctgtgcacctgatgggagggtaatgtctaatgtattatcaataacaataaaaataaagcaaataccaaaaa

SEQ ID NO: 616 - protein, 400 aa, Homo sapien
MMDLRNTPAKSLDKFIEDYLLPDTCFRMQIDHAIDIICGFLKERCFRGSSYPVCVSKVVKGGSSGKGTTLRGRSDADLVVFLSPLTTFQDQLNRRGEFIQEIRRQLEACQRERALSVKFEVQAPRWGNPRALSFVLSSLQLGEGVEFDVLPAFDALGQLTGSYKPNPQIYVKLIEECTDLQKEGEFSTCFTELQRDFLKQRPTKLKSLIRLVKHWYQNCKKKLGKLPPQYALELLTVYAWERGSMKTHFNTAQGFRTVLELVINYQQLCIYWTKYYDFKNPIIEKYLRRQLTKPRPVILDPADPTGNLGGGDPKGWRQLAQEAEAWLNYPCFKNWDGSPVSSWILLAESNSTDDETDDPRTYQKYGYIGTHEYPHFSHRPSTLQAASTPQAEEDWTCTIL

SEQ ID NO: 617 - DNA, 1878 bp, Homo sapien
gggggggtagaggaagccgtgaggccggagcttaggtcgggaagggatggatcgctgagccgatagcgtccgctaggctgtctgcctcggtacctgttactgctgctacttcctcgtttgacaccttcctggaatctctcttgatttttgaggaaatacctagtaacaaacatgactgagttctggcttatatctgctcctggggagaaaacctgtcagcaaacatgggagaaattgcatgcggcaacttcaaagaacaataatcttgctgtcacttccaagttcaatattcctgacttaaaggttggcacgttggatgtcttggttggcttgtcagatgaactggctaaactggatgcatttgtagaaggagtggttaagaaagtagctcaatacatggctgatgtattggaagatagcaaagacaaagttcaagagaatctgttggctaatggagtggacttggttacttatataacaaggttccagtgggacatggccaaatatccaatcaagcagtccctgaaaaatatttctgaaataattgccaagggagtaactcagattgataatgacctgaaatctcgagcatctgcatacaataacctgaaaggaaatcttcagaatttggaacgaaagaatgcaggaagtttgctaactagaagtctagcagaaattgtgaagaaggatgactttgttcttgattcagagtatctcgtcacattactggtagtagttcccaagttaaaccacaacgactggattaagcagtatgaaacactagccgaaatggtagttccaaggtctagcaatgttctttcagaggaccaagacagttacctgtgtaatgtcaccttgtttaggaaggcagttgatgacttcagacacaaagccagagaaaacaaattcattgttcgtgacttccagtataatgaagaggagatgaaagcagataaagaagaaatgaacaggctttctactgataagaaaaaacaatttggaccacttgtacggtggctgaaagtgaattttagtgaagcatttattgcatggattcacgtgaaagcattacgggttttcgttgagtctgttttaaggtatggcttgccagtgaacttccaagcaatgctacttcagcccaataagaaaactttgaagaaactgagagaagtattacatgaattgtataaacatctagacagcagtgcagcagctattattgatgctcctatggatattccaggtttaaacctgagtcaacaagaatactacccctatgtgtactacaagattgattgcaacttgctggaattcaagtgaaaatgggctcctcccccgacaatcctgtccttgtgtttgtgtgtgctaacagaaataagttgcagtatggtcgtacttttaactctagtatcctttgcttgcttcttaccccctttcctaggtgaattctcccacagtggtctgtatctcaacattttctttttaaaggaaaaaatatatatatatagtttctttttattgatcaggtctgtaaatgtgtactaaaaaaatcagagtttatttataaacaaaatagtttatttaaagagaaggtctcttccttattgatatcatggtatgcattaattccatttgttactattgtgcacaaaagccctgttcacaggggaatggtgtaaacatttatactgttttgttcactgtatttagtagacataactgttgaatagttactgaatcatgatgtaaagaatatgtgaccatcttcaggtatgggatttctgaacgtttcaaatttcaatcaatgagcactgtcaacacccacaggagagaataaaattacctgtgcaaaaaaaaaaaaaaaaaaaaaaaaaaaaa

SEQ ID NO: 618 - protein, 382 aa, Homo sapien
MTEFWLISAPGEKTCQQTWEKLHAATSKNNNLAVTSKFNIPDLKVGTLDVLVGLSDELAKLDAFVEGVVKKVAQYMADVLEDSKDKVQENLLANGVDLVTYITRFQWDMAKYPIKQSLKNISEIIAKGVTQIDNDLKSRASAYNNLKGNLQNLERKNAGSLLTRSLAEIVKKDDFVLDSEYLVTLLVVVPKLNHNDWIKQYETLAEMVVPRSSNVLSEDQDSYLCNVTLFRKAVDDFRHKARENKFIVRDFQYNEEEMKADKEEMNRLSTDKKKQFGPLVRWLKVNFSEAFIAWIHVKALRVFVESVLRYGLPVNFQAMLLQPNKKTLKKLREVLHELYKHLDSSAAAIIDAPMDIPGLNLSQQEYYPYVYYKIDCNLLEFK

SEQ ID NO: 619 - DNA, 2149 bp, Homo sapien
gttctgtgttcgcttgggtagaggaagccgtgaggccggagcttaggtcgggaagggatggatcgctgagccgatagcgtccgctaggctgtctgcctcggtacctgttactgctgctacttcctcgtttgacaccttcctggaatctctcttgatttttgaggaaatacctagtaacaaacatgactgagttctggcttatatctgctcctggggagaaaacctgtcagcaaacatgggagaaattgcatgcggcaacttcaaagaacaataatcttgctgtcacttccaagttcaatattcctgacttaaaggttggcacgttggatgtcttggttggcttgtcagatgaactggctaaactggatgcatttgtagaaggagtggttaagaaagtagctcaatacatggctgatgtattggaagatagcaaagacaaagttcaagagaatctgttggctaatggagtggacttggttacttatataacaaggttccagtgggacatggccaaatatccaatcaagcagtccctgaaaaatatttctgaaataattgccaagggagtaactcagattgataatgacctgaaatctcgagcatctgcatacaataacctgaaaggaaatcttcagaatttggaacgaaagaatgcaggaagtttgctaactagaagtctagcagaaattgtgaagaaggatgactttgttcttgattcagagtatctcgtcacattactggtagtagttcccaagttaaaccacaacgactggattaagcagtatgaaacactagccgaaatggtagttccaaggtctagcaatgttctttcagaggaccaagacagttacctgtgtaatgtcaccttgtttaggaaggcagttgatgacttcagacacaaagccagagaaaacaaattcattgttcgtgacttccagtataatgaagaggagatgaaagcagataaagaagaaatgaacaggctttctactgataagaaaaaacaatttggaccacttgtacggtggctgaaagtgaattttagtgaagcatttattgcatggattcacgtgaaagcattacgggttttcgttgagtctgttttaaggtatggcttgccagtgaacttccaagcaatgctacttcagcccaataagaaaactttgaagaaactgagagaagtattacatgaattgtataaacatctagacagcagtgcagcagctattattgatgctcctatggatattccaggtttaaacctgagtcaacaagaatactacccctatgtgtactacaagattgattgcaacttgctggaattcaagtgaaaatgggctcctcccccgacaatcctgtccttgtgtttgtgtgtgctaacagaaataagttgcagtatggtcgtacttttaactctagtatcctttgcttgcttcttaccccctttcctaggtgaattctcccacagtggtctgtatctcaacattttctttttaaaggaaaaaatatatatatatagtttctttttattgatcaggtctgtaaatgtgtactaaaaaaatcagagtttatttataaacagaatagtttatttaaagagaaggtctcttccttattgatatcatggtatgcattaattccatttgttactattgtgcacaaaagccctgttcacaggggaatggtgtaaacatttatactgttttgttcactgtatttagtagacataactgttgaatagttactgaatcatgatgtaaagaatatgtgaccatcttcaggtatgggatttctgaacgtttcaaatttcaatcaatgagcactgtcaacacccacaggagagaataaaattacctgtgcaaaggtgtattgtggtgtgtgtaacttaagattacagttctgtttgagagttaaatgatgtcatagctcacttgctatgctgcttccaggattttgttatatgctgaggtgtaaccatttgtgttgtctgactttcgtatgatttaattgagccaaatttgggtcagaacacaaatttgaagatgacttttcagtatatgatgggtatttacatttgaacactagaattttaggtctctcaaataattaagaatagagccagttttgaataaagtctagcagaactatg

SEQ ID NO: 620 - protein, 382 aa, Homo sapien; identical to SEQ ID NO: 618

SEQ ID NO: 621 - DNA, 6699 bp, Homo sapien
aaagccctcagcctttgtgtccttctctgcgccggagtggctgcagctcacccctcagctccccttggggcccagctgggagccgagatagaagctcctgtcgccgctgggcttctcgcctcccgcagagggccacacagagaccgggatggccacctccatgggcctgctgctgctgctgctgctgctcctgacccagcccggggcggggacgggagctgacacggaggcggtggtctgcgtggggaccgcctgctacacggcccactcgggcaagctgagcgctgccgaggcccagaaccactgcaaccagaacgggggcaacctggccactgtgaagagcaaggaggaggcccagcacgtccagcgagtactggcccagctcctgaggcgggaggcagccctgacggcgaggatgagcaagttctggattgggctccagcgagagaagggcaagtgcctggaccctagtctgccgctgaagggcttcagctgggtgggcgggggggaggacacgccttactctaactggcacaaggagctccggaactcgtgcatctccaagcgctgtgtgtctctgctgctggacctgtcccagccgctccttcccaaccgcctgcccaagtggtctgagggcccctgtgggagcccaggctcccccggaagtaacattgagggcttcgtgtgcaagttcagcttcaaaggcatgtgccggcctctggccctggggggcccaggtcaggtgacctacaccacccccttccagaccaccagttcctccttggaggctgtgccctttgcctctgcggccaatgtagcctgtggggaaggtgacaaggacgagactcagagtcattatttcctgtgcaaggagaaggcccccgatgtgttcgactggggcagctcgggccccctctgtgtcagccccaagtatggctgcaacttcaacaatgggggctgccaccaggactgctttgaagggggggatggctccttcctctgcggctgccgaccaggattccggctgctggatgacctggtgacctgtgcctctcgaaacccttgcagctccagcccatgtcgtgggggggccacgtgcgtcctgggaccccatgggaaaaactacacgtgccgctgcccccaagggtaccagctggactcgagtcagctggactgtgtggacgtggatgaatgccaggactccccctgtgcccaggagtgtgtcaacacccctgggggcttccgctgcgaatgctgggttggctatgagccgggcggtcctggagagggggcctgtcaggatgtggatgagtgtgctctgggtcgctcgccttgcgcccagggctgcaccaacacagatggctcatttcactgctcctgtgaggagggctacgtcctggccggggaggacgggactcagtgccaggacgtggatgagtgtgtgggcccggggggccccctctgcgacagcttgtgcttcaacacacaagggtccttccactgtggctgcctgccaggctgggtgctggccccaaatggggtctcttgcaccatggggcctgtgtctctgggaccaccatctgggccccccgatgaggaggacaaaggagagaaagaagggagcaccgtgccccgcgctgcaacagccagtcccacaaggggccccgagggcacccccaaggctacacccaccacaagtagaccttcgctgtcatctgacgcccccatcacatctgccccactcaagatgctggcccccagtgggtcctcaggcgtctggagggagcccagcatccatcacgccacagctgcctctggcccccaggagcctgcaggtggggactcctccgtggccacacaaaacaacgatggcactgacgggcaaaagctgcttttattctacatcctaggcaccgtggtggccatcctactcctgctggccctggctctggggctactggtctatcgcaagcggagagcgaagagggaggagaagaaggagaagaagccccagaatgcggcagacagttactcctgggttccagagcgagctgagagcagggccatggagaaccagtacagtccgacacctgggacagactgctgaaagtgaggtggccctagagacactagagtcaccagccaccatcctcagagctttgaactccccattccaaaggggcacccacatttttttgaaagactggactggaatcttagcaaacaattgtaagtctcctccttaaaggccccttggaacatgcaggtattttctacgggtgtttgatgttcctgaagtggaagctgtgtgttggcgtgccacggtggggatttcgtgactctataatgattgttactccccctcccttttcaaattccaatgtgaccaattccggatcagggtgtgaggaggctggggctaaggggctcccctgaatatcttctctgctcacttccaccatctaagaggaaaaggtgagttgctcatgctgattaggattgaaatgatttgtttctcttcctaggatgaaaactaaatcaattaattattcaattaggtaagaagatctggttttttggtcaaagggaacatgttcggactggaaacatttctttacatttgcattcctccatttcgccagcacaagtcttgctaaatgtgatactgttgacatcctccagaatggccagaagtgcaattaacctcttaggtggcaaggaggcaggaagtgcctctttagttcttacatttctaatagccttgggtttatttgcaaaggaagcttgaaaaatatgagaaaagttgcttgaagtgcattacaggtgtttgtgaagtcacataatctacggggctagggcgagagaggccagggatttgttcacagatacttgaattaattcatccaaatgtactgaggttaccacacacttgactacggatgtgatcaacactaacaaggaaacaaattcaaggacaacctgtctttgagccagggcaggcctcagacaccctgcctgtggccccgcctccacttcatcctgcccggaatgccagtgctccgagctcagacagaggaagccctgcagaaagttccatcaggctgtttcctaaaggatgtgtgaacgggagatgatgcactgtgttttgaaagttgtcattttaaagcattttagcacagttcatagtccacagttgatgcagcatcctgagattttaaatcctgaagtgtgggtggcgcacacaccaagtagggagctagtcaggcagtttgcttaaggaacttttgttctctgtctcttttccttaaaattgggggtaaggagggaaggaagagggaaagagatgactaactaaaatcatttttacagcaaaaactgctcaaagccatttaaattatatcctcattttaaaagttacatttgcaaatatttctccctatgataatgcagtcgatagtgtgcactctttctctctctctctctctctcacacacacacacacacacacacacacacacacagagacacggcaccattctgcctggggcactggaacacattcctgggggtcaccgatggtcagagtcactagaagttacctgagtatctctgggaggcctcatgtctcctgtgggctttttaccaccactgtgcaggagaacagacagaggaaatgtgtctccctccaaggccccaaagcctcagagaaagggtgtttctggttttgccttagcaatgcatcggtctctgaggtgacactctggagtggttgaagggccacaaggtgcagggttaatactcttgccagttttgaaatatagatgctatggttcagattgtttttaatagaaaactaaaggggcaggggaagtgaaaggaaagatggaggttttgtgcggctcgatggggcatttggaacttctttttaaagtcatctcatggtctccagttttcagttggaactctggtgtttaacacttaagggagacaaaggctgtgtccatttggcaaaacttccttggccacgagactctaggtgatgtgtgaagctgggcagtctgtggtgtggagagcagccatctgtctggccattcagaggattctaaagacatggctggatgcgctgctgaccaacatcagcacttaaataaatgcaaatgcaacatttctccctctgggccttgaaaatccttgcccttatcatttggggtgaaggagacatttctgtccttggcttcccacagccccaacgcagtctgtgtatgattcctgggatccaacgagccctcctattttcacagtgttctgattgctctcacagcccaggcccatcgtctgttctctgaatgcagccctgttctcaacaacagggaggtcatggaacccctctgtggaacccacaaggggagaaatgggtgataaagaatccagttcctcaaaaccttccctggcaggctgggtccctctcctgctgggtggtgctttctcttgcacaccactcccaccacggggggagagccagcaacccaaccagacagctcaggttgtgcatctgatggaaaccactgggctcaaacacgtgctttattctcctgtttatttttgctgttactttgaagcatggaaattcttgtttgggggatcttggggctacagtagtgggtaaacaaatgcccaccggccaagaggccattaacaaatcgtccttgtcctgaggggccccagcttgctcgggcgtggcacagtggggaatccaagggtcacagtatggggagaggtgcaccctgccacctgctaacttctcgctagacacagtgtttctgcccaggtgacctgttcagcagcagaacaagccagggccatggggacgggggaagttttcacttggagatggacaccaagacaatgaagatttgttgtccaaataggtcaataattctgggagactcttggaaaaaactgaatatattcaggaccaactctctccctcccctcatcccacatctcaaagcagacaatgtaaagagagaacatctcacacacccagctcgccatgcctactcattcctgaatttcaggtgccatcactgctctttctttcttctttgtcatttgagaaaggatgcaggaggacaattcccacagataatctgaggaatgcagaaaaaccagggcaggacagttatcgacaatgcattagaacttggtgagcatcctctgtagagggactccacccctgctcaacagcttggcttccaggcaagaccaaccacatctggtctctgccttcggtggcccacacacctaagcgtcatcgtcattgccatagcatcatgatgcaacacatctacgtgtagcactacgacgttatgtttgggtaatgtggggatgaactgcatgaggctctgattaaggatgtggggaagtgggctgcggtcactgtcggccttgcaaggccacctggaggcctgtctgttagccagtggtggaggagcaaggcttcaggaagggccagccacatgccatcttccctgcgatcaggcaaaaaagtggaattaaaaagtcaaacctttatatgcatgtgttatgtccattttgcaggatgaactgagtttaaaagaatttttttttctcttcaagttgctttgtcttttccatcctcatcacaagcccttgtttgagtgtcttatccctgagcaatctttcgatggatggagatgatcattaggtacttttgtttcaacctttattcctgtaaatatttctgtgaaaactaggagaacagagatgagatttgacaaaaaaaaattgaattaaaaataacacagtctttttaaaactaacataggaaagcctttcctattatttctcttcttagcttctccattgtctaaatcaggaaaacaggaaaacacagctttctagcagctgcaaaatggtttaatgccccctacatatttccatcaccttgaacaatagctttagcttgggaatctgagatatgatcccagaaaacatctgtctctacttcggctgcaaaacccatggtttaaatctatatggtttgtgcattttctcaactaaaaatagagatgataatccgaattctccatatattcactaatcaaagacactattttcatactagattcctgagacaaatactcactgaagggcttgtttaaaaataaattgtgttttggtctgttcttgtagataatgcccttctattttaggtagaagctctggaatccctttattgtgctgttgctcttatctgcaaggtggcaagcagttcttttcagcagattttgcccactattcctctgagctgaagttctttgcatagatttggcttaagcttgaattagatccctgcaaaggcttgctctgtgatgtcagatgtaattgtaaatgtcagtaatcacttcatgaatgctaaatgagaatgtaagtatttttaaatgtgtgtatttcaaatttgtttgactaattctggaattacaagatttctatgcaggatttaccttcatcctgtgcatgtttcccaaactgtgaggagggaaggctcagagatcgagcttctcctctgagttctaacaaaatggtgctttgagggtcagcctttaggaaggtgcagctttgttgtcctttgagctttctgttatgtgcctatcctaataaactcttaaacacatt

SEQ ID NO: 622 - protein, 652 aa, Homo sapien
MATSMGLLLLLLLLLTQPGAGTGADTEAVVCVGTACYTAHSGKLSAAEAQNHCNQNGGNLATVKSKEEAQHVQRVLAQLLRREAALTARMSKFWIGLQREKGKCLDPSLPLKGFSWVGGGEDTPYSNWHKELRNSCISKRCVSLLLDLSQPLLPNRLPKWSEGPCGSPGSPGSNIEGFVCKFSFKGMCRPLALGGPGQVTYTTPFQTTSSSLEAVPFASAANVACGEGDKDETQSHYFLCKEKAPDVFDWGSSGPLCVSPKYGCNFNNGGCHQDCFEGGDGSFLCGCRPGFRLLDDLVTCASRNPCSSSPCRGGATCVLGPHGKNYTCRCPQGYQLDSSQLDCVDVDECQDSPCAQECVNTPGGFRCECWVGYEPGGPGEGACQDVDECALGRSPCAQGCTNTDGSFHCSCEEGYVLAGEDGTQCQDVDECVGPGGPLCDSLCFNTQGSFHCGCLPGWVLAPNGVSCTMGPVSLGPPSGPPDEEDKGEKEGSTVPRAATASPTRGPEGTPKATPTTSRPSLSSDAPITSAPLKMLAPSGSSGVWREPSIHHATAASGPQEPAGGDSSVATQNNDGTDGQKLLLFYILGTVVAILLLLALALGLLVYRKRRAKREEKKEKKPQNAADSYSWVPERAESRAMENQYSPTPGTDC

SEQ ID NO: 623 - DNA, 4185 bp, Homo sapien
tgcctctgctgaggtgatctggcgcagagcggaggaggtgcttggcgcttctcaggctcctcctctccccttgcggcctttctaacgttggccctgctcttgtggcctcccgcagaatgtggatgacgcccaaaagaagcaagatggaagtcgacgaggctctagttttccggcccgagtggacccagcgttatttggtggtggagcctccggagggcgatggggccctgtgcctggtctgtcgccgcctcatcgtagctacccgcgaacgcgacgtcaggcgccactacgaggctgagcacgaatactacgagcggtatgtggcggacggcgagcgcgcggccctggtggagcgtctgcgtcagggcgacttgcccgtggcctccttcactcctgaagagagagctgctcgtgcaggcctcgggctctgccgcctcttggccttgaagggtcgcggctggggtgagggggactttgtataccagtgcatggaggtgttgctgagagaggtactgcccgagcatgtaagcgtcctgcaaggcgttgacttatctccagatatcacaaggcagaggatcctgagcattgacaggaatctacgcaaccagctttttaaccgagccagggactttaaagcctattctcttgccttggacgaccaggcttttgtggcctatgagaactacctcctggtctttatccgcggtgtaggccctgagttggaggtgcaagaagatcttctgaccataatcaacctgactcatcatttcagtgttggtgcgctcatgtcggcaatcctagagtccctgcagacagcagggcttagcttgcagagaatggttggactgaccacgacccatactttgaggatgattggtgagaactcaggactcgtctcatacatgagagaaaaggccgtaagccccaactgttggaatgtcattcattattcaggatttcttcacttggaactgttgagctcctatgatgtagatgttaatcagatcataaataccatatccgaatggatagttttgattaagaccagaggcgttaggcgacctgaatttcagactttactaacggaatctgaatcagagcatggtgaaagggttaatggacgatgtctgaacaattggcttaggagagggaaaactttaaaactaatattctctctaagaaaagaaatggaagcgttcttggtttcagtaggggcaacaacagtccacttctcagacaaacaatggctttgtgactttggcttcttggtggacattatggaacaccttcgagaactcagtgaagaattacgagttagtaaagtctttgctgctgctgcctttgaccatatttgtactttcgaagttaagctgaatttatttcaaagacatattgaggaaaaaaatctaacagactttcctgccctcagagaagttgttgatgagctaaaacagcaaaataaggaagatgaaaaaatatttgatcctgataggtatcaaatggtgatctgtcgtctccaaaaagaatttgagagacattttaaggacctcaggttcattaaaaaggacttagaacttttttcaaatccatttaactttaaacctgaatatgcacctatttcagtgagggtggagctaacaaaacttcaggcaaacactaatctttggaatgaatacagaatcaaagacttggggcagttttatgctggattgtctgctgaatcctacccaattatcaaaggggttgcctgtaaggtggcatccttgtttgatagtaaccaaatctgtgaaaaggctttttcatatttgactcgaaaccaacacactttgagtcagccattaacagatgagcatctccaagccctgtttcgggttgccacaactgaaatggagcccggttgggatgaccttgtgagagaaagaaatgaatctaatccataaggctttgtagtacaagattgaaaaactcaacaagaatttaattctaaaagcaaaaattggtttgagttttcaagtttactaatttggattgtgagaaagtaccaagtaccagccgtccaaactgatcacaattaaaattctgacagttgccttttttttcatctcaaatggcagcatgggactgaaacatgagaatgccaccttttttaaaacttagtttagtgacaaagtcattgtcttttatgatatagttaattttaaagagatttagtattaatgtgagttgaatttgcagtctgttttttaggtgttctgaagataaatgccaaaaatttcagctcttattttaatggagtgttaaaattctgattcatgtagtcttaaattatcaactccttaaatgtgcttttgaaccaatttgcagaagctcacatagcaagttcataaggttccaaaaaggaagcccatacataacagtggaggtgttttgtctaaccatcaaaatgtttgagacttttttttaaacatttctgagttcgaaggtaatactgacagatttcttccctcttccctccccatcacccacctcagtgataacacattactgatagaggaagtcattagaatcatttttaagtttcagatataggagacttcatgcaatttggagataagactaattattgggggttttccttggattttttttttaataactgggggctattttatcagcttgcctattaaaggactatggtaagtatagaatcttaatggttgccagttagtaattctttttttttttttttactgtagacacaagtttggccctatcaaaaacgatgaggaaaaaagattgcactccaggattaggaggtgtgagatattttagcttttttgtcttatctgcgtgggtattgctgctttattttaaaaaatcctgcctaaagtaaacactttgttttaaaatgatacagtatcagattttgttagatgctagaaatggatttattctaaaatttggaactgtcgtacacattctatatgtaagatagcacacaagtagaaatatttaaaagcagtcttattcacagattgcagtaattctgtatttctactaagataatctgctttgtgccaaaacagtaatttccaaacttctgttcaccatgaaaaggcaatcttaaagttcattatgtaaaactaattataaacaggacccaatttatattcatagatcctctcaagtattatacaatttaaaaactcttgttccaaagtcctgtcttaactattgaaacaccttaatctgtggttactaatccagcaaattcaaggaaccaggctatgactaagaatttaggtggaattgatgtctgggcaattaaaataaatggcataagagcttaaaaaccaaagttgtgccagtggctttcaactagaggcagtaacctgtcattccagaggatgctgagaaatgtgtaggggcacttttttggttgtcatatttactaggggcttctgttggcatttaagcctaaagacactcacccctgcagtgcatgggacagcctggcacaatgaagaattagccctcccaaaatgtagattattttatttcaagggatagggcagattaccattagaagcaaaattaaaagtacaagctgggcaaactgacagaatactagataggagagactaattccaaccttctaaatttggctagtaaagtgcaataaaggcattgataagttctgttagctcaccatagcacttgtaaatcaggaattaataattgaatcagatttaagggctctgtcctgttatacatatttaaggcagaaaaaaagttacatgtcgattaggtacttatcaagaatggtcaagctgagattttggttaatagagtaagcttacatatctagagaaacaacatagtggaaaaccgaaaaaaaaaaacagaaaaatctaccggtaatttcccagtagctttgaatattcacagcagagctttattacttgagagaaagactggaagacctgaaagccacttctgctttctaaccccagttccttaaatattgaaatcttgtacattttgtgaaattccagtatgttttgcttaaggtgttaataaaattagtttgcatcatgtagtcattgagtgagggggagatataagccaaggattttaaattgacccttagctatagagaatttgctataagctagtcttgtttgt

SEQ ID NO: 624 - protein, 607 aa, Homo sapien
MWMTPKRSKMEVDEALVFRPEWTQRYLVVEPPEGDGALCLVCRRLIVATRERDVRRHYEAEHEYYERYVADGERAALVERLRQGDLPVASFTPEERAARAGLGLCRLLALKGRGWGEGDFVYQCMEVLLREVLPEHVSVLQGVDLSPDITRQRILSIDRNLRNQLFNRARDFKAYSLALDDQAFVAYENYLLVFIRGVGPELEVQEDLLTIINLTHHFSVGALMSAILESLQTAGLSLQRMVGLTTTHTLRMIGENSGLVSYMREKAVSPNCWNVIHYSGFLHLELLSSYDVDVNQIINTISEWIVLIKTRGVRRPEFQTLLTESESEHGERVNGRCLNNWLRRGKTLKLIFSLRKEMEAFLVSVGATTVHFSDKQWLCDFGFLVDIMEHLRELSEELRVSKVFAAAAFDHICTFEVKLNLFQRHIEEKNLTDFPALREVVDELKQQNKEDEKIFDPDRYQMVICRLQKEFERHFKDLRFIKKDLELFSNPFNFKPEYAPISVRVELTKLQANTNLWNEYRIKDLGQFYAGLSAESYPIIKGVACKVASLFDSNQICEKAFSYLTRNQHTLSQPLTDEHLQALFRVATTEMEPGWDDLVRERNESNP

SEQ ID NO: 625 - DNA, 428 bp, Homo sapien
atgtctcttgtcagctgtctttcagaagacctggtggggcaagtccgtgggcatcatgttgaccgagctggagaaagccttgaactctatcatcgacgtctaccacaagtactccctgataaaggggaatttccatgccgtctacagggatgacctgaagaaattgctagagaccgagtgtcctcagtatatcaggaaaaagggtgcagacgtctggttcaaagagttggatatcaacactgatggtgcagttaacttccaggagttcctcattctggtgataaagatgggcgtggcagcccacaaaaaaagccatgaagaaagccacaaagagtagctgagttactgggcccagaggctgggcccctggacatgtacctgcagaataataaagtcatcaatacctcaaaaaaaaaaaaaaaaaaaaa

SEQ ID NO: 626 - protein, 93 aa, Homo sapien
MLTELEKALNSIIDVYHKYSLIKGNFHAVYRDDLKKLLETECPQYIRKKGADVWFKELDINTDGAVNFQEFLILVIKMGVAAHKKSHEESHKE

SEQ ID NO: 627 - DNA, 2634 bp, Homo sapien
ggcacgaggctgagtgtccgtctcgcgcccggaagcgggcgaccgccgtcagcccggaggaggaggaggaggaggaggaggagggggcggccatggggctgctgtcccagggctcgccgctgagctgggaggaaaccaagcgccatgccgaccacgtgcggcggcacgggatcctccagttcctgcacatctaccacgccgtcaaggaccggcacaaggacgttctcaagtggggcgatgaggtggaatacatgttggtatcttttgatcatgaaaataaaaaagtccggttggtcctgtctggggagaaagttcttgaaactctgcaagagaagggggaaaggacaaacccaaaccatcctaccctttggagaccagagtatgggagttacatgattgaagggacaccaggacagccctacggaggaacaatgtccgagttcaatacagttgaggccaacatgcgaaaacgccggaaggaggctacttctatattagaagaaaatcaggctctttgcacaataacttcatttcccagattaggctgtcctgggttcacactgcccgaggtcaaacccaacccagtggaaggaggagcttccaagtccctcttctttccagatgaagcaataaacaagcaccctcgcttcagtaccttaacaagaaatatccgacataggagaggagaaaaggttgtcatcaatgtaccaatatttaaggacaagaatacaccatctccatttatagaaacatttactgaggatgatgaagcttcaagggcttctaagccggatcatatttacatggatgccatgggatttggaatgggcaattgctgtctccaggtgacattccaagcctgcagtatatctgaggccagatacctttatgatcagttggctactatctgtccaattgttatggctttgagtgctgcatctcccttttaccgaggctatgtgtcagacattgattgtcgctggggagtgatttctgcatctgtagatgatagaactcgggaggagcgaggactggagccattgaagaacaataactataggatcagtaaatcccgatatgactcaatagacagctatttatctaagtgtggtgagaaatataatgacatcgacttgacgatagataaagagatctacgaacagctgttgcaggaaggcattgatcatctcctggcccagcatgttgctcatctctttattagagacccactgacactgtttgaagagaaaatacacctggatgatgctaatgagtctgaccattttgagaatattcagtccacaaattggcagacaatgagatttaagccccctcctccaaactcagacattggatggagagtagaatttcgacccatggaggtgcaattaacagactttgagaactctgcctatgtggtgtttgtggtactgctcaccagagtgatcctttcctacaaattggattttctcattccactgtcaaaggttgatgagaacatgaaggtagcacagaaaagagatgctgtcttgcagggaatgttttatttcaggaaagatatttgcaaaggtggcaatgcagtggtggatggttgtggcaaggcccagaacagcacggagctcgctgcagaggagtacaccctcatgagcatagacaccatcatcaatgggaaggaaggtgtgtttcctggactgatcccaattctgaactcttaccttgaaaacatggaagtggatgtggacaccagatgtagtattctgaactacctaaagctaattaagaagagagcatctggagaactaatgacagttgccagatggatgagggagtttatcgcaaaccatcctgactacaagcaagacagtgtcataactgatgaaatgaattatagccttattttgaagtgtaaccaaattgcaaatgaattatgtgaatgcccagagttacttggatcagcatttaggaaagtaaaatatagtggaagtaaaactgactcatccaactagacattctacagaaagaaaaatgcattattgacgaactggctacagtaccatgcctctcagcccgtgtgtataatatgaagaccaaatgatagaactgtactgttttctgggccagtgagccagaaattgattaaggctttctttggtaggtaaatctagagtttatacagtgtacatgtacatagtaaagtatttttgattaacaatgtattttaataacatatctaaagtcatcatgaactggcttgtacatttttaaattcttactctggagcaacctactgtctaagcagttttgtaaatgtactggtaattgtacaatacttgcattccagagttaaaatgtttactgtaaatttttgttcttttaaagactacctgggacctgatttattgaaatttttctctttaaaaacattttctctcgttaattttcctttgtcatttcctttgttgtctacattaaatcacttgaatccattgaaagtgcttcaagggtaatcttgggtttctagcaccttatctatgatgtttcttttgcaattggaataatcacttggtcaccttgccccaagctttcccctctgaataaatacccattgaactctgaaaaaaaaaaaaaaaaaaa

SEQ ID NO: 628 - protein, 637 aa, Homo sapien
MGLLSQGSPLSWEETKRHADHVRRHGILQFLHIYHAVKDRHKDVLKWGDEVEYMLVSFDHENKKVRLVLSGEKVLETLQEKGERTNPNHPTLWRPEYGSYMIEGTPGQPYGGTMSEFNTVEANMRKRRKEATSILEENQALCTITSFPRLGCPGFTLPEVKPNPVEGGASKSLFFPDEAINKHPRFSTLTRNIRHRRGEKVVINVPIFKDKNTPSPFIETFTEDDEASRASKPDHIYMDAMGFGMGNCCLQVTFQACSISEARYLYDQLATICPIVMALSAASPFYRGYVSDIDCRWGVISASVDDRTREERGLEPLKNNNYRISKSRYDSIDSYLSKCGEKYNDIDLTIDKEIYEQLLQEGIDHLLAQHVAHLFIRDPLTLFEEKIHLDDANESDHFENIQSTNWQTMRFKPPPPNSDIGWRVEFRPMEVQLTDFENSAYVVFVVLLTRVILSYKLDFLIPLSKVDENMKVAQKRDAVLQGMFYFRKDICKGGNAVVDGCGKAQNSTELAAEEYTLMSIDTIINGKEGVFPGLIPILNSYLENMEVDVDTRCSILNYLKLIKKRASGELMTVARWMREFIANHPDYKQDSVITDEMNYSLILKCNQIANELCECPELLGSAFRKVKYSGSKTDSSN

SEQ ID NO: 629 - DNA, 3103 bp, Homo sapien
ctgtgacactgccagcagcgcgcagagggagggatgggggcgggtatcggcgtaggggccctcggaaagaacggatattgctgtgacaccgcggggacgctctgaagggacgagtgtcggtgtggcaccggtgcacgctgaaggagccggcggaaccgggtggccatggggatgtgggcatcgctggacgctttgtgggagatgccggccgagaagcgtatcttcggggccgtgctgctcttttcctggacagtgtatctttgggagaccttcctagcacagcggcagagaaggatatataaaacaacaactcatgtaccaccggagttaggacagatcatggattctgaaacatttgagaaatctcgactctatcaactggataaaagcactttcagcttctggtcaggactctattcagagactgaaggcactcttattcttctctttggaggaataccttatctctggagactttctggacggttctgtggttatgctggctttggaccagaatatgagatcactcagtccctggtgtttctgctgttggctacacttttcagtgcattgactggtttgccatggagtctttataatacttttgtgatagaagaaaaacatggcttcaatcaacagactttggggttcttcatgaaagatgcaatcaagaaatttgttgtgactcagtgtattttgttgcctgtgtcttcacttctactttacattattaaaattgggggtgactatttttttatttatgcctggctgttcacattagttgtgtctctggttcttgtcacaatctatgctgattatattgcccctttatttgacaaattcacacctctgcctgagggaaagcttaaagaagaaattgaagtaatggcaaagagtattgactttcctttgacgaaggtgtatgttgtggaaggatctaaacgctcttcccacagcaatgcttatttttatggcttcttcaagaacaagcgaatagttttgtttgacactctactagaagagtactctgtactaaacaaagacatccaggaggattctggcatggaaccccgcaatgaggaagaagggaacagtgaagaaataaaagctaaagttaaaaataagaaacaaggatgtaaaaatgaggaggtactcgctgtactaggccatgaactggggcactggaagttgggacatacagtcaaaaatatcattattagccagatgaattctttcctgtgtttttttttatttgctgtattaattggtcgaaaggagctttttgctgcatttggtttttatgatagccaacccactcttattggactattgatcatcttccagtttattttttcaccttacaatgaggttctttctttttgcctaacagtcctaagccgcagatttgagtttcaagctgatgcatttgccaagaaacttgggaaggctaaagacttatattctgctttaatcaaacttaacaaagataacttgggattccctgtttctgactggttgttctcaatgtggcattattctcatcctccactgctagagagacttcaagctttgaaaactatgaagcaacactgagatgtccaggatctgtgactgaagacatttctgattatttctgtcctggcagcatgttccagctcttgatgtttttaaacttttttttagaagaaaaattaagtacagaaaagcccagatttaaatacatttaatatgtcattttaaaaatgattttaataattcatttcttaaaacactgaatgaattttgaagcttaatgtttttaaaggcatagttttatctttgacatctaatttaccatcaagttgtaaaattatttggaaaaatacagaactcgttttatttgtatacttatatggaatctgcatgtgaggtgtttgagggcatatgtttgaaagagggagcatcaccacaggaatcctttctgtgaggtggaaacagtggtcctgaatcattgtgctcacacctaacttgaaatctggtcttactttcatgctgttatgatttcacctggtgaatcagtgttttaaataagaaaggtaatagttggtaaggccaatgttatttaaatgaaagtagttagaaaaatgctctcctattctaccaaatttttaatttctttcttccctttcttgctacacagtgatcaagagtttctcatagtgctttgaagttagaaattatgtataggatattttaaatcattgagttttgtggggtttttttgtttgtttgtttcttttgttttttggaaaatccgtgtctttatctttttttcccacgtggtagatatgatcccattggaggtaaattgtagcttcttctcattcatgcagtaaataatacatcctttcactcagcagagatggccatattaaacacgttttgctatgttaaaagtggcagaacaggaaagacgaattaaaaataacattttttaagcgacataaggatgaaatactgatgaatctctgtgacattacagggaaaaaaatatagttttctatctctttcaagggcagaagagttttcatttttatttttgtaattttatctgtaagtcataaatattacttaatcaggcctgattctacttttgaaaattacagttcttgaaatgcagataatgtttactttgaaaacaaatgtcatgaatgatttccagtttttaaagctatatgtttcactgcttcatatctctgtccactttctgaatgagaacttattttgtgcctagagctctcactcactgataatgcttattaccttctgggcatttattccaaagtgggatcaactgtacgcctttggtatctgaccataaagtcttttgctccgctgacatttgggtgatgtcttcacatggaaatataataaaaataaaaatctagtttaatactgcattatttattttcctaaggctaaagaggagcagtcctatgcttttattcagcatcctttatctgtgacttcatgctctgataactgcctttccttccttctgtgcctttgaatacaaatttcagttctgcaaaagtgaaacattaaacattgccaacgcaaatgt

SEQ ID NO: 630 - protein, 475 aa, Homo sapien
MGMWASLDALWEMPAEKRIFGAVLLFSWTVYLWETFLAQRQRRIYKTTTHVPPELGQIMDSETFEKSRLYQLDKSTFSFWSGLYSETEGTLILLFGGIPYLWRLSGRFCGYAGFGPEYEITQSLVFLLLATLFSALTGLPWSLYNTFVIEEKHGFNQQTLGFFMKDAIKKFVVTQCILLPVSSLLLYIIKIGGDYFFIYAWLFTLVVSLVLVTIYADYIAPLFDKFTPLPEGKLKEEIEVMAKSIDFPLTKVYVVEGSKRSSHSNAYFYGFFKNKRIVLFDTLLEEYSVLNKDIQEDSGMEPRNEEEGNSEEIKAKVKNKKQGCKNEEVLAVLGHELGHWKLGHTVKNIIISQMNSFLCFFLFAVLIGRKELFAAFGFYDSQPTLIGLLIIFQFIFSPYNEVLSFCLTVLSRRFEFQADAFAKKLGKAKDLYSALIKLNKDNLGFPVSDWLFSMWHYSHPPLLERLQALKTMKQH

SEQ ID NO: 631 - DNA, 852 bp, Homo sapien
caccctgtaagtggctgcggcgggaagatggcggagctgcgcgtgctcgtagctgtcaagagggtcatcgactacgccgtgaagatccgagtgaagcctgacaggaccggtgtggtcacggatggtgtgaagcactccatgaaccccttctgtgagatcgcggtggaggaggctgtgcggctcaaggagaagaagctggtgaaggaggtcatcgccgtcagctgtgggcctgcacagtgccaggagacgattcgtaccgccctggccatgggtgcagaccgaggtatccacgtggaggtgcccccagcagaagcagaacgcttgggtcccctgcaggtggctcgggtcctggccaagctggcagagaaggagaaggtggacctggtgctgctgggcaaacaggccatcgatgatgactgtaaccagacagggcagatgacagctggatttcttgactggccacagggcacattcgcctcccaggtgacgctggagggggacaagttgaaagtggagcgggagatcgatgggggcctggagaccctgcgcctgaagctgccagctgtggtgacagctgacctgaggctcaacgagccccgctacgccacgctgcccaacatcatgaaagccaagaagaagaagatcgaggtgatcaagcctggggacctgggtgtggacctgacctccaagctctctgtgatcagtgtggaggacccgccccagcgcacggccggcgtcaaggtggagaccactgaggacctggtggccaagctgaaggagattgggcggatttgagcccctcccagagatggcaataaaactgactctcaacatcaaaaaaaaaaaaaaaaa

SEQ ID NO: 632 - protein, 255 aa, Homo sapien
MAELRVLVAVKRVIDYAVKIRVKPDRTGVVTDGVKHSMNPFCEIAVEEAVRLKEKKLVKEVIAVSCGPAQCQETIRTALAMGADRGIHVEVPPAEAERLGPLQVARVLAKLAEKEKVDLVLLGKQAIDDDCNQTGQMTAGFLDWPQGTFASQVTLEGDKLKVEREIDGGLETLRLKLPAVVTADLRLNEPRYATLPNIMKAKKKKIEVIKPGDLGVDLTSKLSVISVEDPPQRTAGVKVETTEDLVAKLKEIGRI

SEQ ID NO: 633 - DNA, 1072 bp, Homo sapien
gataggatcaccacggtggtaacctctcacattgtcttctccacaggaggcgtctgacacagtatgatgatgaagatcccatggggcagcatcccagtactgatcttgctcctgctcctgggcctaatcgatatctcccaggcccagctcagctgcaccgggcccccagccatccctggcatcccgggtatccctgggacacctggccccgatggccaacctgggaccccagggataaaaggagagaaagggcttccagggctggctggagaccatggtgagttcggagagaagggagacccagggattcctgggaatccaggaaaagtcggccccaagggccccatgggccctaaaggtggcccaggggcccctggagccccaggccccaaaggtgaatcgggagactacaaggccacccagaaaatcgccttctctgccacaagaaccatcaacgtccccctgcgccgggaccagaccatccgcttcgaccacgtgatcaccaacatgaacaacaattatgagccccgcagtggcaagttcacctgcaaggtgcccggtctctactacttcacctaccacgccagctctcgagggaacctgtgcgtgaacctcatgcgtggccgggagcgtgcacagaaggtggtcaccttctgtgactatgcctacaacaccttccaggtcaccaccggtggcatggtcctcaagctggagcagggggagaacgtcttcctgcaggccaccgacaagaactcactactgggcatggagggtgccaacagcatcttttccgggttcctgctctttccagatatggaggcctgacctgtgggctgcttcacatccaccccggctccccctgccagcaacgctcactctacccccaacaccaccccttgcccagccaatggacacagtagggcttggtgaatgctgctgagtgaatgagtaaataaactcttcaaggccaaggaacagtggtctaattcaactctgtgtcccagcactggcacaccagaagtgccatgctcagaaatgttggttacatgaatgaatgaaccatgaatgaatg

SEQ ID NO: 634 - protein, 253 aa, Homo sapien
MMMKIPWGSIPVLILLLLLGLIDISQAQLSCTGPPAIPGIPGIPGTPGPDGQPGTPGIKGEKGLPGLAGDHGEFGEKGDPGIPGNPGKVGPKGPMGPKGGPGAPGAPGPKGESGDYKATQKIAFSATRTINVPLRRDQTIRFDHVITNMNNNYEPRSGKFTCKVPGLYYFTYHASSRGNLCVNLMRGRERAQKVVTFCDYAYNTFQVTTGGMVLKLEQGENVFLQATDKNSLLGMEGANSIFSGFLLFPDMEA

SEQ ID NO: 635 - DNA, 3615 bp, Homo sapien
ggactgtgtgtgtctggctgtagcagacgcgaggcggcgacgaggcgccggggacccgcgcgaggggcggccgggaggcggcggcggcggccgccagaagtagcagcaggaccggcggcggcgacggcagccctgaaatgcattttcctctccagcggccatgttaaccaggaaaccttcggccgccgctcccgccgcctacccgaccggccgaggtggggacagcgccgttcgtcagcttcaggcttccccggggctcggtgcagggcccacccggagcggagtggggactggcccgccctcccccatcgccctgccgcctctccgggccagcaacgctgccgccgcagcccacacgattggcggcagtaagcacacaatgaatgatcacctgcatgtcggcagccacgctcacggacagatccaggttcaacagttgtttgaggataacagtaacaagcggacagtgctcacgacacaaccaaatgggcttacaacagtgggcaaaacgggcttgccagtggtgccagagcggcagctggacagcattcatagacggcaggggagctccacctctctaaagtccatggaaggcatggggaaggtgaaagccacccccatgacacctgaacaagcaatgaagcaatacatgcaaaaactcacagccttcgaacaccatgagattttcagctaccctgaaatatatttcttgggtctaaatgctaagaagcgccagggcatgacaggtgggcccaacaatggtggctatgatgatgaccagggatcatatgtgcaggtgccccacgatcacgtggcttacaggtatgaggtcctcaaggtcattgggaaggggagctttgggcaggtggtcaaggcctacgatcacaaagtccaccagcacgtggccctaaagatggtgcggaatgagaagcgcttccaccggcaagcagcggaggagatccgaatcctggaacacctgcggaagcaggacaaggataacacaatgaatgtcatccatatgctggagaatttcaccttccgcaaccacatctgcatgacgtttgagctgctgagcatgaacctctatgagctcatcaagaagaataaattccagggcttcagtctgcctttggttcgcaagtttgcccactcgattctgcagtgcttggatgctttgcacaaaaacagaataattcactgtgaccttaagcccgagaacattttgttaaagcagcagggtagaagcggtattaaagtaattgattttggctccagttgttacgagcatcagcgtgtctacacgtacatccagtcgcgtttttaccgggctccagaagtgatccttggggccaggtatggcatgcccattgatatgtggagcctgggctgcattttagcagagctcctgacgggttaccccctcttgcctggggaagatgaaggggaccagctggcctgtatgattgaactgttgggcatgccctcacagaaactgctggatgcatccaaacgagccaaaaattttgtgagctccaagggttatccccgttactgcactgtcacgactctctcagatggctctgtggtcctaaacggaggccgttcccggagggggaaactgaggggcccaccggagagcagagagtgggggaacgcgctgaaggggtgtgatgatccccttttccttgacttcttaaaacagtgtttagagtgggatcctgcagtgcgcatgaccccaggccaggctttgcggcacccctggctgaggaggcggttgccaaagcctcccaccggggagaaaacgtcagtgaaaaggataactgagagcaccggtgctatcacatctatatccaagttacctccaccttctagctcagcttccaaactgaggactaatttggcgcagatgacagatgccaatgggaatattcagcagaggacagtgttgccaaaacttgttagctgagctcacgtcccctgatgctggtaacctgaaagatacgacattgctgagccttactgggttgaaaaggagtagctcagacctgtttttatttgctcaataactctactcatttgtatcttttcagcacttaattttaatgtaagaaagttgttcattttgtttttataaaatacatgaggacaatgctttaagtttttatactttcagaaactttttgtgttctaaaagtacaatgagccttactgtatttagtgtggcagaataataacatcagtggcaggccactgattacttcatgactgccacgcatttacagattggtgtcaaagacattcactatgtttttatggttcatgttatatcctccccagggtgacagccccttaaggccctccttttccctccatgctccaggtccatgcacaggtgtagcatgtcctgcttccgtttttcataaattaatctgggtgttgggggtagtgggaggagaacggtcagaatcaaagtgacattctaagaaaaactgtaccttagagattttcctctagtgctcaaacaaatacaaaataagatccccaaggtttaaactgcccagttagcattctgacattctaaaagccggcaaagcagcttttagtggataaatgggaatggaaacgtgtgtgttcctccaaattttctagtatgatcggtgagctgttttgtaaagaagcctcatattacagagttgcttttgcacctaaatttagaattgtattccatgaactgttcctcccttttctctgcttttctcctctctgttcctcttttaataccacacgtctgttgcttgcatttagtttgtcttcttccttcagctgtgtatcccagactgttaatacagaaaagagacatttcagctgtgattatgaccattgtttcatattccaattaaaaaaagaacagcagcctagctacttaaggtggggatttcatagttccaaagaagatttagcagattagagtgagttcacacttttcaggtgccactgtaaggttctctcagcctgggaaactatcaactctttctttaaaaagaaagagggttgaaaatcctctggacgaacagaagtcactttggctgttcagtaaggccaatgttaacaacacgtttagaggaggaaaagttcaacctcaagttaaatggtttgacttattcttcgtatcattagaagaaccccagagatagcattcctctattttattttactttcttttggattgcactgattgtttttgtgggaatgacactttatctggcaaagtaactgagagtttggtaaaagaatattttcttctctgaataataattattttcacagtgaaaatttcagtattttatcactaatgtatgagcaatgatctatatcaatttcaaggcacgtgaaaaaaattttttagtatgtgcaatttaatatagaaagatttctgcctgtttggacaataggttttgggtagtacagattaggataagtaagcttatatatgcacagagattattgtattacctgtaaattgatttacaagtacttaaaagcgtggtccccagtgaggccaagaaagtttccggttaagttctttaataataatcctacagtttatcttaagaa

SEQ ID NO: 636 - protein, 601 aa, Homo sapien
MLTRKPSAAAPAAYPTGRGGDSAVRQLQASPGLGAGPTRSGVGTGPPSPIALPPLRASNAAAAAHTIGGSKHTMNDHLHVGSHAHGQIQVQQLFEDNSNKRTVLTTQPNGLTTVGKTGLPVVPERQLDSIHRRQGSSTSLKSMEGMGKVKATPMTPEQAMKQYMQKLTAFEHHEIFSYPEIYFLGLNAKKRQGMTGGPNNGGYDDDQGSYVQVPHDHVAYRYEVLKVIGKGSFGQVVKAYDHKVHQHVALKMVRNEKRFHRQAAEEIRILEHLRKQDKDNTMNVIHMLENFTFRNHICMTFELLSMNLYELIKKNKFQGFSLPLVRKFAHSILQCLDALHKNRIIHCDLKPENILLKQQGRSGIKVIDFGSSCYEHQRVYTYIQSRFYRAPEVILGARYGMPIDMWSLGCILAELLTGYPLLPGEDEGDQLACMIELLGMPSQKLLDASKRAKNFVSSKGYPRYCTVTTLSDGSVVLNGGRSRRGKLRGPPESREWGNALKGCDDPLFLDFLKQCLEWDPAVRMTPGQALRHPWLRRRLPKPPTGEKTSVKRITESTGAITSISKLPPPSSSASKLRTNLAQMTDANGNIQQRTVLPKLVS

SEQ ID NO: 637 - DNA, 8846 bp, Homo sapien
  Unsure 258-278: Unknown base
ctcgcagcgcttccagctccccgcgcccctatgtgagggagacggggaggcccgcggcgcgcaggggagggcgaggcatgtgcacgggccggagggtgctgcagccgcccgaggaagaggaggacggcggcgaggaggagagcggggggctcgcggcggcgggccccggccgaggggatgcagtggactgtgtgtgtctggctgtagcagacgcgaggcggcgacgaggcgccggggacccgcgcgaggggcggccgnnnnnnnnnnnnnnnnnnnnncagaagtagcagcaggaccggcggcggcgacggcagccctgaaatgcattttcctctccagcggccatgttaaccaggaaaccttcggccgccgctcccgccgcctacccgaccggccgaggtggggacagcgccgttcgtcagcttcaggcttccccggggctcggtgcaggggccacccggagcggagtggggactggcccgccctcccccatcgccctgccgcctctccgggccagcaacgctgccgccgcagcccacacgattggcggcagtaagcacacaatgaatgatcacctgcatgtcggcagccacgctcacggacagatccaggttcaacagttgtttgaggataacagtaacaagcggacagtgctcacgacacaaccaaatgggcttacaacagtgggcaaaacgggcttgccagtggtgccagagcggcagctggacagcattcatagacggcaggggagctccacctctctaaagtccatggaaggcatggggaaggtgaaagccacccccatgacacctgaacaagcaatgaagcaatacatgcaaaaactcacagccttcgaacaccatgagattttcagctaccctgaaatatatttcttgggtctaaatgctaagaagcgccagggcatgacaggtgggcccaacaatggtggctatgatgatgaccagggatcatatgtgcaggtgccccacgatcacgtggcttacaggtatgaggtcctcaaggtcattgggaaggggagctttgggcaggtggtcaaggcctacgatcacaaagtccaccagcacgtggccctaaagatggtgcggaatgagaagcgcttccaccggcaagcagcggaggagatccgaatcctggaacacctgcggaagcaggacaaggataacacaatgaatgtcatccatatgctggagaatttcaccttccgcaaccacatctgcatgacgtttgagctgctgagcatgaacctctatgagctcatcaagaagaataaattccagggcttcagtctgcctttggttcgcaagtttgcccactcgattctgcagtgcttggatgctttgcacaaaaacagaataattcactgtgaccttaagcccgagaacattttgttaaagcagcagggtagaagcggtattaaagtaattgattttggctccagttgttacgagcatcagcgtgtctacacgtacatccagtcgcgtttttaccgggctccagaagtgatccttggggccaggtatggcatgcccattgatatgtggagcctgggctgcattttagcagagctcctgacgggttaccccctcttgcctggggaagatgaaggggaccagctggcctgtatgattgaactgttgggcatgccctcacagaaactgctggatgcatccaaacgagccaaaaattttgtgagctccaagggttatccccgttactgcactgtcacgactctctcagatggctctgtggtcctaaacggaggccgttcccggagggggaaactgaggggcccaccggagagcagagagtggggtaacgcgctgaaggggtgtgatgatccccttttccttgacttcttaaaacagtgtttagagtgggatcctgcagtgcgcatgaccccaggccaggctttgcggcacccctggctgaggaggcggttgccaaagcctcccaccggggagaaaacgtcagtgaaaaggataactgagagcaccggtgctatcacatctatatccaagttacctccaccttctagctcagcttccaaactgaggactaatttggcgcagatgacagatgccaatgggaatattcagcagaggacagtgttgccaaaacttgttagctgagctcacgtcccctgatgctggtaacctgaaagatacgacattgctgagccttactgggttgaaaaggagtagctcagacctgtttttatttgctcaataactctactcatttgtatcttttcagcacttaattttaatgtaagaaagttgttcattttgtttttataaaatacatgaggacaatgctttaagtttttatactttcagaaactttttgtgttctaaaagtacaatgagccttactgtatttagtgtggcagaataataacatcagtggcaggccactgattacttcatgactgccacgcatttacagattggtgtcaaagacattcactatgtttttatggttcatgttatatcctccccagggtgacagccccttaaggccctccttttccctccatgctccaggtccatgcacaggtgtagcatgtcctgcttccgtttttcataaattaatctgggtgttgggggtagtgggaggagaacggtcagaatcaaagtgacattctaagaaaaactgtaccttagagattttcctctagtgctcaaacaaatacaaaataagatccccaaggtttaaactgcccagttagcattctgacattctaaaagccggcaaagcagcttttagtggataaatgggaatggaaacgtgtgtgttcctccaaattttctagtatgatcggtgagctgttttgtaaagaagcctcatattacagagttgcttttgcacctaaatttagaattgtattccatgaactgttcctcccttttctctgcttttctcctctctgttcctcttttaataccacacgtctgttgcttgcatttagtttgtcttcttccttcagctgtgtatcccagactgttaatacagaaaagagacatttcagctgtgattatgaccattgtttcatattccaattaaaaaaagaacagcagcctagctacttaaggtggggatttccatagttccaaagaagatttagcagattagagtgagttcacacttttcaggtgccactgtaaggttctctcagcctgggaaactatcaactctttctttaaaaagaaagagggttgaaaatcctctggacgaacagaagtcactttggctgttcagtaaggccaatgttaacaacacgtttagaggaggaaaagttcaacctcaagttaaatggtttgacttattcttcgtatcattagaagaaccccagagatagcattcctctattttattttactttcttttggattgcactgattgtttttgtgggaatgacactttatctggcaaagtaactgagagtttggtaaaagaatattttcttctctgaataataattattttcacagtgaaaatttcagtattttatcactaatgtatgagcaatgatctatatcaatttcaaggcacgtgaaaaaaattttttagtatgtgcaatttaatatagaaagatttctgcctgtttggacaataggttttgggtagtacagattaggataagtaagcttatatatgcacagagattattgtattacctgtaaattgatttacaagtacttaaaagcgtggtccccagtgaggccaagaaagtttccggttaagttctttaataataatcctacagtttatcttaagaaaaaaaaaaaggtttgaaaaaaacactttaatttaggcttcgttggttgatggtggaaaaaaatgctcaggaaatatttcagatatttgccaaaaaaccagtaataaggttaccttattaaaatagtgatatttgctttactatttaaggtgtcactgataaattaatttgtacttctgtgtttagaaattatagcttcttttcccttagtcaaattttttagcatattatacacatttctgtgtaatctgtggaagtgcaataatatgttagtaagttacattttaaataatgctcatgtgacaatactcccaatcaatggcttatagaatttaaagatctgtatattagattttggcttaaaggcatgagaagtataagacttggtttggtggctttgtaagaccaccagcctcttaatgatggttagcttctttaggtcattaaatcaataaaaacatataatgctgttttgctcttctaatgctcctcttccatttccagttatcttcacatttacatttaaatatacaaacctgagcccgccattattaatttccctataaaatgacgatacatgtgaacatttataaatggactaatactgcttgtctttcccccaccgcacaaaactggttcttaagatgccagcaatgaatttgagactatctttatttataaatggaaaccggaaacttttataccaaactataataatgtgcagcactgtagggcttttttttttttccctccaaatacagtgaaatttttttattcacaagagctgccacatctcagcatttagtaatagagctgctttaataaaattctagtttgattgtcatgtcaaaaaaagaaaaatgttgcatctttgtgattttaaaacataaattaatgaaggctctgataggctattaggagttggcttggaaacagtttttggtctcacaggttaccattgtttggggatgtctgagctgttttcagatctaggaatagcacagtgttgtcttgtctttggcagtctcatttggctctgtttcttgcaccaccagcatgttcattaccacttaaatatattgctacagcagtggaacaacagagtggtgcaagacactgtagattaacggtagaggagaaattgtgcccttagtgttaacaatgtgccttttgttctgaatgccatgttgtagggcatgcattttttggcctctttaactcttcgaattctagtcagtaagaatggaacccatctctgcaaagatacatctgtcttaaatatctagttacaggccttaatagaaaccataaggcatgactcatcttcaggcactgaaaaaagataaccatcaggtagtgttacacaaggacttcctatatttaaggggttaaagatggtctttgttgtatcttaacatcagactgatttttacattttttttttgttatgctaacactagacaaaaatcaactgtatttgtaaaaatttacctcaaaccatttaattttatagtgtgattaatcccagggcatttggtatgaaccaaagtgcattccttttatatgtgcctggctctagtaaggatggccagggatttttacaatttgggtgcaaggcacttaagccacttttaaacttaatgggtggtttggggtcgtgttaaatgaccccatcagaatgttagaaaacactttaggcatcagtagcattgggccatattggaatcctaaagtgtgaattattttaaggagagcattcatttttgtaatttttttcatcaaaaatatttctggtaagcagaagactttttaaaaaaactgatctggtctcggtaaaggttttaatattgcccaacataatgctgtaatagcattaaaaaaagtatttgtgaactctgtttcttaggggcttgtacatctctctgctatggacatacataaaattaattgtaattatactcagctcaactgctacagttctgtctaggcagtggcttgggtttttatcgagcaacaacttagacacgtgactgtaatatgctgcaactgtgtgtactgaaaatatgtgaaaatggttgaatgtggactgtgtatatatgtatgtaaaaatttctgtgagatgctgctgtcgccacttaacattaaatatgttctagtggattttaatcctagtggccagttctatgatactgtatgtattatacagctgatgacaggagtaagactgtttagtgaatatctgttaaattttattgttgtggccagagataatttcagaataaaattttaatgtcctaccttacttctctcccctttctaactataatttaactcctgatctatttctggtattatcctttgtcaattagcctggagagggtttagaatgcaaaatggatagctctatatcagggtcttgagaagttaaaataattcattctactagtttgttcatagcaatactttattagttcaatataagtatgcagattccaagtggaaaaacaaaggttttagtaagtagttcttgcttttcccaggatattctattccttcacctgtcagatttttatgttaacttttttatatatagcctctgctgtgttctttattatgctagagcttcatatcttcttttattttaaccttcacaatgatagttaagctgggggagcagaacctgtcaattattccccaccagtcttcattcttttctctgcacaagttctggtaaattattctaatgtgctctaaccagttccacccaatgttttttaatgcttatgagtttgcagtttttgtacttggtggtctctgtggttcacatttttttgtgttgtagtgtctcctgcctcggttggctcagaaaataaggcctaggaactgcaattagctcatgatttgtcaagttcagttagtaccaagctaagagtttacttacagatgacagcaagcagatgctctagtaattcgtcagacattgcagggatattgtgtagtcagatattaccctcttgtggaaagaactacctcacatcattatttatttcccttctgttaccaacagccaaggaattacttagtgtggctccctgcatcaatactgggatatgcttaaacaagggaatgccataagagttcccaattgcctcgtcatagcctgggccatagatttttgttactgctaatcttgcttcttaaagttcacacccagtgcaaaaaacccaatcagcaaactaaccccaaaatccaatatatttagaaatgtaagtgttaagagatgtgcattatgtacaaaattgaaaattggtgctaaagtggcaatgtcaatttaaaatttcttgtccagatctgactgactgactcaggagattatagttcctactcattctctttccttttatcagatctttcaaaagcgctttttaaaattgatcaatgtgcaattctgtttgagtctctacagtcctatcccttttggaatgaacagctacacaaataaatattcttggaacttcgaagttgtcttcaaactagctctagaaaatgtccctagttgacattagtgttggtctgttagaaggggaaattgatttgactgcttcatgttttgaaaagagcattaagagggatttgaggaaggtatatgtggctttcttttttcttaagtttgaattacacttgatttcctttgggttattaggcagataaacccttgtcattagtaatacttagcactgtccaaaatgaaaaatgactgccagtgtgttgcacatacataagaaaattacatcttactgcgaagtctttggtttgtttccttatttggtttgactttgacttactattttgctatggtcatatccttaatatctgcggtacatttcatatgtatatatggggtgggagcataattgccattcccatgtgtctcaaggaagcttaatgaggaaactaatgagttaatattaactcttctgaagaaagctgacattttaggagtattaagtcatctgtcgttaaggagcagcaagaatatattatgattgtatcacatgttccagaagagcattaccccttacatagaaagctccttggagatttcatgatgttggatgaacatcagtttatccttatacatccctatgagctataattatcctcatttgatacttgaggaaactgaagtgacttgctccaaagtgactacaaaaacattgcagtttgaggcttaggttgtaatcaggtaattttggtcttggacagtaagggaaaatccataatacataaaacacaaaagtttagaaagggggggaagttgagctagcaatgggcatttctattatttaagttacatatcagtttccaggaatatttttcaaatgggacaaactaaaaagttgaggactagagcatcgtagtgtctaagtgcacctaataacttaatgcatgtgcacacaccctcagttaatttgtaagagagtgacttctcattgttatttgtggagaggctaattatagtagcttcattctttattttctgtgttcttaaatttttttttacatttgaaagtatgaaaatactatttttgacactttactgatactcagggattaaaagttaaattttactgactgtagcagcaggtaaatctcttaaatttactcaggtttcctatcctttgcctccatatttaagaaaatatagaatgcctgccagggaaatatataaaaataaaaatttcaaatacaattttaaaataccaatttgtaaataaaccaattttacaaactaaaatattgtgtctttccttgctttttatcccaatttatctcccctcctaagtttgaggagttttatatattaaggctatttcttcatttgtaaaaatgaagtatgctatttgcaaagcaaaagcccatgaaaagccccaaatcatttaagtaaagcttactgaattgttttcaattgttttgggagaaatgtaactaattataagcaatttatgtggaccagcagcaaataaatgtatgagtacatttggga

SEQ ID NO: 638 - protein, 601 aa, Homo sapien
MLTRKPSAAAPAAYPTGRGGDSAVRQLQASPGLGAGATRSGVGTGPPSPIALPPLRASNAAAAAHTIGGSKHTMNDHLHVGSHAHGQIQVQQLFEDNSNKRTVLTTQPNGLTTVGKTGLPVVPERQLDSIHRRQGSSTSLKSMEGMGKVKATPMTPEQAMKQYMQKLTAFEHHEIFSYPEIYFLGLNAKKRQGMTGGPNNGGYDDDQGSYVQVPHDHVAYRYEVLKVIGKGSFGQVVKAYDHKVHQHVALKMVRNEKRFHRQAAEEIRILEHLRKQDKDNTMNVIHMLENFTFRNHICMTFELLSMNLYELIKKNKFQGFSLPLVRKFAHSILQCLDALHKNRIIHCDLKPENILLKQQGRSGIKVIDFGSSCYEHQRVYTYIQSRFYRAPEVILGARYGMPIDMWSLGCILAELLTGYPLLPGEDEGDQLACMIELLGMPSQKLLDASKRAKNFVSSKGYPRYCTVTTLSDGSVVLNGGRSRRGKLRGPPESREWGNALKGCDDPLFLDFLKQCLEWDPAVRMTPGQALRHPWLRRRLPKPPTGEKTSVKRITESTGAITSISKLPPPSSSASKLRTNLAQMTDANGNIQQRTVLPKLVS

SEQ ID NO: 639 - DNA, 1785 bp, Homo sapien
ggcacgagggtagctttccaacataaagtggaggtttcaacacaggagactttaagcaagttccagtgtgtctatatttggtctggctgatcggctggactctggccttccccgctcacgttagcagacagctctgccctagtgggcgcttagcctgcgacggcagcccgagaggatgtctaacaagcttctttctccccacccccattcagttgttctcaggtctgaattcaaaatggcctcatctcctgctgtccttcgagcgtcccggctgtaccaatggagcctgaagagttcggcgcagttcctggggtctccacagctgaggcaggttggtcagatcattagggttcctgctcggatggcggcgacgctgatcctggagcctgcgggccgctgctgctgggacgaaccggtgcgaatcgccgtgcgcggcctagccccggagcagccggtcacgctgcgcgcgtccctgcgcgacgagaagggcgcgcttttccaggcccacgcgcgctaccgcgccgacactcttggcgagctggacctggagcgcgcgcccgcgctgggcggcagcttcgcggggcttgagcccatggggctgctctgggccttggagcccgagaaacctttggtgcggctggtgaagcgcgacgtgcgaacgcccttggccgtggagctggaggtgctggatggccacgaccccgaccccgggcggctgctgtgccagacgcggcacgagcgctacttcctcccgcccggggtgcggcgcgagccggtgcgcgtgggccgggtgcgaggcacgctcttcctgccgccagaacctgggccctttcctgggattgtggacatgttcggaactggaggtggcctgctggagtatcgggctagtctgctggctgggaagggttttgctgtgatggctctggcttattataactatgaagacctccccaagaccatggagacgctccatctggagtactttgaagaagccatgaactacttgctcagtcatcccgaggtaaaaggtccaggagttgggctgcttggaatttccaaagggggtgagctctgcctttccatggcctctttcctgaagggcatcacggctgctgtcgtcatcaacggctctgtggccaatgttgggggaaccttacgctacaagggcgagaccctgccccctgtgggcgtcaacagaaatcgcatcaaggtgaccaaagatggctatgcagacattgtggatgtcctgaacagccctttggaaggacctgaccagaagagcttcattcctgtggaaagggcagagagcaccttcctgttcctggtaggtcaggatgaccacaactggaagagtgagttctatgctaatgaggcctgtaaacgcttgcaggcccatgggaggagaaagccccagatcatctgttacccagagacagggcactatattgagcctccttacttccccctgtgtcgggcttccctgcatgccttggtgggcagtcctattatctggggaggggagcccagggctcatgtcatggctcaggtggatgcttggaaacaactccagactttcttccacaaacacttgggtggccacgaggggacaatcccatcaaaagtgtaaattttatttgatcatgtggcctctctgttgctaatctctcctggaaacatctgccacatttagtgtgtgtatgtgtattcattcttttgtttttaataactaaagttttttcccctcattattaaaatgaatttaccagtaaaaaaaaaaaaaaaaaa

SEQ ID NO: 640 - protein, 483 aa, Homo sapien
MSNKLLSPHPHSVVLRSEFKMASSPAVLRASRLYQWSLKSSAQFLGSPQLRQVGQIIRVPARMAATLILEPAGRCCWDEPVRIAVRGLAPEQPVTLRASLRDEKGALFQAHARYRADTLGELDLERAPALGGSFAGLEPMGLLWALEPEKPLVRLVKRDVRTPLAVELEVLDGHDPDPGRLLCQTRHERYFLPPGVRREPVRVGRVRGTLFLPPEPGPFPGIVDMFGTGGGLLEYRASLLAGKGFAVMALAYYNYEDLPKTMETLHLEYFEEAMNYLLSHPEVKGPGVGLLGISKGGELCLSMASFLKGITAAVVINGSVANVGGTLRYKGETLPPVGVNRNRIKVTKDGYADIVDVLNSPLEGPDQKSFIPVERAESTFLFLVGQDDHNWKSEFYANEACKRLQAHGRRKPQIICYPETGHYIEPPYFPLCRASLHALVGSPIIWGGEPRAHVMAQVDAWKQLQTFFHKHLGGHEGTIPSKV

SEQ ID NO: 641 - DNA, 1279 bp, Homo sapien
tcctggggcccagcgcgggtggctgccgcggcccctcgggctgcgtggggagggggcttccgcccctgttgtcattgctcctgcagccttttcgctgggactgcgcgacaccgccccccgaccgggtgcccgctgtgtgccaggccgggtgctgggcacggtcccgcgagtgccctataaggactgccaggcaataatgaaggttcttttactgaaggatgcgaaggaagatgactgtggccaggatccgtatatcagggaattaggattatatggacttgaagccactttgatccctgttttatcgtttgagtttttgtctcttcccagtttctctgagaagctttctcatcctgaagattacgggggactcatttttaccagccccagagcagtggaagcagcagagttatgtttggagcaaaacaataaaactgaagtctgggaaaggtctctgaaagaaaaatggaatgccaagtcagtgtatgtggttggaaatgctactgcttctctagtgagtaaaattggcctggatacagaaggagaaacctgtggaaatgcagaaaagcttgcagaatatatttgttccagggagtcctcagcactgcctcttctatttccctgtggaaacctcaaaagagaaatcctgccaaaagcgctcaaggacaaagggattgccatggaaagcataactgtgtatcagacagttgcacacccaggaatccaagggaacctgaacagctactattcccagcagggggttccagccagcatcacattttttagtccctctggcctcacatacagtctcaagcacattcaggagttatctggtgacaatatcgatcaaattaagtttgcagccatcggccccactacggctcgcgcgctggccgcccagggccttcctgtaagctgcactgcagagagccccacgccacaagccctggccactggcatcaggaaggctctccagccccatggctgctgctgagtcagccacctagcgctggccccatgcagcctccctgggctgggctggctctggatggagccaggcatcggcaagggctctcgggagctgctgccgtcagactcctgcctcaagcctgagtggaagcacctgaggaccggggatcgggacctgacctggggctggcctcaggcccacgtgcacgtgactgccctctgtggaagccagcttaaaccctagccctgtgagagcttcctgtgcccagcaggaaggaagtcaaataaaccacactgactacctgtgctt

SEQ ID NO: 642 - protein, 265 aa, Homo sapien
MKVLLLKDAKEDDCGQDPYIRELGLYGLEATLIPVLSFEFLSLPSFSEKLSHPEDYGGLIFTSPRAVEAAELCLEQNNKTEVWERSLKEKWNAKSVYVVGNATASLVSKIGLDTEGETCGNAEKLAEYICSRESSALPLLFPCGNLKREILPKALKDKGIAMESITVYQTVAHPGIQGNLNSYYSQQGVPASITFFSPSGLTYSLKHIQELSGDNIDQIKFAAIGPTTARALAAQGLPVSCTAESPTPQALATGIRKALQPHGCC

SEQ ID NO: 643 - DNA, 1791 bp, Homo sapien
cccagaaattctacccaagctccctcagcaccatgtaccgagcacttcggctcctcgcgcgctcgcgtcccctcgtgcgggctccagccgcagccttagcttcggctcccggcttgggtggcgcggccgtgccctcgttttggcctccgaacgcggctcgaatggcaagccaaaattccttccggatagaatatgatacctttggtgaactaaaggtgccaaatgataagtattatggcgcccagaccgtgagatctacgatgaactttaagattggaggtgtgacagaacgcatgccaaccccagttattaaagcttttggcatcttgaagcgagcggccgctgaagtaaaccaggattatggtcttgatccaaagattgctaatgcaataatgaaggcagcagatgaggtagctgaaggtaaattaaatgatcattttcctctcgtggtatggcagactggatcaggaactcagacaaatatgaatgtaaatgaagtcattagcaatagagcaattgaaatgttaggaggtgaacttggcagcaagatacctgtgcatcccaacgatcatgttaataaaagccagagctcaaatgatacttttcccacagcaatgcacattgctgctgcaatagaagttcatgaagtactgttaccaggactacagaagttacatgatgctcttgatgcaaaatccaaagagtttgcacagatcatcaagattggacgtactcatactcaggatgctgttccacttactcttgggcaggaatttagtggttatgttcaacaagtaaaatatgcaatgacaagaataaaagctgccatgccaagaatctatgagctcgcagctggaggcactgctgttggtacaggtttaaatactagaattggctttgcagaaaaggttgctgcaaaagtggctgcacttacaggcttgccttttgtcactgctccgaataaatttgaagctctggctgctcatgacgctctggttgagctcagtggagccatgaacactactgcctgcagtctgatgaagatagcaaatgatattcgatttttgggttctggtcctcggtcaggtctgggagaattgatcttgcctgaaaatgaaccaggaagcagtatcatgccaggcaaggtgaaccctactcagtgtgaagcaatgaccatggttgcagcccaagtcatggggaaccatgttgctgtcactgtcggaggcagcaatggacattttgagttgaatgttttcaagccaatgatgattaaaaatgtgttacactcagccaggctgctgggggatgcttcagtttcctttacagaaaactgcgtggtgggaatccaggccaatacagaaaggatcaacaagctgatgaatgagtctctaatgttggtgacagctctcaatcctcatatagggtatgacaaggcagcaaagattgctaagacagcacacaaaaatggatcaaccttaaaggaaactgctatcgaacttggctatctcacagcagagcagtttgacgaatgggtaaaacctaaggacatgctgggtccaaagtgatttacataaatttataatgaaaataaacatgtataaaatttaaaaaaacagactcccatttcttaaaaacggataagtttgaaaggaaactgctattgaacttaagcatctctagcagagcaatttgatcagtatataaaaccctaggatgtgctaggtctaagatggattaaacaagtataaaataaaatacatttataaaataaaaaggaaaacagacttaaaa

SEQ ID NO: 644 - protein, 510 aa, Homo sapien
MYRALRLLARSRPLVRAPAAALASAPGLGGAAVPSFWPPNAARMASQNSFRIEYDTFGELKVPNDKYYGAQTVRSTMNFKIGGVTERMPTPVIKAFGILKRAAAEVNQDYGLDPKIANAIMKAADEVAEGKLNDHFPLVVWQTGSGTQTNMNVNEVISNRAIEMLGGELGSKIPVHPNDHVNKSQSSNDTFPTAMHIAAAIEVHEVLLPGLQKLHDALDAKSKEFAQIIKIGRTHTQDAVPLTLGQEFSGYVQQVKYAMTRIKAAMPRIYELAAGGTAVGTGLNTRIGFAEKVAAKVAALTGLPFVTAPNKFEALAAHDALVELSGAMNTTACSLMKIANDIRFLGSGPRSGLGELILPENEPGSSIMPGKVNPTQCEAMTMVAAQVMGNHVAVTVGGSNGHFELNVFKPMMIKNVLHSARLLGDASVSFTENCVVGIQANTERINKLMNESLMLVTALNPHIGYDKAAKIAKTAHKNGSTLKETAIELGYLTAEQFDEWVKPKDMLGPK

SEQ ID NO: 645 - DNA, 5645 bp, Homo sapien
cgtccaccgtggagtctctccttgctttgggtccactgagccccacacattgttgagtgtctgattgtctccttgcccttacaggacaggaaagcgaaatctctgttcctttgtagggacctttcttttgtaggtgaaagggacagaaatatgattctggcctccttgatggtgaatacaggaacactttcagataaattacaatagagaggagtcagcttatttaaacaaactgaggttaagccagagattgcagttaacagtgaaaaaatttaaagcaagtacctggatggatgcaaagcagtgcccaggagacccaacttacgtgacagagatgatcattgtcactcattcattatgttttgagcaccagccatgtgccaggtccagaactagaagaaacttgggtgtaggtgagatcataggaacagtccctgccccagctgaacatcaggaagccagactgggagcacatgccgtggctgactaggactccagcagggacctggggttccatcagatcagtgtaaagcgatggtttcccaaatgagacctctccagagatggttcattccaccccgcaatggccaccagaaacattgtgctgaccagagggcttcactgccccaaaccccaaaatcacactccaggatgagaaacctaaaagtctatcttgatgaggcttcatagctggaaaccacccctcatggatccacaggctgcatttgatgaaaggagactccaggaagtcgagccattccaggcagacatgtagcaaaagcccgagctggggtccgccctcatgcaataaataacacctgtgcacataagagaggtgacaggcagggcatccctggggacctgggcctgtggcacgtgaagaaacacccaagagagcacgaagtcccaatgccatgaccagatatttcggtgccaggcatgcttctgggtcccagcaaaagacacacaaatccgtgtccttggggacccacagtctagtgacctagggctggccgggtcgcacgcttcttttcaagggctcgaaagcctctgcatggatgcaactttgggggaaaagtaaccctaaccctctgcttctctcatcctcccctcttctgtgtatatgtctgtctctttctctctgtgtgtgcccttccccactcccatccccattcctttttttatttattatattttggtggtgtgtggctcggtttctgttggtcccctcgtgtggcccctcccctgctgcagaactcgtccagctcggcctcctccgaagcctcggaaacctgccagtcagtgagcgagtgcagctcccccacctctgtcagctcgggctccaccatgggtgcctgggtgtccacagagaaggtgaccgcccgggtggcagccacagcggccccactctccctggtccccctgcctgctgctcagacagccctcacagccgcggcaacctggaagctcagaatcgacaccaagagtggggctcctcttggggacagagggtgggacaaggctgagagcattttctagaatgagtgcctggctgctggacaatgaccacatggttgtctcaagggagaggaaggggtatggggaatttggaggtgtgaaggctttctcccagaccaggtgttgcgtgcctgtccatcctcctccctcccttcccgagccacccaccagaccgttggatgagccatgtcactgtgtcagaggctgtgtgcttttccgctttttagtttgcacccccacccccctgcccttgattgagaatgtgctcctgagcaatgcgacgattttggaaacctagaatgaacagattcatttgaagatgctttggaatttttaaatttgcataatgaaatgagcaaatcactatcaccattaaatgaggcttcattagttacattatcaaaaaccattgacaaggccacaaattgagggcactgatcaatttccaaacttctaaaacgtaggtcaaacatagatgcttatttgctgtcaaactcatgtgcattctttgcaccccggctcttttctcttgcatcacagatcatccgtgagcagcagagccccaatgtttgttttatttataaatattcaggtttcccctcccttgaatgtcaatgccattttgtatctccgcactcatcctgttatattaattttttttcctttcccccccctttttttgtttgtttccagttgtctaacgggttttctcactatagtttatcaagtgagtcccacgtggggcccacgggtgcaggccttttccctcattgcctgcctgcctcccgcctgctccctcgggtcacctctgtccaccttccagactacgctcattattacaccattgggcccggcatgttcccgtcatctcagatccctagctggaaggactgggctaagcctgggccctatgaccagcctctggtgaacaccctgcagcgccgcaaagagaagcgagaaccggaccccaacgggggaggacccactaccgccagcggcccacctgcagcagctgaggaggctcagagaccacggagcatgactgtatcggctgccaccaggcctggtgaggagatggaggcttgtgaggagctggccctggccctgtctcggggcctgcagctggacacccagaggagcagccgggactcgcttcagtgctccagcggctacagcacccagacaaccaccccctgctgctctgaggacaccatcccttcccaagtttcagattatgattatttctctgtaagtggtgaccaggaggcagatcagcaggagttcgacaagtcctccaccattccaagaaacagcgacatcagccagtcctaccgacggatgttccaagccaagcgtccagcctcaactgctggcctccccaccaccctgggacctgctatggtcactccaggggttgcaactatccgacggaccccttccaccaagccttctgtccgccggggaaccattggagctggtcccatccccatcaagacacccgtgatccctgtcaagaccccaaccgtcccagacctcccaggggtgttgccagcccctccagatgggccagaagagcggggggagcacagccctgagtcgccatctgtgggtgagggcccccaaggtgtcaccagcatgccctcctcaatgtggagcggccaagcttccgttaaccctccacttccaggcccgaagcccagtatccctgaggagcacagacaggcaattccagaaagtgaagctgaagaccaggaacgggaacccccaagtgccactgtctccccaggccagattccagagagtgaccctgcagacctgagcccaagggatactccacaaggagaagacatgctgaacgccatccgaaggggcgtgaaactgaagaagaccacgacaaacgatcgctcagcccctcgcttttcttaggttcacaagaaatgcgccggtggggaatgaactgtttcattaataaaacctaatttgtcttgatccattccactctataataaaacaaaagattttgtaggcaactcggaatatagctcttttgaaagtactcgacacctttagataagaattaaaaccaacctatgtaactgacataatcttgatcttttaatttgtaaatattgacaattttctttctgcacattttaatcttagtttcccttttgatttttctgaaggtgccaaattccatttaacttttttacaagtctttgtaaaattttaaatgcataaagggggttggggcaggggaaccacgaagtagttaattttagaaaaggatttactatacttcactcttctttttttttccccacaagcttttgtagatgcattgtagtagtctagcttagaagcaaatgcaagttattttaatgtacaaactaaatgggtaagaggtaaaatcttcatttaaatatactatgttctggatgaaaagagcaggagtaacaattgatgagcaatattcagagtgaagtaaatctggaaatggtagactgtgttgggattggggggagggccatgggaggggtacatcgtcaacatagccgatcctgttacatttaagagtagcctcgtaggttgaatttcttctggtagcttcatggtaaatgcatccgaataagccatactggattgcagtgtttgtttctgtagggtgtttaaggacttgacttcctttctcccatgattcctctggactgcacacagcacccacaaccagccccatgcatgctgctgcctctgggcagtcgtagaatctcccacttcagtttctcgttgattgtactcacctttatggaatccaaatacatccaaaagggtaaggcagttttaaaaatgtgaaaacatttaaaaatgataatagcagggaattcttagattatagtaaatgccttttacttaactgtgcccagcaggctgggtgcgttaaaaagcccaagtattttgaaaaaactcgaacagatttgacaagggtagccagcttggagtctagcaacttgccaatgtgtttaccaatctgggggcttgtttttcttttcttctttcaaataaatggcagttaactggctttacagtaaacattgaagagaggaggatttgtttattgtcactgggaatctgaccactatactgtcctttttttgtattctgggtaatgttttttggaaaagatttgtcttttctaagtggaagttaaatttgttatactgcccatcccctaaagccaacagagatttgtagatttaaagggatcacatttgaagacaatagtgtttaagaaagcaagcaagtcccttagcagtcaggtcataacagggcacatttctgaccgaaccctctcaaggcagaggaggagtttggtgggtttcatacaccctgcagattcctgttggctctaaccctcaattacctaatcttatgctttaacacataactgcattggatgtgagagtaacgtaccgtatggtcattgttctatatattaacattgaacactgctgcgattgctcaaggacattttatgttacggctttaaagcaaaggcatgattattagaaactatttaagcttttttctttgaaaaacaagcttcttttacagaatataaacaacagtagtgcctgtggtttagcccaccaatcttgatgactaaaagtagctgatgcattgtgcatatgatgcttgagatggtttttgcaaaagcagaaatcgctgcaaggtaatcacaatagataaaagtggtattttaaacctttgaaataaatggatgtaactgtaccttggtacagcttttcacttgtttagtttttaaacgttagtataatctgaataaataaaatgttgccaaattcaatgtagaaagaatgtgacaacacaccttgggtagttctgcttgtgtttttgcatattgtaaaagcagtgtcacagctaaaaagaaagaaatcgtttctaacagtaaattattgtgctttagttgctagtttgtactgagagttgacctctccctgtgcagttttttgttctaaacttgtataaataacaattgtgtaatgtgtctccctcctacattgtaacaattgcttcagcctacgttataaataaagaaccactagatt

SEQ ID NO: 646 - protein, 356 aa, Homo sapien
MFPSSQIPSWKDWAKPGPYDQPLVNTLQRRKEKREPDPNGGGPTTASGPPAAAEEAQRPRSMTVSAATRPGEEMEACEELALALSRGLQLDTQRSSRDSLQCSSGYSTQTTTPCCSEDTIPSQVSDYDYFSVSGDQEADQQEFDKSSTIPRNSDISQSYRRMFQAKRPASTAGLPTTLGPAMVTPGVATIRRTPSTKPSVRRGTIGAGPIPIKTPVIPVKTPTVPDLPGVLPAPPDGPEERGEHSPESPSVGEGPQGVTSMPSSMWSGQASVNPPLPGPKPSIPEEHRQAIPESEAEDQEREPPSATVSPGQIPESDPADLSPRDTPQGEDMLNAIRRGVKLKKTTTNDRSAPRFS

SEQ ID NO: 647 - DNA, 1868 bp, Homo sapien
ccgattcctggcttttgcaaggctgtggtcggtggtcatcagtgctcttgacccaggtccagcgagccttttccctggtgttgcagctgttgttgtaccgccgccgtcgccgccgtcgccgcctgctctgcggggtcatggtgtgcttccgcctcttcccggttccgggctcagggctcgttctggtctgcctagtcctgggagctgtgcggtcttatgcattggaacttaatttgacagattcagaaaatgccacttgcctttatgcaaaatggcagatgaatttcacagtacgctatgaaactacaaataaaacttataaaactgtaaccatttcagaccatggcactgtgacatataatggaagcatttgtggggatgatcagaatggtcccaaaatagcagtgcagttcggacctggcttttcctggattgcgaattttaccaaggcagcatctacttattcaattgacagcgtctcattttcctacaacactggtgataacacaacatttcctgatgctgaagataaaggaattcttactgttgatgaacttttggccatcagaattccattgaatgacctttttagatgcaatagtttatcaactttggaaaagaatgatgttgtccaacactactgggatgttcttgtacaagcttttgtccaaaatggcacagtgagcacaaatgagttcctgtgtgataaagacaaaacttcaacagtggcacccaccatacacaccactgtgccatctcctactacaacacctactccaaaggaaaaaccagaagctggaacctattcagttaataatggcaatgatacttgtctgctggctaccatggggctgcagctgaacatcactcaggataaggttgcttcagttattaacatcaaccccaatacaactcactccacaggcagctgccgttctcacactgctctacttagactcaatagcagcaccattaagtatctagactttgtctttgctgtgaaaaatgaaaaccgattttatctgaaggaagtgaacatcagcatgtatttggttaatggctccgttttcagcattgcaaataacaatctcagctactgggatgcccccctgggaagttcttatatgtgcaacaaagagcagactgtttcagtgtctggagcatttcagataaatacctttgatctaagggttcagcctttcaatgtgacacaaggaaagtattctacagctcaagactgcagtgcagatgacgacaacttccttgtgcccatagcggtgggagctgccttggcaggagtacttattctagtgttgctggcttattttattggtctcaagcaccatcatgctggatatgagcaattttagaatctgcaacctgattgattatataaaaatacatgcaaataacaagattttcttacctctcagttgttgaaacactttgcttcttaaaattgatatgttgaaactttaattcttttatcaatcccagcattttgagatcagtctttattaataaaacctgttctctttaatcagcttaaaatccaaagtgtcatatttactggtcctggagacaaacttgttcaaaagaacatcaacgtgcaatgttttaaggtctatcttaagaagccctggccaaattttgatcctaaccttgaagtatgccttgaacttattaacatggccattataagaataaaatatgtagttgtgtcttaatggaattaataaatgtcatttcactactggtgttctgttttcaatgtataaggactatagtgatttaaactcatcaatgtgcctttgcataaagttgattaaataaatattgatgtggtataaatgcccatcagatatgct

SEQ ID NO: 648 - protein, 410 aa, Homo sapien
MVCFRLFPVPGSGLVLVCLVLGAVRSYALELNLTDSENATCLYAKWQMNFTVRYETTNKTYKTVTISDHGTVTYNGSICGDDQNGPKIAVQFGPGFSWIANFTKAASTYSIDSVSFSYNTGDNTTFPDAEDKGILTVDELLAIRIPLNDLFRCNSLSTLEKNDVVQHYWDVLVQAFVQNGTVSTNEFLCDKDKTSTVAPTIHTTVPSPTTTPTPKEKPEAGTYSVNNGNDTCLLATMGLQLNITQDKVASVININPNTTHSTGSCRSHTALLRLNSSTIKYLDFVFAVKNENRFYLKEVNISMYLVNGSVFSIANNNLSYWDAPLGSSYMCNKEQTVSVSGAFQINTFDLRVQPFNVTQGKYSTAQECSLDDDTILIPIIVGAGLSGLIIVIVIAYVIGRRKSYAGYQTL

SEQ ID NO: 649 - DNA, 3774 bp, Homo sapien
ccgccgtccctgcgtccttcggtctctgctcccgggacccgggctccgccgcagccagccagcatgtcggggatcaagaagcaaaagacggagaaccagcagaaatccaccaatgtagtctatcaggcccaccatgtgagcaggaataagagagggcaagtggttggaacaaggggtgggttccgaggatgtaccgtgtggctaacaggtctctctggtgctggaaaaacaacgataagttttgccctggaggagtaccttgtctcccatgccatcccttgttactccctggatggggacaatgtccgtcatggccttaacagaaatctcggattctctcctggggacagagaggaaaatatccgccggattgctgaggtggctaagctgtttgctgatgctggtctggtctgcattaccagctttatttctccattcgcaaaggatcgtgagaatgcccgcaaaatacatgaatcagcagggctgccattctttgaaatatttgtagatgcacctctaaatatttgtgaaagcagagacgtaaaaggcctctataaaaaggccagagctggggagattaaaggatttacaggtattgattctgattatgagaaacctgaaactcctgagcgtgtgcttaaaaccaatttgtccacagtgagtgactgtgtccaccaggtagtggaacttctgcaagagcagaacattgtaccctatactataatcaaagatatccacgaactctttgtgccggaaaacaaacttgaccacgtccgagctgaggctgaaactctcccttcattatcaattactaagctggatctccagtgggtccaggttttgagcgaaggctgggccactcccctcaaaggtttcatgcgggagaaggagtacttacaggttatgcactttgacaccctgctagatgatggcgtgatcaacatgagcatccccattgtactgcccgtctctgcagaggataagacacggctggaagggtgcagcaagtttgtcctggcacatggtggacggagggtagctatcttacgagacgctgaattctatgaacacagaaaagaggaacgctgttcccgtgtttgggggacaacatgtacaaaacacccccatatcaaaatggtgatggaaagtggggactggctggttggtggagaccttcaggtgctggagaaaataagatggaatgatgggctggaccaataccgtctgacacctctggagctcaaacagaaatgtaaagaaatgaatgctgatgcggtgtttgcattccagttgcgcaatcctgtccacaatggccatgccctgttgatgcaggacactcgccgcaggctcctagagaggggctacaagcacccggtcctcctactacaccctctgggcggctggaccaaggatgacgatgtgcctctagactggcggatgaagcagcacgcggctgtgctcgaggaaggggtcctggatcccaagtcaaccattgttgccatctttccgtctcccatgttatatgctggccccacagaggtccagtggcactgcaggtcccggatgattgcgggtgccaatttctacattgtggggagggaccctgcaggaatgccccatcctgaaaccaagaaggatctgtatgaacccactcatgggggcaaggtcttgagcatggcccctggcctcacctctgtggaaatcattccattccgagtggctgcctacaacaaagccaaaaaagccatggacttctatgatctagcaaggcacaatgagtttgacttcatctcaggaactcgaatgaggaagctcgcccgggaaggagagaatcccccagatggcttcatggcccccaaagcatggaaggtcctgacagattattacaggtccctggagaagaactaagcctttggctccagagtttctttctgaagtgctctttgattaccttttctatttttatgattagatgctttgtattaaattgcttcctcaatgatgcattttaacttttataatgaagtaaaagttgtgtctataattaaaaaaaaatatatatatatacacacacacatatacatacaaagtcaaactgaagaccaaatcttagcaggtaaaagcaatattcttatacatttcataataaaattagctctatgtattttctactgcacctgagcaggcaggtcccagatttcttaaggctttgtttgaccatgtgtctagttacttgctgaaaagtgaatatattttccagcatgtcttgacaacctgtactcttccaatgtcatttatcagttgtaaaatatatcagattgtgtcctcttctgtacaattgacaaaaaaaaatttttttttctcactctaaaagaggtgtggctcacatcaagattcttcctgatattttacctcatgctgtacaagccttaatgtgtaatcatatcttacgtgttgaagacctgactggagaaacaaaatgtgcaataacgtgaattttatcttagagatctgtgcagcctagattttacctcatgctgtacaaagccttaatgttgtaatcatatcttacgtgttgagacctgactggagaaacaaaatgtgcaataacgtgaattttatcttagagatctgtgcagcctattttctgtcacaaaagttatattgtctaataagagaagtcttaatggcctctgtgaataatgtaactcagttacacggtgacttttaatagcatacagtgatttgatgaaaggacgtcaaacaatgtggcgatgtcgtggaaagttatctttcccgctctttgctgtggtcattgtgtcttgcagaaaggatggccctgatgcagcagcagcgccagctgtaataaaaaataattcacactatcagactagcaaggcactagaactggaaaagaccacagaaaacaaagaatccaaccctttcatcttacaggtgaacaaactgtgatgatgcacatgtatgtgttttgtaagctgtgagcaccgtaacaaaatgtaaatttgccattattaggaaagtgctggtggcagtgaagaagcacccaggccacttgactcccagtctggtgccctgtctacaccagacaacacaggagctgggtcagattcccctcagctgcttaacaaagttcctcgaacagaaagtgcttacaaagctgccttctcggatactgaaaggtcgagttttctgaactgcactgattttattgcagttgaaaaacccaaagctattccaaagatttcaagctgttctgagacatcttctgatggctttacttcctgagaggcaatgtttttactttatgcataattcattgttgccaaggaataaagtgaagaaacagcacctttttaatatataggtctctctggaagagacctaaatttagaaagagaaaactgtgacaattttcatattctcattcttaaaaaacactaatcttaactaacaaaagttcttttgagaataagttacacacaatggccacagcagtttgtctttaatagtatagtgcctatactcatgtaatcggttactcactactgcctttaaaaaaaaccagcatatttattgaaaacatgagacaggattatagtgccttaaccgatatattttgtgacttaaaaaatacatttaaaactgctcttctgctctagtaccatgcttagtgcaaatgattatttctatgtacaactgatgcttgttcttattttaataaatttatcagagtgaaaaaaaaaaaaaaaaaaa

SEQ ID NO: 650 - protein, 614 aa, Homo sapien [sequence omitted]

SEQ ID NO: 651 - DNA, 2955 bp, Homo sapien
ggagagaggacctatttctacctaaggacattcccggaaggcaatgggtttcaaacaatatcctgaagagactcatctcggggaactaagcaggtggtaatcagagaacacagagcccccggaagaattttatggcatttcaggcaagccacaggccagcctggggaaaaagcaggaagaaaaactggcaatacgagggcccaacccaaaagttattcctgaagagaaacaacgtgtcagcaccagatgggccttcagaccccagcatctccgcgagcagtgagcaaagcggggcacagcagcctcccggtttacaggttgaaaggattgttgacaaaaggaaaaataaaaaagggaagacagagtatttggttcggtggaaaggctatgacagcgaggacgacacttgggagccggaacagcacctcgtgaactgtgaggaatacatccacgacttcaacagacgccacacggagaagcagaaggagagcacattgaccagaacaaacaggacctctcccaacaatgctaggaaacaaatctccagatccaccaacagcaacttttctaagacctctcctaaggcactcgtgattgggaaagaccacgaatccaaaaacagccagctgtttgctgccagccagaagttcaggaagaacacagctccatctctctccagccggaagaacatggacctagcgaagtcaggtatcaagatcctcgtgcctaaaagccccgttaagagcaggaccgcagtggacggctttcagagcgagagccctgagaaactggaccccgtcgagcagggtcaggaggacacagtggcacccgaagtggcagcggaaaagccggtcggagctttattgggccccggtgccgagagggccaggatggggagcaggcccaggatacacccactagtgcctcaggtgcccggccctgtgactgcagccatggccacaggcttagctgttaacgggaaaggtacatctccgttcatggatgcattaacagccaatgggacaaccaacatacagacatctgttacaggagtgactgccagcaaaaggaaatttattgacgacagaagagaccagccttttgacaagcgattgcgtttcagcgtgaggcaaacagaaagtgcctacagatacagagatattgtggtcaggaagcaggatggcttcacccacatcttgttatccacaaagtcctcagagaataactcactaaatccagaggtaatgagagaagtccagagtgctctgagcacggccgctgccgatgacagcaagctggtactgctcagcgccgttggcagcgtcttctgttgtggacttgactttatttattttatacgacgtctgacagatgacaggaaaagagaaagcactaaaatggcagaagctatcagaaacttcgtgaatactttcattcaatttaagaagcccattattgtagcagtcaatggcccagccattggtctaggagcatctatattgcctctttgcgatgtggtttgggctaatgaaaaggcttggtttcaaacaccctataccaccttcggacagagtccagatggctgttctaccgttatgtttcccaagataatgggaggagcatctgcaaacgagatgctgctcagtggacggaagctgacagcgcaggaggcgtgtggcaagggcctggtctcccaggtgttttggcccgggacgttcactcaggaagtgatggttcgcattaaggagcttgcctcgtgcaatccagttgtgcttgaggaatccaaagccctcgtgcgctgcaacatgaagatggagctggagcaggccaacgagagggagtgtgaggtgctgaagaaaatctggggctcggcccaggggatggactccatgttaaagtacttgcagaggaagatcgatgagttctgagtgtcgggctgcccactggtgacaccgggatcgggctgagcaggagaacatcaccggctccagttcccctgatccattctcacagcctgaaacaagctcacccgtagcttacgcttggaagcaggactgggaacatccacgctatttattatcgaggagttttaaagtactgtaactttaaaataaataactacaaagcttctttgtcvaaacgtcattattttatacttatatacacgcaggtgtaaaagtataaaggtgagcactagactgctcttagaagctctaatttttgttttctttggctagtactgtataaaaaacagaattgtgttttattggttttggatgacagaaaagtctggaataatgtttgttttcctcatttcttccttctagaacacagaatctaagggggtgttagccagcctcgcctccctgccccacgtagagacacagagtgatgtgaggcgttggctttttctccaagaaggtacagatacctcagattcgggaaactcaaaatcaaaagacttagcttctaggataaatacttctgatgaaaaatccgctgaggagcataccccaaaccagacatatgcttaggattcatgctgagatatcaattggtttccccttctttttaaaatacgtccagttcttacccagttaacatgaagaaaccactgtctctagaagaaagcttgttttgcagtattagtgaatcactgaatagcttaagtatgactatctaagttataagttagtctttagtgggttttaaatagtttttctgacccttctgaaaaataactacataagtgcttcttgttgctgggtgagaaatactactttatagacagttttggttttctgtttgcagatatgattgatgtatttcaccaaaataaaatatttttatgtttataaagtgtaatttttaggttcacttagaatatattttatttaataagttaaaattcttttggcacactattaaatgcaaaaactcctttcaaaaaaaaaa

SEQ ID NO: 652 - protein, 598 aa, Homo sapien [sequence omitted]

SEQ ID NO: 653 - DNA, 751 bp, Homo sapien
aggatgatcaagctgttctcgctgaagcagcagaagaaggaggaggagtcggcgggcggcaccaagggcagcagcaagaaggcgtcggcggcgcagctgcggatccagaaggacataaacgagctgaacctgcccaagacgtgtgatatcagcttctcagatccagacgacctcctcaacttcaagctggtcatctgtcctgatgagggcttctacaagagtgggaagtttgtgttcagttttaaggtgggccagggttacccgcatgatccccccaaggtgaagtgtgagacaatggtctatcaccccaacattgacctcgagggcaacgtctgcctcaacatcctcagagaggactggaagccagtccttacgataaactccataatttatggcctgcagtatctcttcttggagcccaaccccgaggacccactgaacaaggaggccgcagaggtcctgcagaacaaccggcggctgtttgagcagaacgtgcagcgctccatgcggggtggctacatcggctccacctactttgagcgctgcctgaaatagggttggcgcatacccacccgccgccacggccacaagccctggcatcccctgcaaatatttattgggggccatgggtaggggtttggggggcggccggtgggggaatcccctgccttggccttgcctccccttcctgccacgtgcccctagttattttttttttaacaccaggctaactaaaggggaatgttactgc

SEQ ID NO: 654 - protein, 183 aa, Homo sapien
MIKLFSLKQQKKEEESAGGTKGSSKKASAAQLRIQKDINELNLPKTCDISFSDPDDLLNFKLVICPDEGFYKSGKFVFSFKVGQGYPHDPPKVKCETMVYHPNIDLEGNVCLNILREDWKPVLTINSIIYGLQYLFLEPNPEDPLNKEAAEVLQNNRRLFEQNVQRSMRGGYIGSTYFERCLK

SEQ ID NO: 655 - DNA, 4103 bp, Homo sapien
ggagccctgggcgcgggggcggcgtgtcaggtggttgcggagctggtaagaatcatattctaagaactcagccactcaggtatccaccatggtgctgggtcctgaacagaagatgtcagatgacagtgtttctggagatcatggggagtctgccagtcttggtaacatcaaccctgcctatagtaatccctctctttcacagtcccctggggactcagaggagtacttcgccacttactttaatgagaagatctccattcctgaggaggagtactcttgttttagctttcgtaaactctgggctttcaccggaccaggttttcttatgagcattgcctacctggatccaggaaatattgaatccgatttgcagtctggagcagtggctggatttaagttgctctggatccttctgttggccacccttgtggggctgctgctccagcggcttgcagctagactgggagtggttactgggctgcatcttgctgaagtatgtcaccgtcagtatcccaaggtcccacgagtcatcctgtggctgatggtggagttggctatcatcggctcagacatgcaagaagtcattggctcagccattgctatcaatcttctgtctgtaggaagaattcctctgtggggtggcgttctcatcaccattgcagatacttttgtatttctcttcttggacaaatatggcttgcggaagctagaagcattttttggctttctcatcactattatggccctcacatttggatatgagtatgttacagtgaaacccagccagagccaggtactcaagggcatgttcgtaccatcctgttcaggctgtcgcactccacagattgaacaggctgtgggcatcgtgggagctgtcatcatgccacacaacatgtacctgcattctgccttagtcaagtctagacaggtaaaccggaacaataagcaggaagttcgagaagccaataagtactttttcattgaatcctgcattgcactctttgtttccttcatcatcaatgtctttgttgtctcagtctttgctgaagcattttttgggaaaaccaacgagcaggtggttgaagtctgtacaaataccagcagtcctcatgctggcctctttcctaaagataactcgacactggctgtggacatctacaaagggggtgttgtgctgggatgttactttgggcctgctgcactctacatttgggcagtggggatcctggctgcaggacagagctccaccatgacaggaacctattctggccagtttgtcatggagggattcctgaacctaaagtggtcacgctttgcccgagtggttctgactcgctctattgccatcatccccactctgcttgttgctgtcttccaagatgtagagcatctaacagggatgaatgactttctgaatgttctacagagcttacagcttccctttgctctcatacccatcctcacatttacgagcttgcggccagtaatgagtgactttgccaatggactaggctggcggattgcaggaggaatcttggtccttatcatctgttccatcaatatgtactttgtagtggtttatgtccgggacctagggcatgtggcattatatgtggtggctgctgtggtcagcgtggcttatctgggctttgtgttctacttgggttggcaatgtttgattgcactgggcatgtccttcctggactgtgggcatacggtaagcatctctaaaggcctgctgacagaagaagccacccgtggctacgttaaataacactggattagtctgtcttctgcaggtagccatcagagccagtgtgtttctatggtttactgtgtgaacatagccaaaagtatgtgccgttgcacagactgtgtttatgactcaaccgttggttggaaaagactttgtttcatgtgtatttgaaagatggaattattttttccttcctgacctaaccttagaactggattagggtgggatctttgaaaagctgacatttgctgctatcattccaacactaaattcttaagtagttgcccaagggccagctcagtttatccttcggagagacaaggatatgcatgattcttaaccaggctatatgttaaaaaaaaattggaaaatgcaatacattttttattatacaaactacagaatgagtatgcaagttttatttatcaaaatgtaatggatttttaaaggctgagaaattttccttatacctaccttttcagttattttaattataccaaattatcaactagaatagcttcatccatatgaaatataaaatgaagagacacctagctctatcaggcttaggattctttgaacttatttccactttaatttctcagtggaagttaagaggggtgagaaaacaaagaaggggaaaaactgacaactaacaaaaccagcaccacatcgctaggtggtgcttactaattaccttctcaggattttcctcagattgaaaagcttatgaggatttcttgggagtcttaataacctgcctgttagtacagagctttcctgatgatatttactcttgagcacatgtggttgtaaaaccttaactttctttctccaggagggtggtgatagaaacagatggtagtatttatgaactgatgttctcgtgaaatgttgagggtggggagaaaagactttaagggaggagagccatctattttgttcctaaagccacctctcagcagaatcgtcatgtttttctgatgcaccgctctgcttcatgcccaagatgacttgcgaggcaatctcaggagctgtggacttaaccgttgcaaagcacactgtctttctcagcgttctctgcaagtcagtaggtgttagtatggttgcaaagttcactgtctcagcaaagttgaactgggctacctctctacagctgtttcctcagagggaaaaatcttgagaccatggtggagctctggagtcagaggaaatgggtgtcttcagcacaaagctgctgcttttacttcagccacttctgacatttttacataccgagcctgagattgtgtgattatctcaaatcaaatcactttgatggagataaataatcaaaactgttttatagtcattgatttggtgagaacagtaatggaaaatggtgttgaaggacttctcatttttggagctttccttccagagtcctggctgattggtgttcgctgttcatctgagcccccaaaagcattattactgatacttgcacacagtcaaaagcgcagactggatggatggtcttttataaggcatttaagggtacactactgtgtttcactgaccatacatttttcttagcccctcaagtaatatagcacagagttatgaatgacaattcccctaaccattcctcttcatatctgcctcttccccttaccatcgtaattctccaaactggtcataaaggcactctgtgaagatattggggactgacatcttaagctctcacctggctgcagtaggaaaggccaaactgacgacaaaaaaaaaattctttataaagatgatatggtaacatgtatctttgccctgggtctgggtgggtccagtcagtctcagatttacaagcatttaggagcctaggtaaaagctgctagtattcttttaaaagttatatttatgacttgcaatgatagaaaactccttccaattaaatggcattttataatattatgtgtgtacttcacagtgttaaaaataccctcatacgttattgcatttgatcttcacagaaagtgcattttaaccagtactctgggtgcaataaataatatgtagaaatttaagtcctccaattccagcatatccagtgagttttgacagtgtgtttatgtggaatgtttaaggatatacaattgtactttatataaattggttcttgttcttcttaaatgtgacatgaaataattgtgctgctacattatactggaaattaacaggggaaaagggaagagctcttggctcccttgaggttctgctagtggtgttaggagtggttacaactgagcttttagtaaccatttaaccgtatgtaaacttggtttctaattaaaaaaaaatttctttttcc

SEQ ID NO: 656 - protein, 561 aa, Homo sapien
MVLGPEQKMSDDSVSGDHGESASLGNINPAYSNPSLSQSPGDSEEYFATYFNEKISIPEEEYSCFSFRKLWAFTGPGFLMSIAYLDPGNIESDLQSGAVAGFKLLWILLLATLVGLLLQRLAARLGVVTGLHLAEVCHRQYPKVPRVILWLMVELAIIGSDMQEVIGSAIAINLLSVGRIPLWGGVLITIADTFVFLFLDKYGLRKLEAFFGFLITIMALTFGYEYVTVKPSQSQVLKGMFVPSCSGCRTPQIEQAVGIVGAVIMPHNMYLHSALVKSRQVNRNNKQEVREANKYFFIESCIALFVSFIINVFVVSVFAEAFFGKTNEQVVEVCTNTSSPHAGLFPKDNSTLAVDIYKGGVVLGCYFGPAALYIWAVGILAAGQSSTMTGTYSGQFVMEGFLNLKWSRFARVVLTRSIAIIPTLLVAVFQDVEHLTGMNDFLNVLQSLQLPFALIPILTFTSLRPVMSDFANGLGWRIAGGILVLIICSINMYFVVVYVRDLGHVALYVVAAVVSVAYLGFVFYLGWQCLIALGMSFLDCGHTVSISKGLLTEEATRGYVK

SEQ ID NO: 657 - DNA, 760 bp, Homo sapien
gcgagggtagccatgacggcctccgtgctgcgaagtatctcgccagccctgcgcccgactagcgggcttctgggaacttggcagacgcagcttagagagactcaccagcgagcgtcattgttgtctttctgggaactcattcccatgagatcagaacctcttcgaaaaaagaagaaggtagatcctaaaaaagaccaagaagcaaaggagcgcttgaaaaggaagatccgaaaactggaaaaggctactcaagagctaattcctattgaagattttattacccctctaaagttcttggataaagcaagagagcggcctcaggtggagctcacctttgaggagactgagaggagagctctgcttctgaagaagtggtccttgtacaagcagcaagagcataagatggagagggacaccatcagggctatgctagaagcccagcaggaagctctggaggaactgcaactggaatccccgaagctccatgctgaggccatcaagcgggatcctaacctgttcccctttgagaaggaagggccacattacacaccaccgatccctaactaccaaccccctgaaggcaggtacaatgacatcaccaaggtgtacacacaagtggagtttaagagatagacttgcaggctgctatccttaacatgctgcccctgagagtaggaatgaccagggttcaagtctgctttccacagaatcaggcatgctgttaataaatactggtttaatcaaaaaaaaaaaaaaaaaa

SEQ ID NO: 658 - protein, 206 aa, Homo sapien
MTASVLRSISPALRPTSGLLGTWQTQLRETHQRASLLSFWELIPMRSEPLRKKKKVDPKKDQEAKERLKRKIRKLEKATQELIPIEDFITPLKFLDKARERPQVELTFEETERRALLLKKWSLYKQQEHKMERDTIRAMLEAQQEALEELQLESPKLHAEAIKRDPNLFPFEKEGPHYTPPIPNYQPPEGRYNDITKVYTQVEFKR

SEQ ID NO: 659 - DNA, 4799 bp, Homo sapien
gaattccgttgctgtcggcgcgcagcagcagcagcagcagcagcagcagcagcagcagcagcagcacccgcatccgctgcgggagtccgagccggaaccacacccaagtagctgccctttcctcttctgtcatctcaccgccccaccacagaccgcgttccccgaggaaaccggccgcccacgcccggagcatcctcccctgttgagcgggcgctgacggacccggcggcatgatgcggctgcgaggctcggggatgctgcgggacctgctcctgcggtcgcccgccggcgtgagcgcgactctgcggcgggcacagcccttggtcaccctgtgccggcgtccccgaggcgggggacggccggccgcgggcccggctgccgccgcgcgactccacccgtggtggggcgggggcggctggccggcggagcccctcgcgcggggcctgtccagctctccttcggagatcttgcaggagctgggcaaggggagcacgcatccgcagcccggggtgtcgccacccgctgccccggcggcgcccggccccaaggacggccccggggagacggacgcgtttggcaacagcgagggcaaagagctggtggcctcaggtgaaaataaaataaaacagggtctgttacctagcttggaagatttgctgttctatacaattgctgaaggacaagagaaaatacctgttcataaatttattacagcactcaaatctacaggattgcgaacgtctgatcccaggttgaaagagtgtatggatatgttaagattaactcttcaaacaacatcagatggtgtcatgctagacaaagatctttttaaaaaatgtgttcagagcaacattgttttgttgacacaagcatttagaagaaagcttgtgattcctgactttatgtcttttacctcacacattgatgagttatatgaaagtgctaaaaagcagtctggaggaaaggttgcagattatattcctcaactggccaaattcagtcccgatttgtggggtgtgtctgtttgtacagtagatggacagaggcattctactggagataccaaagttcccttctgtcttcagtcctgtgtaaaacctttgaaatatgccattgctgttaatgatcttggaactgaatatgtgcatcgatatgttggaaaagagccgagtggactaagattcaacaaactatttttgaatgaagatgataaaccacataatcctatggtaaatgctggagcaattgttgtgacttcactaataaagcaaggagtaaataatgctgaaaaatttgactatgtcatgcagtttttgaataagatggctggtaatgaatatgttggattcagtaatgcaacgtttcagtctgaaagagaaagtggagatcgaaattttgcaataggatattacttaaaagaaaagaagtgctttccagaaggcacagacatggttggtatattagacttctacttccagctgtgctccattgaagtgacttgtgaatcagccagtgtgatggctgcgacactggctaatggtggtttctgcccaattactggtgaaagagtactgagccctgaagcagttcgaaatacattgagtttgatgcattcctgtggcatgtatgacttctcagggcagtttgctttccatgttggtcttcctgcaaaatctggagttgctgggggcattcttttagttgtccccaatgttatgggtatgatgtgctggtctcctcctctggataagatgggcaacagtgttaagggaattcacttttgtcacgatcttgtttctctgtgtaatttccataactatgataatttgagacactttgcaaaaaaacttgatcctcgaagagaaggtggtgatcaaagggtaaagtcagtgataaatcttttgtttgctgcatatactggagatgtgtctgcacttcgaagatttgctttgtcagctatggacatggaacagcgggactatgattctagaacagcactccatgtagctgctgcagagggtcatgttgaagttgttaaatttttgctggaagcctgcaaagtaaaccctttccccaaggacaggtggaataacactcccatggatgaagcactgcactttggacaccatgatgtatttaaaattctccaagaataccaagtccagtacacacctcaaggagattctgacaacgggaaggaaaatcaaaccgtccataagaatcttgatggattgttgtaatggtctcaaatcccaagatttaaatcacttacctatttaattgtggaaaatgattatgaagaacatgtgtatttctatctggtagtgatgtatattttacatttgtcatttcagtgttactggagttttcttcattgtgcacacaggacaaatctgatctctttgggaaaaaatagaaataaaacaatctccctccataatgtgagcaatattacctcgtgcattgtataatttgatgtaaaagaaatagttaccaatgctagcttgtgtggtcttccatgatttatttgtgttttgtgaattttcaatttatggtgatgatctgctgatatgcatttataaagtaagctctgttgtacagtctgtccaaatgggtcaaggttgcctttagaagcaaatagtgtgattttcaagacttcaaatacaaatttagtttaagtgtttgaacaactatatgcacttacggttgtgtgtttaaaatgtctctctctcaccctagcttcatgatgtgactcttaaaaaactataatagttaacaactgttagtaagatagaccaattctgattagactttatcagggaatctgtttaagatatgtttggtgaccaaaacgtatgtgtgaatgtagttataatgcttttgaaaaattttcctttttctatatccccttagtccagcctctcttctcagacatttagctatctgcctctttcctttagctgggaaagtgagagctggcatactatgcagtttttatgttttccatagtaagtcagaaaatgcctcctatttctggcatcagaactttgccatttgtctacagaagacgaaccagagacaaaattactaagtataaattagtcaagtttatcagtctaaaaagcgaagggatgtgcaactgcagctctttaagaagtttttttttttagcttctagggtaaagataaattcagaaatgctctaagctaccaaagttattctgaaagtatgggaactgctacaactaacaaacatttgtttccaagcctgtcattaagagtctgcatcaagagatttgtcctccttgggggaccactggatcattccagatttcttgtgatttttctattgtgtaattcttggtgggctctgtagtttaataataagaaaaaggccatttcattttaaattgtgacctataattctttgtcttgggttggtaattcaggattcatttggaaagtgggtaaaaggggcttcaaaaaacggatagaacaggattttctaggagttacacatacattttatcctgtcatacctcgagataaagtggcatgttagtgaggagttctgatattaagcacacacacacatgcacacaaatggacttctctgaagctgtgtttagtgaaatgagctcaagtacatgaatgttagttgttatcacatacagcaaattcctttttttttctttttctatgagcacactctgctgcttctaaactttacatgcctgatggcaccttactccagcagcctccaggtgctttcattttcacttccagtctaagccagtggctcctgccactgccctcccattacctagatggcacctcctttggtgaaaccacggccaatgttccttagctgcaccaggcccgaagctgttcccatgcttgagcttccatggggaggatgctgagtgagcagtttcctacgccgtggatctagcaagccatggagacaggtagcatttgtaagatgctgcacaggagcagcattatccccaaagatattacagggtagacacgttttaactgaaatcaatcaagataactttattcaaagagcagcccgctttgtgtgactaaaatgaaacaagacagttgaattgtgtgacttgaagattaccaatgattttgaggcttttctataataaaaagaggttctaaccattatttgggaacaaagagagttttcatcttttttcagatcaaaaccattctgtaaaatctttgttgtttaattaaatgtgccgttatttacccctgatgttatttatgactatgtgccgattcctgcttgggctgtttgctgttggctggtaataatatatttgatttaaatgctgttgactgtgctattaactgctgccgtcagtaaactccaaagatctttttgttttggctttagtatcatatgtgctttttctgtatcctgagcgctctatatgatcatgttaatttaaagctttatacacattgttgtttttgctggtctcatctttggtaatatgctataccccactgctgcccgacactgccctttagctgcagagctggattagctgttgaccatttgatgctgttgtctgtctggcagggactgaatgacctgatgtcagatttagattcttcctggggattacacagctatgaatgtatttgcttctaaaacctcccaaagtgaatctaatcttaaaactacaagttgtaagtattctgaaattgggaaacatttattttaaatgcaatcaggtagtgttgctttttacagcataataaatatatgtttcaaaa

SEQ ID NO: 660 - protein, 669 aa, Homo sapien
MMRLRGSGMLRDLLLRSPAGVSATLRRAQPLVTLCRRPRGGGRPAAGPAAAARLHPWWGGGGWPAEPLARGLSSSPSEILQELGKGSTHPQPGVSPPAAPAAPGPKDGPGETDAFGNSEGKELVASGENKIKQGLLPSLEDLLFYTIAEGQEKIPVHKFITALKSTGLRTSDPRLKECMDMLRLTLQTTSDGVMLDKDLFKKCVQSNIVLLTQAFRRKLVIPDFMSFTSHIDELYESAKKQSGGKVADYIPQLAKFSPDLWGVSVCTVDGQRHSTGDTKVPFCLQSCVKPLKYAIAVNDLGTEYVHRYVGKEPSGLRFNKLFLNEDDKPHNPMVNAGAIVVTSLIKQGVNNAEKFDYVMQFLNKMAGNEYVGFSNATFQSERESGDRNFAIGYYLKEKKCFPEGTDMVGILDFYFQLCSIEVTCESASVMAATLANGGFCPITGERVLSPEAVRNTLSLMHSCGMYDFSGQFAFHVGLPAKSGVAGGILLVVPNVMGMMCWSPPLDKMGNSVKGIHFCHDLVSLCNFHNYDNLRHFAKKLDPRREGGDQRVKSVINLLFAAYTGDVSALRRFALSAMDMEQRDYDSRTALHVAAAEGHVEVVKFLLEACKVNPFPKDRWNNTPMDEALHFGHHDVFKILQEYQVQYTPQGDSDNGKENQTVHKNLDGLL

SEQ ID NO: 661 - DNA, 1075 bp, Homo sapien
cgcagcaaacacatccgtagaaggcagcgcggccgccgagagccgcagcgccgctcgcccgccgccccccaccccgccgccccgcccggcgaattgcgccccgcgcccctcccctcgcgcccccgagacaaagaggagagaaagtttgcgcggccgagcggggcaggtgaggagggtgagccgcgcgggaggggcccgcctcggccccggctcagcccccgcccgcgcccccagcccgccgccgcgagcagcgcccggaccccccagcggcggcccccgcccgcccagccccccggcccgccatgggcgccgcggcccgcaccctgcggctggcgctcggcctcctgctgctggcgacgctgcttcgcccggccgacgcctgcagctgctccccggtgcacccgcaacaggcgttttgcaatgcagatgtagtgatcagggccaaagcggtcagtgagaaggaagtggactctggaaacgacatttatggcaaccctatcaagaggatccagtatgagatcaagcagataaagatgttcaaagggcctgagaaggatatagagtttatctacacggccccctcctcggcagtgtgtggggtctcgctggacgttggaggaaagaaggaatatctcattgcaggaaaggccgagggggacggcaagatgcacatcaccctctgtgacttcatcgtgccctgggacaccctgagcaccacccagaagaagagcctgaaccacaggtaccagatgggctgcgagtgcaagatcacgcgctgccccatgatcccgtgctacatctcctccccggacgagtgcctctggatggactgggtcacagagaagaacatcaacgggcaccaggccaagttcttcgcctgcatcaagagaagtgacggctcctgtgcgtggtaccgcggcgcggcgccccccaagcaggagtttctcgacatcgaggacccataagcaggcctccaacgcccctgtggccaactgcaaaaaaagcctccaagggtttcgactggtccagctctgacatcccttcctggaaacagcatgaataaaacactcatccc

SEQ ID NO: 662 - protein, 220 aa, Homo sapien
MGAAARTLRLALGLLLLATLLRPADACSCSPVHPQQAFCNADVVIRAKAVSEKEVDSGNDIYGNPIKRIQYEIKQIKMFKGPEKDIEFIYTAPSSAVCGVSLDVGGKKEYLIAGKAEGDGKMHITLCDFIVPWDTLSTTQKKSLNHRYQMGCECKITRCPMIPCYISSPDECLWMDWVTEKNINGHQAKFFACIKRSDGSCAWYRGAAPPKQEFLDIEDP

SEQ ID NO: 663 - DNA, 2330 bp, Homo sapien
gaattcggcacgagcgacgcggcccagaggccaggaacattccgcgcgtggaccagccgggccagggcgatgctgcgggtgcggtgtctgcgcggcgggagccgcggcgccgaggcggtgcactacatcggatctcggcttggacgaaccttgacaggatgggtgcagcgaactttccagagcacccaggcagctacggcttcctcccggaactcctgtgcagctgacgacaaagccactgagcctctgcccaaggactgccctgtctcttcttacaacgaatgggaccccttagaggaagtgatagtgggcagagcagaaaacgcctgtgttccaccgttcaccatcgaggtgaaggccaacacatatgaaaagtactggccattttaccagaagcaaggagggcattattttcccaaagatcatttgaaaaaggctgttgctgaaattgaagaaatgtgcaatattttaaaaacggaaggagtgacagtaaggaggcctgaccccattgactggtcattgaagtataaaactcctgattttgagtctacgggtttatacagtgcaatgcctcgagacatcctgatagttgtgggcaatgagattatcgaggctcccatggcatggcgttcacgcttctttgagtaccgagcgtacaggtcaattatcaaagactacttccaccgtggcgccaagtggacaacagctcctaagcccacaatggctgatgagctttataaccaggattatcccatccactctgtagaagacagacacaaattggctgctcagggaaaatttgtgacaactgagtttgagccatgctttgatgctgctgacttcattcgagctggaagagatatttttgcacagagaagccaggttacaaactacctaggcattgaatggatgcgtaggcatcttgctccagactacagagtgcatatcatctcctttaaagatcccaatcccatgcatattgatgctaccttcaacatcattggacctggtattgtgctttccaaccctgaccgaccatgtcaccagattgatcttttcaagaaagcaggatggactatcattactcctccaacaccaatcatcccagacgatcatccactctggatgtcatccaaatggctttccatgaatgtcttaatgctagatgaaaaacgtgttatggtggatgccaatgaagttccaattcaaaagatgtttgaaaagctgggtatcactaccattaaagttaacattcgtaatgccaattccctgggaggaggcttccattgctggacctgcgatgtccggcgccgaggcaccctacagtcctacttggactgaacaggcctgatggagcttgtggctggcctcagatacacctaagaagcttaggggcaaggttcattctcctgctttaaaaagtgcatgaactgtagtgctttaaacaatcatctccttaacaggggtcgtaagcctggtttgcttctattacttttctttgacataaagaaaataacttctgctaggtattactctctactcctaaagttatttactatttggcttcaagtataaaattttggtgaatgtgtaccaagaaaaaattagtcacctgagtaacttggccactaataattaaccatctacctctgtttttaattttctttccaaaaggcagcttgaaatgttggtcctaatcttaattttttttcctcttctatagacttgagaatgtttttctctaaatgagagaaagacttagaatgtacacagatccaaaatagaatcagattatctctttttttctaaaggagagaaagacttagaacatacacagatcctaagtagaaccaggtaattgtctctttttctaataaggaatttgggtaatttttaattttttgttttttaaaaaataacctagactatgcaaaacatcaaagtgaattttccatgaatgtttttaatattctcatctcaacattgtgatatatgctactaaaaaccttttcatatacatcttacctcatttcaagtgaattattttaatctttttctctctttccaaaaatttacaggaatgtttagtgtaattggatttcgctatcagttcccatccttaagttttgatattcaatatctgatagatacactgcatctttggtcatctaagatttgtttacaaatgtgcaaattatttagagcatagactttataagcattaaaaaaaactaatggaggtaaaacctaaatgcgatgtgaaataattttagtgttgatactgtatgtgtatttttattctaataaacttttgtgttccagattgaaaa

SEQ ID NO: 664 - protein, 423 aa, Homo sapien
MLRVRCLRGGSRGAEAVHYIGSRLGRTLTGWVQRTFQSTQAATASSRNSCAADDKATEPLPKDCPVSSYNEWDPLEEVIVGRAENACVPPFTIEVKANTYEKYWPFYQKQGGHYFPKDHLKKAVAEIEEMCNILKTEGVTVRRPDPIDWSLKYKTPDFESTGLYSAMPRDILIVVGNEIIEAPMAWRSRFFEYRAYRSIIKDYFHRGAKWTTAPKPTMADELYNQDYPIHSVEDRHKLAAQGKFVTTEFEPCFDAADFIRAGRDIFAQRSQVTNYLGIEWMRRHLAPDYRVHIISFKDPNPMHIDATFNIIGPGIVLSNPDRPCHQIDLFKKAGWTIITPPTPIIPDDHPLWMSSKWLSMNVLMLDEKRVMVDANEVPIQKMFEKLGITTIKVNIRNANSLGGGFHCWTCDVRRRGTLQSYLD

SEQ ID NO: 665 - DNA, 10166 bp, Homo sapien
atggggagaagacggaggctgtgtctccagctctacttcctgtggctgggctgtgtggtgctctgggcgcagggcacggccggccagcctcagcctcctccgcccaagccgccccggccccagccgccgccgcaacaggttcggtccgctacagcaggctctgaaggcgggtttctagcgcccgagtatcgcgaggagggtgccgcagtggccagccgcgtccgccggcgaggacagcaggacgtgctccgagggcccaacgtgtgcggctccagattccactcctactgctgccctggatggaagacgctccctggaggaaaccagtgcattgtcccgatttgtagaaatagttgtggagatggattttgttcccgtcctaacatgtgtacttgttccagtgggcaaatatcatcaacctgtggatcaaaatcaattcagcagtgcagtgtgagatgcatgaatggtgggacctgtgcagatgaccactgccagtgccagaaaggatatattggaacttattgtggacaacctgtctgtgaaaatggatgtcagaatggtggacgttgcatcgcccaaccgtgtgcttgtgtttatgggttcactggtccacagtgtgaaagagattacaggacaggcccgtgtttcactcaggtcaacaaccagatgtgccaagggcagctgacaggcattgtctgcacgaagactctgtgctgtgccaccactggacgggcgtggggccatccctgtgagatgtgtccagcccagcctcagccctgccgacggggtttcatccccaacatccgcactggagcttgccaagatgttgatgaatgccaggctatcccagggatatgccaaggaggaaactgtatcaatacagtgggctcttttgaatgcagatgccctgctggtcacaaacagagtgaaactactcagaaatgtgaagacattgatgagtgcagcatcattcctgggatatgtgaaactggtgaatgttccaacaccgtgggaagctatttttgtgtttgtccacgtggatatgtaacctcaacagatggctctcgatgcatcgatcagagaacaggcatgtgtttctcgggcctggtgaatggccgctgtgcacaagagctcccggggagaatgacgaaaatgcagtgctgctgtgagcctggccgctgctggggcatcggaaccattcctgaagcctgtcctgtcagaggttctgaggaatatcgcagactttgcatggatggacttccaatgggaggaattccagggagtgctggttccagacctggaggcactgggggaaatggctttgccccaagtggcaatggcaatggctatggcccaggagggacaggcttcatccccatccctggaggcaatggcttttctcctggcgttgggggagccggtgtgggggccgggggacagggacctatcatcactggactaacaattctgaaccagacaatagatatctgtaagcatcatgctaacctttgtttaaatggacgctgtataccaactgtctcaagctaccgatgtgaatgcaacatgggttataagcaggatgcaaatggagattgtatagatgttgatgaatgcacatcaaatccctgcactaatggagattgtgttaacacacctggttcctattattgtaaatgtcatgctggattccagaggactcctaccaagcaagcatgcattgatattgatgagtgcatccagaatggggttctttgtaaaaacggtcgatgcgtgaactcagatggaagtttccagtgcatttgcaatgccggctttgaattaactacagatggaaaaaactgtgttgatcatgatgaatgtacaactaccaacatgtgtttgaatggaatgtgcatcaatgaagatggcagcttcaagtgcatctgcaaaccaggatttgtcttggctccaaatgggcgttactgtactgatgttgatgaatgccagaccccaggaatctgcatgaatgggcactgcatcaacagtgaagggtccttccgctgtgactgtcccccaggcctggctgtgggcatggatggacgtgtgtgtgttgatactcacatgcgcagtacctgctatggaggaatcaagaaaggagtgtgtgtgcgtcctttccccggtgcagtgaccaagtccgaatgctgctgtgccaatccagactatggttttggagaaccctgccagccatgccctgcaaaaaattcagctgaattccacggcctttgtagtagtggagtaggtatcactgtggatggaagagatatcaatgaatgtgctttggatcctgatatatgtgccaatgggatttgtgaaaacttacgtggtagttaccgttgtaattgcaacagtggctatgaaccagatgcctctggaagaaactgtattgacattgatgaatgtttagtaaacagactgctttgtgataacggattgtgccgaaacacgccaggaagttacagctgtacgtgcccaccagggtatgtgttcaggactgagacagagacctgtgaagatataaatgaatgtgaaagcaacccatgtgtcaatggggcctgcagaaacaaccttggatctttcaattgtgaatgttcgcccggcagcaaactcagctccacaggattgatctgtattgacagcctgaaggggacctgttggctcaacatccaggacagccgctgtgaggtgaatattaatggagccactctgaaatctgaatgctgtgccaccctcggagccgcctgggggagcccctgtgagcggtgtgaactagatacagcttgcccaagagggcttgccaggattaaaggtgttacgtgtgaagatgttaatgagtgtgaggtgttccctggcgtttgtccaaatggacgctgtgtcaacagtaagggatcttttcattgcgagtgccctgaaggccttacgttggatgggactggccgtgtatgtttggatattcgcatggagcagtgttacttgaagtgggatgaagatgaatgcatccaccccgttcctggaaagttccgcatggatgcctgctgctgtgctgtcggggcggcttggggcaccgagtgtgaggagtgccccaaacctggcaccaaggaatacgagacactgtgcccccgcggggctggctttgctaaccgaggggatgttcttactgggcggccattttacaaagacatcaatgaatgcaaagcatttcctgggatgtgcacttatgggaagtgcagaaatacaatcggaagcttcaaatgccgttgcaatagtggctttgctctagacatggaggaaagaaactgcacggacatcgacgagtgcaggatttctcctgacctctgtggcagtggaatctgcgtcaatacaccgggcagctttgagtgcgagtgcttcgaaggctatgaaagtggcttcatgatgatgaagaactgcatggacattgacggatgtgaacgtaaccctctcctttgtaggggtggcacctgtgtgaacactgagggcagctttcagtgtgactgcccactgggacacgagctgtcaccatcccgtgaggactgtgtggatattaatgaatgctccctgagtgacaatctctgcagaaatggaaaatgtgtgaacatgattggaacctatcagtgctcttgcaatcctggatatcaggctacgccagaccgccagggctgtacagatattgatgaatgtatgataatgaacggaggctgtgacacccagtgcacaaattcagagggaagctacgaatgcagctgcagtgagggttatgccctgatgccagatgggagatcgtgtgcagacattgatgaatgtgaaaacaatcctgatatctgtgatggcggccagtgtaccaacattcctggagagtatcgctgcctctgctatgatggcttcatggcttccatggacatgaaaacatgcattgatgtcaatgaatgtgacctaaattcaaatatctgcatgtttggggaatgtgagaacacaaagggatccttcatttgccactgtcagctgggttactcagtgaagaaggggaccacaggatgtacagatgtggatgagtgtgaaattggtgctcataactgcgacatgcatgcctcatgtctgaatatcccaggaagcttcaagtgtagctgcagagaaggctggattggaaacggcatcaagtgtattgatctggacgaatgttctaatggaacccaccagtgtagcatcaatgctcagtgtgtaaataccccgggctcataccgctgtgcctgctccgaaggtttcactggtgatggctttacctgctcagatgttgatgagtgtgcagaaaacataaacctctgtgagaacggacagtgccttaatgtcccgggtgcatatcgctgcgagtgtgagatgggcttcactccagcctcagacagcagatcctgccaagatattgatgaatgctccttccaaaacatttgtgtctctggaacatgtaataacctgcctggaatgtttcattgcatctgcgatgatggttatgaattggacagaacaggagggaactgtacagatattgatgagtgtgcagatcctataaactgtgtcaatggcctatgtgtcaacacgcctggtcgctatgagtgtaactgcccacccgattttcagttgaacccaactggtgtgggttgtgttgacaaccgtgtgggcaactgctacctgaagtttggacctcgaggagatgggagtctgtcttgcaacaccgagatcggggtgggcgtcagtcgctcttcatgctgctgctctctgggaaaggcctggggaaacccctgtgagacatgcccccctgtcaatagcactgaatattacaccctgtgtcccggaggtgaaggcttcagacctaaccccatcacaatcattttagaagacattgacgaatgccaggagttaccaggtctctgccagggtggaaactgcatcaacacttttgggagcttccagtgtgagtgcccacaaggctactacctcagcgaggatacccgcatctgtgaggatattgatgagtgttttgcacatcctggtgtgtgtgggcctgggacctgctataacaccctgggaaattacacctgcatttgcccacctgagtacatgcaggtcaatggaggccacaactgcatggacatgagaaaaagcttttgctaccgaagctataatggaaccacttgtgagaatgagttgcctttcaatgtgacaaaaaggatgtgctgctgcacatataatgtgggcaaagctgggaacaaaccttgtgaaccatgcccaactccaggaacagctgactttaaaaccatatgtggaaatattcctggattcacctttgacattcacacaggaaaagctgttgacattgatgaatgtaaagagattccaggcatttgtgcaaatggtgtgtgcattaaccagattggcagtttccgctgtgaatgccctacaggattcagttacaatgacctgctgttggtttgtgaagatatagatgagtgcagcaatggtgataatctctgccagcggaatgcagactgcatcaatagtcctggtagttaccgctgtgaatgtgccgcgggtttcaaactttcacccaatggggcctgtgtagatcgcaatgaatgtttagaaattcctaacgtttgcagtcatggcttgtgtgttgatctgcaaggaagttaccagtgcatctgccacaatggctttaaggcttctcaggaccagaccatgtgcatggatgttgatgagtgcgagcggcacccatgtggaaatggaacttgtaaaaacaccgttggatcctataactgtctgtgctacccagggtttgaactcactcataataatgattgcctggacatagatgagtgcagttccttttttggtcaggtgtgcagaaatggacgttgttttaatgaaattggttctttcaagtgtctatgtaacgaaggttatgaacttaccccagatggcaaaaactgtatagacactaatgagtgtgtcgcccttcccggctcttgctctcctggtacctgtcagaatttggagggatccttcagatgcatctgtcccccagggtatgaagtaaaaagcgagaactgcattgatataaatgaatgtgatgaagatcccaacatttgtctttttggttcctgtactaatactccagggggcttccagtgcctctgcccccctggctttgtactatctgataatggacggagatgctttgatactcgccagagcttctgcttcacaaattttgaaaatggaaagtgttctgtacccaaagctttcaacaccacaaaagcaaaatgctgctgtagtaagatgccaggagagggctggggggacccctgtgagctgtgccccaaagacgatgaagttgcatttcaggatttgtgtccatatggccatggaactgtccctagtcttcatgatacacgtgaagatgtcaatgagtgtcttgagagcccaggcatttgttcaaatggtcaatgtatcaacaccgacggatcttttcgctgtgaatgtccaatgggctacaaccttgactacactggagtacgctgtgtggatactgatgagtgttcaatcggcaatccgtgtggaaatggtacatgcaccaatgttattgggagttttgaatgcaattgcaatgaaggctttgagccagggcccatgatgaattgtgaagatatcaacgaatgtgcccagaacccactgctgtgtgctttacgctgcatgaacacttttgggtcctatgaatgcacgtgcccgattggctatgccctcagggaagatcaaaagatgtgcaaagatctggatgaatgtgctgaagggttacacgactgtgaatctaggggcatgatgtgtaagaatctaatcggcaccttcatgtgcatctgccctcctggaatggcccgaaggcccgatggagaaggctgtgtagatgaaaatgaatgcaggaccaagccaggaatctgtgaaaatggacgttgtgttaacattattggaagctatagatgtgagtgtaatgaaggattccagtcaagttcttcaggcactgaatgccttgacaatcgacagggtctctgctttgcagaggtactgcagacaatatgtcaaatggcatccagtagtcgcaatctcgtcactaagtcagaatgctgctgtgatggtgggcgaggctggggccaccagtgcgagctttgcccacttcctggaactgcccagtacaaaaagatatgtcctcatggcccaggatatacaactgatggaagagatattgatgaatgtaaggtaatgccaaacctctgcaccaatggtcagtgcatcaataccatgggctcattccgatgcttctgcaaggttggctacaccacagacatcagtggaacctcttgtatagaccttgatgaatgctcccagtccccgaaaccatgcaactacatctgcaagaacactgaggggagttatcagtgttcatgtccgagggggtatgtcctgcaagaggatggaaagacatgcaaagaccttgatgaatgtcaaacaaagcagcataactgccagttcctctgtgtcaacaccctgggggggtttacctgtaaatgtccacctggtttcacacagcatcacactgcttgtatcgacaacaacgaatgtgggtctcaacctttgctttgtggaggaaagggaatctgtcaaaacactccaggcagtttcagctgtgaatgccaaagagggttctctcttgatgccaccggactgaactgtgaagatgttgatgaatgtgatgggaaccacaggtgccaacacggctgccagaacatcctgggtggctacagatgtggctgcccccaaggctacatccagcactaccagtggaatcagtgtgtcgatgagaatgaatgctccaatcccaatgcctgtggctctgcttcctgctacaacaccctggggagttacaagtgcgcctgcccctcggggttctccttcgaccagttctccagtgcctgccacgacgtgaatgagtgctcgtcctccaagaacccctgcaattacggctgctctaacacggaggggggctacctctgtggctgcccccctgggtattacagagtgggacaaggccactgtgtctcaggaatgggatttaacaaggggcagtacctgtcactggatacagaggtcgatgaggaaaatgctctgtccccagaagcatgctacgagtgcaaaatcaacggctatcctaagaaagacagcaggcagaagagaagtattcatgaacctgatcccactgctgttgaacagatcagcctagagagtgtcgacatggacagccccgtcaacatgaagttcaacctctcccacctcggctctaaggagcacatcctggaactaaggcccgccatccagcccctcaacaaccacatccgttatgtcatctctcaagggaacgatgacagcgtcttccgcatccaccaaaggaatgggctcagctacttgcacacggccaagaagaagctcatgcccggcacatacacactggaaatcactagcatccctctctacaagaagaaggagcttaagaaactggaagagagcaatgaggatgactacctcctaggggagcttggggaggctctcagaatgaggctgcagattcagctctattaaccgttcacagacttgggcccaggctcaaatcctagcacagccagtctgcagaagcatttgaaaagtcaaggactaattttaaagaggaaaaataataataactcttgtttctttcctccctgtcttagactttgaatgttgaccctcacagggagggataatttagactctggtatggccaaagatttgagctcaaaggcaaccgtggttactgtattttttatataacttcattttaaaatatattaaaagaaacctaaatgttcaagatatcagcatatggcactaaatgcacaaaaataatgtgagcttttttttttttttcctgttagcagtctgtaacactttgggtattttgctatagttgctaattaaaaaaatatagatgtttatttatttttaatgcagtaatatatggagaaatgaacaaactatgtaaacaaaaagggaaactcacttgtttttctttagatttataaatttgagctattttttttagaggtgctttttaaaaatccaatagatacaagagatgtttcctttggttttctgccagtcatccagctgatacacacctgatcgattttaaagaaagccacacagagctgaatcgggcagtgctaatcaataatttaaaagacatgaatgtcattagatcctttataacgtagatcgaagccaaagcagctcatttgtgacaacatttcatatcaccagacacaccaggcaacagaagttgaagcacaaccactgtagcaaaataccttgactgcttgtgagaccattagcattgcaggccaaaccgtactgtatttccttctcataacctcaaggaaccatatgtgctacccacaacacctcattcttacccagggtgcgctgcgtcctcatggtactgtaggcagctgaagaaccgccgttcccttgaaagggaacacctggcattctgtggtgtttcgtgctgtcttaaataatggtgcatttattatgttcaagttatttcaggattgccatatgtgcaaacaaatcatgcaatgcagccaaggaatatatgttgttgttgttgttttaaacccattttttttttagaattttcattaatactgtagttatacaccatatgcctcattttatcatagcctattgtgtatgaaagatgtttgtacaatgaattgatgtttagtttgctttagtcatttaaaaagatattgtaccaggatgtgctattaagagcacgtatccattattcttctcaacccaagaacctgtttcctggaccagtgaccaaacctcatatgtgaaatggccaaagcacatgcaggctcctggttgttcctctcaaacctgtgctgaccaaagattagtaaccagttatacccagtattttgaggttttattgtttttttaataactaaaaaaaaactcgtgcc

SEQ ID NO: 666 - protein, 2000 aa, Homo sapien
MGRRRRLCLQLYFLWLGCVVLWAQGTAGQPQPPPPKPPRPQPPPQQVRSATAGSEGGFLAPEYREEGAAVASRVRRRGQQDVLRGPNVCGSRFHSYCCPGWKTLPGGNQCIVPICRNSCGDGFCSRPNMCTCSSGQISSTCGSKSIQQCSVRCMNGGTCADDHCQCQKGYIGTYCGQPVCENGCQNGGRCIAQPCACVYGFTGPQCERDYRTGPCFTQVNNQMCQGQLTGIVCTKTLCCATTGRAWGHPCEMCPAQPQPCRRGFIPNIRTGACQDVDECQAIPGICQGGNCINTVGSFECRCPAGHKQSETTQKCEDIDECSIIPGICETGECSNTVGSYFCVCPRGYVTSTDGSRCIDQRTGMCFSGLVNGRCAQELPGRMTKMQCCCEPGRCWGIGTIPEACPVRGSEEYRRLCMDGLPMGGIPGSAGSRPGGTGGNGFAPSGNGNGYGPGGTGFIPIPGGNGFSPGVGGAGVGAGGQGPIITGLTILNQTIDICKHHANLCLNGRCIPTVSSYRCECNMGYKQDANGDCIDVDECTSNPCTNGDCVNTPGSYYCKCHAGFQRTPTKQACIDIDECIQNGVLCKNGRCVNSDGSFQCICNAGFELTTDGKNCVDHDECTTTNMCLNGMCINEDGSFKCICKPGFVLAPNGRYCTDVDECQTPGICMNGHCINSEGSFRCDCPPGLAVGMDGRVCVDTHMRSTCYGGIKKGVCVRPFPGAVTKSECCCANPDYGFGEPCQPCPAKNSAEFHGLCSSGVGITVDGRDINECALDPDICANGICENLRGSYRCNCNSGYEPDASGRNCIDIDECLVNRLLCDNGLCRNTPGSYSCTCPPGYVFRTETETCEDINECESNPCVNGACRNNLGSFNCECSPGSKLSSTGLICIDSLKGTCWLNIQDSRCEVNINGATLKSECCATLGAAWGSPCERCELDTACPRGLARIKGVTCEDVNECEVFPGVCPNGRCVNSKGSFHCECPEGLTLDGTGRVCLDIRMEQCYLKWDEDECIHPVPGKFRMDACCCAVGAAWGTECEECPKPGTKEYETLCPRGAGFANRGDVLTGRPFYKDINECKAFPGMCTYGKCRNTIGSFKCRCNSGFALDMEERNCTDIDECRISPDLCGSGICVNTPGSFECECFEGYESGFMMMKNCMDIDGCERNPLLCRGGTCVNTEGSFQCDCPLGHELSPSREDCVDINECSLSDNLCRNGKCVNMIGTYQCSCNPGYQATPDRQGCTDIDECMIMNGGCDTQCTNSEGSYECSCSEGYALMPDGRSCADIDECENNPDICDGGQCTNIPGEYRCLCYDGFMASMDMKTCIDVNECDLNSNICMFGECENTKGSFICHCQLGYSVKKGTTGCTDVDECEIGAHNCDMHASCLNIPGSFKCSCREGWIGNGIKCIDLDECSNGTHQCSINAQCVNTPGSYRCACSEGFTGDGFTCSDVDECAENINLCENGQCLNVPGAYRCECEMGFTPASDSRSCQDIDECSFQNICVSGTCNNLPGMFHCICDDGYELDRTGGNCTDIDECADPINCVNGLCVNTPGRYECNCPPDFQLNPTGVGCVDNRVGNCYLKFGPRGDGSLSCNTEIGVGVSRSSCCCSLGKAWGNPCETCPPVNSTEYYTLCPGGEGFRPNPITIILEDIDECQELPGLCQGGNCINTFGSFQCECPQGYYLSEDTRICEDIDECFAHPGVCGPGTCYNTLGNYTCICPPEYMQVNGGHNCMDMRKSFCYRSYNGTTCENELPFNVTKRMCCCTYNVGKAGNKPCEPCPTPGTADFKTICGNIPGFTFDIHTGKAVDIDECKEIPGICANGVCINQIGSFRCECPTGFSYNDLLLVCEDIDECSNGDNLCQRNADCINSPGSYRCECAAGFKLSPNGACVDRNECLEIPNVCSHGLCVDLQGSYQCICHNGFKASQDQTMCMDVDECERHPCGNGTCKNTVGSYNCLCYPGFELTHNNDCLDIDECSSFFGQVCRNGRCFNEIGSFKCLC

SEQ ID NO: 667 - DNA, 5426 bp, Homo sapien
ggggaggaagaaaggcgaaggcaaggcgaaggggtggagagtgatatgaagagcgagagaaaagagaggacagcggacgagcagatccggtatctggaatcccggcgcctagaacgtgtttttcgggagagcaaaggctgtgtctacggcaggctggggatatagcctctccttccgatgaaaagagaaaggaagaatggactacagccaccaaacgtccctagtcccatgtggacaagataaatacatttccaaaaatgaacttctcttgcatctgaagacctacaacttgtactatgaaggccagaatttacagctccggcaccgggaggaagaagacgagttcattgtggaggggctcctgaacatctcctggggcctgcgccggcccattcgcctgcagatgcaggatgacaacgaacgcattcgaccccctccatcctcctcctcctggcactctggctgtaacctgggggctcagggaaccactctgaagcccctgactgtgcccaaagttcagatctcagaggtggatgccccgccggagggtgaccagatgccaagctccacagactccaggggcctgaagcccctgcaggaggacaccccacagctgatgcgcacacgcagtgatgttggggtgcgtcgccgtggcaatgtgaggacgcctagtgaccagcggcgaatcagacgccaccgcttctccatcaacggccatttctacaaccataagacatccgtgttcacaccagcctatggctctgtcaccaacgtccgcatcaacagcaccatgaccaccccacaggtcctgaagctgctgctcaacaaatttaagattgagaattcagcagaggagtttgccttgtacgtggtccatacgagtggtgagaaacagaagctgaaggccaccgattacccgctgattgcccgaatcctccagggcccatgtgagcagatctccaaagtgttcctaatggagaaggaccaggtggaggaagtcacctacgacgtggcccagtatataaagttcgagatgccggtacttaaaagcttcattcagaagctccaggaggaagaagatcgggaagtaaagaagctgatgcgcaagtacaccgtgctccggctaatgattcgacagaggctggaggagatagccgagaccccagcaacaatctgagccatgagaacgaggggatctgggcaccccaggaaccgccattgcccataagacccccaggaagctaggcactttctttccatggaaacatttagacacaaacctccccagctccggccaagccatcatttgctacctggagctggatgtagaagtcagcagacagctccctatccctggacccctgccctccttttttctgctcacaaggacttttgattttagttataaggaggacccaaaatgtgtgtgtgtacatgtgtgtgcacacatggtacgtgtccatgtgcctacctgatactttcacatgtaattaaattccaggcaaccagcacaagagccgtgagcttggcacatgtgctgctcgtgagcaggaaaatcagaggagccactgatctgagtggtatttaggttgaaggaaagatttctcctctcaagtgccagggagcagccacacgtctgtctgtgtttagagagggaagagggttctccaggttcaccatttgggttgtttatatgttggtagaaattctccctgtatgcctagaaggatcagtgaatgtaagagccttggaaattaacaaaataacagccacataaccttgcggcaagtctgatggaaagaaaaagataaaccatccgtggggtagatgcaataagcccacgtatttttacactggaaacgttgattgttttaaatgacaaagacatatgtgatgttctatgtggaaacctgtgaagagtggattctgcctccatctctgcctccatggctacctttaggagacagagaagatcctgtgtgtttctctgtacccagctgacagcctgtctctatggcgcttccttgagtggaaggaaatgtctcaagaaacaaagatctcgctggtgcgtacacagtgctgaccagctagtgtggccagggcctggtggcctggtggccaggaagtttcaggttgaagggaaatgtcgaggctacctgcagatatgacaggtgccttgaacgcagcccatcttcatgtcatcaaaggtcttcctgcacttgaagctggggcgatgtttgcagtcaagaccattctttccaacctctgggttcttgcaagttgccctcaccttgtgtgtggagatgcattccaagaatgaagcctcatcttgctactgagtgtggggttcagggaagctctttaggccacctggtgaaggtgcatggggaggatggagcttctcctcagctcctctgagcagccacctatgtgatctttaaatccaaccccaatgggagaaaagggcaagaacagtctgtgccctgggactcctatcaggaagcttgacaggcagctgggcatcagtgcagctgatatcgtttgaggagggagacagatgcttggacctgggtgcctggctatggagattgaccaagcaagatcaggagctcctgatagcaggcgtctttgagcctagctggggtagaggcactgcccatctcttctccaccttctctccacagaatgtttgcagagctgggcagttgaggaaaggacagcccctggttggtgcctccaaaggaaggtggacttttttggtggagacgtttctgccctgggcaccctcctgcccccgattcatacctatggcttcttgagaaggctcacagctgtggtcttaacgtagactgcagaaagatggcatgcggcccctggcatttcgccaagggttttatagcaagtctccttcctccatagggacagcagcaccagccctgtggggcatggagtggaagcccagaagggcttctgcaagctgcacagaactggggtaagaagacaaagagtagccaccgggagaggcttcctttgttacagctgggaaagaacagttctgtgaatgcaaacacctcctgagttttgcaattgagaaaatgatttggagaacttctcttctggtaatttttattttgaatgttcagggccttagttggccccagtaattctccttggaggacttgggagaagaatttccacaaagcaaactactaaccactagctcttactggacagcgatttctggcttataagagttctctttgatttgcactagcactacgatagtgttagatggggaaatactgcaacatgtccagttggccagatcactttccaagggagcgatactaaggcagactcagctttttaaagatgggaggtcaggaggtggaagtgagaggagatcccatctcacacaacacacttccacgtaatgcagaccacacttttccattttgtcctgccctcttgagaggtcatttctcacgtcctaagaacctgatcagaaattttggaagggttctttgaaatagcagcagttgaaacagagacactttgccacagtgtggagcagattttctcactggtatcacatggtcttgcagttttgaactcttcgaccgatttgtgggagtttatgtaattgcgtgcaatgaacctgaaattgtgtaaaggacaaaagaccagtttatagggttgggttttttttccaacttgtgaaaagcagtttagctgcatctgtctccccaccacccccaccccgggaggggcttatgttacaaggtgatcaagtgaaggaaaaacctgagcctatctggctgggatggtggaattaagcacaaggtcacattctctgtgatcacatgagagggaaggtgatgacttaaatggcagggggtggggattatcttggggagaggctgaaaagcacaaaagatagtcttccctgtacgtattggtgaagaacgtgcacaaggctggatggacttcaacttggagttgagttgaggcaagaggatttctggatattagtcacccatctgcaagaaaaatgctgaggcctcgggtcaagattttgatctgagacatgctgatgcttcaaggagaaatattttcacaatcctctcttccctcaccagaagagaacagtactctctcctagaaacctctaggtaaacacattttatcctaatatcggtagcatataatgccccccccaaaatatctgttttccatgcaaaaaagtctcaacaagaagtctgtggagttgagtggttacttcaaagtgtcaggagagtgaagaaattggccacagaagagcaagaagctctcttaagaaaagggaattctctttaaagaaaccaccaccaacaacaaaacaaccaaaaaccatgttttatgtcaaagctctgtagcacagagaatgtggtgtcacagatacatcgccgagagaggtttctttctttcttttttttttttttgagacagagtctggttctgtttcccaggctggagtgcagtggtgggatctcagctcactgcaacatccgcctctggggttcaagtgattctcctgtctcagcctcccaagtagctggaattacagggacccgccaccacgcccggctaatttttttgtgtggttttagtagaggtggggtttcaccatcttggccaggctggtcttgaactcctgacctcgtgatccacccgcctaggcctcccaaagtgttgggattacaggcgtgagccactgtgcccagccaaaagagaaatttctacatgaacaaggcaatttcagtgtcttacagcggccaaaccatgacgtgaagaatgagataggagacaggagatcaccataagcgtccctgatatagcagcacacattttcacgtttccacttaaatcgttttgcacaaagtcttgcttcgctcagatgagatgagatatgatttcctagagatgtaaaaataagaatgaatgtggcgcccccttcttccagatgtaatagaaagctctgccctatcacaaggggggtgttgaagcgccccttgtgttttaactgtatttaactgagcacaagatgcacaagctgtggtgggaaaccctcagtttacctttggagtcttccctgcagatcgcagacctgtttccaggctgatgtttctggtgtgtaattgctagcgtttctgaagggttttcccaattgttttagccttgtgaagtattcttaattataacttgcctttcagcgatggtacatgacttgattcaacgtttggttctgaacttacacactgatgcgtttactcatctaacataatctgacagggcctcagcaagggagccatacatttttgtaacattttgatatgttttaatgcatctgacttagatcttactgaaataaagcacttttcaaagag

SEQ ID NO: 668 - protein, 326 aa, Homo sapien
MDYSHQTSLVPCGQDKYISKNELLLHLKTYNLYYEGQNLQLRHREEEDEFIVEGLLNISWGLRRPIRLQMQDDNERIRPPPSSSSWHSGCNLGAQGTTLKPLTVPKVQISEVDAPPEGDQMPSSTDSRGLKPLQEDTPQLMRTRSDVGVRRRGNVRTPSDQRRIRRHRFSINGHFYNHKTSVFTPAYGSVTNVRINSTMTTPQVLKLLLNKFKIENSAEEFALYVVHTSGEKQKLKATDYPLIARILQGPCEQISKVFLMEKDQVEEVTYDVAQYIKFEMPVLKSFIQKLQEEEDREVKKLMRKYTVLRLMIRQRLEEIAETPATI

SEQ ID NO: 669 - DNA, 779 bp, Homo sapien
cccgctggcccaatggcagcgtcctacagtgtagcctccgcctcccgattgactggcctgcttggcaaggcaagtagcggcggcgcttcaagatgcgctgcctgaccacgcctatgctgctgcgggccctggcccaggctgcacgtgcaggacctcctggtggccggagcctccacagcagtgcagtggcagccacctacaagtatgtgaacatgcaggatcccgagatggacatgaagtcagtgactgaccgggcagcccgcaccctgctgtggactgagctcttccgaggcctgggcatgaccctgagctacctgttccgggaaccggccaccatcaactacccgttcgagaagggcccgctgagccctcgcttccgtggggagcatgcgctgcgccggtacccatccggggaggagcgttgcattgcctgcaagctctgcgaggccatctgccccgcccaggccatcaccatcgaggctgagccaagagctgatggcagccgccggaccacccgctatgacatcgacatgaccaagtgcatctactgcggcttctgccaggaggcctgtcccgtggatgccatcgtcgagggccccaactttgagttctccacggagacccatgaggagctgctgtacaacaaggagaagttgctcaacaacggggacaagtgggaggccgagatcgccgccaacatccaggctgactacttgtatcggtgacgccccaccggcctgcagcccctgctgcccaataaaaccactccgaccccacgg

SEQ ID NO: 670 - protein, 210 aa, Homo sapien
MRCLTTPMLLRALAQAARAGPPGGRSLHSSAVAATYKYVNMQDPEMDMKSVTDRAARTLLWTELFRGLGMTLSYLFREPATINYPFEKGPLSPRFRGEHALRRYPSGEERCIACKLCEAICPAQAITIEAEPRADGSRRTTRYDIDMTKCIYCGFCQEACPVDAIVEGPNFEFSTETHEELLYNKEKLLNNGDKWEAEIAANIQADYLYR

SEQ ID NO: 671 - DNA, 4681 bp, Homo sapien
ctccttccataagggtctggtccttcatccctcccgcttcaccagaccccctcaccctgggagccgccacctccctttccccaagaccagatgtcgcgcggccggacacagccagcacggagagtcgatgccggcgtctgagctgcgcagtggggtcttcccgctgcccagcagcctacaggcgcggtgcactctgggggaacatggccgcttccggtctccctcccgggccggcgctggcctgactgcggccccggtccgtagcactccgccctccgcttctcccgccctgtagccgcgaagactgcttcagcctttccctgtgctgcccctgccgcgcgatggagacgagctcgagctgcgagagtcttggctcccagccggcggcggctcggccgcccagcgtggactccttgtccagtgcctccacttctcattcagagaattcagtgcatacaaaatcagcttctgttgtatcatcagattccatttcaacttctgccgacaacttttctcctgatttgagggtcctgagggagtctaacaagttagcagaaatggaagaaccacccttgcttccaggagaaaatattaaagacatggccaaagatgtaacttatatatgtccattcactggcgctgtacgaggaactctgactgtcacgaattataggttatatttcaaaagcatggaacgggatcccccatttgttttagatgcttcccttggtgtgataaatagagtagaaaaaattggtggtgcttctagtcgaggtgaaaattcttatggactagaaactgtgtgtaaggatattaggaatttacgatttgctcataaacctgaggggcggacaagaagatccatatttgagaatctaatgaaatatgcatttcctgtctctaataacctgcctctttttgcttttgaatacaaagaagtattccctgaaaatgggtggaagctatatgaccctcttttagagtatagaaggcagggaattccaaatgaaagctggagaataacaaagataaatgaacgatatgaactttgtgatacataccctgccctcctggttgtgccagcaaatattcctgatgaagaattaaagagagtggcatccttcagatcaagaggccgtatcccagttttatcatggattcatcctgaaagtcaagccacaatcactcggtgtagccagcccatggttggagtgagtggaaagcgaagcaaagaagatgaaaaataccttcaagctatcatggattccaatgcccagtctcacaaaatctttatatttgatgcccggccaagtgttaatgctgttgccaacaaggcaaagggtggaggttatgaaagtgaagatgcctatcaaaatgctgaactagttttcctggatatccacaatattcatgttatgagagaatcattacgaaaacttaaggagattgtgtaccccaacattgaggaaactcactggttgtctaacttggaatctactcattggctagaacatattaagcttattcttgcaggggctcttaggattgctgacaaggtagagtcagggaagacgtctgtggtagtgcattgcagtgatggttgggatcgcacagctcagctcacttcccttgccatgctcatgttggatggatactatcgaaccatccgaggatttgaagtccttgtggagaaagaatggctaagttttggacatcgatttcaactaagagttggccatggagataagaaccatgcagatgcagacagatcgcctgtttttcttcaatttattgactgtgtctggcagatgacaagacagtttcctaccgcatttgaattcaatgagtattttctcattaccattttggaccacctatacagctgcttattcggaacattcctctgtaatagtgaacaacagagaggaaaagagaatcttcctaaaaggactgtgtcactgtggtcttacataaacagccagctggaagacttcactaatcctctctatgggagctattccaatcatgtcctttatccagtagccagcatgcgccacctagagctctgggtgggatattacataaggtggaatccacggatgaaaccacaggaacctattcacaacagatacaaagaacttcttgctaaacgagcagagcttcagaaaaaagtagaggaactacagagagagatttctaaccgatcaacctcatcctcagagagagccagctctcctgcacagtgtgtcactcctgtccaaactgttgtataaaggactgtaagatcaggggcatcattgctatacactcttgattacactggcagctctatgagtagaaagtcttcggaatttagaacccatctatgagagaaagttcagtcactttatttattttaaatctctctaggatgagtttagaactgtagcagtgcaggtggcttaagtgaagtaactccatatgtaattacatgattatgatactaatcttttaagtatccaaagaatattaaaatacttcaatcctggattcacagtgggaacaagtttctattaaaaggcaaatgctgttacaaatttttggcatctggtaatattaaaaccattttagaaatacactctgtgctcactgtgcagaggaacatcagttttcaaaccaacactgaaattctgtggcatcacatatattgggccttgatgtcatgacagatcaaaatcatttgatatccctttctccattctaggtttttctttttttcagtaactgatttaccttgatcacttttcaacttccatattcttcatatagtaaaaggcaaagtattgaagatactacggtgtggtagtagttgaaaattattgccgtcattatttacatacttaagacatattagcaagttgatccaaaatgggaggccttatagatgtgcttgggggaaaatgaaggggagaaagtagccatacaggagttcaaagaattccatgcccttcagattagcccaattaccagaaacatcatgaaagatattttaaaaactaattatttactacagtgtatttcacttgtcttgtgtgtctgaacacacagaagctaattagcaagtttttaagaagtatttaaaaatcttactaggattgacattttttctgaattctgtataaatagcttatagtgagaagtactgtgctcaaattttacatttttttcctttgcaaattctgtaatttcactcaacgattaagtctaccaaagaacacactgcatgtaaaagatgtattacaatctcaaagccagtaaaagaaatcttgcttcactgttcacctgctacaagtaagagtttggtgctggtagaaacatttgactctgatgtctattttattctacataagagccatatgtaatgtactgtaacaaaggagcttcttgtccccttggtcttttaattaaaagaaattccaactgacttttaaactttgttcttgtccaaagttgccatttcttttttttccccagaaatatttggaaattattggaggaatatgcaccccagatgaaaatgttcagtttgtacccatttttccttaaccaacacccaaatcaaacaattaaaatatacagtgtttttccactcactaattcactatacagagagtctgaaccttagcctccctcttggtcttgcagtgaggaaatttctattagtatatccaatttagcaaaattggtaccaaaatgatttctttggtaattgtgtgaaatataagctttttaacagggcatttaagtggctagcaaatcagtaattaaaaattaagctttctactccaagtatttcacaaatgcatctgccattttcctcatttaaaccttggttatcttggcctgataccacataaaagaatgtagaatggctgaagagatcaagaatttaaagcttctagtcttaacatacttgcatccacttcaaattcaaatcaaaagccagggaaatctaagtgcaaccctaccacttctctgctgagaaccttccagtggttcccctcaccttctgcagaagtctccaatatggagtacatgcacttgggcatttaatatataccactggtgtgtgtgggagggagggaggaggaatactagccctttttatatatttacacaagcaaaacttttaaatatttgaattgacagttacatgtttcataacttcgtatgtctattggttgtgcaggtgtaattttttccctttttgattagggttacaaaatttagagaccagtatgattaagttgaagctccttagcctccttcgacctagtctctgcatacctcaacttttacgtaccaatgctactctgctgttcacaattgcctcatgtaatctgcagattcctgcctccccactttggttcagtctgtcttgtgcacctggaacaactgttctcccttgtgactaattcctattttctagagtttaggcatcatctcttcctttgggaagttatctgattcacgactgccttctctgacatccccaccttcctctgtgcccccatagcactgtgtataccgctactaccactgcaattcacattatattggaatgaacaattcacatgtctaccacaagtctgtaaacataaccttatttgaaatgaattgcaataaagctctgttacaacgt

SEQ ID NO: 672 - protein, 643 aa, Homo sapien
METSSSCESLGSQPAAARPPSVDSLSSASTSHSENSVHTKSASVVSSDSISTSADNFSPDLRVLRESNKLAEMEEPPLLPGENIKDMAKDVTYICPFTGAVRGTLTVTNYRLYFKSMERDPPFVLDASLGVINRVEKIGGASSRGENSYGLETVCKDIRNLRFAHKPEGRTRRSIFENLMKYAFPVSNNLPLFAFEYKEVFPENGWKLYDPLLEYRRQGIPNESWRITKINERYELCDTYPALLVVPANIPDEELKRVASFRSRGRIPVLSWIHPESQATITRCSQPMVGVSGKRSKEDEKYLQAIMDSNAQSHKIFIFDARPSVNAVANKAKGGGYESEDAYQNAELVFLDIHNIHVMRESLRKLKEIVYPNIEETHWLSNLESTHWLEHIKLILAGALRIADKVESGKTSVVVHCSDGWDRTAQLTSLAMLMLDGYYRTIRGFEVLVEKEWLSFGHRFQLRVGHGDKNHADADRSPVFLQFIDCVWQMTRQFPTAFEFNEYFLITILDHLYSCLFGTFLCNSEQQRGKENLPKRTVSLWSYINSQLEDFTNPLYGSYSNHVLYPVASMRHLELWVGYYIRWNPRMKPQEPIHNRYKELLAKRAELQKKVEELQREISNRSTSSSERASSPAQCVTPVQTVV

SEQ ID NO: 673 - DNA, 8091 bp, Homo sapien
acgcggcgcggaggctggcccgggacgcgcccggagcccagggaaggagggaggaggggagggtcgcggccggccgccatggggccgggggcccgtggccgccgccgccgccgtcgcccgatgtcgccgccaccgccaccgccacccgtgcgggcgctgcccctgctgctgctgctagcggggccgggggctgcagcccccccttgcctggacggaagcccgtgtgcaaatggaggtcgttgcacccagctgccctcccgggaggctgcctgcctgtgcccgcctggctgggtgggtgagcggtgtcagctggaggacccctgtcactcaggcccctgtgctggccgtggtgtctgccagagttcagtggtggctggcaccgcccgattctcatgccggtgcccccgtggcttccgaggccctgactgctccctgccagatccctgcctcagcagcccttgtgcccacggtgcccgctgctcagtggggcccgatggacgcttcctctgctcctgcccacctggctaccagggccgcagctgccgaagcgacgtggatgagtgccgggtgggtgagccctgccgccatggtggcacctgcctcaacacacctggctccttccgctgccagtgtccagctggctacacagggccactatgtgagaaccccgcggtgccctgtgcgccctcaccatgccgtaacgggggcacctgcaggcagagtggcgacctcacttacgactgtgcctgtcttcctgggtttgagggtcagaattgtgaagtgaacgtggacgactgtccaggacaccgatgtctcaatggggggacatgcgtggatggcgtcaacacctataactgccagtgccctcctgagtggacaggccagttctgcacggaggacgtggatgagtgtcagctgcagcccaacgcctgccacaatgggggtacctgcttcaacacgctgggtggccacagctgcgtgtgtgtcaatggctggacaggtgagagctgcagtcagaatatcgatgactgtgccacagccgtgtgcttccatggggccacctgccatgaccgcgtggcttctttctactgtgcctgccccatgggcaagactggcctcctgtgtcacctggatgacgcctgtgtcagcaacccctgccacgaggatgctatctgtgacacaaatccggtgaacggccgggccatttgcacctgtcctcccggcttcacgggtggggcatgtgaccaggatgtggacgagtgctctatcggcgccaacccctgcgagcacttgggcaggtgcgtgaacacgcagggctccttcctgtgccagtgcggtcgtggctacactggacctcgctgtgagaccgatgtcaacgagtgtctgtcggggccctgccgaaaccaggccacgtgcctcgaccgcataggccagttcacctgtatctgtatggcaggcttcacaggaacctattgcgaggtggacattgacgagtgtcagagtagcccctgtgtcaacggtggggtctgcaaggaccgagtcaatggcttcagctgcacctgcccctcgggcttcagcggctccacgtgtcagctggacgtggacgaatgcgccagcacgccctgcaggaatggcgccaaatgcgtggaccagcccgatggctacgagtgccgctgtgccgagggctttgagggcacgctgtgtgatcgcaacgtggacgactgctcccctgacccatgccaccatggtcgctgcgtggatggcatcgccagcttctcatgtgcctgtgctcctggctacacgggcacacgctgcgagagccaggtggacgaatgccgcagccagccctgccgccatggcggcaaatgcctagacctggtggacaagtacctctgccgctgcccttctgggaccacaggtgtgaactgcgaagtgaacattgacgactgtgccagcaacccctgcacctttggagtctgccgtgatggcatcaaccgctacgactgtgtctgccaacctggcttcacagggcccctttgtaacgtggagatcaatgagtgtgcttccagcccatgcggcgagggaggttcctgtgtggatggggaaaatggcttccgctgcctctgcccgcctggctccttgcccccactctgcctccccccgagccatccctgtgcccatgagccctgcagtcacggcatctgctatgatgcacctggcgggttccgctgtgtgtgtgagcctggctggagtggcccccgctgcagccagagcctggcccgagacgcctgtgagtcccagccgtgcagggccggtgggacatgcagcagcgatggaatgggtttccactgcacctgcccgcctggtgtccagggacgtcagtgtgaactcctctccccctgcaccccgaacccctgtgagcatgggggccgctgcgagtctgcccctggccagctgcctgtctgctcctgcccccagggctggcaaggcccacgatgccagcaggatgtggacgagtgtgctggccccgcaccctgtggccctcatggtatctgcaccaacctggcagggagtttcagctgcacctgccatggagggtacactggcccttcctgtgatcaggacatcaatgactgtgaccccaacccatgcctgaacggtggctcgtgccaagacggcgtgggctccttttcctgctcctgcctccctggtttcgccggcccacgatgcgcccgcgatgtggatgagtgcctgagcaacccctgcggcccgggcacctgtaccgaccacgtggcctccttcacctgcacctgcccgccgggctacggaggcttccactgcgaacaggacctgcccgactgcagccccagctcctgcttcaatggcgggacctgtgtggacggcgtgaactcgttcagctgcctgtgccgtcccggctacacaggagcccactgccaacatgaggcagacccctgcctctcgcggccctgcctacacgggggcgtctgcagcgccgcccaccctggcttccgctgcacctgcctcgagagcttcacgggcccgcagtgccagacgctggtggattggtgcagccgccagccttgtcaaaacgggggtcgctgcgtccagactggggcctattgcctttgtccccctggatggagcggacgcctctgtgacatccgaagcttgccctgcagggaggccgcagcccagatcggggtgcggctggagcagctgtgtcaggcgggtgggcagtgtgtggatgaagacagctcccactactgcgtgtgcccagagggccgtactggtagccactgtgagcaggaggtggacccctgcttggcccagccctgccagcatggggggacctgccgtggctatatggggggctacatgtgtgagtgtcttcctggctacaatggtgataactgtgaggacgacgtggacgagtgtgcctcccagccctgccagcacgggggttcatgcattgacctcgtggcccgctatctctgctcctgtcccccaggaacgctgggggtgctctgcgagattaatgaggatgactgcggcccaggcccaccgctggactcagggccccggtgcctacacaatggcacctgcgtggacctggtgggtggtttccgctgcacctgtcccccaggatacactggtttgcgctgcgaggcagacatcaatgagtgtcgctcaggtgcctgccacgcggcacacacccgggactgcctgcaggacccaggcggaggtttccgttgcctttgtcatgctggcttctcaggtcctcgctgtcagactgtcctgtctccctgcgagtcccagccatgccagcatggaggccagtgccgtcctagcccgggtcctgggggtgggctgaccttcacctgtcactgtgcccagccgttctggggtccgcgttgcgagcgggtggcgcgctcctgccgggagctgcagtgcccggtgggcgtcccatgccagcagacgccccgcgggccgcgctgcgcctgccccccagggttgtcgggaccctcctgccgcagcttcccggggtcgccgccgggggccagcaacgccagctgcgcggccgccccctgtctccacgggggctcctgccgccccgcgccgctcgcgcccttcttccgctgcgcttgcgcgcagggctggaccgggccgcgctgcgaggcgcccgccgcggcacccgaggtctcggaggagccgcggtgcccgcgcgccgcctgccaggccaagcgcggggaccagcgctgcgaccgcgagtgcaacagcccaggctgcggctgggacggcggcgactgctcgctgagcgtgggcgacccctggcggcaatgcgaggcgctgcagtgctggcgcctcttcaacaacagccgctgcgaccccgcctgcagctcgcccgcctgcctctacgacaacttcgactgccacgccggtggccgcgagcgcacttgcaacccggtgtacgagaagtactgcgccgaccactttgccgacggccgctgcgaccagggctgcaacacggaggagtgcggctgggatgggctggattgtgccagcgaggtgccggccctgctggcccgcggcgtgctggtgctcacagtgctgctgccgccggaggagctactgcgttccagcgccgactttctgcagcggctcagcgccatcctgcgcacctcgctgcgcttccgcctggacgcgcacggccaggccatggtcttcccttaccaccggcctagtcctggctccgaaccccgggcccgtcgggagctggcccccgaggtgatcggctcggtagtaatgctggagattgacaaccggctctgcctgcagtcgcctgagaatgatcactgcttccccgatgcccagagcgccgctgactacctgggagcgttgtcagcggtggagcgcctggacttcccgtacccactgcgggacgtgcggggggagccgctggagcctccagaacccagcgtcccgctgctgccactgctagtggcgggcgctgtcttgctgctggtcattctcgtcctgggtgtcatggtggcccggcgcaagcgcgagcacagcaccctctggttccctgagggcttctcactgcacaaggacgtggcctctggtcacaagggccggcgggaacccgtgggccaggacgcgctgggcatgaagaacatggccaagggtgagagcctgatgggggaggtggccacagactggatggacacagagtgcccagaggccaagcggctaaaggtagaggagccaggcatgggggctgaggaggctgtggattgccgtcagtggactcaacaccatctggttgctgctgacatccgcgtggcaccagccatggcactgacaccaccacagggcgacgcagatgctgatggcatggatgtcaatgtgcgtggcccagatggcttcaccccgctaatgctggcttccttctgtgggggggctctggagccaatgccaactgaagaggatgaggcagatgacacatcagctagcatcatctccgacctgatctgccagggggctcagcttggggcacggactgaccgtactggcgagactgctttgcacctggctgcccgttatgcccgtgctgatgcagccaagcggctgctggatgctggggcagacaccaatgcccaggaccactcaggccgcactcccctgcacacagctgtcacagccgatgcccagggtgtcttccagattctcatccgaaaccgctctacagacttggatgcccgcatggcagatggctcaacggcactgatcctggcggcccgcctggcagtagagggcatggtggaagagctcatcgccagccatgctgatgtcaatgctgtggatgagcttgggaaatcagccttacactgggctgcggctgtgaacaacgtggaagccactttggccctgctcaaaaatggagccaataaggacatgcaggatagcaaggaggagacccccctattcctggccgcccgcgagggcagctatgaggctgccaagctgctgttggaccactttgccaaccgtgagatcaccgaccacctggacaggctgccgcgggacgtagcccaggagagactgcaccaggacatcgtgcgcttgctggatcaacccagtgggccccgcagcccccccggtccccacggcctggggcctctgctctgtcctccaggggccttcctccctggcctcaaagcggcacagtcggggtccaagaagagcaggaggccccccgggaaggcggggctggggccgcaggggccccgggggcggggcaagaagctgacgctggcctgcccgggccccctggctgacagctcggtcacgctgtcgcccgtggactcgctggactccccgcggcctttcggtgggccccctgcttcccctggtggcttcccccttgaggggccctatgcagctgccactgccactgcagtgtctctggcacagcttggtggcccaggccgggcaggtctagggcgccagccccctggaggatgtgtactcagcctgggcctgctgaaccctgtggctgtgcccctcgattgggcccggctgcccccacctgcccctccaggcccctcgttcctgctgccactggcgccgggaccccagctgctcaacccagggacccccgtctccccgcaggagcggcccccgccttacctggcagtcccaggacatggcgaggagtacccggtggctggggcacacagcagccccccaaaggcccgcttcctgcgggttcccagtgagcacccttacctgaccccatcccccgaatcccctgagcactgggccagcccctcacctccctccctctcagactggtccgaatccacgcctagcccagccactgccactggggccatggccaccaccactggggcactgcctgcccagccacttcccttgtctgttcccagctcccttgctcaggcccagacccagctggggccccagccggaagttacccccaagaggcaagtgttggcctgagacgctcgtcagttcttagatcttgggggcctaaagagacccccgtcctgcctcctttctttctctgtctcttccttccttttagtctttttcatcctcttctctttccaccaaccctcctgcatccttgccttgcagcgtgaccgagataggtcatcagcccagggcttcagtcttcctttatttataatgggtgggggctaccacccaccctctcagtcttgtgaagagtctgggacctccttcttccccacttctctcttccctcattcctttctctctccttctggcctctcatttccttacactctgacatgaatgaattattattatttttctttttctttttttttttacattttgtatagaaacaaattcatttaaacaaacttattattattattttttacaaaatatatatatggagatgctccctccccctgtgaaccccccagtgcccccgtggggctgagtctgtgggcccattcggccaagctggattctgtgtacctagtacacaggcatgactgggatcccgtgtaccgagtacacgacccaggtatgtaccaagtaggcacccttgggcgcacccactggggccaggggtcgggggagtgttgggagcctcctccccaccccacctccctcacttcactgcattccagattggacatgttccatagccttgctggggaagggcccactgccaactccctctgccccagccccacccttggccatctccctttgggaactagggggctgctggtgggaaatgggagccagggcagatgtatgcattcctttatgtccctgtaaatgtgggactacaagaagaggagctgcctgagtggtactttctcttcctggtaatcctctggcccagccttatggcagaatagaggtatttttaggctatttttgtaatatggcttctggtcaaaatccctgtgtagctgaattcccaagccctgcattgtacagccccccactcccctcaccacctaataaaggaatagttaacactcaaaaaaaaaaaaaaaaaaa

SEQ ID NO: 674 - protein, 2000 aa, Homo sapien
MGPGARGRRRRRRPMSPPPPPPPVRALPLLLLLAGPGAAAPPCLDGSPCANGGRCTQLPSREAACLCPPGWVGERCQLEDPCHSGPCAGRGVCQSSVVAGTARFSCRCPRGFRGPDCSLPDPCLSSPCAHGARCSVGPDGRFLCSCPPGYQGRSCRSDVDECRVGEPCRHGGTCLNTPGSFRCQCPAGYTGPLCENPAVPCAPSPCRNGGTCRQSGDLTYDCACLPGFEGQNCEVNVDDCPGHRCLNGGTCVDGVNTYNCQCPPEWTGQFCTEDVDECQLQPNACHNGGTCFNTLGGHSCVCVNGWTGESCSQNIDDCATAVCFHGATCHDRVASFYCACPMGKTGLLCHLDDACVSNPCHEDAICDTNPVNGRAICTCPPGFTGGACDQDVDECSIGANPCEHLGRCVNTQGSFLCQCGRGYTGPRCETDVNECLSGPCRNQATCLDRIGQFTCICMAGFTGTYCEVDIDECQSSPCVNGGVCKDRVNGFSCTCPSGFSGSTCQLDVDECASTPCRNGAKCVDQPDGYECRCAEGFEGTLCDRNVDDCSPDPCHHGRCVDGIASFSCACAPGYTGTRCESQVDECRSQPCRHGGKCLDLVDKYLCRCPSGTTGVNCEVNIDDCASNPCTFGVCRDGINRYDCVCQPGFTGPLCNVEINECASSPCGEGGSCVDGENGFRCLCPPGSLPPLCLPPSHPCAHEPCSHGICYDAPGGFRCVCEPGWSGPRCSQSLARDACESQPCRAGGTCSSDGMGFHCTCPPGVQGRQCELLSPCTPNPCEHGGRCESAPGQLPVCSCPQGWQGPRCQQDVDECAGPAPCGPHGICTNLAGSFSCTCHGGYTGPSCDQDINDCDPNPCLNGGSCQDGVGSFSCSCLPGFAGPRCARDVDECLSNPCGPGTCTDHVASFTCTCPPGYGGFHCEQDLPDCSPSSCFNGGTCVDGVNSFSCLCRPGYTGAHCQHEADPCLSRPCLHGGVCSAAHPGFRCTCLESFTGPQCQTLVDWCSRQPCQNGGRCVQTGAYCLCPPGWSGRLCDIRSLPCREAAAQIGVRLEQLCQAGGQCVDEDSSHYCVCPEGRTGSHCEQEVDPCLAQPCQHGGTCRGYMGGYMCECLPGYNGDNCEDDVDECASQPCQHGGSCIDLVARYLCSCPPGTLGVLCEINEDDCGPGPPLDSGPRCLHNGTCVDLVGGFRCTCPPGYTGLRCEADINECRSGACHAAHTRDCLQDPGGGFRCLCHAGFSGPRCQTVLSPCESQPCQHGGQCRPSPGPGGGLTFTCHCAQPFWGPRCERVARSCRELQCPVGVPCQQTPRGPRCACPPGLSGPSCRSFPGSPPGASNASCAAAPCLHGGSCRPAPLAPFFRCACAQGWTGPRCEAPAAAPEVSEEPRCPRAACQAKRGDQRCDRECNSPGCGWDGGDCSLSVGDPWRQCEALQCWRLFNNSRCDPACSSPACLYDNFDCHAGGRERTCNPVYEKYCADHFADGRCDQGCNTEECGWDGLDCASEVPALLARGVLVLTVLLPPEELLRSSADFLQRLSAILRTSLRFRLDAHGQAMVFPYHRPSPGSEPRARRELAPEVIGSVVMLEIDNRLCLQSPENDHCFPDAQSAADYLGALSAVERLDFPYPLRDVRGEPLEPPEPSVPLLPLLVAGAVLLLVILVLGVMVARRKREHSTLWFPEGFSLHKDVASGHKGRREPVGQDALGMKNMAKGESLMGEVATDWMDTECPEAKRLKVEEPGMGAEEAVDCRQWTQHHLVAADIRVAPAMALTPPQGDADADGMDVNVRGPDGFTPLMLASFCGGALEPMPTEEDEADDTSASIISDLICQGAQLGARTDRTGETALHLAARYARADAAKRLLDAGADTNAQDHSGRTPLHTAVTADAQGVFQILIRNRSTDLDARMADGSTALILAARLAVEGMVEELIASHADVNAVDELGKSALHWAAAVNNVEATLALLKNGANKDMQDSKEETPLFLAAREGSYEAAKLLLDHFANREI

SEQ ID NO: 675 - DNA, 3262 bp, Homo sapien
aggaaatggtttctggaaaacgttagtaaggtcagtttttaaacactgaatccaaggttgtcttctggaatatccaaattggttatgaccagaatgtgattcattatactaagctaaaggaatagattaaagaattagcaacagtggccgggtgcagtggctcatgcctgtaaccccagcactttgggggaggcccaggtgggtggatcatttgaggtcaggagtttgagaccagcctggccaacatggtgaaacctaaaaatacaaaaattagccaggtgtggtggcaggtgcttgtaatcccagctgcttgggaggctgaagcaggagaattgcttgaacccggaggcaggggttgcagtgagccaagatcacaccattgcactccagcctgggtggcagagtgagactctgtctcaaaaattaaaaagcaacagtgtatatgcaatagttgcaagatgtaagatcacccaaagagtatgcagagggaaatgagggacagaacccagaaatattaatacccagggagtgaacaggaggaggaccccaagaagttactgagtcagatttttcccactcatccaggtgaaagtttaggtcaataatgtgaaataccagagggattaaatgtctacagaaataaaaccatgtctcacattaagacaaacaagtaggttggagggatattttgaaaggcaaggtgatattaaactttattctgaaagtagtttgttagagaaagaggcatgataagagttgcagttaactgattggaaactatgcagcagatgaaactggaataaaggaaactcatcaggaaatgattatagtaataagggccagaaataagggcttgcttgcctgaactaaaaacaaagaggatacaaaggttctagaaatatttcaaaggaattagctttaattcagcaatactcattgagaatcacctatgcacctggctctgaagatgaagtgctgagtaaacttagacatggaccctgctatcatggagatggcagattattggtcagaatgctcttacctgtcattgtagcaattttgttagatccttaatacctctgaattgctaataaacttgttttggctgaaaaaatagtcctgtgaattttaccatgcagttaaataagaaactaaaagcaaacctaaataccaccaaaaaggttagtagtctgttatatgcattagccttaatctaaggaaatattttattataggtctccttgaagaaaatgatattttcaggaatgctcaagcaggtgttctcatcagcactaatagtcatccaatcttaaggaaaaacagaatatttgatggatttgccgcaggtattgaaattacaaatcacgcaactgcaacactagaaggcaatcagatttttaacaaccggtttggaggcttatttttagcatctggtgttaatgtgacaatgaaagataacaaaataatgaacaatcaagatgccatagaaaaggctgttagtagaggccaatgtttatataaaatatcaagttataccagctatcccatgcatgatttctacagatgtcatacttgtaacaccacagatcgaaatgccatatgtgtgaactgcattaagaagtgccatcagggacatgatgtagagtttattagacatgataggtatgtagcacacttgcttgatatattacccaattactttccccctcacttttctaatatttgggtttcattttgctttaggtttttctgtgactgtggtgctggaacactgtctaatccttgtacattagctggtgagcctacacatgatacagatacactatatgactctgctccacctatagaatctaatacattgcagcacaactgaattccttccctaaagaaaaagtcctgccattgtaacatcataacttaaaacacttttttggaagaagatttaaaatatttgcccatgctacaggaagagactgtattaaaaatggatacacaaggtcagttgacactatgaagctcaagctaccaaaaagaaagtggcaatatattgactcaggatctcaaagctgggtgttttagcattactgtgtaaagacttgaagggacagaagtgaagaaaataagctgcaattttgtacagataccaacttctgaaaagctggtgtttttacaactagcattgaatgcagtccaatttgcagtagtaatcttcaatagacaagcagctttgttgctgcctttatggacatgggtaccaattgcttttgtaatatggtaaaaatgtgagctagcacttctgcgttccttttgattttttttttttaacatgtattcagattgagaaatatgattttaatgccttaatctcatgtagtttgtttttaatttcaagcaaaatcttactgtacttgaatgtgccctgttttgttagcacacctagacttgctgtaactgtactcatgtcccagtatgtacgttctttctatgaaagagaaaacactaatcttaaattatatccagcaatgtttctggtatcctttaagaaaagttaagactattatttccttcccttccctgtgcagcattcaaaaatcacccctagaaaaagtgagtgttttaatgagacttcctaggaagggatgcactgtaaaacaaaagtattcttgtaactcagttttgtgaaaggtaaaaaactactatgttttaagtacactttagaaagtctcttcaaaacaaacagtcctgtatttgaactctgttcatagtttttttttgaacagtttagacaaaactgttggaaattaaaccaatttcctgcattaagctgagacaagtatataaacagccctatacagtttcatagcttttcctcccccatttatgtgtattggtgacagtgggtataaaacagcctgaaagtgtatgcatgtaccataacatttagacttaatatattgtggagtattcaataaccattatgtagaaggtagataagaattaaaagggtttaatttcctagaaagaaaatggaaaaatggtcatttttaaaaaataaagtttattagatcataatgttgtctgaatttaccacctttgtcagaagtcaactcaaagcttccaatgtagtcagtctataattccttaatcaaagtcagcaatttatggacagcttcagcatttacagttgacctttcactagccaggcaaacttcccttaaaattaaaaaaaaaaaaaaaaaaaaaaaaaaaaaaaaaaaaaaaa

SEQ ID NO: 676 - protein, 141 aa, Homo sapien
MKDNKIMNNQDAIEKAVSRGQCLYKISSYTSYPMHDFYRCHTCNTTDRNAICVNCIKKCHQGHDVEFIRHDRYVAHLLDILPNYFPPHFSNIWVSFCFRFFCDCGAGTLSNPCTLAGEPTHDTDTLYDSAPPIESNTLQHN

SEQ ID NO: 677 - DNA, 3380 bp, Homo sapien
gaattcgcctcgatggcgtttatccggaagaagcagcaggagcagcagctgcagctctactccaaggagagattttccttgctgctgcttaacttggaggagtactactttgaacagcatagagccaatcacattttgcacaagggcagtcaccatgaaaggaaaatcagaggctccttaaaaatatgttcaaaatcggtgatttttgaaccagattcaatatcccagcccatcatcaagattcctttgagagactgtataaaaataggaaagcatggagaaaatggagccaatagacacttcacaaaggcaaaatctgggggtatttcactcattttcagtcaggtatatttcattaaagaacataatgttgttgcaccatataaaatagaaaggggcaaaatggaatatgtttttgaattggatgttcccgggaaagtggaagatgttgtggagacgttgcttcagcttcacagagcatcctgccttgacaaattgggtgaccaaaccgccatgataacagctattttgcagtctcgtttagctagaacatcatttgacaaaaacaggttccaaaacatttctgaaaagctgcacatggaatgcaaagcagaaatggtgacgcctctggtgactaatcctggacacgtgtgcatcacggacacaaacctgtattttcagcccctcaacggctacccgaaacctgtggtccagataacactccaagatgtccgccgcatctacaaaaggaggcacggcctcatgcctctgggcttggaagtattttgcacagaagatgatctgtgttccgacatctacctaaagttctatgaacctcaagatagagatgatctctatttttacattgccacatacctagagcaccatgtggcggagcacactgctgagagctacatgctgcagtggcagcgtggacacctttccaactatcagtacctccttcacctcaacaacctggccgaccgcagctgcaacgacctctcccagtaccctgtgtttccatggataatacatgattattccagctcagaactagatttgtcaaatccaggaaccttccgggatctcagtaagccagtaggggccctaaataaggaacggctggagagactactgacacgctaccaggaaatgcctgaaccaaagttcatgtatgggagtcactactcttccccgggttatgtacttttttatcttgttaggattgcaccagagtatatgctgtgcctgcagaatggaagatttgataatgcagatagaatgttcaacagtattgcagaaacttggaaaaactgtctggatggtgcaacggattttaaagagttaattccagaattctatggtgatgatgtgagctttctagtcaatagcctgaagttggatttgggaaagagacaaggaggacagatggttgacgacgtggagcttcccccttgggcttccagtcccgaggactttctccagaagagcaaagatgcattggaaagcaattatgtgtctgaacaccttcacgagtggattgatctaatatttggctacaaacaaaaagggagtgatgcagttggggcccataatgtatttcatcccctgacctatgaaggaggtgtagacttgaacagcatccaggatcctgatgagaaggtagccatgcttacgcaaatcttggaatttgggcagacaccaaaacaactatttgtgacaccacatcctcgaaggatcaccccaaagtttaaaagtttgtcccagacctccagttataatgcttctatggcagattccccaggtgaagagtcttttgaagacctgaccgaagaaagcaaaacactggcctggaataacatcaccaaactgcagttacacgagcactataaaatccacaaagaagcagttactggaatcacggtctctcgcaatggatcttcagtattcacaacatcccaagattccaccttgaagatgttttctaaagaatcaaaaatgctacaaagaagtatatcattttcaaatatggctttatcgtcttgtttacttttaccaggagatgccactgtcataacttcttcatgggataataatgtctatttttattccatagcatttggaagacgccaggacacgttaatgggacatgatgatgctgttagtaagatctgttggcatgacaacaggctatattctgcatcgtgggactctacagtgaaggtgtggtctggtgttcctgcagagatgccaggcaccaaaagacaccactttgacttgctggccgagctggaacatgatgtcagtgtagatacaatcagtttaaatgctgcaagcacactgttagtttccggcaccaaagaaggcacagtgaatatttgggacctcacaacggccaccttaatgcaccagattccatgccattcagggattgtatgtgacactgcttttagcccagatagtcgccatgtcctcagcacaggaacagatggctgtcttaatgtcattgatgtgcagacaggaatgctcatctcctccatgacatcagatgagccccagacgtgctttgtctgggatggaaattccgttttatctggcagtcagtctggtgaactgctcgtttgggacctccttggagcaaaaatcagtgagagaatacagggccacacaggtgctgtgacatgtatatggatgaatgaacagtgtagcagtatcatcacaggaggggaagacagacaaattatattctggaaattgcagtattaagtgccttttcctctcctgaatattaaattgaactctatttaatgcatttttaaaccaaacttttaaacggactggtgaatgtgcaatgttagtaattagaagttttaccacatggaaaatttgtggttttaaactttctaaatcatggtgacttcattgaaagccattagttgccattctcttagggcagataaaatgcggctgtgttaggaaaaacatgttacactgtaaggcagatgatcgtccccgtatgatgattgtcagaagacaggactaagtagcagagaatagctaagagataaattgggctggggaaacttgtcagaaagcactgaacaattaagaaattttccaagaaaatgtgcagtattctctgctacttctgaatctgttttgtcttcctaatctatcacaattgccacccatcgggttttgggtgtgtgttttcatagcgtggttactttctataatgctgtacccagattctaagaacctggagaaggattagcagttcttagtaagtttactgtgtataggaacggtttgtatttcattacagctattcatcttttctacattaaaaatatttttctctaaaaaaaaaaaaaaaaaaa

SEQ ID NO: 678 - protein, 917 aa, Homo sapien
MAFIRKKQQEQQLQLYSKERFSLLLLNLEEYYFEQHRANHILHKGSHHERKIRGSLKICSKSVIFEPDSISQPIIKIPLRDCIKIGKHGENGANRHFTKAKSGGISLIFSQVYFIKEHNVVAPYKIERGKMEYVFELDVPGKVEDVVETLLQLHRASCLDKLGDQTAMITAILQSRLARTSFDKNRFQNISEKLHMECKAEMVTPLVTNPGHVCITDTNLYFQPLNGYPKPVVQITLQDVRRIYKRRHGLMPLGLEVFCTEDDLCSDIYLKFYEPQDRDDLYFYIATYLEHHVAEHTAESYMLQWQRGHLSNYQYLLHLNNLADRSCNDLSQYPVFPWIIHDYSSSELDLSNPGTFRDLSKPVGALNKERLERLLTRYQEMPEPKFMYGSHYSSPGYVLFYLVRIAPEYMLCLQNGRFDNADRMFNSIAETWKNCLDGATDFKELIPEFYGDDVSFLVNSLKLDLGKRQGGQMVDDVELPPWASSPEDFLQKSKDALESNYVSEHLHEWIDLIFGYKQKGSDAVGAHNVFHPLTYEGGVDLNSIQDPDEKVAMLTQILEFGQTPKQLFVTPHPRRITPKFKSLSQTSSYNASMADSPGEESFEDLTEESKTLAWNNITKLQLHEHYKIHKEAVTGITVSRNGSSVFTTSQDSTLKMFSKESKMLQRSISFSNMALSSCLLLPGDATVITSSWDNNVYFYSIAFGRRQDTLMGHDDAVSKICWHDNRLYSASWDSTVKVWSGVPAEMPGTKRHHFDLLAELEHDVSVDTISLNAASTLLVSGTKEGTVNIWDLTTATLMHQIPCHSGIVCDTAFSPDSRHVLSTGTDGCLNVIDVQTGMLISSMTSDEPQTCFVWDGNSVLSGSQSGELLVWDLLGAKISERIQGHTGAVTCIWMNEQCSSIITGGEDRQIIFWKLQY

SEQ ID NO: 679 - DNA, 1395 bp, Homo sapien
acttcccccggctccagccggcgcaggcagcggcggcagcagcaggcgagcctcggccccgcaaggccatgaaggtgaagaagggcggcggtggggccgggacggcgacggagtccgctccggggccctcgggccagagcgtggcccccataccacagccgcctgcggaatccgaatctgggtccgagtcggagccggacgcaggcccagggcccaggccggggccgctgcagaggaagcagccgatcgggccggaggacgtgctggggctgcagcggatcaccggtgactacctctgctcccctgaggagaatatctacaagatcgactttgtcaggtttaagattcgggacatggactcaggcactgtcctctttgaaatcaagaagcccccagtctcagaacggttgcccatcaaccggcgggacctggaccccaatgctgggcgctttgtccgctaccagttcacgcctgccttcctccgcctgaggcaggtgggagccacggtggagttcacagtgggagacaagcctgtcaacaacttccgcatgatcgagaggcactacttccgcaaccagctactcaaaagcttcgacttccactttggcttctgcatccccagcagcaagaacacctgcgagcacatttacgacttcccccctctctccgaggagctgatcagcgagatgatccgccacccgtatgagacccagtctgacagcttctacttcgtggatgaccggctggtgatgcacaataaagcagactattcctacagcgggacaccctgaccccacggctgccctgaccccaggaggctccagttctgggctgggagctgtgacctccccaacgctcacccctcaaccccaagtcctctgcttggggagttctccaggagctccggaccctgagtcaatgttgggaggaagggtacctggtgtccccagtcaagcccatgaagcccatgcggcctgctacatggggtggggtcgtagggaggctgtttgcctccacgtctaggaaggcctgtgagaggagcagtcaggacttccggacaacttagctgggccctacttgggcccaagtttcagaatagtgttcccctatcaaggctgtgactagatcaggcagggatccattccctgtcccctgcccactaccttcaggccatttagagttgtaaatttacaaagatccacggtgggctccagctgccaagccacccaagggagtctgggccctaggcctagccccatccctccccatgaggggccaagacactgcctaaggtgtgggagggactggctgagattgcagcccatggtaggagctggaccaactgtatatagttttcaataaactttttccttttctgttcaaaaaaaaaaaaaa

SEQ ID NO: 680 - protein, 240 aa, Homo sapien
MKVKKGGGGAGTATESAPGPSGQSVAPIPQPPAESESGSESEPDAGPGPRPGPLQRKQPIGPEDVLGLQRITGDYLCSPEENIYKIDFVRFKIRDMDSGTVLFEIKKPPVSERLPINRRDLDPNAGRFVRYQFTPAFLRLRQVGATVEFTVGDKPVNNFRMIERHYFRNQLLKSFDFHFGFCIPSSKNTCEHIYDFPPLSEELISEMIRHPYETQSDSFYFVDDRLVMHNKADYSYSGTP

SEQ ID NO: 681 - DNA, 2509 bp, Homo sapien
atggcgactgcgacccccgtgccgccgcggatgggcagccgcgctggcggccccaccacgccgctgagccccacgcgcctgtcgcggctccaggagaaggaggagctgcgcgagctcaatgaccggctggcggtgtacatcgacaaggtgcgcagcctggagacggagaacagcgcgctgcagctgcaggtgacggagcgcgaggaggtgcgcggccgtgagctcaccggcctcaaggcgctctacgagaccgagctggccgacgcgcgacgcgcgctcgacgacacggcccgcgagcgcgccaagctgcagatcgagctgggcaagtgcaaggcggaacacgaccagctgctcctcaactatgctaagaaggaatctgatcttaatggcgcccagatcaagcttcgagaatatgaagcagcactgaattcgaaagatgcagctcttgctactgcacttggtgacaaaaaaagtttagagggagatttggaggatctgaaggatcagattgcccagttggaagcctccttagctgcagccaaaaaacagttagcagatgaaactttacttaaagtagatttggagaatcgttgtcagagccttactgaggacttggagtttcgcaaaagcatgtatgaagaggagattaacgagaccagaaggaagcatgaaacgcgcttggtagaggtggattctgggcgtcaaattgagtatgagtacaagctggcgcaagcccttcatgagatgagagagcaacatgatgcccaagtgaggctgtataaggaggagctggagcagacttaccatgccaaacttgagaatgccagactgtcatcagagatgaatacttctactgtcaacagtgccagggaagaactgatggaaagccgcatgagaattgagagcctttcatcccagctttctaatctacagaaagagtctagagcatgtttggaaaggattcaagaattagaggacttgcttgctaaagaaaaagacaactctcgtcgcatgctgacagacaaagagagagagatggcggaaataagggatcaaatgcagcaacagctgaatgactatgaacagcttcttgatgtaaagttagccctggacatggaaatcagtgcttacaggaaactcttagaaggcgaagaagagaggttgaagctgtctccaagcccttcttcccgtgtgacagtatcccgagcatcctcaagtcgtagtgtacgtacaactagaggaaagcggaagagggttgatgtggaagaatcagaggcgagtagtagtgttagcatctctcattccgcctcagccactggaaatgtttgcatcgaagaaattgatgttgatgggaaatttatccgcttgaagaacacttctgaacaggatcaaccaatgggaggctgggagatgatcagaaaaattggagacacatcagtcagttataaatatacctcaagatatgtgctgaaggcaggccagactgttacaatttgggctgcaaacgctggtgtcacagccagccccccaactgacctcatctggaagaaccagaactcgtggggcactggcgaagatgtgaaggttatattgaaaaattctcagggagaggaggttgctcaaagaagtacagtctttaaaacaaccatacctgaagaagaggaggaggaggaagaagcagctggagtggttgttgaggaagaacttttccaccagcagggaaccccaagagcatccaatagaagctgtgcaattatgtaaaattttcaactgtcttcctcaaaataaagaagtatggtaatctttacctgtatacagtgcagagccttctcagaagcacagaatatttttatatttcctttatgtgaatttttaagctgcaaatctgatggccttaatttcctttttgacactgaaagttttgtaaaagaaatcatgtccatacactttgttgcaagatgtgaattattgacactgaacttaataactgtgtactgttcggaaggggttcctcaaattttttgactttttttgtatgtgtgttttttctttttttttaagttcttatgaggaggggagggtaaataaaccactgtgcgtcttggtgtaatttgaagattgccccatctagactagcaatctcttcattattctctgctatatataaaacggtgctgtgagggaggggaaaagcatttttcaatatattgaacttttgtactgaatttttttgtaataagcaatcaaggttataattttttttaaaatagaaattttgtaagaaggcaatattaacctaatcaccatgtaagcactctggatgatggattccacaaaacttggttttatggttacttcttctcttagattcttaattcatgaggagggtgggggagggaggtggagggagggaagggtttctctattaaaatgcattcgttgtgttttttaagatagtgtaacttgcttaaatttcttatgtgacattaacaaataaaaaagctctttt

SEQ ID NO: 682 - protein, 586 aa, Homo sapien
MATATPVPPRMGSRAGGPTTPLSPTRLSRLQEKEELRELNDRLAVYIDKVRSLETENSALQLQVTEREEVRGRELTGLKALYETELADARRALDDTARERAKLQIELGKCKAEHDQLLLNYAKKESDLNGAQIKLREYEAALNSKDAALATALGDKKSLEGDLEDLKDQIAQLEASLAAAKKQLADETLLKVDLENRCQSLTEDLEFRKSMYEEEINETRRKHETRLVEVDSGRQIEYEYKLAQALHEMREQHDAQVRLYKEELEQTYHAKLENARLSSEMNTSTVNSAREELMESRMRIESLSSQLSNLQKESRACLERIQELEDLLAKEKDNSRRMLTDKEREMAEIRDQMQQQLNDYEQLLDVKLALDMEISAYRKLLEGEEERLKLSPSPSSRVTVSRASSSRSVRTTRGKRKRVDVEESEASSSVSISHSASATGNVCIEEIDVDGKFIRLKNTSEQDQPMGGWEMIRKIGDTSVSYKYTSRYVLKAGQTVTIWAANAGVTASPPTDLIWKNQNSWGTGEDVKVILKNSQGEEVAQRSTVFKTTIPEEEEEEEEAAGVVVEEELFHQQGTPRASNRSCAIM

SEQ ID NO: 683 - DNA, 3692 bp, Homo sapien
ggtgaatgggctggtggtgctcgctgctgctgctgagaggaggaggaggatgaagagttgggcttgtttgtctcctcctcctcctgcttcccctgctcagagttcctgcctccagctgccaggggggacagccagccagcagcaggaggggggctagagagctgaaggagagccagtttccccaaaattggacttctcagaacctttaatatgctaatgtgcattgtgaatctccaagagggggatatgatatgcagcattcttgaatacttctaatgacagggagcccactacctcataagctgcagtgagaagaggagtttgttactttaaacagaggctgaagaaactatagaattagcagagaaagtggagaaggtagaggatggagttgcagactctacaggaggctcttaaagtggaaattcaggttcaccagaaactggttgctcaaatgaagcaggatccacagaatgctgacttaaagaaacagcttcatgaactccaagccaaaatcacagctttgagtgagaaacagaaaagagtagttgaacagctacggaagaacctgatagtaaagcaagaacaaccggacaagttccaaatacagccattgccacaatctgaaaacaaactacaaacagcacagcagcaaccactacagcaactacaacaacagcagcagtaccaccaccaccacgcccagcagtcagctgcagcctctcccaacctgactgcttcacagaagactgtaactacagcttctatgattaccacaaagacactacctctcgtcttgaaagcagcaactgcgaccatgcctgcctctgtggtgggccagagacctaccattgctatggtgaccgccatcaacagtcagaaggctgtgctcagcactgatgtgcagaacacaccagtcaacctccagacgtctagtaaggtcactgggcctggggcagaggctgtccaaattgtggcaaaaaacacagtcactctgcaggttcaggcaacacctcctcagcccatcaaagtaccacagtttatcccccctcctagactcactccacgtccaaactttcttccacaggttcgacccaagcctgtggcccagaataacattcctattgccccagcaccacctcccatgctcgcagctcctcagcttatccagaggcccgtcatgctgaccaagttcacccccacaacccttcccacatcccagaattccatccaccccgtccgtgtcgtcaatgggcagactgcaaccatagccaaaacgttccccatggcccagctcaccagcattgtgatagctactccagggaccagactcgctggacctcaaactgtacagcttagcaagccaagtcttgaaaaacagacagttaaatctcacacagaaacagatgagaaacaaacagagagccacaccatcaccccacctgctgcacccaaaccaaaacgggaggagaaccctcagaaacttgccttcatggtgtctctagggttggtaacacatgaccatctagaagaaatccaaagcaagaggcaagagcgaaaaagaagaacaacagcaaatccggtctacagtggagcagtctttgagccagagcgtaagaagagtgcagtgacatacctaaacagcacaatgcaccctgggacccggaagagagccaatgaggaacactggccaaagggtgatattcatgaggatttttgcagcgtttgcagaaaaagtggccagttactgatgtgcgacacgtgttcccgtgtatatcatttggactgcttagacccccctctgaaaacaattcccaagggcatgtggatctgtcccagatgtcaggaccagatgctgaagaaggaagaagcaattccatggcctggaactttagcaattgttcattcctatattgcctacaaagcagcaaaagaagaagagaaacagaagttacttaaatggagttcagatttaaaacaagaacgagaacaactagagcaaaaggtgaaacagctcagcaattccataagtaaatgcatggaaatgaagaacaccatcctggcccggcagaaggagatgcacagctccctggagaaggtaaaacagctgattcgcctcatccacggcatcgacctctccaaacctgtagactctgaggccactgtgggggccatctccaatggcccggactgcaccccccctgccaatgccgccacctccacgccggccccttccccctcctcccagagctgcacagcgaactgtaaccagggggaagagactaaataacagagcccctctaggagaagccacgggatcccggcggcaaggagaacagaacactgaagactctagaaaagcaaagccggatttctggaaagtgcagaattcttttggttctttggttccagagagagagaagatgcttgtgccaggtggcaccagagtttgccaattgatccttcttattctgtgtgtacatgcaaagattggaccatgttacatgaaatagtgccagctggaggttctttgccagcaccatgccaagtgaaataatatatttactctctctattatacaccagtgtgtgcctgcagcagcctccacagccacgatgggtttgtttctgttttcttgggtggggagcagggacgggcggagggaggagagcaggtttcagatccttacttgccgagccgtttgtttaggtagagaagacaagtccaaagagtgtgtgggctttcctgtttctaaactttcgctactataaaaccaaaaaaaggaattgagatttcaccaaccccagtgcccagaagagggaaggggagtggctggagggagcagggggtgggacagtgtatcaaataagcagtatttaatcacctctggcgggggcctcgtgcaaggggagactgacaccaagaacagccagtaggttcttctcccctgcactctgctccctgcgcggtaaccccaccactcctgaagcctgcccagtctccttccttccctgcttggtgagtcgcgcatctccgtggttatcccgctgtctcctctccaagaacaagcagagcccgggccactggcccttgcccaaggcagggaagaaggatgtgtgtgtccaggaaggaaaaaaaggtggatcagtgattttacttgaaaacaagctccatcccttttctatatttataagaagagaagatcttgagtgaagcagcacgcgacccaggtgtgtgtgaattgaatggagacgtttcttttctctttctttaatttttgtttttgttctttttttctttaaggaaagttttattttactgttcattttactttcttggtaacaaaaactaaaataaggaatagaaaagctgtttttcaggctgacagtccaattaagggtagccaagaccttgcatggtagagtaggaatcatagtgtcagtgaggtcccgtgagtctttgtgagtccttgtgtcatcgttcgggcactgtttttttatgcaagggcaaaaatctttgtatctggggaaaaaaaacttttttttaaattaaaaaggaaaataaaagatattgaggtcttcctagtgttacttaaattaagatcaaggtaagaaacattgtaaaaaaaaattacaaaagtgctatttgtttcctaaaaacagtgatttctattaaaaaggtgtcagaactgg

SEQ ID NO: 684 - protein, 634 aa, Homo sapien
MELQTLQEALKVEIQVHQKLVAQMKQDPQNADLKKQLHELQAKITALSEKQKRVVEQLRKNLIVKQEQPDKFQIQPLPQSENKLQTAQQQPLQQLQQQQQYHHHHAQQSAAASPNLTASQKTVTTASMITTKTLPLVLKAATATMPASVVGQRPTIAMVTAINSQKAVLSTDVQNTPVNLQTSSKVTGPGAEAVQIVAKNTVTLQVQATPPQPIKVPQFIPPPRLTPRPNFLPQVRPKPVAQNNIPIAPAPPPMLAAPQLIQRPVMLTKFTPTTLPTSQNSIHPVRVVNGQTATIAKTFPMAQLTSIVIATPGTRLAGPQTVQLSKPSLEKQTVKSHTETDEKQTESHTITPPAAPKPKREENPQKLAFMVSLGLVTHDHLEEIQSKRQERKRRTTANPVYSGAVFEPERKKSAVTYLNSTMHPGTRKRANEEHWPKGDIHEDFCSVCRKSGQLLMCDTCSRVYHLDCLDPPLKTIPKGMWICPRCQDQMLKKEEAIPWPGTLAIVHSYIAYKAAKEEEKQKLLKWSSDLKQEREQLEQKVKQLSNSISKCMEMKNTILARQKEMHSSLEKVKQLIRLIHGIDLSKPVDSEATVGAISNGPDCTPPANAATSTPAPSPSSQSCTANCNQGEETK

SEQ ID NO: 685 - DNA, 2913 bp, Homo sapien
gtcccagctagagctccagcgcccgctcaggccccactcgaccctctcgggcctcggctacttggactgcggcggaatatggcggctccgatgactcccgcggctcggcccgaggactacgaggcggcgctcaatgccgccctggctgacgtgcccgaactggccagactcctggagatcgacccgtacttgaagccctacgccgtggacttccagcgcaggtataagcagtttagccaaattttgaagaacattggagaaaatgaaggtggtattgataagttttccagaggctatgaatcatttggcgtccacagatgtgctgatggtggtttatactccaaagaatgggccccgggagcagaaggagtttttcttactggagattttaatggttggaatccattttcgtacccatacaaaaaactggattatggaaaatgggagctgtatatcccaccaaagcagaataaatctgtactcgtgcctcatggatccaaattaaaggtagttattactagtaaaagcggagagatcttgtatcgtatttcaccgtgggcaaagtatgtggttcgtgaaggtgataatgtgaattatgattggatacactgggatccagaacactcatatgagtttaagcattccagaccaaagaagccacggagtctaagaatttatgaatctcatgtgggaatttcttcccatgaaggaaaagtagcttcttataaacattttacatgcaatgtactaccaagaatcaaaggccttggatacaactgcattcagttgatggcaatcatggagcatgcttactatgccagctttggttaccaaatcacaagcttctttgcagcttccagccgttatggaacacctgaagagctacaagaactggtagacacagctcattccatgggtatcatagtcctcttagatgtggtacacagccatgcttcaaaaaattcagcagatggattgaatatgtttgatgggacagattcctgttattttcattctggacctagagggactcatgatctttgggatagcagattgtttgcctactccagctgggaagttttaagattccttctgtcaaacataagatggtggttggaagaatatcgctttgatggatttcgttttgatggtgttacgtccatgctttatcatcaccatggagtgggtcaaggtttctcaggtgattacagtgaatatttcggactacaagtagatgaagatgccttgacttacctcatgttggcaaatcatttggttcacacgctgtgtcccgattctataacaatagctgaggatgtatcaggaatgccagctctgtgctctccaatttcccagggagggggtggttttgactatcgactagccatggcaattccagataagtggattcagctacttaaagagtttaaagatgaagactggaacatgggcgatatagtatacacgctcacaaacaggcgctaccttgaaaagtgcattgcttatgcagagagccatgatcaggcattggttggggataagtcgctggcattttggttgatggatgccgaaatgtatacaaacatgagtgtcctgactccttttactccagttattgatcgtggaatacagcttcataaaatgattcgactcattacgcatgggcttggtggagaaggctatctcaatttcatgggtaatgaatttgggcatcctgaatggttagacttcccaagaaaaggaaataatgagagttaccattatgccaggcggcagtttcatttaactgacgacgaccttcttcgctacaagttcctaaataattttgacagggatatgaatagattggaagaaagatatggttggcttgcagctccacaggcctacgtgagtgaaaaacatgaaggcaataagatcattgcttttgaaagagcaggtcttcttttcattttcaacttccatccaagcaagagctacactgactaccgagttggaacagcattgccagggaaattcaaaattgtgctagattcagatgcagcggaatatggagggcatcagagactggaccacagcactgactttttttctgaggcttttgaacataatgggcgtccctattctcttttggtgtacattccaagcagagtggccctcatccttcagaatgtggatctgccgaattgaagaggcctgatttcagctccaccagatgcagatttgtgttttgttttcttgttatcactgtcacacagcttataacatgtatgcttttcagaatacagttgtctagccaagccatcaagtgtctgaaattcaatattggtttatgcaaatacagcaaacttttatttaagtagataggagaatatgtttaaaatattaggaatcctagaccatattttcaagtcatcttagcagctaggattctcaaatggaagtgttatatataatatgttaaaaacattttgctttcctggctaattatttgatccttttaaatccaaatttgaatcatttgtcatgtatgattatttctgttaaatgtacacagtatttaagatggatatttggtggctctatttgttctgatatcttttggtctaaattatgaggtaccaagattgtttctttgtttctttttttcaaattgtgtttagaaatactgtaataaatatgcagtagtgatataaagaattatatccaaggtaatataaaagccattacgtatgaactcatccgtgtctcattttgtgttttattttgtgatctcttgtccactaagtatcttgttaaatgccagtatctcagtctttctgaagccctgaaatggtaattgtagcatttcagaaaatgtctttcatttcaatcaataaaaagcttttgtaaaaaaaaaaaaaaaaaaaaaaaaaa

SEQ ID NO: 686 - protein, 702 aa, Homo sapien
MAAPMTPAARPEDYEAALNAALADVPELARLLEIDPYLKPYAVDFQRRYKQFSQILKNIGENEGGIDKFSRGYESFGVHRCADGGLYSKEWAPGAEGVFLTGDFNGWNPFSYPYKKLDYGKWELYIPPKQNKSVLVPHGSKLKVVITSKSGEILYRISPWAKYVVREGDNVNYDWIHWDPEHSYEFKHSRPKKPRSLRIYESHVGISSHEGKVASYKHFTCNVLPRIKGLGYNCIQLMAIMEHAYYASFGYQITSFFAASSRYGTPEELQELVDTAHSMGIIVLLDVVHSHASKNSADGLNMFDGTDSCYFHSGPRGTHDLWDSRLFAYSSWEVLRFLLSNIRWWLEEYRFDGFRFDGVTSMLYHHHGVGQGFSGDYSEYFGLQVDEDALTYLMLANHLVHTLCPDSITIAEDVSGMPALCSPISQGGGGFDYRLAMAIPDKWIQLLKEFKDEDWNMGDIVYTLTNRRYLEKCIAYAESHDQALVGDKSLAFWLMDAEMYTNMSVLTPFTPVIDRGIQLHKMIRLITHGLGGEGYLNFMGNEFGHPEWLDFPRKGNNESYHYARRQFHLTDDDLLRYKFLNNFDRDMNRLEERYGWLAAPQAYVSEKHEGNKIIAFERAGLLFIFNFHPSKSYTDYRVGTALPGKFKIVLDSDAAEYGGHQRLDHSTDFFSEAFEHNGRPYSLLVYIPSRVALILQNVDLPN

SEQ ID NO: 687 - DNA, 2096 bp, Homo sapien
ctctcctcagcatggacaggggcttccccttcgccgccgccgtcgcggcggcaagtccgcgcgcccggtcctgcggcctattgcagtttatgttgctttttagtcgtcagggaaagcttcgactgcaaaaatggtatgtcccactatcagacaaagagaagaaaaagatcacaagagaacttgttcagaccgttttagcacggaaacctaaaatgtgcagcttccttgagtggcgagatctgaagattgtttacaaaagatatgctagtctgtatttttgctgtgctattgaggatcaggacaatgaactaattaccctggaaataattcatcgttatgtggaattacttgacaagtatttcggcagtgtctgtgaactagatatcatctttaattttgagaaggcttattttattttggatgagtttcttttgggaggggaagttcaggaaacatccaagaaaaatgtccttaaagcaattgagcaggctgatctactgcaggaggaggaagctgaaaccccacgtagtgttcttgaagaaattggactgacataactctcctcccttgttgatgacttcttgtggcatttcacacactgtagatggtcactcccttcattgtccattgttagctcatggtgtaagatgatgtcttgtcagtattactgttttgctaagccgcttcattcatgcctacacaatttttttttaaaagggaactttagttaattaagtgataagggacttaaatatgaattagaatggtgcagaaagagataccttttctggatattttaaagtttaaaggtcagtttctcttaatctgattatgtgcacatatgaaaatggcacatcatatacatgtaaaatcaggcagtatacatttattaattactgtatttgacaaaggaaactcttaaattataatgtgaaacctggttttatgaaaccaaagactagtgcagcatttcagcatatgtaaaaaaaaaaaagggaattgacatgtcacatatcaaatgaatggaaactttgttgaaactttaaaaagcaaatttactccaaagacttgtattggaaattacatacctttttttttttttttaaaggactacagattatttttaatgactaaattggagtgatacttcttacactaaaaattatttcttaggcattctgaatctgggatgagaaacaggattgtttcacaatagtaagcacataatttttaaggccaaggcacatttgactcctgagatgaattttttgtggtcataatcaaatacttagttgtttttgatgccccaaaataaagtgagaatggtaatttgccaggaattcttcataacagtatcttacaaaaaacgtgttgctctcttcacagtattatgtgtaaagtcattgtttaaagcacgaatgttccctctggggtacttgttaaagctaaatttattttgcttccctccacttagaagtgctgcacactttacagcagcttcctttctttccatggcactgcctagttaacagaagtcttataaaaatttaaaaagacacatttcttacaaaaaagagttgaatgaggtaaaatggcattagatggctctatattttttaaagctatgtaattgttcagcgtcacttttctaagtacttatacatatctaaacatgtcttcaatggtttatattttcacttataatatgctgggctggattaagctttgttgtgaattgtgacccaacattcaggccaacgttgagcactgtccttatcacatctcgccacaattagttgtaataaaccgttcaacgtacaaacgtacaaacactggagtgtgtttttatctctttccaaaagtttgtcaaactatgcagagctgctgaaggaagaatttctcatttttttttcagtaaaatgttgaaaattcccctccatttgaatatggtggttgttataagcacacacaagatacatggtggaagatctaaggagtcttcatgtacttcattaaaaaataacatggattccatactgagagcctatctacacatttattttcaatcaataaatgctgcttttaaaaccttgaaa

SEQ ID NO: 688 - protein, 181 aa, Homo sapien
MDRGFPFAAAVAAASPRARSCGLLQFMLLFSRQGKLRLQKWYVPLSDKEKKKITRELVQTVLARKPKMCSFLEWRDLKIVYKRYASLYFCCAIEDQDNELITLEIIHRYVELLDKYFGSVCELDIIFNFEKAYFILDEFLLGGEVQETSKKNVLKAIEQADLLQEEEAETPRSVLEEIGLT

SEQ ID NO: 689 - DNA, 2283 bp, Homo sapien
agcggttacccgcgctgcctccggtgccgctggcgaccgctgagccgcttcccgcgcgtcgcctagcccgcccctcagctcgccgcagccccggctcctccctcgtccggcccccggggcggggtctgtcagcttgccctcccctctccgcctaagcctgccctatgccagccgggtgtcctccccacagcaccacggcttctcttcctcagcacggcgacaggggcttccccttcgccgccgccgccgccgccggccaagctccgccgcgcccgcggcccgcggccgccatgcagtttatgttgctttttagtcgtcagggaaagcttcgactgcaaaaatggtatgtcccactatcagacaaagagaagaaaaagatcacaagagaacttgttcagaccgttttagcacggaaacctaaaatgtgcagcttccttgagtggcgagatctgaagattgtttacaaaagatatgctagtctgtatttttgctgtgctattgaggatcaggacaatgaactaattaccctggaaataattcatcgttatgtggaattacttgacaagtatttcggcagtgtctgtgaactagatatcatctttaattttgagaaggcttattttattttggatgagtttcttttgggaggggaagttcaggaaacatccaagaaaaatgtccttaaagcaattgagcaggctgatctactgcaggaggaagctgaaaccccacgtagtgttcttgaagaaattggactgacataactctcctcccttgttgatgacttcttgtggcatttcacacactgtagatggtcactcccttcatgtccatgttagctcatggtgtaagatgatgtcttgtcagtattactgttttgctaagccgcttcattcatgcctacacaatttttttttaaaagggaactttagttaattaagtgataagggacttaaatatgaattagaatggtgcagaaagagataccttttctggatattttaaagtttaaaggtcagtttctcttaatctgattatgtgcacatatgaaaatggcacatcatatacatgtaaaatcaggcagtatacatttattaattactgtatttgacaaaggaaactcttaaattataatgtgaaacctggttttatgaaaccaaagactagtgcagcatttcagcatatgtaaaaaaaaaaaaaaagggaattgacatgtcacatatcaaatgaatggaaactttgttgaaactttaaaaagcaaatttactccaaagacttgtattggaaattacataccttttttttttttttttaaaggactacagattatttttaatgactaaattggagtgatacttcttacactaaaaattatttcttaggcattctgaatctgggatgagaaacaggattgtttcacaatagtaagcacataatttttaaggccaaggcacatttgactcctgagatgaattttttgtggtcataatcaaatacttagttgtttttgatgccccaaaataaagtgagaatggtaatttgccaggaattcttcataacagtatcttacaaaaaacgtgttgctctcttcacagtattatgtgtaaagtcattgtttaaagcacgaatgttccctctggggtacttgttaaagctaaatttattttgcttccctccacttagaagtgctgcacactttacagcagcttcctttctttccatggcactgcctagttaacagaagtcttataaaaatttaaaaagacacatttcttacaaaaaagagttgaatgaggtaaaatggcattagatggctctatattttttaaagctatgtaattgttcagcgtcacttttctaagtacttatacatatctaaacatgtcttcatggtttatattttcacttatatatgctgggctggattaagctttgttgtgattgtgaccaacattcaggccacgtgagcactgtcttatcacatcgccaattagttgtaataaacgttcaacgtacaaacactggagtgtgtttttatctctttccaaaagtttgtcaaactatgcagagctgctgaaggaagaatttctcatttttttttcagtaaaatgttgaaaattcccctccatttgaatatggtggttgttataagcacacacaagatacatggtggaagatctaaggagtcttcatgtacttcattaaaaaataacatggattccatactgagagcctatctacacatttattttcaatcaataaatgctgcttttaaaaccttga

SEQ ID NO: 690 - protein, 181 aa, Homo sapien; identical to SEQ ID NO: 688

SEQ ID NO: 691 - DNA, 2156 bp, Homo sapien
ggaggccagtgcgcggccgcggtgctctaccggcgtgtcgctccgccccagggagagccggcgctaccatggaggagtaccatcgccactgcgacgaggttggcttcaatgctgaggaagcccacaatattgtcaaagagtgtgtagatggggttttaggtggtgaagattataatcacaacaacatcaaccagtggactgcaagcatagtggaacaatccttaacacacctggttaagttgggaaaagcctataaatatattgtgacctgtgcagtggtccagaagagcgcatatggctttcacacagccagctcctgtttttgggataccacatctgatggaacctgtaccgtaagatgggagaaccggaccatgaactgtattgtcaacgtttttgccattgctattgttctttaactgactaaaaatgttgggctaaagccattaacttaagaatttgtcagtgtatcctttccaaaaagagtaatagttgtttactagtgtgctagatgaaaagcgtgcaatatgctttaaagctatcaacaaaaactgaatattataagcaagcaatatcatagtaattggcagattagctcatattctatacagcatcgtttaaataggaaaaatttaatgctagcaaaaaataaatttagaatatggcatgacatgaaaatacaatcttatatttacaccagcttttcactaatattttgtacctaaggtgatggggaactccattcagataataaaattctctttcagctagagaagttaacaggaataaatatatgaacaaaaaagctgcaaggataaatgtggagaaaatgatgagaattagctaacatttttaagtttttttaaactttcttcccctcagttgtacttaatatttagtggaaagtaataatttttttattttctatcaactaatagtatagtaacaactatgattaacttgtttactttttctgaggattagtaaatcaattttttttaatttcaaattttggatttacacttgagggtaaattaaatctggtaaactgaatttcctagttaaataaaattagttgcagtatatgatgaacagtgtatgactcaaacagctgccttacaattcactcattccatgtggaacaaacatttatcagatgcctattatgggcatatgtctctgctaagcaccatagttgtcaatgtgctgtgcaaatgctaagttccttttagcaattgttcagttggaagacgtattaatatttggggaaggaaaagaaagtagttgttttacaagggaggaaaaaagtgaatctggttacacatatggaagtaagcaaaatgaaaagcacttattgctttctgacagaattatagatgtaattttaagagttgctcctagcaagttaaaagtgcatataaaatatgcaactcttagttaaaggccttattatcagtcttacctatacaagtagtaaattttgtcattgctttagttacaaccatctgtaaataacttaaaagacttattatgtggggttcaaattgagtggaataaagtatagattaaaagtatacaatccttagcacgttatctcagggcttatgaaatgtaattaaatttattaagaaaatagatgaaaaattagggtacacagctggccaccaaatgcgaagtcaatctgctacttaaccctgaaaacaaaatcagttttgcatattaccactaacactaatacatatagagagcggaaccataactcattgaattttggagaggaataagcttagcgttaatattgacaatattaaggcaatattcttgtaggaatactatgtgcatgtttgatattttgccaaataacaataattaataattgttcaatgtttaagaataatattaacaaaataaaggagtttaatgcagtgatctttgtttttggcacatcaaaaattctcagtcattattcatgtttcttttatgctgctggcttttgtgccctggaagatcataatagtgaccaaaatatacatgcagacttgttttttattattgttgtttaagcataatttaagaaaaaaaatttttacctggtgaacttgctatctgctctgtttctagttaaaatataataaatattatcttcctgtgctgta

SEQ ID NO: 692 - protein, 116 aa, Homo sapien
MEEYHRHCDEVGFNAEEAHNIVKECVDGVLGGEDYNHNNINQWTASIVEQSLTHLVKLGKAYKYIVTCAVVQKSAYGFHTASSCFWDTTSDGTCTVRWENRTMNCIVNVFAIAIVL

SEQ ID NO: 693 - DNA, 3833 bp, Homo sapien
ctttcccgagtccgtttgaggaagtccccgaggcgcacagagcaagcccacgcgagggcacctctggaggggagcgcctgcaggaccttgtaaagtcaaaaatgtcagaaacttccaggaccgcctttggaggcagaagagcagttccacccaataactctaatgcagcggaagatgacctgcccacagtggagcttcagggcgtggtgccccggggcgtcaacctgcaagagtttcttaatgtcacgagcgttcacctgttcaaggagagatgggacactaacaaggtggaccaccacactgacaagtatgaaaacaacaagctgattgtccgcagagggcagtctttctatgtgcagattgacctcagtcgtccatatgaccccagaagggatctcttcagggtggaatacgtcattggtcgctacccacaggagaacaagggaacctacatcccagtgcctatagtctcagagttacaaagtggaaagtggggggccaagattgtcatgagagaggacaggtctgtgcggctgtccatccagtcttcccccaaatgtattgtggggaaattccgcatgtatgttgctgtctggactccctatggcgtacttcgaaccagtcgaaacccagaaacagacacgtacattctcttcaatccttggtgtgaagatgatgctgtgtatctggacaatgagaaagaaagagaagagtatgtcctgaatgacatcggggtaattttttatggagaggtcaatgacatcaagaccagaagctggagctatggtcagtttgaagatggcatcctggacacttgcctgtatgtgatggacagagcacaaatggacctctctggaagagggaatcccatcaaagtcagccgtgtggggtctgcaatggtgaatgccaaagatgacgaaggtgtcctcgttggatcctgggacaatatctatgcctatggcgtccccccatcggcctggactggaagcgttgacattctattggaataccggagctctgagaatccagtccggtatggccaatgctgggtttttgctggtgtctttaacacatttttacgatgccttggaataccagcaagaattgttaccaattatttctctgcccatgataatgatgccaatttgcaaatggacatcttcctggaagaagatgggaacgtgaattccaaactcaccaaggattcagtgtggaactaccactgctggaatgaagcatggatgacaaggcctgaccttcctgttggatttggaggctggcaagctgtggacagcaccccccaggaaaatagcgatggcatgtatcggtgtggccccgcctcggttcaagccatcaagcacggccatgtctgcttccaatttgatgcaccttttgtttttgcagaggtcaacagcgacctcatttacattacagctaagaaagatggcactcatgtggtggaaaatgtggatgccacccacattgggaaattaattgtgaccaaacaaattggaggagatggcatgatggatattactgatacttacaaattccaagaaggtcaagaagaagagagattggccctagaaactgccctgatgtacggagctaaaaagcccctcaacacagaaggtgtcatgaaatcaaggtccaacgttgacatggactttgaagtggaaaatgctgtgctgggaaaagacttcaagctctccatcaccttccggaacaacagccacaaccgttacaccatcacagcttatctctcagccaacatcaccttctacaccggggtcccgaaggcagagttcaagaaggagacgttcgacgtgacgctggagcccttgtccttcaagaaagaggcggtgctgatccaagccggcgagtacatgggtcagctgctggaacaagcgtccctgcacttctttgtcacagctcgcatcaatgagaccagggatgttctggccaagcaaaagtccaccgtgctaaccatccctgagatcatcatcaaggtccgtggcactcaggtagttggttctgacatgactgtgacagttcagtttaccaatcctttaaaagaaaccctgcgaaatgtctgggtacacctggatggtcctggagtaacaagaccaatgaagaagatgttccgtgaaatccggcccaactccaccgtgcagtgggaagaagtgtgccggccctgggtctctgggcatcggaagctgatagccagcatgagcagtgactccctgagacatgtgtatggcgagctggacgtgcagattcaaagacgaccttccatgtgaatgcacaggaagctgagatgaaccctggcatttggcctcttgtagtcttggctaaggaaattctaacgcaaaaatagctcttgctttgacttaggtgtgaagacccagacaggactgcagagggccccagagtggagatcccacatatttcaaaaacatacttttccaaacccaggctattcggcaaggaagttagtttttaatctctccaccttccaaagagtgctaagcattagctttaattaagctctcatagctcataagagtaacagtcatcatttatcatcacaaatggctacatctccaaatatcagtgggctctcttaccagggagatttgctcaatacctggcctcatttaaaacaagacttcagattccccactcagccttttgggaataatagcacatgatttgggctctagaattccagtcccctttctcggggtcaggttctaccctccatgtgagaatatttttcccaggactagagcacaacataatttttatttttggcaaagccagaaaaagatctttcattttgcacctgcagccaagcaaatgcctgccaaattttagatttaccttgttagaagaggtggccccatattaacaaattgcatttgtgggaaacttaaccacctacaaggagataagaaagcaggtgcaacactcaagtctattgaataatgtagttttgtgatgcattttatagaatgtgtcacactgtggcctgatcagcaggagccaatatcccttactttaaccctttctgggatgcaatactaggaagtaaagtgaagaatttatctctttagttagtgattatatttcacccatctctcaggaatcatctcctttgcagaatgatgcaggttcaggtcccctttcagagatataataagcccaacaagttgaagaagctggcggatctagtgaccagatatatagaaggactgcagccactgattctctcttgtccttcacatcaccattttgagacctcagcttggcactcaggtgctgaagggtaatatggactcagccttgcaaatagccagtgctagttctgacccaaccacagaggatgctgacatcatttgtattatgttccaaggctactacagagaaggctgcctgctatgtatttgcaaggctgatttatggtcagaatttccctctgatatgtctagggtgtgatttaggtcagtagactgtgattcttagcaaaaaatgaacagtgataagtatactgggggcaaaatcagaatggaatgctctggtctatataaccacatttctgagcctttgagactgttcctgagccttcagcactaacctatgagggtgagctggtcccctctatatatacatcatacttaactttactaagtaatctcacagcatttgccaagtctcccaatatccaattttaaaatgaaatgcattttgctagacagttaaactggcttaacttagtatattattattaattacaatgtaatagaagcttaaaataaagttaaactgattat

SEQ ID NO: 694 - protein, 732 aa, Homo sapien
MSETSRTAFGGRRAVPPNNSNAAEDDLPTVELQGVVPRGVNLQEFLNVTSVHLFKERWDTNKVDHHTDKYENNKLIVRRGQSFYVQIDLSRPYDPRRDLFRVEYVIGRYPQENKGTYIPVPIVSELQSGKWGAKIVMREDRSVRLSIQSSPKCIVGKFRMYVAVWTPYGVLRTSRNPETDTYILFNPWCEDDAVYLDNEKEREEYVLNDIGVIFYGEVNDIKTRSWSYGQFEDGILDTCLYVMDRAQMDLSGRGNPIKVSRVGSAMVNAKDDEGVLVGSWDNIYAYGVPPSAWTGSVDILLEYRSSENPVRYGQCWVFAGVFNTFLRCLGIPARIVTNYFSAHDNDANLQMDIFLEEDGNVNSKLTKDSVWNYHCWNEAWMTRPDLPVGFGGWQAVDSTPQENSDGMYRCGPASVQAIKHGHVCFQFDAPFVFAEVNSDLIYITAKKDGTHVVENVDATHIGKLIVTKQIGGDGMMDITDTYKFQEGQEEERLALETALMYGAKKPLNTEGVMKSRSNVDMDFEVENAVLGKDFKLSITFRNNSHNRYTITAYLSANITFYTGVPKAEFKKETFDVTLEPLSFKKEAVLIQAGEYMGQLLEQASLHFFVTARINETRDVLAKQKSTVLTIPEIIIKVRGTQVVGSDMTVTVQFTNPLKETLRNVWVHLDGPGVTRPMKKMFREIRPNSTVQWEEVCRPWVSGHRKLIASMSSDSLRHVYGELDVQIQRRPSM

SEQ ID NO: 695 - DNA, 1577 bp, Homo sapien
gcccgctgcggtaaatggggcagaggccgggaggggtgggggttccccgcgccgcagccatggagcagcttcgcgccgccgcccgtctgcagattgttctgggccacctcggccgcccctcggccggggctgtcgtagctcatcccacttcagggactatttcctctgccagtttccatcctcaacaattccagtatactctggataataatgttctaaccctggaacagagaaaattttatgaagaaaatgggtttctagtaatcaaaaatcttgtacctgatgccgatattcaacgctttcggaatgagtttgaaaaaatctgcagaaaggaggtgaaaccattaggattaacagtaatgagagatgtgaccatttcgaaatccgaatatgctccaagtgagaagatgatcacgaaggtccaggatttccaggaagataaggagctcttcagatactgcactctccccgagattctgaaatatgtggagtgcttcactggacctaatattatggccatgcacacaatgttgataaacaaacctccagattctggcaagaagacgtcccgtcaccccctgcaccaggacctgcactatttccccttcaggcccagcgatctcatcgtttgcgcctggacggcgatggagcacatcagccggaacaacggctgtctggttgtgctcccaggcacacacaagggctccctgaagccccacgattaccccaagtgggaggggggagttaacaaaatgttccacgggatccaggactacgaggaaaacaaggcccgggtgcacctggtgatggagaagggcgacactgttttcttccatcctttgctcatccacggatctggtcagaataaaacccagggattccggaaggcaatttcctgccatttcgccagtgccgattgccactacattgacgtgaagggcaccagtcaagaaaacatcgagaaggaagttgtaggaatagcacataaattctttggagctgaaaatagcgtgaacttgaaggatatttggatgtttcgagctcgacttgtgaaaggagaaagaaccaatctttgaaatagccatctgctataactctttcaacagaaaaccaaaaccaaacgaaatgtctaaggaaaatgttttcttaatgagatgatgtaaccttttctatcacttgttaaaagcagaaaacatgtatcaggtacttaattgcatagagttagttttgcagcacaatggtgttgctttaatggaaaaaaaaaacagtaaaagtgaaatattactgttttaaggaaaactaatttagggtggcagccaataaaggtggttggtgtctaatttaagtgttaaatcaatttctttcattcagttagctctttacccaagaagaagtgaatgatttggagcttagggtatgttttgtatcccctttctgataaacccattccctaccaattttatgtcataagagatttttttcccccaaatctagaacaatgtataatacattcacatctagtcaagggcataggaacggtgtcatggagtccaaataaagtggatattcctgctcgg

SEQ ID NO: 696 - protein, 338 aa, Homo sapien
MEQLRAAARLQIVLGHLGRPSAGAVVAHPTSGTISSASFHPQQFQYTLDNNVLTLEQRKFYEENGFLVIKNLVPDADIQRFRNEFEKICRKEVKPLGLTVMRDVTISKSEYAPSEKMITKVQDFQEDKELFRYCTLPEILKYVECFTGPNIMAMHTMLINKPPDSGKKTSRHPLHQDLHYFPFRPSDLIVCAWTAMEHISRNNGCLVVLPGTHKGSLKPHDYPKWEGGVNKMFHGIQDYEENKARVHLVMEKGDTVFFHPLLIHGSGQNKTQGFRKAISCHFASADCHYIDVKGTSQENIEKEVVGIAHKFFGAENSVNLKDIWMFRARLVKGERTNL

SEQ ID NO: 697 - DNA, 1425 bp, Homo sapien
gcggacgtgggcaggagggctggaaaagccggcgctggagcgggaacgggagtagctgcctgggcgccaaaggccgcggcactcccacgcggaccccgaagtccgcaacccggggatgggcccgcggctgcgaggggatcttctctggatcaagcaatggtggtgaaaaatgtttcgcaagggcaaaaaacgacacagtagtagcagttcccaaagtagcgaaatcagtactaagagcaagtctgtggattctagccttgggggtctttcacgatccagcactgtggccagcctcgacacagattccaccaaaagctcaggacaaagcaacaataattcagatacctgtgcagaatttcgaataaaatatgttggtgccattgagaaactgaaactctccgagggaaaaggccttgaagggccattagacctgataaattatatagacgttgcccagcaagatggaaagttgccttttgttcctccggaggaagaatttattatgggagtttccaagtatggcataaaagtatcaacatcagatcaatatgatgttttgcacaggcatgctctctacttaataatccggatggtgtgttacgatgacggtctgggggcgggaaaaagcttactggctctgaagaccacagatgcaagcaatgaggaatacagcctgtgggtttatcagtgcaacagcctggaacaagcacaagccatttgcaaggttttatccaccgcttttgactctgtattaacatctgagaaaccctgaatcctgcaatcaagtagaagtcaacttcatctgaaagttcagctgttttcaaactgcaatgctgaaatgttatgcaaataatgaagttatcccttgctctagattttctgaagaaaatggattgtgtaaaatgctgatcatttgtttattaaaatgtgtcctattacacagtgagttaactctcaatgaagtcatctattttctgggctaaaaaacttcatttgtctttttcaacttctaataagcttaacctaagtgtcacgaagacgagatgtcacagaggtccactcagtgacaaacacacactgaaggcctgagggaagactgaggacatgggctcagtggtggcttcccagtcatggtatcactggcatggacctctgtccggcagaggtgtggactggagaccaggattcatgctggtctggaacaatgacattgccaacttaagacacacaaagcagattttcagaagtgtctggtcaagataacatgctggccaaccacaattcctagagttaagagaaccttaaaagattaccgctcatgctaaaagtatgtaaagatcccatgtacagtatgatagtgtactttttttaaaggactgtcaatatacaaaactttaaagattaaaaacattaaaaataaaaaaa

SEQ ID NO: 698 - protein, 200 aa, Homo sapien
MFRKGKKRHSSSSSQSSEISTKSKSVDSSLGGLSRSSTVASLDTDSTKSSGQSNNNSDTCAEFRIKYVGAIEKLKLSEGKGLEGPLDLINYIDVAQQDGKLPFVPPEEEFIMGVSKYGIKVSTSDQYDVLHRHALYLIIRMVCYDDGLGAGKSLLALKTTDASNEEYSLWVYQCNSLEQAQAICKVLSTAFDSVLTSEKP

SEQ ID NO: 699 - DNA, 6722 bp, Homo sapien
ggcacggggacatcaggatatcctgagtgtgtctgcagatggtggcatcgtgatgggctattctagtggcgtcaccaatgggctgaatgatgccagcgactccatctacacgaaaggcaccccggagattgctttctggggaagcaatgctggggtgaaaacaacacggctagaagctcattctgaaatggggagcactgaaattttggaaaaggagaccccagaaaatctcagtaatggtaccagcagcaatgtggaagcagccaaaaggttggccaaacgcctttatcagctggacagattcaaaagatcagatgttgcaaaacaccttggcaagaacaacgaatttagcaaactagttgcagaagaatatctgaagttttttgattttacaggaatgacgctggatcagtcactcaggtatttctttaaagcattctctcttgtgggagaaactcaagaacgagagagagttttaatacacttctccaatagatatttttattgtaacccagataccattgcttcacaagatggagtccattgccttacctgtgcaataatgcttcttaataccgatctacatggccacgtgaatattggaaagaagatgacctgtcaggagttcattgcaaatctgcaaggggtaaatgagggtgttgatttctccaaggatctgctgaaagctctgtacaactcaatcaagaatgagaagcttgaatgggcagtagatgatgaagagaaaaaaaagtctccctcagaaagtactgaggagaaagctaacggaacacatccaaagaccatcagtcgtattggaagtactactaacccatttttggacattcctcatgatccaaatgctgctgtgtacaaaagtggattcttggctcggaaaattcatgcagatatggatggaaagaagactccaagaggaaaacgaggatggaaaaccttttatgctgtactgaagggaacagttctttacttgcaaaaggatgaatacaagccagaaaaggccttgtctgaagaggacttgaaaaacgctgtgagtgtgcaccacgcattggcatccaaggccacggactatgagaagaaaccaaacgtgtttaaacttaaaactgccgactggagggtcttgctttttcaaactcagagcccagaggaaatgcaagggtggataaacaaaatcaattgtgtggcagctgtattttctgcaccaccatttccagcagcaatcggctctcagaagaagtttagccgcccacttctgcctgccactacaacaaaactgtctcaggaggagcaactgaagtcacatgaaagtaagctgaagcagatcaccaccgagctggccgagcaccgctcatatccccccgacaagaaggtcaaagccaaggacgtcgatgagtacaaactgaaagaccactatctggagtttgagaaaacccgctatgaaatgtatgtcagcattctcaaggaaggaggcaaagagctactgagtaacgatgaaagcgaggctgcaggactgaagaagtcgcactcgagtccttcgctgaacccggatacttctccaatcactgccaaagtcaagcgtaacgtgtcagagaggaaggatcaccgacctgaaacaccaagcattaagcaaaaagttacttagagtccatctgcggccaggaagtgctggtcatggagcaaaatagggtttttcaagatctttctggtaatccgtgaatatatttaaaaaaaaaaaagtctgtgacaaaacggtgcattagtaattttttctattgtatatttttgttagtttctgtacagattgtctttgctcttgatttcttttgctttgatgatttttgcaacttgatagctaatgcaccttttctgtgaggaggaggggatcgtgatttcagaatgaattatgtatcccttctcttttggttttctcttgtttgcagtctgctcagttgttttatgtattctcatatcaactgttaaacttttttttaaggttaaagaatttaatccattgtgaaacacttaactggacaaactgtagttttagtaaattctagctggagttaatatacgcctttatatgtgaaatcttgcccagtcacagaggtagaattgagcactcacagatgctccagtaagaatcacagtgctgggaatctagttgctccaatatgaggcagcttcatgtgcagcttagcacttgttgttgagatcggaccctgctggaagcagggaaaagaagcgtgaagatcgtaggattgagaacttagggaagcacattagcttgcttgaagtgctgattccatttcagccaagcaagggaaagaggaagtggagtcattttgcctttgaaggctgaggaaagattgatacccagttaattttgtttgctaaaggatgggggcaataatcggcccttgaggagctgcagcagtaggcatgtgctcagtctgcaggaattgttacctcactcccacagggtctagactagaaatccatcatctctatcgttgatatccttccatccaggaatagatttttcttactctacatatgtgtgtgtgcgtgcgtgtgtgtgcgtgtgtgggcatggggttgtgtcctggttgtgatattgaggtcttccttcctaacaaattaatactaaaatgaaacagcttttcttgtgtccttaagacaaaataaggaaggaaaacgtagctgcagttgtccacgatggatattggttctttaaaatatatctgaaagtagtagtcagaatgaattatggttggaaaactgaggaatcttctggttgcaggtgcaaagtgactttgtttattcttgtctcagtctccttgatagccacttcactctgctactactcaactttctcctaaaaatacttcatctattttcagtcctttctttctgtctactcaaaatggttctattaactttgcagtcatgagcttgttccagttacagtccctttgaagttcagggtgataaacagaatattcttctgtagaggaagagaaaggagtgaaagtttagcccactgagacctagagctttgtgatttcctaaccttgaaactctgtaatccctaaagttaaaatctccgcaagtggcacaacttcagaactaatagtatcactttgatttttctttttcctcccttagaaagtttctctagttctatagtttatttgttgaaggtactatgaccaaagaatcagctgctctacaggaatagcatggttccagtgaattagagaaaacctgctgtaaagccatggtagtgtctaagtggtatgttattatgatgtactagcatttatttacagaattatttattaacgtttacttccttcccctctgtaaatgtccatgactattgcccagagaaggcttacccctctctagggttgcagttgctttctttgtaataagtattttgccacacctgtaaaaaaaaaaaacctcacttttaactctctgccttgtttgggtaaaggcagtaactaagtttatgtttcagaactgcaaaacaaacaggatagttaccaatatggcccatgtgtcagattgatttttgtagcctctcactgaatccaacatatccacaagcaagttatctgtctttctacctgataatctaaattatcaggatatttgttttctgcctaaatgtttatactaagccgaggggagagaggtacctagaccatgtcatctacgagcttcagtaactaaagaaaaaggaacttccctgagtggcttgaatgtgtttgcccacagtctatatctatgtatatagaatgtctgtatgtattttacttatttaatatacattgaatggtaccttgctacagtatttctgacatttagagtagtgttgaaatactcggctagcatcagcaccactatagcactgtccgtgtcatatgagtcactaatattaactccagggacttctggataggctaatagatcattggatacgaagggctcttttgaagcttcagtataccatgtttgcatagtttatctttaaaaacaactttaaaggttcttttgtgagccaggatctcagactgccgtagcatgatgctgtccatctttagcgcatgggctgagaacacctcttccctgaggcttctgaaggttgctgtctgtcatgagtgcatgaaggaggccaagagtttatgctatgggaggaaccagtcactgatttgcctagattctgagagtctggcccatagccaaccacattttcctttgggataatttatttcctgtggcatctagccagaagaaattgaggatgtttcctttcacagctgctccaagcctgttgcccaattcacggtacaagggagcaccccttccctttcctctgaaggtacgccacccacctccgtcgcccacctcagcgcccaggagccttgggacttccttccatatgataaatcattcttcttcacgtcaatacacttcatattaatttctagtacagaaaatcttgacagctatcagaatgccttggtcatagtgttgttgcaaaattgaccatacaggtggcccatgtataaaatctgaattttaggggtttgtccccacctcgcatgctggcttttacagggaggtgtctgggattcctcattagcaatcaaaacttaattactgggatgcagagtccttactttatcgccagcccgtaggcatttctgaagtgcacttttttgaaacatcattttgctaactctcagcagtgtctaattaaactgagcaatacttttgtgaattttaattaatctcagcaaaaccatgatgggagagagtcctctgatggaaatgtagtccctggattatgtgtaacctttttattgctcttagatgcagaggatagaaagcattttttggtgcagtggtcttgtggcaaacacaagaccctctatgcgtctccaactgttatcctaatctagaaaatgaggactggcccctgggcaaaagtgacatgaggaatttactctggaagaggaaaatctgggtggctttccaaggctaagataggtttgtatttcaccctgtggccaagctacagaacttctgagattgtggaagaatttttgcaaccagcagggaaagaggcctcttactgcctaaacacaaagttacactgagcttttctactgtcctttgcctattgctccctctatcatgtaaagatctgggaaggatgagaggcagggcctgcttgtcatgagctgcactcttttctttttaactaatcattgacaattggaagaaaattgacgttaaagaagtttctccattgtcttactaacaaaaccttttgggtttcattaattgtccttgaaattgagttcctttggcatttttccttgcagtcatcagttaagcatgttgcatcctgaattcacagaagtttagctttgcaggtttgaatctctgtaatttaactcccgtggacttggtcgagttttcagcaggttgggagccacctctcttcatttcagcagtgagtcatcccttgacttttcaaatgacagaattttttccaattgtaaaattagcactgtaaaacaaagaaccaaagtggcatcctaagagttgttaaacctgaagtctagtttatgaggaattgtccaagttggagtttaaatagtatctgcttttgtctcaaagcatctaagttattctgacagaaaatggtaagtcagctttgcaggcagatgcgcctctgggcctcctaccttgctccacagctttctggccatcttgtctcccaggccatgccactgctctgccacatgtcagcaaatttctttccaccagtcttatagcatcttacatgatcaaatcatcacagaataaccccgtgatagattattgatagcaatagagaggggcggctttgtcactgatttttctctcagattccttttccatctctcatccataaaggaaggactgaaatccaaaggcattctccttttgtacctacagtatccagaacccacgtgggcagccttctgcttatgacaataattggcccattgcatgcagagagaatgtcttcatagagagaatgtcattaaatacttgaatctgcatgacagtttgacttgaatgcaacagcaggaaaattttgcaagttacataattgtatatacagtaggttttcttaagtctcttcggttcatcctttgtaatttgtgtgtgtatctgtagtattgcaggcttttggagactattcttacaggcagtatgtcagtcatcaaagaaaatgctgtcacctgccattgttgtatttgtgggtatttatagttgtatgtatgtaaatgcatcagtgtgtagattgcatatcagtgtatggtacatgtacatcaaaattatttttgtccttaatcagtgtgatatgaaaagcaagtacaacctcataggactgattatataatgaagttgttgagagtatatatagtggtattgttttattaaacttaaactcaaataatattttgattaaaatttttaataagactttatgctagaaaattctttgagctttgaatcaccagggcaaaaatgactttcaactaaccttgtgaatcttttgcagtgtactgtgtgcaataccaagggcatagctccctgtaatttgggaaatacagaaagaaaagaaaaaaaaaaaaaaaaaa

SEQ ID NO: 700 - protein, 534 aa, Homo sapien
MGYSSGVTNGLNDASDSIYTKGTPEIAFWGSNAGVKTTRLEAHSEMGSTEILEKETPENLSNGTSSNVEAAKRLAKRLYQLDRFKRSDVAKHLGKNNEFSKLVAEEYLKFFDFTGMTLDQSLRYFFKAFSLVGETQERERVLIHFSNRYFYCNPDTIASQDGVHCLTCAIMLLNTDLHGHVNIGKKMTCQEFIANLQGVNEGVDFSKDLLKALYNSIKNEKLEWAVDDEEKKKSPSESTEEKANGTHPKTISRIGSTTNPFLDIPHDPNAAVYKSGFLARKIHADMDGKKTPRGKRGWKTFYAVLKGTVLYLQKDEYKPEKALSEEDLKNAVSVHHALASKATDYEKKPNVFKLKTADWRVLLFQTQSPEEMQGWINKINCVAAVFSAPPFPAAIGSQKKFSRPLLPATTTKLSQEEQLKSHESKLKQITTELAEHRSYPPDKKVKAKDVDEYKLKDHYLEFEKTRYEMYVSILKEGGKELLSNDESEAAGLKKSHSSPSLNPDTSPITAKVKRNVSERKDHRPETPSIKQKVT

SEQ ID NO: 701 - DNA, 1471 bp, Homo sapien
gtggccgcgcaggaggacggagccctaaccgcaacccgcgccgcgccgcgccgatttgatttgtatccactgtcaccagcactgctcacttaggactttctggatccagacccaggcagcgcacactggactcttgaggaagaaggagactctaattttggattccttggtggaggaaaataaaacactctggtcttgccgccaacgatgcaagtgtgactgctggcgtcttcatgagctccagaggtcacagcacgctaccaaggactctcatggcccctcggatgatttccgagggagacataggaggcattgctcaaatcacctcctctctattcctgggcagaggcagtgtggcctccaatcggcacctcctccaggctcgtggcatcacctgcattgttaatgctaccattgagatccctaatttcaactggccccaatttgagtatgttaaagtgcctctggctgacatgccgcatgcccccattggactgtactttgacaccgtggctgacaagatccacagtgtgagcaggaagcacggggccaccttggtgcactgtgctgcaggggtgagccgctcagccacgctgtgtatcgcgtacctgatgaaattccacaacgtgtgcctgctggaggcatacaactgggtgaaagcccggcgacctgtcatcaggcccaacgtaggcttctggaggcaactgatagactacgagcgccagctctttgggaagtcgacagttaaaatggtacagacaccttatggcatagttcccgacgtctatgagaaggagtcccgacacctgatgccttactgggggatttagtgccactgaagcctgcgtcagcagcccgagcggggccggcatctgctccccgccgtctgctccctctccactctcttctcaaatggctgacttctggttctccctcaagtgttttttacactgggtgttcaaatttattttaagagatagggagggaggggacataaagggaatgcatacattgctagtcacatttttaaaattaacattttggaatagtgtttatggaaatctttagcttttaatcatttttaccaatttgaacagtttaataaactggttctgctctcttctgaatctcatgcctttggcaccttggtaggtgcaggaggagctcagtgcaaaaatcactttggggcctcattaaccctttagagacaagctttgccccaggctgcggaccagacagatgcttagggaaggttgataccagcttcagtctctactggattagccctactctttcctttcccctccattatttagtgactctgtaagtaagttaaatacacccttattatttagctgttaagtaactataatgaaatctgctgcaaaatctctcttggaatccatgtgcccaggattatattagcattatttttaataaatctatatgcttaaaaaaaaaaaaaaaaaaa

SEQ ID NO: 702 - protein, 198 aa, Homo sapien
MSSRGHSTLPRTLMAPRMISEGDIGGIAQITSSLFLGRGSVASNRHLLQARGITCIVNATIEIPNFNWPQFEYVKVPLADMPHAPIGLYFDTVADKIHSVSRKHGATLVHCAAGVSRSATLCIAYLMKFHNVCLLEAYNWVKARRPVIRPNVGFWRQLIDYERQLFGKSTVKMVQTPYGIVPDVYEKESRHLMPYWGI

SEQ ID NO: 703 - DNA, 3206 bp, Homo sapien
ctggtgactcgcggcggcggcggcggacggcccagccggagcgcgaggggctcgggggggcgcggcggttcgggtcgcagagccagggaccccaggacccgggaggcggcgcagccggggccgccggaggagcgcgggtgacctggcggcggcgagatgccgctcgcccagctcaaggagccctggccgctcatggagctagtgccgctggacccggagaatggacagacctcaggggaagaagctggacttcagccgtccaaggatgagggcgtcctcaaggagatctccatcacgcaccacgtcaaggctggctctgagaaggctgatccatcccatttcgagctcctcaaggttctgggccagggatcctttggcaaagtcttcctggtgcggaaagtcacccggcctgacagtgggcacctgtatgctatgaaggtgctgaagaaggcaacgctgaaagtacgtgaccgcgtccggaccaagatggagagagacatcctggctgatgtaaatcacccattcgtggtgaagctgcactatgccttccagaccgagggcaagctctatctcattctggacttcctgcgtggtggggacctcttcacccggctctcaaaagaggtgatgttcacggaggaggatgtgaagttttacctggccgagctggctctgggcctggatcacctgcacagcctgggtatcatttacagagacctcaagcctgagaacatccttctggatgaggagggccacatcaaactcactgactttggcctgagcaaagaggccattgaccacgagaagaaggcctattctttctgcgggacagtggagtacatggcccctgaggtcgtcaaccgccagggccactcccatagtgcggactggtggtcctatggggtgttgatgtttgagatgctgacgggctccctgcccttccaggggaaggaccggaaggagaccatgacactgattctgaaggcgaagctaggcatgccccagtttctgagcactgaagcccagagcctcttgcgggccctgttcaagcggaatcctgccaaccggctcggctccggccctgatggggcagaggaaatcaagcggcatgtcttctactccaccattgactggaataagctataccgtcgtgagatcaagccacccttcaagccagcagtggctcagcctgatgacaccttctactttgacaccgagttcacgtcccgcacacccaaggattccccaggcatcccccccagcgctggggcccatcagctgttccggggcttcagcttcgtggccaccggcctgatggaagacgacggcaagcctcgtgccccgcaggcacccctgcactcggtggtacagcaactccatgggaagaacctggtttttagtgacggctacgtggtaaaggagacaattggtgtgggctcctactctgagtgcaagcgctgtgtccacaaggccaccaacatggagtatgctgtcaaggtcattgataagagcaagcgggatccttcagaagagattgagattcttctgcggtatggccagcaccccaacatcatcactctgaaagatgtgtatgatgatggcaaacacgtgtacctggtgacagagctgatgcggggtggggagctgctggacaagatcctgcggcagaagttcttctcagagcgggaggccagctttgtcctgcacaccattggcaaaactgtggagtatctgcactcacagggggttgtgcacagggacctgaagcccagcaacatcctgtatgtggacgagtccgggaatcccgagtgcctgcgcatctgtgactttggttttgccaaacagctgcgggctgagaatgggctcctcatgacaccttgctacacagccaactttgtggcgcctgaggtgctgaagcgccagggctacgatgaaggctgcgacatctggagcctgggcattctgctgtacaccatgctggcaggatatactccatttgccaacggtcccagtgacacaccagaggaaatcctaacccggatcggcagtgggaagtttaccctcagtgggggaaattggaacacagtttcagagacagccaaggacctggtgtccaagatgctacacgtggatccccaccagcgcctcacagctaagcaggttctgcagcatccatgggtcacccagaaagacaagcttccccaaagccagctgtcccaccaggacctacagcttgtgaagggagccatggctgccacgtactccgcactcaacagctccaagcccaccccccagctgaagcccatcgagtcatccatcctggcccagcggcgagtgaggaagttgccatccaccaccctgtgaggcaccagggcattcgggccacagggcggtgctagcttgacagagtcagcatgcttcccagagggagcaggccggaaccacagggccagagggagctggaacccgaggggccggggaagctgccagcccagaacacccctaatgagggtgtgagaagtgccttctccttccccaggatggactcttctcggctcaggctctgctggtggaaagcgattcactgtataaacttttttttatgaaaaaaatggcatcaaccaccatggatttttacaagatccatttgcctttctgggagcagaaacagccattgcggccccaggaggggaactgagtcacgctggggctctctgagactctttagagcagctttgggatcccaccctggggacccccatgattggccacctgtagccatctgcacacacctccgagacagtccagtgtcacctctctcagagcatctggctgtttagcagaactcattctatccccaatcagctccttttccgttctgttctgctgggagttctagaaccacttcctgctacaggaggggtctcatgtcctgctggcttccagcttcaggcaccagcatccaccttggctctgccagtggatcccctgcggtcaggctgggcagccccagagagaggatgtggaaagcactttttggctgacttcatctggggttggcaacaggacagagttcacaggaggccagtgggcgggccatgagggacagggtcttttttcatttcttcctcagctggttactcagggttcatctgtccatggcctttctaataaactgttgagttgaaaaaaaaaaaaaaaaaaaa

SEQ ID NO: 704 - protein, 735 aa, Homo sapien
MPLAQLKEPWPLMELVPLDPENGQTSGEEAGLQPSKDEGVLKEISITHHVKAGSEKADPSHFELLKVLGQGSFGKVFLVRKVTRPDSGHLYAMKVLKKATLKVRDRVRTKMERDILADVNHPFVVKLHYAFQTEGKLYLILDFLRGGDLFTRLSKEVMFTEEDVKFYLAELALGLDHLHSLGIIYRDLKPENILLDEEGHIKLTDFGLSKEAIDHEKKAYSFCGTVEYMAPEVVNRQGHSHSADWWSYGVLMFEMLTGSLPFQGKDRKETMTLILKAKLGMPQFLSTEAQSLLRALFKRNPANRLGSGPDGAEEIKRHVFYSTIDWNKLYRREIKPPFKPAVAQPDDTFYFDTEFTSRTPKDSPGIPPSAGAHQLFRGFSFVATGLMEDDGKPRAPQAPLHSVVQQLHGKNLVFSDGYVVKETIGVGSYSECKRCVHKATNMEYAVKVIDKSKRDPSEEIEILLRYGQHPNIITLKDVYDDGKHVYLVTELMRGGELLDKILRQKFFSEREASFVLHTIGKTVEYLHSQGVVHRDLKPSNILYVDESGNPECLRICDFGFAKQLRAENGLLMTPCYTANFVAPEVLKRQGYDEGCDIWSLGILLYTMLAGYTPFANGPSDTPEEILTRIGSGKFTLSGGNWNTVSETAKDLVSKMLHVDPHQRLTAKQVLQHPWVTQKDKLPQSQLSHQDLQLVKGAMAATYSALNSSKPTPQLKPIESSILAQRRVRKLPSTTL

SEQ ID NO: 705 - DNA, 1865 bp, Homo sapien
gcgtggaggtcgacgactccgtcgcagactacggacctgtctgggtctcagccgccaaagaccccgtccggtaggtgagtggctcactttgagggcaagccttctcggatcgaggcttcttcatggccgctcagatcgtgagcggccggggctgctctctttgcggaggatggcgtctaatgagcgcagttgattcgaggaagtactagccggacatcatgagtggctgtcgggtattcatcgggagactaaatccagcggccagggagaaggacgtggaaagattcttcaagggatatggacggataagagatattgatctgaaaagaggctttggttttgtggaatttgaggatccaagggatgcagatgatgctgtgtatgagcttgatggaaaagaactctgtagtgaaagggttactattgaacatgctagggctcggtcacgaggtggaagaggtagaggacgatactctgaccgttttagtagtcgcagacctcgaaatgatagacggtatgtgaagggtggatggctgcattgaacaattattgtaggggtagcatttaagattcaggagtcattagcagtgatgattttgggacctgccgtataatctgttcttctattcccacgttagccaattgttcttgatgaatctatatgagtcatagaacacaaatctattgacggaagtcattagaatggcttgtgatatctgatggcttgaacttgcccacagttgaacacaagtgctgtcattgcatttcttccattgtgaatacgaattttcttcctcagaaatgctccacctgtaagaacagaaaatcgtcttatagttgagaatttatcctcaagagtcagctggcaggatctcaaagatttcatgagacaagctggggaagtaacgtttgcggatgcacaccgacctaaattaaatgaaggggtggttgagtttgcctcttatggtgacttaaagaatgctattgaaaaactttctggaaaggaaataaatgggagaaaaataaaattaattgaaggcagcaaaaggcacaggtcaagaagcaggtctcgatcccggaccagaagttcctctaggtctcgtagccgatcccgttcccgtagtcgcaaatcttacagccggtcaagaagcaggagcaggagccggagccggagcaagtcccgttctgttagtaggtctcccgtgcctgagaagagccagaaacgtggttcttcaagtagatctaagtctccagcatctgtggatcgccagaggtcccggtcccgatcaaggtccagatcagttgacagtggcaattaaactgtaaataacttgccctgggggcctttttttttaaaaaacaaaaaccacaaaaattcccaaaccatacttgctaaaaattctggtaagtatgtgcttttctgtgggggtgggatttggaaggggggttgggttgggctggatatctttgtagatgtggaccaccaaggggttgttgaaaactaattgtattaaatgtcttttgataagccttctgctcacatttttgtgaatgtctgaagtatatagtttgtgtatattgacagagctcttttataactaaagcaaatttaatttttttgtactagaaaaaaatttgaacattttagttcttggttataaaaatgttaattcagaattagtttaatgccttaattaaactaattaatagctttggacacttaaaagagctctaaatttgcttgtacataaaggcttaatttgttttccttgttagggtcaagggtgtcctccactctttaacagctgctggacagacacattagagcagctgtttgttattgataataaaatattataaaacta

SEQ ID NO: 706 - protein, 107 aa, Homo sapien
MSGCRVFIGRLNPAAREKDVERFFKGYGRIRDIDLKRGFGFVEFEDPRDADDAVYELDGKELCSERVTIEHARARSRGGRGRGRYSDRFSSRRPRNDRRYVKGGWLH

SEQ ID NO: 707 - DNA, 1156 bp, Homo sapien
cgcagcggaggtgaaggacgtccttccccaggagccgactggccaatcacaggcaggaagatgaaggttctgtgggctgcgttgctggtcacattcctggcaggatgccaggccaaggtggagcaagcggtggagacagagccggagcccgagctgcgccagcagaccgagtggcagagcggccagcgctgggaactggcactgggtcgcttttgggattacctgcgctgggtgcagacactgtctgagcaggtgcaggaggagctgctcagctcccaggtcacccaggaactgagggcgctgatggacgagaccatgaaggagttgaaggcctacaaatcggaactggaggaacaactgaccccggtggcggaggagacgcgggcacggctgtccaaggagctgcaggcggcgcaggcccggctgggcgcggacatggaggacgtgtgcggccgcctggtgcagtaccgcggcgaggtgcaggccatgctcggccagagcaccgaggagctgcgggtgcgcctcgcctcccacctgcgcaagctgcgtaagcggctcctccgcgatgccgatgacctgcagaagcgcctggcagtgtaccaggccggggcccgcgagggcgccgagcgcggcctcagcgccatccgcgagcgcctggggcccctggtggaacagggccgcgtgcgggccgccactgtgggctccctggccggccagccgctacaggagcgggcccaggcctggggcgagcggctgcgcgcgcggatggaggagatgggcagccggacccgcgaccgcctggacgaggtgaaggagcaggtggcggaggtgcgcgccaagctggaggagcaggcccagcagatacgcctgcaggccgaggccttccaggcccgcctcaagagctggttcgagcccctggtggaagacatgcagcgccagtgggccgggctggtggagaaggtgcaggctgccgtgggcaccagcgccgcccctgtgcccagcgacaatcactgaacgccgaagcctgcagccatgcgaccccacgccaccccgtgcctcctgcctccgcgcagcctgcagcgggagaccctgtccccgccccagccgtcctcctggggtggaccctagtttaataaagattcaccaagtttcacgc

SEQ ID NO: 708 - protein, 317 aa, Homo sapien [sequence omitted]

SEQ ID NO: 709 - DNA, 3874 bp, Homo sapien
atggctcacctaaagcgactagtaaaattacacattaaaagacattaccataaaaagttctggaagcttggtgcagtaatttttttctttataatagttttggttttaatgcaaagagaagtaagtgttcaatattccaaagaggaatcaaggatggaaaggaacatgaaaaacaaaaacaagatgttggatttaatgctagaagctgtaaacaatattaaggatgccatgccaaaaatgcaaataggagcacctgtcaggcaaaacattgatgctggtgagagaccttgtttgcaaggatattatacagcagcagaattgaagcctgtccttgaccgtccacctcaggattcaaatgcacctggtgcttctggtaaagcattcaagacaaccaatttaagtgttgaagagcaaaaggaaaaggaacgtggggaagctaaacactgctttaatgctttcgcaagtgacaggatttctttgcaccgagatcttggaccagacactcgacctcctgaatgtattgaacaaaaatttaagcgctgccctcccctgcccaccaccagtgtcataatagtttttcataatgaagcgtggtccacgttgcttagaactgtccacagtgtgctctattcttcacctgcaatactgctgaaggaaatcattttggtggatgatgctagtgtagatgagtacttacatgataaactagatgaatatgtaaaacaattttctatagtaaaaatagtcagacaaagagaaagaaaaggtctgatcactgctcggttgctaggagcaacagtcgcaacagctgaaacgctcacatttttagatgctcactgtgagtgtttctatggttggctagaacctctgttggccagaatagctgagaactacacggctgtcgtaagtccagatattgcatccatagatctgaacacgtttgaattcaacaaaccttctccttatggaagtaaccataaccgtggaaattttgactggagtctttcatttggctgggagtcgcttcctgatcatgagaagcaaagaaggaaagatgaaacctacccaattaaaacacccacttttgcaggaggacttttttccatatcaaaagaatattttgagtatattggaagctatgatgaagaaatggaaatctggggaggtgaaaatatagaaatgtctttcagagtatggcaatgtggtgggcagttggagattatgccttgctctgttgttggacatgtttttcgcagcaaaagccctcatagctttccaaaaggcactcaggtgattgctagaaaccaagttcgccttgcagaagtctggatggatgaatacaaggaaatattttataggagaaatacagatgcagcaaaaattgttaaacaaaaagcatttggtgatctttcaaaaagatttgaaataaaacaccgtcttcggtgtaaaaattttacatggtatctgaacaacatttatccagaggtgtatgtgccagaccttaatcctgttatatctggatacattaaaagcgttggtcagcctctatgtctggatgttggagaaaacaatcaaggaggcaaaccattaattatgtatacatgtcatggacttgggggaaaccagtactttgaatactctgctcaacatgaaattcggcacaacatccagaaggaattatgtcttcatgctgctcaaggtctcgttcagctgaaggcatgtacctacaaaggtcacaagacagttgtcactggagagcagatatgggagatccagaaggatcaacttctatacaatccattcttaaaaatgtgcctttcagcaaatggagagcatccaagtttagtgtcatgcaacccatcagatccactccaaaaatggatacttagccaaaatgattaagtgttccttaaaattaagttgaaaaaggaaatattctttctcataaaactgtgactaggcatacactgtagtttttgaaaattatgcaaaagcagctaaatgtaacttattccaagtgcatttttcttatttatatctttatgtagcactactacagaaattctgcaagtttctgtttcaaagcacaataactagtaataccaaagactatttcaaaatgtccagatgtaggggaagagatgtttacagtatgatgaaaataattttccaagtaaagtgatgtttgtgtgttttgtacacttagggatatatatatatagctacattcacacactcacaatttaaaatatttcccctagttttttggggggataggaagaaagatttgttactgtatttttttaactacataaaaatagatcaataaatgtcagcattggcctctgtgtacaaaccaagagcttttacagatccagaatttattagtttaaaatgcaggtgaacttttttttgcgtttggtttacttgtctgtcaaatgtttccttaaacatgaaactgaataaggagaagagtatttttaacacttaaatttcttggcaaattttaaaacattttttagtctgtaatacactccacttgaagcacttaagtcttccttaaatgacttttcttaagtaatgatactgtgtgttttcccaaagcacttttaaaaaaatttttataaattactatctgttgaaaaggtgtccttttcctttcttctagtattttttttcttaccaaaattcactaatcttgaatgtttgtgatattaaatttcaaatgcagaatacttgactcatttaaagctaaattttgttactgattcaattataattgtaatggatttttgactttgtaatggattcttttcatcaaaaagccttattattttttatctatgtggaaaacacaataaaaaatcctcaacactattgtaatcatttggttaagtgcttattcctcttttgggtaaaatctgtaattgataataggtgggggaaaatgaattttgtatgctgaatttctaagcgcctattgtttgtaaaaccatcagatatttcttatggcacaaaaaatgaggaatagcaaaattcctgtgttcaatatttagaaaattttgtattaatttctgataaagttccttaagcatctgatagaatgatgttttaaaaaaatttgacgcttgcttaggagatttaccactttttttttttgtttttcgtcattttatatttagatctcctgtattcttgttcccgaagtaaaatacgatcggtttcatattttaaatctggcagagcctcagctgtacgaaaaagagcatatactggttattgaccctatcttctcattgtttgtttgtaagtttgaatttgtattaaaaagcctgcattctgagctggacatggtggctcagcttctaatcccagcactttggtaggcaaaggtgggaggatcatttgagctcaggagttccagaccagcctgggcaacatagcaaaatctcatctctacaaaaagtaaaaattaaaaaatgaaattaaaaataaaattacctaggtgtggtggcacgcatctgtagttccagctatacaggaaggtgaggcagaagcattgcttgagcttgggagatcgaggctacagtgagctatgattacaccactgcacttcagtctgtgtgactgagcaagactctttcaaaaaaaaaaaaaagcctacattctccagttgattatttccaactaatgtgtattatgtgcctaattttctatcagaagttgtattaagcccgttttcacactgctgttaaagacatacctgagactgggtaatttataaagaaaaataggttcaatggacccacaggtccgcgtggctggggaagcttcacaatcatggcggaaggtgaaagcatgtcttacgtggaag

SEQ ID NO: 710 - protein, 633 aa, Homo sapien
MAHLKRLVKLHIKRHYHKKFWKLGAVIFFFIIVLVLMQREVSVQYSKEESRMERNMKNKNKMLDLMLEAVNNIKDAMPKMQIGAPVRQNIDAGERPCLQGYYTAAELKPVLDRPPQDSNAPGASGKAFKTTNLSVEEQKEKERGEAKHCFNAFASDRISLHRDLGPDTRPPECIEQKFKRCPPLPTTSVIIVFHNEAWSTLLRTVHSVLYSSPAILLKEIILVDDASVDEYLHDKLDEYVKQFSIVKIVRQRERKGLITARLLGATVATAETLTFLDAHCECFYGWLEPLLARIAENYTAVVSPDIASIDLNTFEFNKPSPYGSNHNRGNFDWSLSFGWESLPDHEKQRRKDETYPIKTPTFAGGLFSISKEYFEYIGSYDEEMEIWGGENIEMSFRVWQCGGQLEIMPCSVVGHVFRSKSPHSFPKGTQVIARNQVRLAEVWMDEYKEIFYRRNTDAAKIVKQKAFGDLSKRFEIKHRLRCKNFTWYLNNIYPEVYVPDLNPVISGYIKSVGQPLCLDVGENNQGGKPLIMYTCHGLGGNQYFEYSAQHEIRHNIQKELCLHAAQGLVQLKACTYKGHKTVVTGEQIWEIQKDQLLYNPFLKMCLSANGEHPSLVSCNPSDPLQKWILSQND

SEQ ID NO: 711 - DNA, 1080 bp, Homo sapien
ctcgcgcaagcggcgtgcggtcccgcggcgctgcagttgtgtccagccggtcacggggcggctatggcggccacgttcttcggagaggtggtgaaggcgccgtgccgagctgggactgaggacgaagaggaggaggaggaggggcggagggagacgcccgaggacagggaggtgcgtctgcagctggcgcggaagagggaagtgcggctccttcgaagacaaacaaaaacatctttggaagtttctttgctagaaaaatatccgtgctccaagtttataattgctataggaaataatgcagtagcatttctgtcatcatttgttatgaattcaggagtctgggaggaagttggttgtgccaaactctggaatgaatggtgtagaacaacagacactacacatctgtcctccacagaggctttttgtgtgttttatcatctaaaatccaatccctcggtttttctctgtcagtgcagttgctatgttgcagaagatcaacagtatcagtggctggaaaaggtttttggctcttgtccaaggaagaacatgcagataactattctcacatgtcgacatgttaccgattataaaacctcagaatccaccggcagccttccttctcctttcctgagagccctaaaaacacagaatttcaaagactcggcgtgttgtccattgctagaacaaccgaatatagtacacgaccttcctgcagcagttctaagctactgtcaagtatggaaaatcccagcaattctgtacttgtgttatactgatgtgatgaaattagacctaatcacagtggaagcttttaagcctatactttctaccagaagcttgaagggtttggttaagaatattccccaaagcactgagatactaaagaaattgatgacaacaaatgagattcagagtaacatttatacatgatcttaaacattgttttgtagtgtatattacttgtccattcctttaaggggagcagcctgcactcttttgtagattacttttgggggatatattttgagaatgatgaaacggaataaaattgtaaaaaactaaaaaaaaaaaaaaaaaaaa

SEQ ID NO: 712 - protein, 288 aa, Homo sapien
MAATFFGEVVKAPCRAGTEDEEEEEEGRRETPEDREVRLQLARKREVRLLRRQTKTSLEVSLLEKYPCSKFIIAIGNNAVAFLSSFVMNSGVWEEVGCAKLWNEWCRTTDTTHLSSTEAFCVFYHLKSNPSVFLCQCSCYVAEDQQYQWLEKVFGSCPRKNMQITILTCRHVTDYKTSESTGSLPSPFLRALKTQNFKDSACCPLLEQPNIVHDLPAAVLSYCQVWKIPAILYLCYTDVMKLDLITVEAFKPILSTRSLKGLVKNIPQSTEILKKLMTTNEIQSNIYT

SEQ ID NO: 713 - DNA, 2029 bp, Homo sapien
actcagtgttcgcgggagccgcacctacaccagccaacccagatcccgaggtccgacagcgcccggcccagatccccacgcctgccaggagcaagccgagagccagccggccggcgcactccgactccgagcagtctctgtccttcgacccgagccccgcgccctttccgggacccctgccccgcgggcagcgctgccaacctgccggccatggagaccccgtcccagcggcgcgccacccgcagcggggcgcaggccagctccactccgctgtcgcccacccgcatcacccggctgcaggagaaggaggacctgcaggagctcaatgatcgcttggcggtctacatcgaccgtgtgcgctcgctggaaacggagaacgcagggctgcgccttcgcatcaccgagtctgaagaggtggtcagccgcgaggtgtccggcatcaaggccgcctacgaggccgagctcggggatgcccgcaagacccttgactcagtagccaaggagcgcgcccgcctgcagctggagctgagcaaagtgcgtgaggagtttaaggagctgaaagcgcgcaataccaagaaggagggtgacctgatagctgctcaggctcggctgaaggacctggaggctctgctgaactccaaggaggccgcactgagcactgctctcagtgagaagcgcacgctggagggcgagctgcatgatctgcggggccaggtggccaagcttgaggcagccctaggtgaggccaagaagcaacttcaggatgagatgctgcggcgggtggatgctgagaacaggctgcagaccatgaaggaggaactggacttccagaagaacatctacagtgaggagctgcgtgagaccaagcgccgtcatgagacccgactggtggagattgacaatgggaagcagcgtgagtttgagagccggctggcggatgcgctgcaggaactgcgggcccagcatgaggaccaggtggagcagtataagaaggagctggagaagacttattctgccaagctggacaatgccaggcagtctgctgagaggaacagcaacctggtgggggctgcccacgaggagctgcagcagtcgcgcatccgcatcgacagcctctctgcccagctcagccagctccagaagcagctggcagccaaggaggcgaagcttcgagacctggaggactcactggcccgtgagcgggacaccagccggcggctgctggcggaaaaggagcgggagatggccgagatgcgggcaaggatgcagcagcagctggacgagtaccaggagcttctggacatcaagctggccctggacatggagatccacgcctaccgcaagctcttggagggcgaggaggagaggctacgcctgtcccccagccctacctcgcagcgcagccgtggccgtgcttcctctcactcatcccagacacagggtgggggcagcgtcaccaaaaagcgcaaactggagtccactgagagccgcagcagcttctcacagcacgcacgcactagcgggcgcgtggccgtggaggaggtggatgaggagggcaagtttgtccggctgcgcaacaagtccaatgaggaccagtccatgggcaattggcagatcaagcgccagaatggagatgatcccttgctgacttaccggttcccaccaaagttcaccctgaaggctgggcaggtggtgacgatctgggctgcaggagctggggccacccacagcccccctaccgacctggtgtggaaggcacagaacacctggggctgcgggaacagcctgcgtacggctctcatcaactccactggggaagaagtggccatgcgcaagctggtgcgctcagtgactgtggttgaggacgacgaggatgaggatggagatgacctgctccatcaccaccatgtgagtggtagccgccgctgaggccgagcctgcactggggccacccagccaggcctgggggcagcctctccccagcctccccgtgccaaaaatcttttcattaaagaatgtttggaacttt

SEQ ID NO: 714 - protein, 572 aa, Homo sapien
METPSQRRATRSGAQASSTPLSPTRITRLQEKEDLQELNDRLAVYIDRVRSLETENAGLRLRITESEEVVSREVSGIKAAYEAELGDARKTLDSVAKERARLQLELSKVREEFKELKARNTKKEGDLIAAQARLKDLEALLNSKEAALSTALSEKRTLEGELHDLRGQVAKLEAALGEAKKQLQDEMLRRVDAENRLQTMKEELDFQKNIYSEELRETKRRHETRLVEIDNGKQREFESRLADALQELRAQHEDQVEQYKKELEKTYSAKLDNARQSAERNSNLVGAAHEELQQSRIRIDSLSAQLSQLQKQLAAKEAKLRDLEDSLARERDTSRRLLAEKEREMAEMRARMQQQLDEYQELLDIKLALDMEIHAYRKLLEGEEERLRLSPSPTSQRSRGRASSHSSQTQGGGSVTKKRKLESTESRSSFSQHARTSGRVAVEEVDEEGKFVRLRNKSNEDQSMGNWQIKRQNGDDPLLTYRFPPKFTLKAGQVVTIWAAGAGATHSPPTDLVWKAQNTWGCGNSLRTALINSTGEEVAMRKLVRSVTVVEDDEDEDGDDLLHHHHVSGSRR

SEQ ID NO: 715 - DNA, 2533 bp, Homo sapien
ccaagcccatgagggccgcgcgcccggccgccggtgctgacgagacggagctcctggcccccgaggaggagcagaggatcaatgcggttcaagaatcgattccagcggttcatgaaccatcgagctccagccaatggccgctacaagccaacttgctatgaacatgctgctaactgttacacacacgcattcctcattgttccggccatcgtgggcagtgccctcctccatcggctgtctgatgactgctgggaaaagataacagcatggatttatggaatgggactctgtgccctcttcatcgcttctacagtatttcacattgtatcatggaaaaagagccacttaaggacagcggagcattgttttcacatgtgtgatagaatggttatctatttcttcattgctgcttcttatgctccatggttaaatcttcgtgaacttggacccctggcatctcatatgcgttggtttatctggctcatggcagctggaggaaccatttatgtatttctctaccatgaaaaatataaggtggttgaactctttttctatctcacaatgggattctctccagccttggtggtgacatcaatgaacaacaccgatggacttcaggaacttgcctgtgggggcttaatttattgcttgggagttgtgttcttcaagagtgatggcatcattccatttgcccacgccatctggcacctgtttgtggccacggcagctgcagtgcattactacgccatttggaaatacctttaccgaagtcctacggactttatgcggcatttatgaccaatctgtactaattctccaaaccagtattatttcaattatggcacttgggagtggggtgagagctaaacattgcacagggcaaagaaaaaaaataactgcactgactttatatcttttgaatataattactgtgaaagtataaaggctgtgttctggaattttctgcctcacagcaaataaataaggtagtgaattaattattcattccattccactatcatgaaggactctgaatagacttggccaactgatgtttacaaaccagacttttatattttaattttacagattttactacatgatttttctaaattactatgtcaggttgtaaaagtcagtgcaataacaaaccttcctttttaagaagaaaattgtttctattactttcccattcactaggtaaagaatcatggacagaacttacactactttttaccatgtttcatcttggcataacatggttcttttttaaatagaaactttagttttttgtaaatttttaaaaaaatatttcattgatatgcatctctgcaggtcctcattcatgttgtaaatttttggagcaagcagtcaacattccacaaacgaacaaacattatacctcttctgatagttttattaagcatggagaaattgccaatttttaaaaactgcagttttccaaacttttctgccaacctcttactctgaattcagtgctgctttgggacatatacttgacctagcttggtttaccagtgatggaaaagtattttgatatcattaactttttcaaaagatccaactttttctctatgcctttgccacattctcttcagggtctctttccacagcggataaatgttttttctgtattatgacagtattgttgtgatggccatctgctggaaactcctgaagagcattatgtattacagtgagcagttgtattgcctgtttggtgcccaatggttaagtcattgtcacttagctttatattgtcagtttgatatttattttaaattgtggaactagatgcataaattcacatttctgcctttcctttgcatcttctcatatattgtgttttttttttttttcctagaaaaaatatttaaagcattgtttgacaggtagaaactcatgtatctgtagtccatgagttatatcctggctcagtggagtgatatttatgtattatttttacttttctctcagtgtcttatattaagattaacatgttgttaatagttgctttgttgattaatctctcttgttggtgttttaataaatgaaataggcttgcctttagatcgggtgctgatattgcctgtttcctagtaatgggctgatcaaatgatcagtggaattcttggtttgatgataaccttattaattgaaattttttactgatgtggctttaaaagaggtttattttgtatatgtttagaactctctgattttgatgaattatatgggagtgagaaacagaagaagtggtatttgctggcgagttaaataggcaaggtacccagtgataacaccaaccaaaccactcctatctgcatgattctgaacatctggatgcctgttgttttactgtgtatattttatttttaatatattaactttgtggattcatttaaggtctactcaaaagtaacactgtccaaaccactaatatgtatgtaaaaattgtgctgtatactacaataaagttgttacttggatttgttccaaaaaaaaaaaaaaa

SEQ ID NO: 716 - protein, 238 aa, Homo sapien
MRFKNRFQRFMNHRAPANGRYKPTCYEHAANCYTHAFLIVPAIVGSALLHRLSDDCWEKITAWIYGMGLCALFIASTVFHIVSWKKSHLRTAEHCFHMCDRMVIYFFIAASYAPWLNLRELGPLASHMRWFIWLMAAGGTIYVFLYHEKYKVVELFFYLTMGFSPALVVTSMNNTDGLQELACGGLIYCLGVVFFKSDGIIPFAHAIWHLFVATAAAVHYYAIWKYLYRSPTDFMRHL

SEQ ID NO: 717 - DNA, 502 bp, Homo sapien
ctgtcgccctgcacggtgacccgcgtgtgcgaggccttcatggccaggatccgggtggagaggcgctgctgacaccgccgccacaccgccgccacaccgccgctgcctcagtcatgccgaagcacgagttctctgtggacatgacctgtggaggctgtgctgaagctgtctctcgggtcctcaataagcttggaggagttaagtatgacattgacctgcccaacaagaaggtctgcattgaatctgagcacagcatggacactctgcttgcaaccctgaagaaaacaggaaagactgtttcctaccttggccttgagtagcaggggcctggtccccacagcccacaggatggaccaaagggggcaggatgctgatcctcccgctggcttccagacagacctgggacttggcagtcatgccgggtgatcgtgttcctgcggagaccctcagttgtcctattccttcctagcttccctgcaataaatcaagctgcttttgttgg

SEQ ID NO: 718 - protein, 68 aa, Homo sapien
MPKHEFSVDMTCGGCAEAVSRVLNKLGGVKYDIDLPNKKVCIESEHSMDTLLATLKKTGKTVSYLGLE

SEQ ID NO: 719 - DNA, 1347 bp, Homo sapien
gtcttgacgtgagctagctggcatggcggcctgcattgcagcggggcactgggctgcaatgggcctaggccggagtttccaagccgccaggactctgctccccccgccggcctctatcgcctgcagggtccacgcggggcctgtccggcagcagagcactgggccttccgagcccggtgcgttccaaccgccgccgaaaccggtcatcgtggacaagcaccgccccgtggaaccggaacgcaggttcttgagtcctgaattcattcctcgaaggggaagaacagatcctctgaaatttcaaatagaaagaaaagatatgttagaaaggagaaaagtactccacattccagagttctatgttggaagtattcttcgtgttactacagctgacccatatgccagtggaaaaatcagccagtttctggggatttgcattcagagatcaggaagaggacttggagctactttcatccttaggaatgttatcgaaggacaaggtgtcgagatttgctttgaactttataatcctcgggtccaggagattcaggtggtcaaattagagaaacggctggatgatagcttgctatacttacgagatgcccttcctgaatatagcacttttgatgtgaatatgaagccagtagtacaagagcctaaccaaaaagttcctgttaatgagctgaaagtaaaaatgaagcctaagccctggtctaaacgctgggaacgtccaaattttaatattaaaggaatcagatttgatctttgtttaactgaacagcaaatgaaagaagctcagaagtggaatcagccatggcttgaatttgatatgatgagggaatatgatacttcaaaaattgaagctgcaatatggaaggaaattgaagcgtcgaaaaggtcttgattctgagaatgaatttggttagttgcagaagatacattggctctaagaggatatattttgagaccaatttaatttcatttataagaacatagtaattaagtgaactaagcattcattgttttattaatactttttttctaaaataaaacttgtacaccagtttattactctaaaaagagaattacacatgccaaatggaccaatgtccatttgcttattggaggcaaagctacaatagaagtcagagcatcaccagaatggtctttaatgagcatggaacctgagcaaagggaataggtgggatgaattttttttttaattgtgaaacaattcataagcacaatatgatttacagaataataaacattcatgtacccactatcaggttaagaaatagaacatttattaatatgtaggaatgttaagaaataaaacatttaataaga

SEQ ID NO: 720 - protein, 280 aa, Homo sapien
MGLGRSFQAARTLLPPPASIACRVHAGPVRQQSTGPSEPGAFQPPPKPVIVDKHRPVEPERRFLSPEFIPRRGRTDPLKFQIERKDMLERRKVLHIPEFYVGSILRVTTADPYASGKISQFLGICIQRSGRGLGATFILRNVIEGQGVEICFELYNPRVQEIQVVKLEKRLDDSLLYLRDALPEYSTFDVNMKPVVQEPNQKVPVNELKVKMKPKPWSKRWERPNFNIKGIRFDLCLTEQQMKEAQKWNQPWLEFDMMREYDTSKIEAAIWKEIEASKRS

SEQ ID NO: 721 - DNA, 974 bp, Homo sapien
gtgggagggaggctcggcgctcaggaagcatggcactctggcgggcataccagcgggccctggccgctcacccgtggaaagtacaggtcctgacagctgggtccctgatgggcctgggtgacattatctcacagcagctggtggagaggcggggtctgcaggaacaccagagaggccggactctgaccatggtgtccctgggctgtggctttgtgggccctgtggtaggaggctggtacaaggttttggatcggttcatccctggcaccaccaaagtggatgcactgaagaagatgttgttggatcaggggggctttgccccgtgttttctaggctgctttctcccactggtaggggcacttaatggactgtcagcccaggacaactgggccaaactacagcgggattatcctgatgcccttatcaccaactactatctatggcctgctgtgcagttagccaacttctacctggtcccccttcattacaggttggccgttgtccaatgtgttgctgttatctggaactcctacctgtcctggaaggcacatcggctctaagcctgcctcactccatcgtttccaccttgcagtgatgcagcttgaccctggaacggtcagacaacctcctcaaagtgggcataccagtttccacggggttgggttgccggtcagagcttaagaggactagcacctgcaatgccctcttcactctaaatgtacactgactgctttagagcccttgataatagtcttattcccaccacatactaggcactccataaatatctgttgaaccttcatgaccttatcaactttacacccatatccagcaaatgccactcatccccactcttcatagacacatttgttactctaaccctgcctaggcttcttgtagctccagctctttagagactccgggaaccctttatatggtgcctcagtaaatatgttattaaatatgtaatccgg

SEQ ID NO: 722 - protein, 176 aa, Homo sapien
MALWRAYQRALAAHPWKVQVLTAGSLMGLGDIISQQLVERRGLQEHQRGRTLTMVSLGCGFVGPVVGGWYKVLDRFIPGTTKVDALKKMLLDQGGFAPCFLGCFLPLVGALNGLSAQDNWAKLQRDYPDALITNYYLWPAVQLANFYLVPLHYRLAVVQCVAVIWNSYLSWKAHRL

SEQ ID NO: 723 - DNA, 4068 bp, Homo sapien
aagtgacccagggagacaaacacttggagatacttggggctgagtttgagcaagactccctaacctgtgtctggacaagtctgatgtcctgtgtggcccaagaagaactgaccccgtgtctggagctcccaccgttattgcatccctgctgtggctcacctgctgctgtctccaggagcccctgagaagatttgcctcctctcccctgctaagctccaggtcctgagattgaattaggggctggagctcactgcactccagcagtcatgggacccaggatagggccagcgggtgaggtaccccaggtaccagacaaggaaaccaaagccacaatgggcacagaaaacacacctggaggcaaagccagcccagaccctcaggacgtgcggccaagtgtgttccataacatcaagctgttcgttctgtgccacagcctgctgcagctggcgcagctcatgatctccggctacctaaagagctccatctccacagtggagaagcgcttcggcctctccagccagacgtcggggctgctggcctccttcaacgaggtggggaacacagccttgattgtgtttgtgagctattttggcagccgggtgcaccgaccccgaatgattggctatggggctatccttgtggccctggcgggcctgctcatgactctcccgcacttcatctcggagccataccgctacgacaacaccagccctgaggatatgccacaggacttcaaggcttccctgtgcctgcccacaacctcggccccagcctcggccccctccaatggcaactgctcaagctacacagaaacccagcatctgagtgtggtggggatcatgttcgtggcacagaccctgctgggcgtgggcggggtgcccattcagccctttggcatctcctacatcgatgactttgcccacaacagcaactcgcccctctacctcgggatcctgtttgcagtgaccatgatggggccaggcctggcctttgggctgggcagcctcatgctgcgcctttatgtggacattaaccagatgccagaaggtggtatcagcctgaccataaaggacccccgatgggtgggtgcctggtggctgggtttcctcatcgctgccggtgcagtggccctggctgccatcccctacttcttcttccccaaggaaatgcccaaggaaaaacgtgagcttcagtttcggcgaaaggtcttagcagtcacagactcacctgccaggaagggcaaggactctccctctaagcagagccctggggagtccacgaagaagcaggatggcctagtccagattgcaccaaacctgactgtgatccagttcattaaagtcttccccagggtgctgctgcagaccctacgccaccccatcttcctgctggtggtcctgtcccaggtatgcttgtcatccatggctgcgggcatggccaccttcctgcccaagttcctggagcgccagttttccatcacagcctcctacgccaacctgctcatcggctgcctctccttcccttcggtcatcgtgggcatcgtggtgggtggcgtcctggtcaagcggctccacctgggccctgtgggatgcggtgccctttgcctgctggggatgctgctgtgcctcttcttcagcctgccgctcttctttatcggctgctccagccaccagattgcgggcatcacacaccagaccagtgcccaccctgggctggagctgtctccaagctgcatggaggcctgctcctgcccattggacggctttaaccctgtctgcgaccccagcactcgtgtggaatacatcacaccctgccacgcaggctgctcaagctgggtggtccaggatgctctggacaacagccaggttttctacaccaactgcagctgcgtggtggagggcaaccccgtgctggcaggatcctgcgactcaacgtgcagccatctggtggtgcccttcctgctcctggtcagcctgggctcggccctggcctgtctcacccacacaccctccttcatgctcatcctaagaggagtgaagaaagaagacaagactttggctgtgggcatccagttcatgttcctgaggattttggcctggatgcccagccccgtgatccacggcagcgccatcgacaccacctgtgtgcactgggccctgagctgtgggcgtcgagctgtctgtcgctactacaataatgacctgctccgaaaccggttcatcggcctccagttcttcttcaaaacaggttctgtgatctgcttcgccttagttttggctgtcctgaggcagcaggacaaagaggcaaggaccaaagagagcagatccagccctgccgtagagcagcaattgctagtgtcggggccagggaagaagccagaggattcccgagtgtgagctgtcttggggccccacctggccaagagtagcagccacagcagtacctcctctgagtcctttgcccaagattgggtgtcaagagccctgtgttccattctggctcctccactaaattgctgtgtgacttcaggcaagacattgatcctctctcagcctttgcttgctagtctgaaccaaagagttgtttgggcatttgctgtgttggccatttctggagcaagagggtcttcttcctccttcccccagccagccagctgtcctggggccaggctttcctgggtggaaagaagtatacctttccctggggccctaggatagcaaagtgagccatagtgggccaggctgccctccatgctgggccccagcccaggtctgcactcgcctggatcaccttctttgagccttagccatctcctgtcaggtaggaatgaacttgccagccttcaggctcgttcagctatgaccatctgtgcggtcagggtacactcagctctcctccccaactccagcagcctttaagaagtgtccctttggcgccccctggaggcagagcactgagctggaccctgggtagactcccacagggaggacggagctggcctcaggagtgggacacccagacttggcagggccttcaagaggcctgtgtgggggccccaggaatccttagctgaagcggggagactcactctccatctcaggaaattctagcccttgccctcagggagccacggttgagggtgaggcccaacacctgccttagggccctgggtgggcaagtctgggccctggggtagggagggagactcaggcccacacttgggtattttctaatttcagacaaacacacactcagcgcgcactcactgattcctacacattgccaagatttcacacatgtgaccaggggccaccaaagtccctgtgacctttgtgactaggatcctaatttctctattttctcctgggtgcctgggtctgtgtcacctggggcagtgtggataatgtttagttctgtgacactgttttttgggggtggcacctggttctccgatgcctgggctggtgtcaggcccaggactgtagtgctgggagcagtaaagctcagctctgtgtaatgagtgatgctatggcttgctcgtgtcttatgatccaatccttttctacatcagcccttgttttgttttatggctagtcttatctggcctggttatttccttgcggggaggagagggtttgctaatctgctcccagcccaacctattaccaccccacctcgctgggacctactgctcgggaggcagcagacagggagccaccagcagtggcttcctggccctgtgctgggggtggggggaagctgggggcacatgtggcccttgccttctgagcagctcccagtgccagggctttgagactttcccacatgataaaagaaaagggaggtacagaagttccaattccctttttattttgctggttggtatctgtaaatgtttaataaatatctgagcatgtatctatcaacgccaagaatttcaaagtctccttcaacaatatgaggcttttaggatgtttatattccttcatccctcttgtttcccaggttttgcagggaaaaaaagtctggaattatagatacagcttattattaaatttgttcttgcat

SEQ ID NO: 724 - protein, 709 aa, Homo sapien
MGPRIGPAGEVPQVPDKETKATMGTENTPGGKASPDPQDVRPSVFHNIKLFVLCHSLLQLAQLMISGYLKSSISTVEKRFGLSSQTSGLLASFNEVGNTALIVFVSYFGSRVHRPRMIGYGAILVALAGLLMTLPHFISEPYRYDNTSPEDMPQDFKASLCLPTTSAPASAPSNGNCSSYTETQHLSVVGIMFVAQTLLGVGGVPIQPFGISYIDDFAHNSNSPLYLGILFAVTMMGPGLAFGLGSLMLRLYVDINQMPEGGISLTIKDPRWVGAWWLGFLIAAGAVALAAIPYFFFPKEMPKEKRELQFRRKVLAVTDSPARKGKDSPSKQSPGESTKKQDGLVQIAPNLTVIQFIKVFPRVLLQTLRHPIFLLVVLSQVCLSSMAAGMATFLPKFLERQFSITASYANLLIGCLSFPSVIVGIVVGGVLVKRLHLGPVGCGALCLLGMLLCLFFSLPLFFIGCSSHQIAGITHQTSAHPGLELSPSCMEACSCPLDGFNPVCDPSTRVEYITPCHAGCSSWVVQDALDNSQVFYTNCSCVVEGNPVLAGSCDSTCSHLVVPFLLLVSLGSALACLTHTPSFMLILRGVKKEDKTLAVGIQFMFLRILAWMPSPVIHGSAIDTTCVHWALSCGRRAVCRYYNNDLLRNRFIGLQFFFKTGSVICFALVLAVLRQQDKEARTKESRSSPAVEQQLLVSGPGKKPEDSRV

SEQ ID NO: 725 - DNA, 10412 bp, Homo sapien
gtaattgcgagcgagagtgagtggggccgggacccgcagagccgagccgacccttctctcccgggctgcggcagggcagggcggggagctccgcgcaccaacagagccggttctcagggcgctttgctccttgttttttccccggttctgttttctccccttctccggaaggcttgtcaaggggtaggagaaagagacgcaaacacaaaagtggaaaacagttaatgaccagccacggcgtccctgctgtgagctctggccgctgccttccagggctcccgagccacacgctgggggtgctggctgagggaacatggcttgttggcctcagctgaggttgctgctgtggaagaacctcactttcagaagaagacaaacatgtcagctgctgctggaagtggcctggcctctatttatcttcctgatcctgatctctgttcggctgagctacccaccctatgaacaacatgaatgccattttccaaataaagccatgccctctgcaggaacacttccttgggttcaggggattatctgtaatgccaacaacccctgtttccgttacccgactcctggggaggctcccggagttgttggaaactttaacaaatccattgtggctcgcctgttctcagatgctcggaggcttcttttatacagccagaaagacaccagcatgaaggacatgcgcaaagttctgagaacattacagcagatcaagaaatccagctcaaacttgaagcttcaagatttcctggtggacaatgaaaccttctctgggttcctgtatcacaacctctctctcccaaagtctactgtggacaagatgctgagggctgatgtcattctccacaaggtatttttgcaaggctaccagttacatttgacaagtctgtgcaatggatcaaaatcagaagagatgattcaacttggtgaccaagaagtttctgagctttgtggcctaccaagggagaaactggctgcagcagagcgagtacttcgttccaacatggacatcctgaagccaatcctgagaacactaaactctacatctcccttcccgagcaaggagctggctgaagccacaaaaacattgctgcatagtcttgggactctggcccaggagctgttcagcatgagaagctggagtgacatgcgacaggaggtgatgtttctgaccaatgtgaacagctccagctcctccacccaaatctaccaggctgtgtctcgtattgtctgcgggcatcccgagggaggggggctgaagatcaagtctctcaactggtatgaggacaacaactacaaagccctctttggaggcaatggcactgaggaagatgctgaaaccttctatgacaactctacaactccttactgcaatgatttgatgaagaatttggagtctagtcctctttcccgcattatctggaaagctctgaagccgctgctcgttgggaagatcctgtatacacctgacactccagccacaaggcaggtcatggctgaggtgaacaagaccttccaggaactggctgtgttccatgatctggaaggcatgtgggaggaactcagccccaagatctggaccttcatggagaacagccaagaaatggaccttgtccggatgctgttggacagcagggacaatgaccacttttgggaacagcagttggatggcttagattggacagcccaagacatcgtggcgtttttggccaagcacccagaggatgtccagtccagtaatggttctgtgtacacctggagagaagctttcaacgagactaaccaggcaatccggaccatatctcgcttcatggagtgtgtcaacctgaacaagctagaacccatagcaacagaagtctggctcatcaacaagtccatggagctgctggatgagaggaagttctgggctggtattgtgttcactggaattactccaggcagcattgagctgccccatcatgtcaagtacaagatccgaatggacattgacaatgtggagaggacaaataaaatcaaggatgggtactgggaccctggtcctcgagctgacccctttgaggacatgcggtacgtctgggggggcttcgcctacttgcaggatgtggtggagcaggcaatcatcagggtgctgacgggcaccgagaagaaaactggtgtctatatgcaacagatgccctatccctgttacgttgatgacatctttctgcgggtgatgagccggtcaatgcccctcttcatgacgctggcctggatttactcagtggctgtgatcatcaagggcatcgtgtatgagaaggaggcacggctgaaagagaccatgcggatcatgggcctggacaacagcatcctctggtttagctggttcattagtagcctcattcctcttcttgtgagcgctggcctgctagtggtcatcctgaagttaggaaacctgctgccctacagtgatcccagcgtggtgtttgtcttcctgtccgtgtttgctgtggtgacaatcctgcagtgcttcctgattagcacactcttctccagagccaacctggcagcagcctgtgggggcatcatctacttcacgctgtacctgccctacgtcctgtgtgtggcatggcaggactacgtgggcttcacactcaagatcttcgctagcctgctgtctcctgtggcttttgggtttggctgtgagtactttgccctttttgaggagcagggcattggagtgcagtgggacaacctgtttgagagtcctgtggaggaagatggcttcaatctcaccacttcggtctccatgatgctgtttgacaccttcctctatggggtgatgacctggtacattgaggctgtctttccaggccagtacggaattcccaggccctggtattttccttgcaccaagtcctactggtttggcgaggaaagtgatgagaagagccaccctggttccaaccagaagagaatatcagaaatctgcatggaggaggaacccacccacttgaagctgggcgtgtccattcagaacctggtaaaagtctaccgagatgggatgaaggtggctgtcgatggcctggcactgaatttttatgagggccagatcacctccttcctgggccacaatggagcggggaagacgaccaccatgtcaatcctgaccgggttgttccccccgacctcgggcaccgcctacatcctgggaaaagacattcgctctgagatgagcaccatccggcagaacctgggggtctgtccccagcataacgtgctgtttgacatgctgactgtcgaagaacacatctggttctatgcccgcttgaaagggctctctgagaagcacgtgaaggcggagatggagcagatggccctggatgttggtttgccatcaagcaagctgaaaagcaaaacaagccagctgtcaggtggaatgcagagaaagctatctgtggccttggcctttgtcgggggatctaaggttgtcattctggatgaacccacagctggtgtggacccttactcccgcaggggaatatgggagctgctgctgaaataccgacaaggccgcaccattattctctctacacaccacatggatgaagcggacgtcctgggggacaggattgccatcatctcccatgggaagctgtgctgtgtgggctcctccctgtttctgaagaaccagctgggaacaggctactacctgaccttggtcaagaaagatgtggaatcctccctcagttcctgcagaaacagtagtagcactgtgtcatacctgaaaaaggaggacagtgtttctcagagcagttctgatgctggcctgggcagcgaccatgagagtgacacgctgaccatcgatgtctctgctatctccaacctcatcaggaagcatgtgtctgaagcccggctggtggaagacatagggcatgagctgacctatgtgctgccatatgaagctgctaaggagggagcctttgtggaactctttcatgagattgatgaccggctctcagacctgggcatttctagttatggcatctcagagacgaccctggaagaaatattcctcaaggtggccgaagagagtggggtggatgctgagacctcagatggtaccttgccagcaagacgaaacaggcgggccttcggggacaagcagagctgtcttcgcccgttcactgaagatgatgctgctgatccaaatgattctgacatagacccagaatccagagagacagacttgctcagtgggatggatggcaaagggtcctaccaggtgaaaggctggaaacttacacagcaacagtttgtggcccttttgtggaagagactgctaattgccagacggagtcggaaaggattttttgctcagattgtcttgccagctgtgtttgtctgcattgcccttgtgttcagcctgatcgtgccaccctttggcaagtaccccagcctggaacttcagccctggatgtacaacgaacagtacacatttgtcagcaatgatgctcctgaggacacgggaaccctggaactcttaaacgccctcaccaaagaccctggcttcgggacccgctgtatggaaggaaacccaatcccagacacgccctgccaggcaggggaggaagagtggaccactgccccagttccccagaccatcatggacctcttccagaatgggaactggacaatgcagaacccttcacctgcatgccagtgtagcagcgacaaaatcaagaagatgctgcctgtgtgtcccccaggggcaggggggctgcctcctccacaaagaaaacaaaacactgcagatatccttcaggacctgacaggaagaaacatttcggattatctggtgaagacgtatgtgcagatcatagccaaaagcttaaagaacaagatctgggtgaatgagtttaggtatggcggcttttccctgggtgtcagtaatactcaagcacttcctccgagtcaagaagttaatgatgccatcaaacaaatgaagaaacacctaaagctggccaaggacagttctgcagatcgatttctcaacagcttgggaagatttatgacaggactggacaccaaaaataatgtcaaggtgtggttcaataacaagggctggcatgcaatcagctctttcctgaatgtcatcaacaatgccattctccgggccaacctgcaaaagggagagaaccctagccattatggaattactgctttcaatcatcccctgaatctcaccaagcagcagctctcagaggtggctctgatgaccacatcagtggatgtccttgtgtccatctgtgtcatctttgcaatgtccttcgtcccagccagctttgtcgtattcctgatccaggagcgggtcagcaaagcaaaacacctgcagttcatcagtggagtgaagcctgtcatctactggctctctaattttgtctgggatatgtgcaattacgttgtccctgccacactggtcattatcatcttcatctgcttccagcagaagtcctatgtgtcctccaccaatctgcctgtgctagcccttctacttttgctgtatgggtggtcaatcacacctctcatgtacccagcctcctttgtgttcaagatccccagcacagcctatgtggtgctcaccagcgtgaacctcttcattggcattaatggcagcgtggccacctttgtgctggagctgttcaccgacaataagctgaataatatcaatgatatcctgaagtccgtgttcttgatcttcccacatttttgcctgggacgagggctcatcgacatggtgaaaaaccaggcaatggctgatgccctggaaaggtttggggagaatcgctttgtgtcaccattatcttgggacttggtgggacgaaacctcttcgccatggccgtggaaggggtggtgttcttcctcattactgttctgatccagtacagattcttcatcaggcccagacctgtaaatgcaaagctatctcctctgaatgatgaagatgaagatgtgaggcgggaaagacagagaattcttgatggtggaggccagaatgacatcttagaaatcaaggagttgacgaagatatatagaaggaagcggaagcctgctgttgacaggatttgcgtgggcattcctcctggtgagtgctttgggctcctgggagttaatggggctggaaaatcatcaactttcaagatgttaacaggagataccactgttaccagaggagatgctttccttaacaaaaatagtatcttatcaaacatccatgaagtacatcagaacatgggctactgccctcagtttgatgccatcacagagctgttgactgggagagaacacgtggagttctttgcccttttgagaggagtcccagagaaagaagttggcaaggttggtgagtgggcgattcggaaactgggcctcgtgaagtatggagaaaaatatgctggtaactatagtggaggcaacaaacgcaagctctctacagccatggctttgatcggcgggcctcctgtggtgtttctggatgaacccaccacaggcatggatcccaaagcccggcggttcttgtggaattgtgccctaagtgttgtcaaggaggggagatcagtagtgcttacatctcatagtatggaagaatgtgaagctctttgcactaggatggcaatcatggtcaatggaaggttcaggtgccttggcagtgtccagcatctaaaaaataggtttggagatggttatacaatagttgtacgaatagcagggtccaacccggacctgaagcctgtccaggatttctttggacttgcatttcctggaagtgttctaaaagagaaacaccggaacatgctacaataccagcttccatcttcattatcttctctggccaggatattcagcatcctctcccagagcaaaaagcgactccacatagaagactactctgtttctcagacaacacttgaccaagtatttgtgaactttgccaaggaccaaagtgatgatgaccacttaaaagacctctcattacacaaaaaccagacagtagtggacgttgcagttctcacatcttttctacaggatgagaaagtgaaagaaagctatgtatgaagaatcctgttcatacggggtggctgaaagtaaagaggaactagactttcctttgcaccatgtgaagtgttgtggagaaaagagccagaagttgatgtgggaagaagtaaactggatactgtactgatactattcaatgcaatgcaattcaatgcaatgaaaacaaaattccattacaggggcagtgcctttgtagcctatgtcttgtatggctctcaagtgaaagacttgaatttagttttttacctatacctatgtgaaactctattatggaacccaatggacatatgggtttgaactcacacttttttttttttttttgttcctgtgtattctcattggggttgcaacaataattcatcaagtaatcatggccagcgattattgatcaaaatcaaaaggtaatgcacatcctcattcactaagccatgccatgcccaggagactggtttcccggtgacacatccattgctggcaatgagtgtgccagagttattagtgccaagtttttcagaaagtttgaagcaccatggtgtgtcatgctcacttttgtgaaagctgctctgctcagagtctatcaacattgaatatcagttgacagaatggtgccatgcgtggctaacatcctgctttgattccctctgataagctgttctggtggcagtaacatgcaacaaaaatgtgggtgtctccaggcacgggaaacttggttccattgttatattgtcctatgcttcgagccatgggtctacagggtcatccttatgagactcttaaatatacttagatcctggtaagaggcaaagaatcaacagccaaactgctggggctgcaagctgctgaagccagggcatgggattaaagagattgtgcgttcaaacctagggaagcctgtgcccatttgtcctgactgtctgctaacatggtacactgcatctcaagatgtttatctgacacaagtgtattatttctggctttttgaattaatctagaaaatgaaaagatggagttgtattttgacaaaaatgtttgtactttttaatgttatttggaattttaagttctatcagtgacttctgaatccttagaatggcctctttgtagaaccctgtggtatagaggagtatggccactgccccactatttttattttcttatgtaagtttgcatatcagtcatgactagtgcctagaaagcaatgtgatggtcaggatctcatgacattatatttgagtttctttcagatcatttaggatactcttaatctcacttcatcaatcaaatattttttgagtgtatgctgtagctgaaagagtatgtacgtacgtataagactagagagatattaagtctcagtacacttcctgtgccatgttattcagctcactggtttacaaatataggttgtcttgtggttgtaggagcccactgtaacaatactgggcagcctttttttttttttttttaattgcaacaatgcaaaagccaagaaagtataagggtcacaagtctaaacaatgaattcttcaacagggaaaacagctagcttgaaaacttgctgaaaaacacaacttgtgtttatggcatttagtaccttcaaataattggctttgcagatattggataccccattaaatctgacagtctcaaatttttcatctcttcaatcactagtcaagaaaaatataaaaacaacaaatacttccatatggagcatttttcagagttttctaacccagtcttatttttctagtcagtaaacatttgtaaaaatactgtttcactaatacttactgttaactgtcttgagagaaaagaaaaatatgagagaactattgtttggggaagttcaagtgatctttcaatatcattactaacttcttccactttttccagaatttgaatattaacgctaaaggtgtaagacttcagatttcaaattaatctttctatattttttaaatttacagaatattatataacccactgctgaaaaagaaaaaaatgattgttttagaagttaaagtcaatattgattttaaatataagtaatgaaggcatatttccaataactagtgatatggcatcgttgcattttacagtatcttcaaaaatacagaatttatagaataatttctcctcatttaatatttttcaaaatcaaagttatggtttcctcattttactaaaatcgtattctaattcttcattatagtaaatctatgagcaactccttacttcggttcctctgatttcaaggccatattttaaaaaatcaaaaggcactgtgaactattttgaagaaaacacaacattttaatacagattgaaaggacctcttctgaagctagaaacaatctatagttatacatcttcattaatactgtgttaccttttaaaatagtaattttttacattttcctgtgtaaacctaattgtggtagaaatttttaccaactctatactcaatcaagcaaaatttctgtatattccctgtggaatgtacctatgtgagtttcagaaattctcaaaatacgtgttcaaaaatttctgcttttgcatctttgggacacctcagaaaacttattaacaactgtgaatatgagaaatacagaagaaaataataagccctctatacataaatgcccagcacaattcattgttaaaaaacaaccaaacctcacactactgtatttcattatctgtactgaaagcaaatgctttgtgactattaaatgttgcacatcattcattcactgtatagtaatcattgactaaagccatttgtctgtgttttcttcttgtggttgtatatatcaggtaaaatattttccaaagagccatgtgtcatgtaatactgaaccactttgatattgagacattaatttgtacccttgttattatctactagtaataatgtaatactgtagaaatattgctctaattcttttcaaaattgttgcatcccccttagaatgtttctatttccataaggatttaggtatgctattatcccttcttataccctaagatgaagctgtttttgtgctctttgttcatcattggccctcattccaagcactttacgctgtctgtaatgggatctatttttgcactggaatatctgagaattgcaaaactagacaaaagtttcacaacagatttctaagttaaatcattttcattaaaaggaaaaaagaaaaaaaattttgtatgtcaataactttatatgaagtattaaaatgcatatttctatgttgtaatataatgagtcacaaaataaagctgtgacagttctgttggtctacagaaa

SEQ ID NO: 726 - protein, 2000 aa, Homo sapien
MPSAGTLPWVQGIICNANNPCFRYPTPGEAPGVVGNFNKSIVARLFSDARRLLLYSQKDTSMKDMRKVLRTLQQIKKSSSNLKLQDFLVDNETFSGFLYHNLSLPKSTVDKMLRADVILHKVFLQGYQLHLTSLCNGSKSEEMIQLGDQEVSELCGLPREKLAAAERVLRSNMDILKPILRTLNSTSPFPSKELAEATKTLLHSLGTLAQELFSMRSWSDMRQEVMFLTNVNSSSSSTQIYQAVSRIVCGHPEGGGLKIKSLNWYEDNNYKALFGGNGTEEDAETFYDNSTTPYCNDLMKNLESSPLSRIIWKALKPLLVGKILYTPDTPATRQVMAEVNKTFQELAVFHDLEGMWEELSPKIWTFMENSQEMDLVRMLLDSRDNDHFWEQQLDGLDWTAQDIVAFLAKHPEDVQSSNGSVYTWREAFNETNQAIRTISRFMECVNLNKLEPIATEVWLINKSMELLDERKFWAGIVFTGITPGSIELPHHVKYKIRMDIDNVERTNKIKDGYWDPGPRADPFEDMRYVWGGFAYLQDVVEQAIIRVLTGTEKKTGVYMQQMPYPCYVDDIFLRVMSRSMPLFMTLAWIYSVAVIIKGIVYEKEARLKETMRIMGLDNSILWFSWFISSLIPLLVSAGLLVVILKLGNLLPYSDPSVVFVFLSVFAVVTILQCFLISTLFSRANLAAACGGIIYFTLYLPYVLCVAWQDYVGFTLKIFASLLSPVAFGFGCEYFALFEEQGIGVQWDNLFESPVEEDGFNLTTSVSMMLFDTFLYGVMTWYIEAVFPGQYGIPRPWYFPCTKSYWFGEESDEKSHPGSNQKRISEICMEEEPTHLKLGVSIQNLVKVYRDGMKVAVDGLALNFYEGQITSFLGHNGAGKTTTMSILTGLFPPTSGTAYILGKDIRSEMSTIRQNLGVCPQHNVLFDMLTVEEHIWFYARLKGLSEKHVKAEMEQMALDVGLPSSKLKSKTSQLSGGMQRKLSVALAFVGGSKVVILDEPTAGVDPYSRRGIWELLLKYRQGRTIILSTHHMDEADVLGDRIAIISHGKLCCVGSSLFLKNQLGTGYYLTLVKKDVESSLSSCRNSSSTVSYLKKEDSVSQSSSDAGLGSDHESDTLTIDVSAISNLIRKHVSEARLVEDIGHELTYVLPYEAAKEGAFVELFHEIDDRLSDLGISSYGISETTLEEIFLKVAEESGVDAETSDGTLPARRNRRAFGDKQSCLRPFTEDDAADPNDSDIDPESRETDLLSGMDGKGSYQVKGWKLTQQQFVALLWKRLLIARRSRKGFFAQIVLPAVFVCIALVFSLIVPPFGKYPSLELQPWMYNEQYTFVSNDAPEDTGTLELLNALTKDPGFGTRCMEGNPIPDTPCQAGEEEWTTAPVPQTIMDLFQNGNWTMQNPSPACQCSSDKIKKMLPVCPPGAGGLPPPQRKQNTADILQDLTGRNISDYLVKTYVQIIAKSLKNKIWVNEFRYGGFSLGVSNTQALPPSQEVNDATKQMKKHLKLAKDSSADRFLNSLGRFMTGLDTRNNVKVWFNNKGWHAISSFLNVINNAILRANLQKGENPSHYGITAFNHPLNLTKQQLSEVAPMTTSVDVLVSICVIFAMSFVPASFVVFLIQERVSKAKHLQFISGVKPVIYWLSNFVWDMCNYVVPATLVIIIFICFQQKSYVSSTNLPVLALLLLLYGWSITPLMYPASFVFKIPSTAYVVLTSVNLFIGINGSVATFVLELFTDNKLNNINDILKSVFLIFPHFCLGRGLIDMVKNQAMADALERFGENRFVSPLSWDLVGRNLFAMAVEGVVFFLITVLIQYRFFIRPRPVNAKLSPLNDEDEDVRRERQRILDGGGQNDILEIKELTKIYRRKRKPAVDRICVGIPPGECFGLLGVNGAGKSSTFKMLTGDTTVTRGDAFLNRNSILSNIHEVHQNMGYCPQFDAITELLTGREHVEFFALLRGVPEKEVGKVGEWAIRKLGLVKYGEKYAGNYSGGNKRKLSTAMALI

SEQ ID NO: 727 - DNA, 10442 bp, Homo sapien
  Unsure 9881: Unknown base
  Unsure 9884: Unknown base
  Unsure 9999: Unknown base
  Unsure 10046: Unknown base
ggccgggacccgcagagccgagccgacccttctctcccgggctgcggcagggcagggcggggagctccgcgcaccaacagagccggttctcagggcgctttgctccttgttttttccccggttctgttttctccccttctccggaaggcttgtcaaggggtaggagaaagagacgcaaacacaaaagtggaaaacagttaatgaccagccacgggcgtccctgctgtgagctctggccgctgccttccagggctcccgagccacacgctgggcgtgctggctgagggaacatggcttgttggcctcagctgaggttgctgctgtggaagaacctcactttcagaagaagacaaacatgtcagctgttactggaagtggcctggcctctatttatcttcctgatcctgatctctgttcggctgagctacccaccctatgaacaacatgaatgccattttccaaataaagccatgccctctgcaggaacacttccttgggttcaggggattatctgtaatgccaacaacccctgtttccgttacccgactcctggggaggctcccggagttgttggaaactttaacaaatccattgtggctcgcctgttctcagatgctcggaggcttcttttatacagccagaaagacaccagcatgaaggacatgcgcaaagttctgagaacattacagcagatcaagaaatccagctcaaacttgaagcttcaagatttcctggtggacaatgaaaccttctctgggttcctatatcacaacctctctctcccaaagtctactgtggacaagatgctgagggctgatgtcattctccacaaggtatttttgcaaggctaccagttacatttgacaagtctgtgcaatggatcaaaatcagaagagatgattcaacttggtgaccaagaagtttctgagctttgtggcctaccaaaggagaaactggctgcagcagagcgagtacttcgttccaacatggacatcctgaagccaatcctgagaacactaaactctacatctcccttcccgagcaaggagctggctgaagccacaaaaacattgctgcatagtcttgggactctggcccaggagctgttcagcatgagaagctggagtgacatgcgacaggaggtgatgtttctgaccaatgtgaacagctccagctcctccacccaaatctaccaggctgtgtctcgtattgtctgcgggcatcccgagggaggggggctgaagatcaagtctctcaactggtatgaggacaacaactacaaagccctctttggaggcaatggcactgaggaagatgctgaaaccttctatgacaactctacaactccttactgcaatgatttgatgaagaatttggagtctagtcctctttcccgcattatctggaaagctctgaagccgctgctcgttgggaagatcctgtatacacctgacactccagccacaaggcaggtcatggctgaggtgaacaagaccttccaggaactggctgtgttccatgatctggaaggcatgtgggaggaactcagccccaagatctggaccttcatggagaacagccaagaaatggaccttgtccggatgctgttggacagcagggacaatgaccacttttgggaacagcagttggatggcttagattggacagcccaagacatcgtggcgtttttggccaagcacccagaggatgtccagtccagtaatggttctgtgtacacctggagagaagctttcaacgagactaaccaggcaatccggaccatatctcgcttcatggagtgtgtcaacctgaacaagctagaacccatagcaacagaagtctggctcatcaacaagtccatggagctgctggatgagaggaagttctgggctggtattgtgttcactggaattactccaggcagcattgagctgccccatcatgtcaagtacaagatccgaatggacattgacaatgtggagaggacaaataaaatcaaggatgggtactgggaccctggtcctcgagctgacccctttgaggacatgcggtacgtctgggggggcttcgcctacttgcaggatgtggtggagcaggcaatcatcagggtgctgacgggcaccgagaagaaaactggtgtctatatgcaacagatgccctatccctgttacgttgatgacatctttctgcgggtgatgagccggtcaatgcccctcttcatgacgctggcctggatttactcagtggctgtgatcatcaagggcatcgtgtatgagaaggaggcacggctgaaagagaccatgcggatcatgggcctggacaacagcatactctggtttagctggttcattagtagcctcattcctcttcttgtgagcgctggcctgctagtggtcatcctgaagttaggaaacctgctgccctacagtgatcccagcgtggtgtttgtcttcctgtccgtgtttgctgtggtgacaatcctgcagtgcttcctgattagcacactcttctccagagccaacctggcagcagcctgtgggggcatcatctacttcacgctgtacctgccctacgtcctgtgtgtggcatggcaggactacgtgggcttcacactcaagatcttcgctagcctgctgtctcctgtggcttttgggtttggctgtgagtactttgccctttttgaggagcagggcattggagtgcagtgggacaacctgtttgagagtcctgtggaggaagatggcttcaatctcaccacttcgatctccatgatgctgtttgacaccttcctctatggggtgatgacctggtacattgaggctgtctttccaggccagtacggaattcccaggccctggtattttccttgcaccaagtcctactggtttggcgaggaaagtgatgagaagagccaccctggttccaaccagaagagaatgtcagaaatctgcatggaggaggaacccacccacttgaagctgggcgtgtccattcagaacctggtaaaagtctaccgagatgggatgaaggtggctgtcgatggcctggcactgaatttttatgagggccagatcacctccttcctgggccacaatggagcggggaagacgaccaccatgtcaatcctgaccgggttgttccccccgacctcgggcaccgcctacatcctgggaaaagacattcgctctgagatgagcaccatccggcagaacctgggggtctgtccccagcataacgtgctgtttgacatgctgactgtcgaagaacacatctggttctatgcccgcttgaaagggctctctgagaagcacgtgaaggcggagatggagcagatggccctggatgttggtttgccatcaagcaagctgaaaagcaaaacaagccagctgtcaggtggaatgcagagaaagctatctgtggccttggcctttgtcgggggatctaaggttgtcattctggatgaacccacagctggtgtggacccttactcccgcaggggaatatgggagctgctgctgaaataccgacaaggccgcaccattattctctctacacaccacatggatgaagcggacgtcctgggggacaggattgccatcatctcccatgggaagctgtgctgtgtgggctcctccctgtttctgaagaaccagctgggaacaggctactacctgaccttggtcaagaaagatgtggaatcctccctcagttcctgcagaaacagtagtagcactgtgtcatacctgaaaaaggaggacagtgtttctcagagcagttctgatgctggcctgggcagcgaccatgagagtgacacgctgaccatcgatgtctctgctatctccaacctcatcaggaagcatgtgtctgaagcccggctggtggaagacatagggcatgagctgacctatgtgctgccatatgaagctgctaaggagggagcctttgtggaactctttcatgagattgatgaccggctctcagacctgggcatttctagttatggcatctcagagacgaccctggaagaaatattcctcaaggtggccgaagagagtggggtggatgctgagacctcagatggtaccttgccagcaagacgaaacaggcgggccttcggggacaagcagagctgtcttcgcccgttcactgaagatgatgctgctgatccaaatgattctgacatagacccagaatccagagagacagacttgctcagtgggatggatggcaaagggtcctaccaggtgaaaggctggaaacttacacagcaacagtttgtggcccttttgtggaagagactgctaattgccagacggagtcggaaaggattttttgctcagattgtcttgccagctgtgtttgtctgcattgcccttgtgttcagcctgatcgtgccaccctttggcaagtaccccagcctggaacttcagccctggatgtacaacgaacagtacacatttgtcagcaatgatgctcctgaggacacgggaaccctggaactcttaaacgccctcaccaaagaccctggcttcgggacccgctgtatggaaggaaacccaatcccagacacgccctgccaggcaggggaggaagagtggaccactgccccagttccccagaccatcatggacctcttccagaatgggaactggacaatgcagaacccttcacctgcatgccagtgtagcagcgacaaaatcaagaagatgctgcctgtgtgtcccccaggggcaggggggctgcctcctccacaaagaaaacaaaacactgcagatatccttcaggacctgacaggaagaaacatttcggattatctggtgaagacgtatgtgcagatcatagccaaaagcttaaagaacaagatctgggtgaatgagtttaggtatggcggcttttccctgggtgtcagtaatactcaagcacttcctccgagtcaagaagttaatgatgccatcaaacaaatgaagaaacacctaaagctggccaaggacagttctgcagatcgatttctcaacagcttgggaagatttatgacaggactggacaccagaaataatgtcaaggtgtggttcaataacaagggctggcatgcaatcagctctttcctgaatgtcatcaacaatgccattctccgggccaacctgcaaaagggagagaaccctagccattatggaattactgctttcaatcatcccctgaatctcaccaagcagcagctctcagaggtggctctgatgaccacatcagtggatgtccttgtgtccatctgtgtcatctttgcaatgtccttcgtcccagccagctttgtcgtattcctgatccaggagcgggtcagcaaagcaaaacacctgcagttcatcagtggagtgaagcctgtcatctactggctctctaattttgtctgggatatgtgcaattacgttgtccctgccacactggtcattatcatcttcatctgcttccagcagaagtcctatgtgtcctccaccaatctgcctgtgctagcccttctacttttgctgtatgggtggtcaatcacacctctcatgtacccagcctcctttgtgttcaagatccccagcacagcctatgtggtgctcaccagcgtgaacctcttcattggcattaatggcagcgtggccacctttgtgctggagctgttcaccgacaataagctgaataatatcaatgatatcctgaagtccgtgttcttgatcttcccacatttttgcctgggacgagggctcatcgacatggtgaaaaaccaggcaatggctgatgccctggaaaggtttggggagaatcgctttgtgtcaccattatcttgggacttggtgggacgaaacctcttcgccatggccgtggaaggggtggtgttcttcctcattactgttctgatccagtacagattcttcatcaggcccagacctgtaaatgcaaagctatctcctctgaatgatgaagatgaagatgtgaggcgggaaagacagagaattcttgatggtggaggccagaatgacatcttagaaatcaaggagttgacgaagatatatagaaggaagcggaagcctgctgttgacaggatttgcgtgggcattcctcctggtgagtgctttgggctcctgggagttaatggggctggaaaatcatcaactttcaagatgttaacaggagataccactgttaccagaggagatgctttccttaacaaaaatagtatcttatcaaacatccatgaagtacatcagaacatgggctactgccctcagtttgatgccatcacagagctgttgactgggagagaacacgtggagttctttgcccttttgagaggagtcccagagaaagaagttggcaaggttggtgagtgggcgattcggaaactgggcctcgtgaagtatggagaaaaatatgctggtaactatagtggaggcaacaaacgcaagctctctacagccatggctttgatcggcgggcctcctgtggtgtttctggatgaacccaccacaggcatggatcccaaagcccggcggttcttgtggaattgtgccctaagtgttgtcaaggaggggagatcagtagtgcttacatctcatagtatggaagaatgtgaagctctttgcactaggatggcaatcatggtcaatggaaggttcaggtgccttggcagtgtccagcatctaaaaaataggtttggagatggttatacaatagttgtacgaatagcagggtccaacccggacctgaagcctgtccaggatttctttggacttgcatttcctggaagtgttctaaaagagaaacaccggaacatgctacaataccagcttccatcttcattatcttctctggccaggatattcagcatcctctcccagagcaaaaagcgactccacatagaagactactctgtttctcagacaacacttgaccaagtatttgtgaactttgccaaggaccaaagtgatgatgaccacttaaaagacctctcattacacaaaaaccagacagtagtggacgttgcagttctcacatcttttctacaggatgagaaagtgaaagaaagctatgtatgaagaatcctgttcatacggggtggctgaaagtaaagaggaactagactttcctttgcaccatgtgaagtgttgtggagaaaagagccagaagttgatgtgggaagaagtaaactggatactgtactgatactattcaatgcaatgcaattcaatgcaatgaaaacaaaattccattacaggggcagtgcctttgtagcctatgtcttgtatggctctcaagtgaaagacttgaatttagttttttacctatacctatgtgaaactctattatggaacccaatggacatatgggtttgaactcacactttttttttttttttgttcctgtgtattctcattggggttgcaacaataattcatcaagtaatcatggccagcgattattgatcaaaatcaaaaggtaatgcacatcctcattcactaagccatgccatgcccaggagactggtttcccggtgacacatccattgctggcaatgagtgtgccagagttattagtgccaagtttttcagaaagtttgaagcaccatggtgtgtcatgctcacttttgtgaaagctgctctgctcagagtctatcaacattgaatatcagttgacagaatggtgccatgcgtggctaacatcctgctttgattccctctgataagctgttctggtggcagtaacatgcaacaaaaatgtgggtgtctctaggcacgggaaacttggttccattgttatattgtcctatgcttcgagccatgggtctacagggtcatccttatgagactcttaaatatacttagatcctggtaagaggcaaagaatcaacagccaaactgctggggctgcaagctgctgaagccagggcatgggattaaagagattgtgcgttcaaacctagggaagcctgtgcccatttgtcctgactgtctgctaacatggtacactgcatctcaagatgtttatctgacacaagtgtattatttctggctttttgaattaatctagaaaatgaaaagatggagttgtattttgacaaaaatgtttgtactttttaatgttatttggaattttaagttctatcagtgacttctgaatccttagaatggcctctttgtagaaccctgtggtatagaggagtatggccactgccccactatttttattttcttatgtaagtttgcatatcagtcatgactagtgcctagaaagcaatgtgatggtcaggatctcatgacattatatttgagtttctttcagatcatttaggatactcttaatctcacttcatcaatcaaatattttttgagtgtatgctgtagctgaaagagtatgtacgtacgtataagactagagagatattaagtctcagtacacttcctgtgccatgttattcagctcactggtttacaaatataggttgtcttgtggttgtaggagcccactgtaacaatattgggcagccttttttttttttttttaattgcaacaatgcaaaagccaagaaagtataagggtcacaagtttaaacaatgaattcttcaacagggaaaacagctagcttgaaaacttgctgaaaaacacaacttgtgtttatggcatttagtaccttcaaataattggctttgcagatattggataccccattaaatctgacagtctcaaatttttcatctcttcaatcactagtcaagaaaaatataaaaacaacaaatacttccatatggagcatttttcagagttttctaacccagtcttatttttctagtcagtaaacatttgtaaaaatactgtttcactaatacttactgttaactgtcttgagagaaaagaaaaatatgagagaactattgtttggggaagttcaagtgatctttcaatatcattactaacttcttccactttttccaaaatttgaatattaacgctaaaggtgtaagacttcagatttcaaattaatctttctatattttttaaatttacagaatattatataacccactgctgaaaaagaaaaaaatgattgttttagaagttaaagtcaatattgattttaaatataagtaatgaaggcatatttccaataactagtgatatggcatcgttgcaatttacagtatcttcaaaaatacagaatttatagaataatttctcctcatttaatatttttcaaaatcaaagttatggtttcctcattttactaaaatcgtattctaattcttcattatagtaaatctatgagcaactccttacttcggttcctctgatttcaaggccatattttaaaaaatcaaaaggcactgtgaactattttgaagaaaacacgacattttaatacagattgaaaggacctcttctgaagctagaaacaatctatagttatacatcttcattaatactgtgttaccttttaaaatagtaattttttacattttcctgtgtaaacctaattgtggtagaaatttttaccaactctatactcaatcaagcaaaatttctgtatattccctgtggaatgtacctatgtgagtttcagaaattctcaaaatacgtgttcaaaaatttctgcttttgcatctttgggacacctcagaaaacttattaacaactgtgaatatgagaaatacagaagaaaataataagccctctatacataaatgcccagcacaattcattgttaaaaaacaaccaaacctcacactactgtatttcattatctgtactgaaagcaaatgctttgtgactattaaatgttgcacatcattcattcactgtatagtaatcattgactaaagccatttgctgtgttttcttcttgtggntgnatatatcaggtaaaatattttccaaagagccatgtgtcatgtaatactgaaccctttgatattgagacattaatttggacccttggtattatctactagaataatgtaatactgnagaaatattgctctaattctttcaaaatggtgcatcccccttaaaangttctatttccataaggatttagcttgcttatcccttcttataccctaagatgaagctgtttttgtgctctttgttcatcattggccctcattccaagcactttacgctgtctgtaatgggatctatttttgcactggaatatctgagaattgcaaaactagacaaaagtttcacaacagatttctaagttaaatcattttcattaaaaggaaaaaagaaaaaaaattttgtatgtcaataactttatatgaagtattaaaatgcatatttctatgttgtaatataatgagtcacaaaataaagctgtgacagttctgttaaaaaaaaaaaaaaaaaaaaaaaaaaaaaaaaaaaaaaaaaaaaaaaaaaaaaaaaaaaaaaaaaaaaaaaaaaaa

SEQ ID NO: 728 - protein, 2261 aa, Homo sapien [sequence omitted]

SEQ ID NO: 729 - DNA, 3683 bp, Homo sapien
gcgagcgcagcggagcctggagagaaggcgctgggctgcgagggcgcgagggcgcgagggcagggggcaaccggaccccgcccgcacccatggcgcccgtcgccgtctgggccgcgctggccgtcggactggagctctgggctgcggcgcacgccttgcccgcccaggtggcatttacaccctacgccccggagcccgggagcacatgccggctcagagaatactatgaccagacagctcagatgtgctgcagcaaatgctcgccgggccaacatgcaaaagtcttctgtaccaagacctcggacaccgtgtgtgactcctgtgaggacagcacatacacccagctctggaactgggttcccgagtgcttgagctgtggctcccgctgtagctctgaccaggtggaaactcaagcctgcactcgggaacagaaccgcatctgcacctgcaggcccggctggtactgcgcgctgagcaagcaggaggggtgccggctgtgcgcgccgctgcgcaagtgccgcccgggcttcggcgtggccagaccaggaactgaaacatcagacgtggtgtgcaagccctgtgccccggggacgttctccaacacgacttcatccacggatatttgcaggccccaccagatctgtaacgtggtggccatccctgggaatgcaagcatggatgcagtctgcacgtccacgtcccccacccggagtatggccccaggggcagtacacttaccccagccagtgtccacacgatcccaacacacgcagccaactccagaacccagcactgctccaagcacctccttcctgctcccaatgggccccagccccccagctgaagggagcactggcgacttcgctcttccagttggactgattgtgggtgtgacagccttgggtctactaataataggagtggtgaactgtgtcatcatgacccaggtgaaaaagaagcccttgtgcctgcagagagaagccaaggtgcctcacttgcctgccgataaggcccggggtacacagggccccgagcagcagcacctgctgatcacagcgccgagctccagcagcagctccctggagagctcggccagtgcgttggacagaagggcgcccactcggaaccagccacaggcaccaggcgtggaggccagtggggccggggaggcccgggccagcaccgggagctcagattcttcccctggtggccatgggacccaggtcaatgtcacctgcatcgtgaacgtctgtagcagctctgaccacagctcacagtgctcctcccaagccagctccacaatgggagacacagattccagcccctcggagtccccgaaggacgagcaggtccccttctccaaggaggaatgtgcctttcggtcacagctggagacgccagagaccctgctggggagcaccgaagagaagcccctgccccttggagtgcctgatgctgggatgaagcccagttaaccaggccggtgtgggctgtgtcgtagccaaggtgggctgagccctggcaggatgaccctgcgaaggggccctggtccttccaggcccccaccactaggactctgaggctctttctgggccaagttcctctagtgccctccacagccgcagcctccctctgacctgcaggccaagagcagaggcagcgagttggggaaagcctctgctgccatggtgtgtccctctcggaaggctggctgggcatggacgttcggggcatgctggggcaagtccctgactctctgtgacctgccccgcccagctgcacctgccagcctggcttctggagcccttgggttttttgtttgtttgtttgtttgtttgtttgtttctccccctgggctctgcccagctctggcttccagaaaaccccagcatccttttctgcagaggggctttctggagaggagggatgctgcctgagtcacccatgaagacaggacagtgcttcagcctgaggctgagactgcgggatggtcctggggctctgtgtagggaggaggtggcagccctgtagggaacggggtccttcaagttagctcaggaggcttggaaagcatcacctcaggccaggtgcagtggctcacgcctatgatcccagcactttgggaggctgaggcgggtggatcacctgaggttaggagttcgagaccagcctggccaacatggtaaaaccccatctctactaaaaatacagaaattagccgggcgtggtggcgggcacctatagtcccagctactcagaagcctgaggctgggaaatcgtttgaacccgggaagcggaggttgcagggagccgagatcacgccactgcactccagcctgggcgacagagcgagagtctgtctcaaaagaaaaaaaaaaaagcaccgcctccaaatgctaacttgtccttttgtaccatggtgtgaaagtcagatgcccagagggcccaggcaggccaccatattcagtgctgtggcctgggcaagataacgcacttctaactagaaatctgccaattttttaaaaaagtaagtaccactcaggccaacaagccaacgacaaagccaaactctgccagccacatccaaccccccacctgccatttgcaccctccgccttcactccggtgtgcctgcagccccgcgcctccttccttgctgtcctaggccacaccatctcctttcagggaatttcaggaactagagatgactgagtcctcgtagccatctctctactcctacctcagcctagaccctcctcctcccccagaggggtgggttcctcttccccactccccaccttcaattcctgggccccaaacgggctgccctgccactttggtacatggccagtgtgatcccaagtgccagtcttgtgtctgcgtctgtgttgcgtgtcgtgggtgtgtgtagccaaggtcggtaagttgaatggcctgccttgaagccactgaagctgggattcctccccattagagtcagccttccccctcccagggccagggccctgcagaggggaaaccagtgtagccttgcccggattctgggaggaagcaggttgaggggctcctggaaaggctcagtctcaggagcatggggataaaggagaaggcatgaaattgtctagcagagcaggggcagggtgataaattgttgataaattccactggacttgagcttggcagctgaactattggagggtgggagagcccagccattaccatggagacaagaagggttttccaccctggaatcaagatgtcagactggctggctgcagtgacgtgcacctgtactcaggaggctgaggggaggatcactggagcccaggagtttgaggctgcagcgagctatgatcgcgccactacactccagcctgagcaacagagtgagaccctgtctcttaaagaaaaaaaaagtcagactgctgggactggccaggtttctgcccacattggacccacatgaggacatgatggagcgcacctgccccctggtggacagtcctgggagaacctcaggcttccttggcatcacagggcagagccgggaagcgatgaatttggagactctgtggggccttggttcccttgtgtgtgtgtgttgatcccaagacaatgaaagtttgcactgtatgctggacggcattcctgcttatcaataaacctgtttgttttaaaaaaaa

SEQ ID NO: 730 - protein, 461 aa, Homo sapien
MAPVAVWAALAVGLELWAAAHALPAQVAFTPYAPEPGSTCRLREYYDQTAQMCCSKCSPGQHAKVFCTKTSDTVCDSCEDSTYTQLWNWVPECLSCGSRCSSDQVETQACTREQNRICTCRPGWYCALSKQEGCRLCAPLRKCRPGFGVARPGTETSDVVCKPCAPGTFSNTTSSTDICRPHQICNVVAIPGNASMDAVCTSTSPTRSMAPGAVHLPQPVSTRSQHTQPTPEPSTAPSTSFLLPMGPSPPAEGSTGDFALPVGLIVGVTALGLLIIGVVNCVIMTQVKKKPLCLQREAKVPHLPADKARGTQGPEQQHLLITAPSSSSSSLESSASALDRRAPTRNQPQAPGVEASGAGEARASTGSSDSSPGGHGTQVNVTCIVNVCSSSDHSSQCSSQASSTMGDTDSSPSESPKDEQVPFSKEECAFRSQLETPETLLGSTEEKPLPLGVPDAGMKPS

SEQ ID NO: 731 - DNA, 6906 bp, Homo sapien
ggcgcgggcggcctggagccccgggagcggcgcgcgcggtcccggcccagccggctctcctggcctcgcgctgcacattctctcctggcggcggcgccacctgcagtagcgttcgcccgaacatggcgacacggagcagcaggagggagtcgcgactcccgttcctattcaccctggtcgcactgctgccgcccggagctctctgcgaagtctggacgcagaggctgcacggcggcagcgcgcccttgccccaggaccggggcttcctcgtggtgcagggcgacccgcgcgagctgcggctgtgggcgcgcggggatgccaggggggcgagccgcgcggacgagaagccgctccggaggaaacggagcgctgccctgcagcccgagcccatcaaggtgtacggacaggttagtctgaatgattcccacaatcagatggtggtgcactgggctggagagaaaagcaacgtgatcgtggccttggcccgagatagcctggcattggcgaggcccaagagcagtgatgtgtacgtgtcttacgactatggaaaatcattcaagaaaatttcagacaagttaaactttggcttgggaaataggagtgaagctgttatcgcccagttctaccacagccctgcggacaacaagcggtacatctttgcagacgcttatgcccagtacctctggatcacgtttgacttctgcaacactcttcaaggcttttccatcccatttcgggcagctgatctcctcctacacagtaaggcctccaaccttctcttgggctttgacaggtcccaccccaacaagcagctgtggaagtcagatgactttggccagacctggatcatgattcaggaacatgtcaagtccttttcttggggaattgatccctatgacaaaccaaataccatctacattgaacgacacgaaccctctggctactccactgtcttccgaagtacagatttcttccagtcccgggaaaaccaggaagtgatccttgaggaagtgagagattttcagcttcgggacaagtacatgtttgctacaaaggtggtgcatctcttgggcagtgaacagcagtcttctgtccagctctgggtctcctttggccggaagcccatgagagcagcccagtttgtcacaagacatcctattaatgaatattacatcgcagatgcctccgaggaccaggtgtttgtgtgtgtcagccacagtaacaaccgcaccaatttatacatctcagaggcagaggggctgaagttctccctgtccttggagaacgtgctctattacagcccaggaggggccggcagtgacaccttggtgaggtattttgcaaatgaaccatttgctgacttccaccgagtggaaggattgcaaggagtctacattgctactctgattaatggttctatgaatgaggagaacatgagatcggtcatcacctttgacaaagggggaacctgggagtttcttcaggctccagccttcacgggatatggagagaaaatcaattgtgagctttcccagggctgttcccttcatctggctcagcgcctcagtcagctcctcaacctccagctccggagaatgcccatcctgtccaaggagtcggctccaggcctcatcatcgccactggctcagtgggaaagaacttggctagcaagacaaacgtgtacatctctagcagtgctggagccaggtggcgagaggcacttcctggacctcactactacacatggggagaccacggcggaatcatcacggccattgcccagggcatggaaaccaacgagctaaaatacagtaccaatgaaggggagacctggaaaacattcatcttctctgagaagccagtgtttgtgtatggcctcctcacagaacctggggagaagagcactgtcttcaccatctttggctcgaacaaagagaatgtccacagctggctgatcctccaggtcaatgccacggatgccttgggagttccctgcacagagaatgactacaagctgtggtcaccatctgatgagcgggggaatgagtgtttgctgggacacaagactgttttcaaacggcggaccccccatgccacatgcttcaatggagaggactttgacaggccggtggtcgtgtccaactgctcctgcacccgggaggactatgagtgtgacttcggtttcaagatgagtgaagatttgtcattagaggtttgtgttccagatccggaattttctggaaagtcatactcccctcctgtgccttgccctgtgggttctacttacaggagaacgagaggctaccggaagatttctggggacacttgtagcggaggagatgttgaagcgcgactggaaggagagctggtcccctgtcccctggcagaagagaacgagttcattctgtatgctgtgaggaaatccatctaccgctatgacctggcctcgggagccaccgagcagttgcctctcaccgggctacgggcagcagtggccctggactttgactatgagcacaactgtttgtattggtccgacctggccttggacgtcatccagcgcctctgtttgaatggaagcacagggcaagaggtgatcatcaattctggcctggagacagtagaagctttggcttttgaacccctcagccagctgctttactgggtagatgcaggcttcaaaaagattgaggtagctaatccagatggcgacttccgactcacaatcgtcaattcctctgtgcttgatcgtcccagggctctggtcctcgtgccccaagagggggtgatgttctggacagactggggagacctgaagcctgggatttatcggagcaatatggatggttctgctgcctatcacctggtgtctgaggatgtgaagtggcccaatggcatctctgtggacgaccagtggatttactggacggatgcctacctggagtgcatagagcggatcacgttcagtggccagcagcgctctgtcattctggacaacctcccgcacccctatgccattgctgtctttaagaatgaaatctactgggatgactggtcacagctcagcatattccgagcttccaaatacagtgggtcccagatggagattctggcaaaccagctcacggggctcatggacatgaagattttctacaaggggaagaacactggaagcaatgcctgtgtgcccaggccatgcagcctgctgtgcctgcccaaggccaacaacagtagaagctgcaggtgtccagaggatgtgtccagcagtgtgcttccatcaggggacctgatgtgtgactgccctcagggctatcagctcaagaacaatacctgtgtcaaagaagagaacacctgtcttcgcaaccagtatcgctgcagcaacgggaactgtatcaacagcatttggtggtgtgactttgacaacgactgtggagacatgagcgatgagagaaactgccctaccaccatctgtgacctggacacccagtttcgttgccaggagtctgggacttgtatcccactgtcctataaatgtgaccttgaggatgactgtggagacaacagtgatgaaagtcattgtgaaatgcaccagtgccggagtgacgagtacaactgcagttccggcatgtgcatccgctcctcctgggtatgtgacggggacaacgactgcagggactggtctgatgaagccaactgtaccgccatctatcacacctgtgaggcctccaacttccagtgccgaaacgggcactgcatcccccagcggtgggcgtgtgacggggatacggactgccaggatggttccgatgaggatccagtcaactgtgagaagaagtgcaatggattccgctgcccaaacggcacttgcatcccatccagcaaacattgtgatggtctgcgtgattgctctgatggctccgatgaacagcactgcgagcccctctgtacgcacttcatggactttgtgtgtaagaaccgccagcagtgcctgttccactccatggtctgtgacggaatcatccagtgccgcgacgggtccgatgaggatgcggcgtttgcaggatgctcccaagatcctgagttccacaaggtatgtgatgagttcggtttccagtgtcagaatggagtgtgcatcagtttgatttggaagtgcgacgggatggatgattgcggcgattattctgatgaagccaactgcgaaaaccccacagaagccccaaactgctcccgctacttccagtttcggtgtgagaatggccactgcatccccaacagatggaaatgtgacagggagaacgactgtggggactggtctgatgagaaggattgtggagattcacatattcttcccttctcgactcctgggccctccacgtgtctgcccaattactaccgctgcagcagtgggacctgcgtgatggacacctgggtgtgcgacgggtaccgagattgtgcagatggctctgacgaggaagcctgccccttgcttgcaaacgtcactgctgcctccactcccacccaacttgggcgatgtgaccgatttgagttcgaatgccaccaaccgaagacgtgtattcccaactggaagcgctgtgacggccaccaagattgccaggatggccgggacgaggccaattgccccacacacagcaccttgacttgcatgagcagggagttccagtgcgaggacggggaggcctgcattgtgctctcggagcgctgcgacggcttcctggactgctcggacgagagcgatgaaaaggcctgcagtgatgagttgactgtgtacaaagtacagaatcttcagtggacagctgacttctctggggatgtgactttgacctggatgaggcccaaaaaaatgccctctgcttcttgtgtatataatgtctactacagggtggttggagagagcatatggaagactctggagacccacagcaataagacaaacactgtattaaaagtcttgaaaccagataccacgtatcaggttaaagtacaggttcagtgtctcagcaaggcacacaacaccaatgactttgtgaccctgaggaccccagagggattgccagatgcccctcgaaatctccagctgtcactccccagggaagcagaaggtgtgattgtaggccactgggctcctcccatccacacccatggcctcatccgtgagtacattgtagaatacagcaggagtggttccaagatgtgggcctcccagagggctgctagtaactttacagaaatcaagaacttattggtcaacactctatacaccgtcagagtggctgcggtgactagtcgtggaataggaaactggagcgattctaaatccattaccaccataaaaggaaaagtgatcccaccaccagatatccacattgacagctatggtgaaaattatctaagcttcaccctgaccatggagagtgatatcaaggtgaatggctatgtggtgaaccttttctgggcatttgacacccacaagcaagagaggagaactttgaacttccgaggaagcatattgtcacacaaagttggcaatctgacagctcatacatcctatgagatttctgcctgggccaagactgacttgggggatagccctctggcatttgagcatgttatgaccagaggggttcgcccacctgcacctagcctcaaggccaaagccatcaaccagactgcagtggaatgtacctggaccggcccccggaatgtggtttatggtattttctatgccacgtcctttcttgacctctatcgcaacccgaagagcttgactacttcactccacaacaagacggtcattgtcagtaaggatgagcagtatttgtttctggtccgtgtagtggtaccctaccaggggccatcctctgactacgttgtagtgaagatgatcccggacagcaggcttccaccccgtcacctgcatgtggttcatacgggcaaaacctccgtggtcatcaagtgggaatcaccgtatgactctcctgaccaggacttgttgtatgcaattgcagtcaaagatctcataagaaagactgacaggagctacaaagtaaaatcccgtaacagcactgtggaatacacccttaacaagttggagcctggcgggaaataccacatcattgtccaactggggaacatgagcaaagattccagcataaaaattaccacagtttcattatcagcacctgatgccttaaaaatcataacagaaaatgatcatgttcttctgttttggaaaagcctggctttaaaggaaaagcattttaatgaaagcaggggctatgagatacacatgtttgatagtgccatgaatatcacagcttaccttgggaatactactgacaatttctttaaaatttccaacctgaagatgggtcataattacacgttcaccgtccaagcaagatgcctttttggcaaccagatctgtggggagcctgccatcctgctgtacgatgagctggggtctggtgcagatgcatctgcaacgcaggctgccagatctacggatgttgctgctgtggtggtgcccatcttattcctgatactgctgagcctgggggtggggtttgccatcctgtacacgaagcaccggaggctgcagagcagcttcaccgccttcgccaacagccactacagctccaggctggggtccgcaatcttctcctctggggatgacctgggggaagatgatgaagatgcccctatgataactggattttcagatgacgtccccatggtgatagcctgaaagagctttcctcactagaaaccaaatggtgtaaatattttatttgataaagatagttgatggtttattttaaaagatgcactttgagttgcaatatgttatttttatatgggccaaaaacaaaaaacaaaaaaaaaaa

SEQ ID NO: 732 - protein, 2000 aa, Homo sapien
MATRSSRRESRLPFLFTLVALLPPGALCEVWTQRLHGGSAPLPQDRGFLVVQGDPRELRLWARGDARGASRADEKPLRRKRSAALQPEPIKVYGQVSLNDSHNQMVVHWAGEKSNVIVALARDSLALARPKSSDVYVSYDYGKSFKKISDKLNFGLGNRSEAVIAQFYHSPADNKRYIFADAYAQYLWITFDFCNTLQGFSIPFRAADLLLHSKASNLLLGFDRSHPNKQLWKSDDFGQTWIMIQEHVKSFSWGIDPYDKPNTIYIERHEPSGYSTVFRSTDFFQSRENQEVILEEVRDFQLRDKYMFATKVVHLLGSEQQSSVQLWVSFGRKPMRAAQFVTRHPINEYYIADASEDQVFVCVSHSNNRTNLYISEAEGLKFSLSLENVLYYSPGGAGSDTLVRYFANEPFADFHRVEGLQGVYIATLINGSMNEENMRSVITFDKGGTWEFLQAPAFTGYGEKINCELSQGCSLHLAQRLSQLLNLQLRRMPILSKESAPGLIIATGSVGKNLASKTNVYISSSAGARWREALPGPHYYTWGDHGGIITAIAQGMETNELKYSTNEGETWKTFIFSEKPVFVYGLLTEPGEKSTVFTIFGSNKENVHSWLILQVNATDALGVPCTENDYKLWSPSDERGNECLLGHKTVFKRRTPHATCFNGEDFDRPVVVSNCSCTREDYECDFGFKMSEDLSLEVCVPDPEFSGKSYSPPVPCPVGSTYRRTRGYRKISGDTCSGGDVEARLEGELVPCPLAEENEFILYAVRKSIYRYDLASGATEQLPLTGLRAAVALDFDYEHNCLYWSDLALDVIQRLCLNGSTGQEVIINSGLETVEALAFEPLSQLLYWVDAGFKKIEVANPDGDFRLTIVNSSVLDRPRALVLVPQEGVMFWTDWGDLKPGIYRSNMDGSAAYHLVSEDVKWPNGISVDDQWIYWTDAYLECIERITFSGQQRSVILDNLPHPYAIAVFKNEIYWDDWSQLSIFRASKYSGSQMEILANQLTGLMDMKIFYKGKNTGSNACVPRPCSLLCLPKANNSRSCRCPEDVSSSVLPSGDLMCDCPQGYQLKNNTCVKEENTCLRNQYRCSNGNCINSIWWCDFDNDCGDMSDERNCPTTICDLDTQFRCQESGTCIPLSYKCDLEDDCGDNSDESHCEMHQCRSDEYNCSSGMCIRSSWVCDGDNDCRDWSDEANCTAIYHTCEASNFQCRNGHCIPQRWACDGDTDCQDGSDEDPVNCEKKCNGFRCPNGTCIPSSKHCDGLRDCSDGSDEQHCEPLCTHFMDFVCKNRQQCLFHSMVCDGIIQCRDGSDEDAAFAGCSQDPEFHKVCDEFGFQCQNGVCISLIWKCDGMDDCGDYSDEANCENPTEAPNCSRYFQFRCENGHCIPNRWKCDRENDCGDWSDEKDCGDSHILPFSTPGPSTCLPNYYRCSSGTCVMDTWVCDGYRDCADGSDEEACPLLANVTAASTPTQLGRCDRFEFECHQPKTCIPNWKRCDGHQDCQDGRDEANCPTHSTLTCMSREFQCEDGEACIVLSERCDGFLDCSDESDEKACSDELTVYKVQNLQWTADFSGDVTLTWMRPKKMPSASCVYNVYYRVVGESIWKTLETHSNKTNTVLKVLKPDTTYQVKVQVQCLSKAHNTNDFVTLRTPEGLPDAPRNLQLSLPREAEGVIVGHWAPPIHTHGLIREYIVEYSRSGSKMWASQRAASNFTEIKNLLVNTLYTVRVAAVTSRGIGNWSDSKSITTIKGKVIPPPDIHIDSYGENYLSFTLTMESDIKVNGYVVNLFWAFDTHKQERRTLNFRGSILSHKVGNLTAHTSYEISAWAKTDLGDSPLAFEHVMTRGVRPPAPSLKAKAINQTAVECTWTGPRNVVYGIFYATSFLDLYRNPKSLTTSLHNKTVIVSKDEQYLFLVRVVVPYQGPSSDYVVVKMIPDSRLPPRHLHVVHTGKTSVVIKWESPYDSPDQDLLYAIAVKDLIRKTDRSYKVKSRNSTVEYTLNKLEPGG

SEQ ID NO: 733 - DNA, 1270 bp, Homo sapien
ggcacgaggctgcgccggaagtccctagccaggcctggcggtaaccttgggggcctcactgcagccgccgctgctgttggagtgggctttgcgagtctgaacgttggcggggctaggctcgttaactgccgagagcctccgggtttgcggtggaggacgctgaggcccgtggggggcaggcacccgggcgccgggcctcccagccgacatgtctctagtggcggaagccttcgtctcccagattgcagctgcagaaccttggcctgaaaatgctacattatatcagcaattgaaaggggagcaaattttactttctgacaatgcagcttctcttgcagtgcaggcctttttgcaaatgtgtaacttgcctatcaaagtagtttgtagggcaaatgcagaatatatgtctccatctggtaaagtaccttttattcatgtgggaaatcaagtagtatcagaacttggtccaatagtccaatttgttaaagccaagggccattctcttagtgatgggctggaggaagtccaaaaagcagaaatgaaagcttacatggaattagtcaacaatatgctgttgactgcagagctgtatcttcagtggtgtgatgaagctacagtaggggagatcactcatgctaggtatggatctccttacccttggcctctgaatcatattttggcctatcaaaaacagtgggaagtcaaacgtaagatgaaagctattggatggggaaagaagactctggaccaggtcttagaggatgtagaccagtgctgtcaagctctctctcaaagactgggaacacaaccgtatttcttcaataagcagcctactgaacttgacgcactggtatttggccatctatacaccattcttaccacacaattgacaaatgatgaactttctgagaaggtgaaaaactatagcaacctccttgctttctgtaggagaattgaacagcactattttgaagatcgtggtaaaggcaggctgtcatagagttatgtgttagtctcaggagtcttaacttttgaaatatgttttacttgaatgttacattagatattggtgtcagaattttaaaaccaaattactgctttttgaaacctcaaattatataatgtatcttatgtatgtgctttatattgttatttgtgtatacattaaaataattctgaattatttaatctgatatgttgtattctgtatcttgaaatttttgtttccttgaaacatgcatgcatttaaaaataaagcttaaacaactgt

SEQ ID NO: 734 - protein, 263 aa, Homo sapien
MSLVAEAFVSQIAAAEPWPENATLYQQLKGEQILLSDNAASLAVQAFLQMCNLPIKVVCRANAEYMSPSGKVPFIHVGNQVVSELGPIVQFVKAKGHSLSDGLEEVQKAEMKAYMELVNNMLLTAELYLQWCDEATVGEITHARYGSPYPWPLNHILAYQKQWEVKRKMKAIGWGKKTLDQVLEDVDQCCQALSQRLGTQPYFFNKQPTELDALVFGHLYTILTTQLTNDELSEKVKNYSNLLAFCRRIEQHYFEDRGKGRLS

SEQ ID NO: 735 - DNA, 13449 bp, Homo sapien
  Unsure 11967: Unknown base
  Unsure 12008: Unknown base
  Unsure 12013: Unknown base
gcggccgcgtcgacgcggcggcggcagcggcgtcggctcggggttctccgggagagggggagtgcgcggcggccgcagctgccacaaaccaggtgaagctttgttctaagaatatttgtttcatctagtttatgagtccaaatgatatagactgtaaatgtcacagcagtggtgaaagactgctcggtcatgagcaccgacagtaactcactggcacgtgaatttctgaccgatgtcaaccggctttgcaatgcagtggtccagagggtggaggccagggaggaagaagaggaggagacgcacatggcaacccttggacagtaccttgtccatggtcgaggatttctattacttaccaagctaaattctataattgatcaggcattgacatgtagagaagaactcctgactcttcttctgtctctccttccactggtatggaagatacctgtccaagaagaaaaggcaacagattttaacctaccgctctcagcagatataatcctgaccaaagaaaagaactcaagttcacaaagatccactcaggaaaaattacatttagaaggaagtgccctgtctagtcaggtttctgcaaaagtaaatgtttttcgaaaaagcagacgacagcgtaaaattacccatcgctattctgtaagagatgcaagaaagacacagctctccacctcagattcagaagccaattcagatgaaaaaggcatagcaatgaataagcatagaaggccccatctgctgcatcattttttaacatcgtttcctaaacaagaccaccccaaagctaaacttgaccgcttagcaaccaaagaacagactcctccagatgctatggctttggaaaattccagagagattattccaagacaggggtcaaacactgacattttaagtgagccagctgccttgtctgttatcagtaacatgaacaattctccatttgacttatgtcatgttttgttatctttattagaaaaagtttgtaagtttgacgttaccttgaatcataattctcctttagcagccagtgtagtgcccacactaactgaattcctagcaggctttggggactgctgcagtctgagcgacaacttggagagtcgagtagtttctgcaggttggaccgaagaaccggtggctttgattcaaaggatgctctttcgaacagtgttgcatcttctgtcagtagatgttagtactgcagagatgatgccagaaaatcttaggaaaaatttaactgaattgcttagagcagctttaaaaattagaatatgcctagaaaagcagcctgacccttttgcaccaagacaaaagaaaacactgcaggaggttcaggaagattttgtgttttcaaagtatcgtcatagagcccttcttttacctgagcttttggaaggagttcttcagattctgatctgttgtcttcaaagtgcagcttcaaatcccttctacttcagtcaagccatggatttggttcaagaattcattcagcatcatggatttaatttatttgaaacagcagttcttcaaatggaatggctggttttaagagatggagttcctcccgaggcctcagagcatttgaaagccctaataaatagtgtgatgaaaataatgagcactgtcaaaaaagtgaaatcagagcaacttcatcattcgatgtgtacaagaaaaaggcacagacgatgtgaatattctcattttatgcatcatcaccgagatctctcaggtcttctggtttcggcttttaaaaaccaggtttccaaaaacccatttgaagagactgcagatggagatgtttattatcctgagcggtgctgttgcattgcagtgtgtgcccatcagtgcttgcgcttactacagcaggcttccttgagcagcacttgtgtccagatcctatcgggtgttcataacattggaatatgctgttgtatggatcccaaatctgtaatcattcctttgctccatgcttttaaattgccagcactgaaaaattttcagcagcatatattgaatatccttaacaaacttattttggatcagttaggaggagcagagatatcaccaaaaattaaaaaagcagcttgtaatatttgtactgttgactctgaccaactagcccaattagaagagacactgcagggaaacttatgtgatgctgaactctcctcaagtttatccagtccttcttacagatttcaagggatcctgcccagcagtggatctgaagatttgttgtggaaatgggatgctttaaaggcttatcagaactttgtttttgaagaagacagattacatagtatacagattgcaaatcacatttgcaatttaatccagaaaggcaatatagttgttcagtggaaattatataattacatatttaatcctgtgctccaaagaggagttgaattagcacatcattgtcaacacctaagcgttacttcagctcaaagtcatgtatgtagccatcataaccagtgcttgcctcaggacgtgcttcagatttatgtaaaaactctgcctatcctgcttaaatccagggtaataagagatttgtttttgagttgtaatggagtaagtcaaataatcgaattaaattgcttaaatggtattcgaagtcattctctaaaagcatttgaaactctgataatcagcctaggggagcaacagaaagatgcctcagttccagatattgatgggatagacattgaacagaaggagttgtcctctgtacatgtgggtacttcttttcatcatcagcaagcttattcagattctcctcagagtctcagcaaattttatgctggcctcaaagaagcttatccaaagagacggaagactgttaaccaagatgttcatatcaacacaataaacctattcctctgtgtggcttttttatgcgtaagtaaagaagcagagtctgacagggagtcggccaatgactcagaagatacttctggctatgacagcacagccagcgagcctttaagtcatatgctgccatgtatatctctcgagagccttgtcttgccttctcctgaacatatgcaccaagcagcagacatttggtctatgtgtcgttggatctacatgttgagttcagtgttccagaaacagttttataggcttggtggtttccgagtatgccataagttaatatttatgataatacagaaactgttcagaagtcacaaagaggagcaaggaaaaaaggagggagatacaagtgtaaatgaaaaccaggatttaaacagaatttctcaacctaagagaactatgaaggaagatttattatctttggctataaaaagtgaccccataccatcagaactaggtagtctaaaaaagagtgctgacagtttaggtaaattagagttacagcatatttcttccataaatgtggaagaagtttcagctactgaagccgctcccgaggaagcaaagctatttacaagtcaagaaagtgagacctcacttcaaagtatacgacttttggaagcccttctggccatttgtcttcatggtgccagaactagtcaacagaagatggaattggagttacctaatcagaacttgtctgtggaaagtatattatttgaaatgagggaccatctttcccagtcaaaggtgattgaaacacaactagcaaagccgttatttgatgccctgcttcgagttgccctcgggaattattcagcagattttgaacataatgatgctatgactgagaagagtcatcaatctgcagaagaattgtcatcccagcctggtgatttttcagaagaagctgaggattctcagtgttgtagttttaaacttttagttgaagaagaaggttacgaagcagatagtgaaagcaatcctgaagatggcgaaacccaggatgatggggtagacttaaagtctgaaacagaaggtttcagtgcatcaagcagtccaaatgacttactcgaaaacctcactcaaggggaaataatttatcctgagatttgtatgctggaattaaatttgctttctgctagtaaagccaaacttgatgtgcttgcccatgtatttgagagttttttgaaaattattaggcagaaagaaaagaatgtttttctgctcatgcaacagggaactgtgaaaaatcttttaggagggttcttgagtattttaacacaggatgattctgattttcaagcatgccagagagtattggtggatcttttggtatctttgatgagttcaagaacatgttcagaagagctaacccttcttttgagaatatttctggagaaatctccttgtacaaaaattcttcttctgggtattctgaaaattattgaaagtgatactactatgagcccttcacagtatctaaccttccctttactgcacgctccaaatttaagcaacggtgtttcatcacaaaagtatcctgggattttaaacagtaaggccatgggtttattgagaagagcacgagtttcacggagcaagaaagaggctgatagagagagttttccccatcggctgctttcatcttggcacatagccccagtccacctgccgttgctggggcaaaactgctggccacacctatcagaaggtttcagtgtttccctgtggtttaatgtggagtgtatccatgaagctgagagtactacagaaaaaggaaagaagataaagaaaagaaacaaatcattaattttaccagatagcagttttgatggtacagagagcgacagaccagaaggtgcagagtacataaatcctggtgaaagactcatagaagaaggatgtattcatataatttcactgggatccaaagcgttgatgatccaagtgtgggctgatccccacaatgccactcttatctttcgtgtgtgcatggattcaaatgatgacatgaaagctgttttactagcacaggttgaatcacaggagaatattttcctcccaagcaaatggcaacatttagtactcacctacttacagcagccccaagggaaaaggaggattcatgggaaaatctccatatgggtctctggacagaggaagcctgatgttactttggattttatgcttccaagaaaaacaagtttgtcatctgatagcaataaaacattttgcatgattggccattgtttatcatcccaagaagagtttttgcagttggctggaaaatgggacctgggaaatttgcttctcttcaacggagctaaggttggttcacaagaggccttttatctgtatgcttgtggacccaaccatacatctgtaatgccatgtaagtatggcaagccagtcaatgactactccaaatatattaataaagaaattttgcgatgtgaacaaatcagagaactttttatgaccaagaaagatgtggatattggtctcttaattgaaagtctttcagttgtttatacaacttactgtcctgctcagtataccatctatgaaccagtgattagacttaaaggtcaaatgaaaacccaactctctcaaagacccttcagctcaaaagaagttcagagcatcttattagaacctcatcatctaaagaatctccaacctactgaatataaaactattcaaggcattctgcacgaaattggtggaactggcatatttgtttttctctttgccagggttgttgaactcagtagctgtgaagaaactcaagcattagcactgcgagttatactctcattaattaaatacaaccaacaaagagtacatgaattagaaaattgtaatggactttctatgattcatcaggtgttgatcaaacaaaaatgcattgttgggttttacattttgaagacccttcttgaaggatgctgtggtgaagatattatttatatgaatgagaatggagagtttaagttggatgtagactctaatgctataatccaagatgttaagctgttagaggaactattgcttgactggaagatatggagtaaagcagagcaaggtgtttgggaaactttgctagcagctctagaagtcctcatcagagcagatcaccaccagcagatgtttaatattaagcagttattgaaagctcaagtggttcatcactttctactgacttgtcaggttttgcaggaatacaaagaggggcaactcacacccatgccccgagaggtttgtagatcatttgtgaaaattatagcagaagtccttggatctcctccagatttggaattattgacaattatcttcaatttccttttagcagttcaccctcctactaatacttacgtttgtcacaatcccacgaacttctacttttctttgcacatagatggcaagatctttcaggagaaagtgcggtcaatcatgtacctgaggcattccagcagtggaggaaggtcccttatgagccctggatttatggtaataagcccatctggttttactgcttcaccatatgaaggagagaattcctctaatattattccacaacagatggccgcccatatgctgcgttctagaagcctaccagcattccctacttcttcactactaacgcaatcacaaaaactgactggaagtttgggttgtagtatcgacaggttacaaaatattgcagatacttatgttgccacccaatcaaagaaacaaaattctttggggagttccgacacactgaaaaaaggcaaagaggacgcattcatcagtagctgtgagtctgcaaaaactgtttgtgaaatggaagctgtcctctcagcccaggtctctgtcagtgatgtcccaaagggagtgctgggatttccagtggtcaaagcagatcataaacagttgggagcagaacccaggtcagaagatgacagtcctggggatgagtcctgcccacgccgacctgattacctaaagggattggcctccttccagcgaagccacagcactattgcaagccttgggctagcttttccttcacagaacggatctgcagctgttggccgttggccaagtcttgttgatagaaacactgatgattgggaaaactttgcctattctcttggttatgagccaaattacaaccgaactgcaagtgctcacagtgtaactgaagactgtttggtacctatatgctgtggattatatgaactcctaagtggggttcttcttatcctgcctgatgttttgcttgaagatgtgatggacaagcttattcaagcagatacacttttggtcctcgttaaccacccatcaccagctatacaacaaggtgttattaaactattagatgcatattttgctagagcatctaaggaacaaaaagataaatttctgaagaatcgtggattttccttgctagccaaccagttgtatcttcatcgaggaactcaagaattgttagaatgcttcatcgaaatgttctttggtcgacatattggccttgatgaagaatttgatctggaagatgtgagaaacatgggattgtttcagaagtggtctgtcattcctattctgggactaatagagacctctctatatgacaacatactcttgcataatgctcttttacttcttctccaaattttaaattcttgttctaaggtagcagatatgttgctggataatggtctactctatgtgttatgtaatacagtagcagccctgaatggattagaaaagaacattcccatgagtgaatataaattgcttgcttgtgatatacagcaacttttcatagcagttacaattcatgcttgcagttcctcaggctcacaatattttagggttattgaagaccttattgtaatgcttggatatcttcaaaatagcaaaaacaagaggacacaaaatatggctgttgcactacagcttagagttctccaggctgctatggaatttataaggaccaccgcaaatcatgactctgaaaacctcacagattcactccagtcaccttctgctccccatcatgcagtagttcaaaagcggaaaagcattgctggtcctcgaaaatttccccttgctcaaactgaatcgcttctgatgaaaatgcgttcagtggcaaatgatgagcttcatgtgatgatgcaacggagaatgagccaagagaaccctagccaagcaactgaaacggaacttgcgcagagactacagaggctcactgttttagcagtcaacaggattatttatcaagaatttaattcagacattattgacattttgagaactccagaaaatgtaactcaaagcaagacctcagttttccagaccgaaatttctgaggaaaatattcatcatgaacagtcttctgttttcaatccatttcagaaagaaatttttacatatctggtagaaggattcaaagtatctattggttcaagtaaagccagtggttccaagcagcaatggactaaaattctgtggtcttgtaaggagaccttccgaatgcagcttgggagactactagtgcatattttgtcgccagcccacgctgcacaagagagaaagcaaatttttgaaatagttcatgaaccaaatcatcaggaaatactacgagactgtctcagcccatccctacaacatggagccaagttagttttgtatttgtcagagttgatacataatcaccaaggtgaattgactgaagaagagctaggcacagcagaactgcttatgaatgctttgaagttatgtggtcacaagtgcatccctcccagtgcatcaacaaaagcagaccttattaaaatgatcaaagaggaacaaaagaaatatgaaactgaagaaggagtgaataaagctgcttggcagaaaacagttaacaataatcaacaaagtctctttcagcgtctggattcaaaatcaaaggatatatctaaaatagctgcagatatcacccaggcagtgtctctctcccaaggaaatgagagaaaaaaggtgatccagcatattagaggaatgtataaagtagatttgagtgccagcagacattggcaggaacttattcagcagctgacacatgatagagcagtatggtatgaccccatctactatccaacctcatggcagttggatccaacagaagggccaaatcgagagaggagacgtttacagagatgttatttaactattccaaataagtatctccttagggatagacagaaatcagaagatgttgtcaaaccaccactctcttacctgtttgaagacaaaactcattcttctttctcttctactgtcaaagacaaagctgcaagtgaatctataagagtgaatcgaagatgcatcagtgttgcaccatctagagagacagctggtgaattgttactaggtaaatgtggaatgtattttgtggaagataatgcttctgatacagttgaaagttcgagccttcagggagagttggaaccagcatcattttcctggacatatgaagaaattaaagaagttcacaagcgttggtggcaattgagagataatgctgtagaaatctttctaacaaatggcagaacactcctgttggcatttgataacaccaaggttcgtgatgatgtataccacaatatactcacaaataacctccctaatcttctggaatatggtaacatcaccgctctgacaaatttatggtatactgggcaaattactaattttgaatatttgactcacttaaacaaacatgctggccgatccttcaatgatctcatgcagtatcctgtgttcccatttatacttgctgactacgttagtgagacacttgacctcaatgatctgttgatatacagaaatctctctaaacctatagctgttcagtataaagaaaaagaagatcgttatgtggacacatacaagtacttggaggaagagtaccgcaaaggagccagagaagatgaccccatgcctcccgtgcagccctatcactatggctcccactattccaatagcggcactgtgcttcacttcctggtcaggatgcctcctttcactaaaatgtttttagcctatcaagatcaaagttttgacattccagacagaacttttcattctacaaatacaacttggcgactctcatcttttgaatctatgactgatgtgaaagaacttatcccagagtttttctatcttccagagttcctagttaaccgtgaaggttttgattttggtgtgcgtcagaatggtgaacgggttaatcacgtcaaccttcccccttgggcgcgtaatgatcctcgtctttttatcctcatccatcggcaggctctagagtctgactacgtgtcgcagaacatctgtcagtggattgacttggtgtttgggtataagcaaaaggggaaggcttctgttcaagcgatcaatgtttttcatcctgctacatattttggaatggatgtctctgcagttgaagatccagttcagagacgagcgctagaaaccatgataaaaacctacgggcagactccccgtcagctgttccacatggcccatgtgagcagacctggagccaagctcaatattgaaggagagcttccagctgctgtggggttgctagtgcagtttgctttcagggagacccgagaacaggtcaaagaaatcacctatccgagtcctttgtcatggataaaaggcttgaaatggggggaatacgtgggttcccccagtgctccagtacctgtggtctgcttcagccagccccacggagaaagatttggctctctccaggctctgcccaccagagcaatctgtggtttgtcacggaatttctgtcttgtgatgacatatagcaaggaacaaggtgtgagaagcatgaacagtacggacattcagtggtcagccatcctgagctggggatatgctgataatattttaaggttgaagagtaaacaaagtgagcctccagtaaactttattcaaagttcacaacagtaccaggtgactagttgtgcttgggtgcctgacagttgccagctgtttactggaagcaaatgcggtgtcatcacagcctacacaaacagatttacaagcagcacgccatcagaaatagaaatggagactcaaatacatctctatggtcacacagaagagataaccagcttatttgtttgcaaaccatacagtatactgataagtgtgagcagagacggaacctgcatcatatgggatttaaacaggttatgctatgtacaaagtctggcgggacacaaaagccctgtcacagctgtctctgccagtgaaacctcaggtgatattgctactgtgtgtgattcagctggcggaggcagtgacctcagactctggacggtgaacggggatctcgttggacatgtccactgcagggagatcatctgttccgtggctttctccaaccagcctgagggagtatctatcaatgtaatcgctgggggattagaaaatggaattgtaaggttatggagcacatgggacttaaagcctgtgagagaaattacatttcccaaatcaaataagcccatcatcagccttacattttcttgtgatggccaccatttgtacacagcaaacagtgatgggaccgtgattgcctggtgtcggaaggaccagcagcgcttgaaacagccaatgttctattccttccttagcagctatgcagccgggtgaatgcgaatgaacttcacgttctccaaagcactttaactccaaactagatttgttgacttcaccagttttaggaggttgaacctaaagaaatggatgactggacaaaccatccaaataatgataaagtctattcatctgcacaaaattctgaagagtcacatgatcctaagaggaaagttctgttctattttagtgataatctggaagattgtgtcaatatgcactagccaacaagttttaagcctcgcatggtacattaaaatgatattcttaaaattttttcccaccaaggtattccaaagaaaatattaaggtctcccctttttctatgattccaaaaggaccagtagaatttaaattggttggttgatngtttatataaaacacactaaaattatattttaaaagtttantgccntgaaatactcctcccaccacacacacatgctccaaaagaggaaagaaaaaaagataatttttaggacttgataattgctttctttgagaagcaaattattcagtaggtgcctctgtaccaaatattttatggaatatctaaatactaaaataaactatgaatgaatctcaaaattaggcagtttttgccagttgctttcttagctcaaaggagaaccagaatttttttgacagccacaaacaagaatacaggtatcttggatttcagacacattctgtttcttcataaaaattttacttaaaatctgtaacgctagatattgactatccttagttgagtcactgaggtttaaacacaatggtaagtcttaaagtctgctatttacagagcattgaatctgtaccaatttgcaatagaaagccttcagtatgcaagaagtttgcatgggtattaagaacacagcctaaataaggcatttgatctaatctgcaggaagaattttcttccccaaaacagaattataaaagcttactttaaacaggaggcagaataattcttttaggaaaccatttcattctgtttctactaacctataccatctgagaattcctaaacatcttggagccgtctgtctctcccatatgatggctgtctgtatatttttacttggggtgctgctttattggctttgaaaacactgtcagataagctcagtaatatgttaccatgggataaaaatatgtatccctgcctaagaataacttgtgcatttgttatggaaatttaattcatatggtgtttacagtactacttttgtaacttccagactttctaaaacattctgcttaaaaaccatataaaatataattccaaagtctctgctgtcaagatagattcgagagaaagcacgtggccatgtatgctttaaccttaaactgcatacacatgtagtgatacctaggctgcatttagatcaccgtgtgctcaggccaggtgtgaatcctgaggtccatggaggtgcagagatgagattactcctattcacgttgaagtgatttgctttgttaacaaaaaattgcagctattgtctagctttcatttttttactgagaactttaaattagtcccctattagaatagggttgctactcatctttttttaaaaaccgaatttcatcatttatctaaagagaaaatatgcagaataactggtcttgttaagagtgcaatattatatttttatgtaaaaataaaaattaatttggggggattatttattcagcatgaaacctaatatgtatatgtttgaaatacttcataatgtgcatgttgtagcaaacatttctgtaaattatcacaagctctgttacctttatatacgctgcctcttcaatttggaaataaatttcataaaaaaaaaaaaaaaaaaaaaaaaa

SEQ ID NO: 736 - protein, 2000 aa, Homo sapien
MSTDSNSLAREFLTDVNRLCNAVVQRVEAREEEEEETHMATLGQYLVHGRGFLLLTKLNSIIDQALTCREELLTLLLSLLPLVWKIPVQEEKATDFNLPLSADIILTKEKNSSSQRSTQEKLHLEGSALSSQVSAKVNVFRKSRRQRKITHRYSVRDARKTQLSTSDSEANSDEKGIAMNKHRRPHLLHHFLTSFPKQDHPKAKLDRLATKEQTPPDAMALENSREIIPRQGSNTDILSEPAALSVISNMNNSPFDLCHVLLSLLEKVCKFDVTLNHNSPLAASVVPTLTEFLAGFGDCCSLSDNLESRVVSAGWTEEPVALIQRMLFRTVLHLLSVDVSTAEMMPENLRKNLTELLRAALKIRICLEKQPDPFAPRQKKTLQEVQEDFVFSKYRHRALLLPELLEGVLQILICCLQSAASNPFYFSQAMDLVQEFIQHHGFNLFETAVLQMEWLVLRDGVPPEASEHLKALINSVMKIMSTVKKVKSEQLHHSMCTRKRHRRCEYSHFMHHHRDLSGLLVSAFKNQVSKNPFEETADGDVYYPERCCCIAVCAHQCLRLLQQASLSSTCVQILSGVHNIGICCCMDPKSVIIPLLHAFKLPALKNFQQHILNILNKLILDQLGGAEISPKIKKAACNICTVDSDQLAQLEETLQGNLCDAELSSSLSSPSYRFQGILPSSGSEDLLWKWDALKAYQNFVFEEDRLHSIQIANHICNLIQKGNIVVQWKLYNYIFNPVLQRGVELAHHCQHLSVTSAQSHVCSHHNQCLPQDVLQIYVKTLPILLKSRVIRDLFLSCNGVSQIIELNCLNGIRSHSLKAFETLIISLGEQQKDASVPDIDGIDIEQKELSSVHVGTSFHHQQAYSDSPQSLSKFYAGLKEAYPKRRKTVNQDVHINTINLFLCVAFLCVSKEAESDRESANDSEDTSGYDSTASEPLSHMLPCISLESLVLPSPEHMHQAADIWSMCRWIYMLSSVFQKQFYRLGGFRVCHKLIFMIIQKLFRSHKEEQGKKEGDTSVNENQDLNRISQPKRTMKEDLLSLAIKSDPIPSELGSLKKSADSLGKLELQHISSINVEEVSATEAAPEEAKLFTSQESETSLQSIRLLEALLAICLHGARTSQQKMELELPNQNLSVESILFEMRDHLSQSKVIETQLAKPLFDALLRVALGNYSADFEHNDAMTEKSHQSAEELSSQPGDFSEEAEDSQCCSFKLLVEEEGYEADSESNPEDGETQDDGVDLKSETEGFSASSSPNDLLENLTQGEIIYPEICMLELNLLSASKAKLDVLAHVFESFLKIIRQKEKNVFLLMQQGTVKNLLGGFLSILTQDDSDFQACQRVLVDLLVSLMSSRTCSEELTLLLRIFLEKSPCTKILLLGILKIIESDTTMSPSQYLTFPLLHAPNLSNGVSSQKYPGILNSKAMGLLRRARVSRSKKEADRESFPHRLLSSWHIAPVHLPLLGQNCWPHLSEGFSVSLWFNVECIHEAESTTEKGKKIKKRNKSLILPDSSFDGTESDRPEGAEYINPGERLIEEGCIHIISLGSKALMIQVWADPHNATLIFRVCMDSNDDMKAVLLAQVESQENIFLPSKWQHLVLTYLQQPQGKRRIHGKISIWVSGQRKPDVTLDFMLPRKTSLSSDSNKTFCMIGHCLSSQEEFLQLAGKWDLGNLLLFNGAKVGSQEAFYLYACGPNHTSVMPCKYGKPVNDYSKYINKEILRCEQIRELFMTKKDVDIGLLIESLSVVYTTYCPAQYTIYEPVIRLKGQMKTQLSQRPFSSKEVQSILLEPHHLKNLQPTEYKTIQGILHEIGGTGIFVFLFARVVELSSCEETQALALRVILSLIKYNQQRVHELENCNGLSMIHQVLIKQKCIVGFYILKTLLEGCCGEDIIYMNENGEFKLDVDSNAIIQDVKLLEELLLDWKIWSKAEQGVWETLLAALEVLIRADHHQQMFNIKQLLKAQVVHHFLLTCQVLQEYKEGQLTPMPREVCRSFVKIIAEVL

SEQ ID NO: 737 - DNA, 4157 bp, Homo sapien
ctgagccgcatctgcaatagcacacttgcccggccacctgctgccgtgagcctttgctgctgaagcccctggggtcgcctctacctgatgaggatgtgcacccccattagggggctgctcatggcccttgcagtgatgtttgggacagcgatggcatttgcacccataccccggatcacctgggagcacagagaggtgcacctggtgcagtttcatgagccagacatctacaactactcagccttgctgctgagcgaggacaaggacaccttgtacataggtgcccgggaggcggtcttcgctgtgaacgcactcaacatctccgagaagcagcatgaggtgtattggaaggtctcagaagacaaaaaagcaaaatgtgcagaaaaggggaaatcaaaacagacagagtgcctcaactacatccgggtgctgcagccactcagcgccacttccctttacgtgtgtgggaccaacgcattccagccggcctgtgaccacctgaacttaacatcctttaagtttctggggaaaaatgaagatggcaaaggaagatgtccctttgacccagcacacagctacacatccgtcatggttgatggagaactttattcggggacgtcgtataattttttgggaagtgaacccatcatctcccgaaattcttcccacagtcctctgaggacagaatatgcaatcccttggctgaacgagcctagtttcgtgtttgctgacgtgatccgaaaaagcccagacagccccgacggcgaggatgacagggtctacttcttcttcacggaggtgtctgtggagtatgagtttgtgttcagggtgctgatcccacggatagcaagagtgtgcaagggggaccagggcggcctgaggaccttgcagaagaaatggacctccttcctgaaagcccgactcatctgctcccggccagacagcggcttggtcttcaatgtgctgcgggatgtcttcgtgctcaggtccccgggcctgaaggtgcctgtgttctatgcactcttcaccccacagctgaacaacgtggggctgtcggcagtgtgcgcctacaacctgtccacagccgaggaggtcttctcccacgggaagtacatgcagagcaccacagtggagcagtcccacaccaagtgggtgcgctataatggcccggtacccaagccgcggcctggagcgtgcatcgacagcgaggcacgggccgccaactacaccagctccttgaatttgccagacaagacgctgcagttcgttaaagaccaccctttgatggatgactcggtaaccccaatagacaacaggcccaggttaatcaagaaagatgtgaactacacccagatcgtggtggaccggacccaggccctggatgggactgtctatgatgtcatgtttgtcagcacagaccggggagctctgcacaaagccatcagcctcgagcacgctgttcacatcatcgaggagacccagctcttccaggactttgagccagtccagaccctgctgctgtcttcaaagaagggcaacaggtttgtctatgctggctctaactcgggcgtggtccaggccccgctggccttctgtgggaagcacggcacctgcgaggactgtgtgctggcgcgggacccctactgcgcctggagcccgcccacagcgacctgcgtggctctgcaccagaccgagagccccagcaggggtttgattcaggagatgagcggcgatgcttctgtgtgcccggataaaagtaaaggaagttaccggcagcattttttcaagcacggtggcacagcggaactgaaatgctcccaaaaatccaacctggcccgggtcttttggaagttccagaatggcgtgttgaaggccgagagccccaagtacggtcttatgggcagaaaaaacttgctcatcttcaacttgtcagaaggagacagtggggtgtaccagtgcctgtcagaggagagggttaagaacaaaacggtcttccaagtggtcgccaagcacgtcctggaagtgaaggtggttccaaagcccgtagtggcccccaccttgtcagttgttcagacagaaggtagtaggattgccaccaaagtgttggtggcatccacccaagggtcttctcccccaaccccagccgtgcaggccacctcctccggggccatcacccttcctcccaagcctgcgcccaccggcacatcctgcgaaccaaagatcgtcatcaacacggtcccccagctccactcggagaaaaccatgtatcttaagtccagcgacaaccgcctcctcatgtccctcttcctcttcttctttgttctcttcctctgcctctttttctacaactgctataagggatacctgcccagacagtgcttgaaattccgctcggccctactaattgggaagaagaagcccaagtcagatttctgtgaccgtgagcagagcctgaaggagacgttagtagagccagggagcttctcccagcagaatggggagcaccccaagccagccctggacaccggctatgagaccgagcaagacaccatcaccagcaaagtccccacggatagggaggactcacagaggatcgacgacctttctgccagggacaagccctttgacgtcaagtgtgagctgaagttcgctgactcagacgcagatggagactgaggccggctgtgcatccccgctggtgcctcggctgcgacgtgtccaggcgtggagagttttgtgtttctcctgttcagtatccgagtctcgtgcagtgctgcgtaggttagcccgcatcgtgcagacaacctcagtcctcttgtctattttctcttgggttgagcctgtgacttggtttctctttgtccttttggaaaaatgacaagcattgcatcccagtcttgtgttccgaagtcagtcggagtacttgaagaaggcccacgggcggcacggagttcctgagccctttctgtagtgggggaaaggtggctggacctctgttggctgagaagagcatcccttcagcttcccctccccgtagcagccactaaaagattatttaattccagattggaaatgacattttagtttatcagattggtaacttatcgcctgttgtccagattggcacgaaccttttcttccacttaattatttttttaggattttgctttgattgtgtttatgtcatgggtcatttttttttagttacagaagcagttgtgttaatatttagaagaagatgtatatcttccagattttgttatatatttggcataaaatacggcttacgttgcttaagattctcagggataaacttccttttgctaaatgcattctttctgcttttagaaatgtagacataaacactccccggagcccactcaccttttttctttttctttttttttttttaactttattccttgagggaagcattgtttttggagagattttctttctgtacttcgttttacttttctttttttttaacttttactctctcgaagaagaggaccttcccacatccacgaggtgggttttgagcaagggaaggtagcctggatgagctgagtggagccaggctggcccagagctgagatgggagtgcggtacaatctggagcccacagctgtcggtcagaacctcctgtgagacagatggaaccttcacaagggcgcctttggttctctgaacatctcctttctcttcttgcttcaattgcttacccactgcctgcccagactttctatccagcctcactgagctgcccactactggaagggaactgggcctcggtggccggggccgcgagctgtgaccacagcaccctcaagcatacggcgctgttcctgccactgtcctgaagatgtgaatgggtggtacgatttcaacactggttaatttcacactccatctccccgctttgtaaatacccatcgggaagagactttttttccatggtgaagagcaataaactctggatgtttgtgcgcgtgtgtggacagtcttatcttccagcatgataggatttgaccattttggtgtaaacatttgtgttttataagatttaccttgtttttatttttctactttgaattgtatacatttggaaagtacccaaataaatgagaagcttctatccttaaaaaaaaaaaaaa

SEQ ID NO: 738 - protein, 862 aa, Homo sapien
MRMCTPIRGLLMALAVMFGTAMAFAPIPRITWEHREVHLVQFHEPDIYNYSALLLSEDKDTLYIGAREAVFAVNALNISEKQHEVYWKVSEDKKAKCAEKGKSKQTECLNYIRVLQPLSATSLYVCGTNAFQPACDHLNLTSFKFLGKNEDGKGRCPFDPAHSYTSVMVDGELYSGTSYNFLGSEPIISRNSSHSPLRTEYAIPWLNEPSFVFADVIRKSPDSPDGEDDRVYFFFTEVSVEYEFVFRVLIPRIARVCKGDQGGLRTLQKKWTSFLKARLICSRPDSGLVFNVLRDVFVLRSPGLKVPVFYALFTPQLNNVGLSAVCAYNLSTAEEVFSHGKYMQSTTVEQSHTKWVRYNGPVPKPRPGACIDSEARAANYTSSLNLPDKTLQFVKDHPLMDDSVTPIDNRPRLIKKDVNYTQIVVDRTQALDGTVYDVMFVSTDRGALHKAISLEHAVHIIEETQLFQDFEPVQTLLLSSKKGNRFVYAGSNSGVVQAPLAFCGKHGTCEDCVLARDPYCAWSPPTATCVALHQTESPSRGLIQEMSGDASVCPDKSKGSYRQHFFKHGGTAELKCSQKSNLARVFWKFQNGVLKAESPKYGLMGRKNLLIFNLSEGDSGVYQCLSEERVKNKTVFQVVAKHVLEVKVVPKPVVAPTLSVVQTEGSRIATKVLVASTQGSSPPTPAVQATSSGAITLPPKPAPTGTSCEPKIVINTVPQLHSEKTMYLKSSDNRLLMSLFLFFFVLFLCLFFYNCYKGYLPRQCLKFRSALLIGKKKPKSDFCDREQSLKETLVEPGSFSQQNGEHPKPALDTGYETEQDTITSKVPTDREDSQRIDDLSARDKPFDVKCELKFADSDADGD

SEQ ID NO: 739 - DNA, 576 bp, Homo sapien
aaacactctgtgtggctcctcggctttgggacagagtgcaagacgatgacttgcaaaatgtcgcagctggaacgcaacatagagaccatcatcaacaccttccaccaatactctgtgaagctggggcacccagacaccctgaaccagggggaattcaaagagctggtgcgaaaagatctgcaaaattttctcaagaaggagaataagaatgaaaaggtcatagaacacatcatggaggacctggacacaaatgcagacaagcagctgagcttcgaggagttcatcatgctgatggcgaggctaacctgggcctcccacgagaagatgcacgagggtgacgagggccctggccaccaccataagccaggcctcggggagggcaccccctaagaccacagtggccaagatcacagtggccacggccatggccacagtcatggtggccacggccacaggccactaatcaggaggccaggccaccctgcctctacccaaccagggccccggggcctgttatgtcaaactgtcttggctgtggggctaggggctggggccaaataaagtctcttcctccaa

SEQ ID NO: 740 - protein, 114 aa, Homo sapien
MTCKMSQLERNIETIINTFHQYSVKLGHPDTLNQGEFKELVRKDLQNFLKKENKNEKVIEHIMEDLDTNADKQLSFEEFIMLMARLTWASHEKMHEGDEGPGHHHKPGLGEGTP

SEQ ID NO: 741 - DNA, 4859 bp, Homo sapien
cacgttgggtgacataatggggtttttttaattatagattcacactgcatttattcatcacccctgtcctctcatccataactcaaatttactaccagcaacacaaaatacaaagatgtgtccagtttcactacagctcttcgcgtttacaagtgtcgagcgcttgctttcggaacgcccttgtgattggccgagccaatgccagtgacatcaaccaacttacttttgattggaaggctggttgctgggactgtagcgtttgcaggaagtcacttaactgtttgggagctggaaaaccgaagctgaagttctcttttgccataggaacgagcgcaactgactaggaaagatgtgtcccaaagctccgcaagctggaacgtgagccaggaggcccggaccggccacgggaccgcgaggcactccgaaagtgtgcggctgccccttccctgcctcccagctgttacccttttaaatgtcagtgttcgaggctgtaggggtagcacgaggcagcgaaacggaacagtcggattggccgcacgcctcagttctagacgcacctctccaccgaagccgttctgactggcagggggagaaagtaaacagagttgaatcaccctccccactggccaattggagggggtttggtttgtgacgtgatgggattctgcgaaattgttactgagcaagagaatgccggaacgtgcggaccggccggagcaggggttcagaagccgtcagtggactcgggaaaaagtgtctcttagacctggcgctcggcggggccctcgccacccgcgtcggggtgatcgggtgaatgtcctggggctttggctcgacggcgaggcggccgagggcgtgcacctctcttgcagtttcctctcccagcgcctcgggggcgttttcagtcgaataaacttgcgaccgccacgtgtggcatctttccaagggagccggctcagaggggccggcgcgcccgtcgggggatcgcggccggcgcggggcaggggcggcggctagaggcggcggcgcggcggagcccggggccgtggatgctgcgtgcggaggcgctgccggttacgtaaagatgaggggctgaggtcgcctcggcgctcctgcgagtcggaagcgccccgcgcccccgcccccttggccgccgcgccgtgccgggcgggcgggtcgtcgtccgaggccagggagggcgagccgaacctccgcagccaccgccaagtttgtccgcgccgcctgggctgccgtcgcccgcaccatgtccgcggccgcctacatggacttcgtggctgcccagtgtctggtttccatttcgaaccgcgctgcggtgccggagcatggggtcgctccggacgccgagcggctgcgactacctgagcgcgaggtgaccaaggagcacggtgacccgggggacacctggaaggattactgcacactggtcaccatcgccaagagcttgttggacctgaacaagtaccgacccatccagaccccctccgtgtgcagcgacagtctggaaagtccagatgaggatatgggatccgacagcgacgtgaccaccgaatctgggtcgagtccttcccacagcccggaggagagacaggatcctggcagcgcgcccagcccgctctccctcctccatcctggagtggctgcgaaggggaaacacgcctccgaaaagaggcacaagtgcccctacagtggctgtgggaaagtctatggaaaatcctcccatctcaaagcccattacagagtgcatacaggtgaacggcccttcccctgcacgtggccagactgccttaaaaagttctcccgctcagacgagctgacccgccactaccggacccacactggggaaaagcagttccgctgtccgctgtgtgagaagcgcttcatgaggagtgaccacctcacaaagcacgcccggcggcacaccgagttccaccccagcatgatcaagcgatcgaaaaaggcgctggccaacgctttgtgaggtgctgcccgtggaagccagggagggatggaccccgaaaggacaaaagtactcccaggaaacagacgcgtgaaaactgagccccagaagaggcacacttgacggcacaggaagtcactgctctttggtcaatattctgattttcctctccctgcattgtttttaaaaagcacattgtagcctaagatcaaagtcaacaacactcggtccccttgaagaggcaactctctgaacccgtctctgactgttggagggaaggcaaatgcttttgggttttttggtttttgtttttgtttttttttctccttttatttttttgcgggggagggtagggagtgggtgggggggagggggtaaggccaagactgggtagattttaaagattcaacactggtgtacatatgtccgctgggtgagttgacctgtggcctcgcacagtgattctaggccctttatgcttgctgtctctcagaattgttttcttaccttttaatgtaatgacgagtgtgcttcagtttgtttagcaaaaccactctcttgaatcacgttaacttttgagattaaaaaaaaaaacgccatagcacagctgtctttatgcaagcaagagcacatctactccagcatgatctgtcatctaaagacttgaaaacaaaaaacagttacttatagtcaatgggtaagcagagtctgaatttatactaatcaagacaaacctttgaaaggttacactaagtacagaacttttaaaccttgctttgtatgagttgtactttttgaacataagctgcacttttattttctaatgcagaggatgaataagttaaatacatgctttgaggatagaagcagatgttctgtttggcaccacgttataatctgcttattttacaatatacacgtttccctaagaaatcatgcgcagagatgtgagggcagaatatacacaacagatgctgaaggagaaggagggtagtgttttgcaaaagaaaaagaaaagaaccaacagaattttaactctattaacttttccaaattttcctatgcttttagttaacatcattattgtatcctaatgccactaggggagagagcttttgactctgttgggttttatttgaatgtgtgcataacagtaatgagatctggaaacacctattttttggggaaaaaggtttgttggtctccttcctgtgttcctacaaaactcccactctcaggtgcaagagttatgtagaaggaaagggagctgaaataggaacagaaaaatcaacccctataactagtgaacaccaagggaaaataccacaatgatttcagaggagactctgcaaaatcgtcccttgtggagaatgcaggcaacatggaatactacgaatgaaatcacatcactgtatcttttacatcaatagcctcaccactaatatatcttgtatctaggtgtctataatggctgaaaccactacatccatctatgccatttacctgaaaacttaactgtggcctttatgaggccagaaaagtgaactgagttttgtagttaagacctcaaatgaggggagtcagcagtgatcatgggggaaatgtttacattttttttttcttcagaagtaacgctttctgatgattttatctgatatttaaaacagggagctatggtgcactctagtttatacttgcgctctgaaatgtgtaaacatagggtgcctacctatttcacctgacccatactcgtttctgattcagaatcagtgtgggctcctgcagtgggcgcgggtcacggctgactccaacttccaatacaacagccatcactagcacagtgtttttttgtttaaccaacgtagtgttattagtagttctataaagagaactgcttttaacattagggactgggagcagtccatgggataaaaaggaaagtgttttctcacgagaaaacatgtcaggaaaaataaagaacactttctacctctgtttcagatttttgaaacacttattttaaaccaaattttaatttctgtgtccaaaataagttttaaggacatctgttcttccatacgaaataggttaggctgcctatttctcactgagctcatggaatggttctgcttatgatactctgcacgctgccttttagtgagtgaggagtttggggttgcctagcacttgctaacttgtaaaaagtcatctttccctcacagaaagaaacgaaagaaagcaaagcaaagtcagtgaaagacaatctttatagtttcaggagtaaatctaaatgtggcttttgtcaagcacttagatggatataaatgcagcaacttgttttaaaaaaatgcacatttacttcccaaaaaagttgttacttgccttttcaagtgtgacaaactcacatttgatattctcttatatgttatagtaatgtaacgtataaactcaagcctttttattctttgtgattaaatcctgttttaaaatgtcacaaaacaggaaccagcattctaattagatttactatatcaagatatggttcaaataggactactagagttcattgaacactaaaactatgaaacaattactttttatattaaaaagaccatggatttaacttatgaaaatccaaatgcaggatagtaatttttgtttacttttttaaccaaactgaatttttgaaagactattgcaggtgtttaaaaagaaagaaaagttgttttatctaatactgtaagtagttgtcatattctggaaaatttaatagttttagagttaagatatctcctctctttggttagggaagaagaaagcccttcaccattgtggaatgatgccctggctttaaggtttagctccacatcatgcttctctt

SEQ ID NO: 742 - protein, 244 aa, Homo sapien
MSAAAYMDFVAAQCLVSISNRAAVPEHGVAPDAERLRLPEREVTKEHGDPGDTWKDYCTLVTIAKSLLDLNKYRPIQTPSVCSDSLESPDEDMGSDSDVTTESGSSPSHSPEERQDPGSAPSPLSLLHPGVAAKGKHASEKRHKCPYSGCGKVYGKSSHLKAHYRVHTGERPFPCTWPDCLKKFSRSDELTRHYRTHTGEKQFRCPLCEKRFMRSDHLTKHARRHTEFHPSMIKRSKKALANAL

SEQ ID NO: 743 - DNA, 1675 bp, Homo sapien
ggcacgagggatcccggatgtggatcaagttggtgggaagcgtgcggtgccgcagcaatggcggcgctcacaattgccacgggtactggcaattggttttcggctttggcgctcggggtgactcttctcaaatgccttctcatccccacataccattccacagattttgaagtacaccgaaactggcttgctatcactcacagtttgccaatatcacagtggtattatgaggcaacttcagagtggacgttggattacccccctttctttgcatggtttgagtatatcctgtcacatgttgccaaatattttgatcaagaaatgctgaatgtccataatttgaattactccagctcaaggaccttacttttccagagattttccgtcatctttatggatgtactctttgtgtatgctgtccgtgagtgctgtaaatgcattgatggaaaaaaagtgggtaaagaacttacagaaaagccaaaatttattctgtcggtattacttctgtggaacttcgggttattaattgtggaccatattcattttcagtacaatggctttttatttggattaatgctactctccattgcacgattatttcagaaaaggcatatggaaggagcatttctctttgctgttctcctacatttcaagcatatctacctctatgtagcaccagcttatggtgtatatctgctgcgatcctactgtttcactgcaaataaaccagatgggtctattcgatggaagagtttcagctttgttcgtgttatttccctgggactggttgttttcttagtttctgctctttcattgggtcctttcctggccttgaatcagctgcctcaagtcttttcccgactctttcctttcaagaggggcctctgtcatgcatattgggctccaaacttctgggctttgtacaatgctttggacaaagtgctgtctgtcatcggtttgaaattgaaatttcttgatcccaacaatattcccaaggcctcaatgacaagtggtttggttcagcagttccaacacacagtccttccctcagtgactcccttggcaaccctcatctgcacactgattgccatattgccctctattttctgtctttggtttaaaccccaagggcccagaggctttctccgatgtctaactctttgtgccttgagctcctttatgtttgggtggcatgttcatgaaaaagccatacttctagcaattctcccaatgagccttttgtctgtgggaaaagcaggagacgcttcgatttttctgattctgaccacaacaggacattattccctctttcctctgctcttcactgcaccagaacttcccattaaaatcttactcatgttactattcaccatatatagtatttcgtcactgaagactttattcagaaaagaaaaacctctttttaattggatggaaactttctacctgcttggcctggggcctctggaagtctgctgtgaatttgtattccctttcacctcctggaaggtgaagtaccccttcatccctttgttactaacctcagtgtattgtgcagtaggcgtcacatatgcttggttcaaactgtatgtttcagtattgattgactctgctattggcaagacaaagaaacaatgaataaaggaactgcttagaaaaaaaaaaaaaaaaaaaa

SEQ ID NO: 744 - protein, 526 aa, Homo sapien
MAALTIATGTGNWFSALALGVTLLKCLLIPTYHSTDFEVHRNWLAITHSLPISQWYYEATSEWTLDYPPFFAWFEYILSHVAKYFDQEMLNVHNLNYSSSRTLLFQRFSVIFMDVLFVYAVRECCKCIDGKKVGKELTEKPKFILSVLLLWNFGLLIVDHIHFQYNGFLFGLMLLSIARLFQKRHMEGAFLFAVLLHFKHIYLYVAPAYGVYLLRSYCFTANKPDGSIRWKSFSFVRVISLGLVVFLVSALSLGPFLALNQLPQVFSRLFPFKRGLCHAYWAPNFWALYNALDKVLSVIGLKLKFLDPNNIPKASMTSGLVQQFQHTVLPSVTPLATLICTLIAILPSIFCLWFKPQGPRGFLRCLTLCALSSFMFGWHVHEKAILLAILPMSLLSVGKAGDASIFLILTTTGHYSLFPLLFTAPELPIKILLMLLFTIYSISSLKTLFRKEKPLFNWMETFYLLGLGPLEVCCEFVFPFTSWKVKYPFIPLLLTSVYCAVGVTYAWFKLYVSVLIDSAIGKTKKQ

SEQ ID NO: 745 - DNA, 3549 bp, Homo sapien
cccctcttcctcctcctcaagggaaagctgcccacttctagctgccctgccatcccctttaaagggcgacttgctcagcgccaaaccgcggctccagccctctccagcctccggctcagccggctcatcagtcggtccgcgccttgcagctcctccagagggacgcgccccgagatggagagcaaagccctgctcgtgctgactctggccgtgtggctccagagtctgaccgcctcccgcggaggggtggccgccgccgaccaaagaagagattttatcgacatcgaaagtaaatttgccctaaggacccctgaagacacagctgaggacacttgccacctcattcccggagtagcagagtccgtggctacctgtcatttcaatcacagcagcaaaaccttcatggtgatccatggctggacggtaacaggaatgtatgagagttgggtgccaaaacttgtggccgccctgtacaagagagaaccagactccaatgtcattgtggtggactggctgtcacgggctcaggagcattacccagtgtccgcgggctacaccaaactggtgggacaggatgtggcccggtttatcaactggatggaggaggagtttaactaccctctggacaatgtccatctcttgggatacagccttggagcccatgctgctggcattgcaggaagtctgaccaataagaaagtcaacagaattactggcctcgatccagctggacctaactttgagtatgcagaagccccgagtcgtctttctcctgatgatgcagattttgtagacgtcttacacacattcaccagagggtcccctggtcgaagcattggaatccagaaaccagttgggcatgttgacatttacccgaatggaggtacttttcagccaggatgtaacattggagaagctatccgcgtgattgcagagagaggacttggagatgtggaccagctagtgaagtgctcccacgagcgctccattcatctcttcatcgactctctgttgaatgaagaaaatccaagtaaggcctacaggtgcagttccaaggaagcctttgagaaagggctctgcttgagttgtagaaagaaccgctgcaacaatctgggctatgagatcaataaagtcagagccaaaagaagcagcaaaatgtacctgaagactcgttctcagatgccctacaaagtcttccattaccaagtaaagattcatttttctgggactgagagtgaaacccataccaatcaggcctttgagatttctctgtatggcaccgtggccgagagtgagaacatcccattcactctgcctgaagtttccacaaataagacctactccttcctaatttacacagaggtagatattggagaactactcatgttgaagctcaaatggaagagtgattcatactttagctggtcagactggtggagcagtcccggcttcgccattcagaagatcagagtaaaagcaggagagactcagaaaaaggtgatcttctgttctagggagaaagtgtctcatttgcagaaaggaaaggcacctgcggtatttgtgaaatgccatgacaagtctctgaataagaagtcaggctgaaactgggcgaatctacagaacaaagaacggcatgtgaattctgtgaagaatgaagtggaggaagtaacttttacaaaacatacccagtgtttggggtgtttcaaaagtggattttcctgaatattaatcccagccctacccttgttagttattttaggagacagtctcaagcactaaaaagtggctaattcaatttatggggtatagtggccaaatagcacatcctccaacgttaaaagacagtggatcatgaaaagtgctgttttgtcctttgagaaagaaataattgtttgagcgcagagtaaaataaggctccttcatgtggcgtattgggccatagcctataattggttagaacctcctattttaattggaattctggatctttcggactgaggccttctcaaactttactctaagtctccaagaatacagaaaatgcttttccgcggcacgaatcagactcatctacacagcagtatgaatgatgttttagaatgattccctcttgctattggaatgtggtccagacgtcaaccaggaacatgtaacttggagagggacgaagaaagggtctgataaacacagaggttttaaacagtccctaccattggcctgcatcatgacaaagttacaaattcaaggagatataaaatctagatcaattaattcttaataggctttatcgtttattgcttaatccctctctcccccttcttttttgtctcaagattatattataataatgttctctgggtaggtgttgaaaatgagcctgtaatcctcagctgacacataatttgaatggtgcagaaaaaaaaaagataccgtaattttattattagattctccaaatgattttcatcaatttaaaatcattcaatatctgacagttactcttcagttttaggcttaccttggtcatgcttcagttgtacttccagtgcgtctcttttgttcctggctttgacatgaaaagataggtttgagttcaaattttgcattgtgtgagcttctacagattttagacaaggaccgtttttactaagtaaaagggtggagaggttcctggggtggattcctaagcagtgcttgtaaaccatcgcgtgcaatgagccagatggagtaccatgagggttgttatttgttgtttttaacaactaatcaagagtgagtgaacaactatttataaactagatctcctatttttcagaatgctcttctacgtataaatatgaaatgataaagatgtcaaatatctcagaggctatagctgggaacccgactgtgaaagtatgtgatatctgaacacatactagaaagctctgcatgtgtgttgtccttcagcataattcggaagggaaaacagtcgatcaagggatgtattggaacatgtcggagtagaaattgttcctgatgtgccagaacttcgaccctttctctgagagagatgatcgtgcctataaatagtaggaccaatgttgtgattaacatcatcaggcttggaatgaattctctctaaaaataaaatgatgtatgatttgttgttggcatcccctttattaattcattaaatttctggatttgggttgtgacccagggtgcattaacttaaaagattcactaaagcagcacatagcactgggaactctggctccgaaaaactttgttatatatatcaaggatgttctggctttacattttatttattagctgtaaatacatgtgtggatgtgtaaatggagcttgtacatattggaaaggtcattgtggctatctgcatttataaatgtgtggtgctaactgtatgtgtctttatcagtgatggtctcacagagccaactcactcttatgaaatgggctttaacaaaacaagaaagaaacgtacttaactgtgtgaagaaatggaatcagcttttaataaaattgacaacattttattaccac

SEQ ID NO: 746 - protein, 475 aa, Homo sapien
MESKALLVLTLAVWLQSLTASRGGVAAADQRRDFIDIESKFALRTPEDTAEDTCHLIPGVAESVATCHFNHSSKTFMVIHGWTVTGMYESWVPKLVAALYKREPDSNVIVVDWLSRAQEHYPVSAGYTKLVGQDVARFINWMEEEFNYPLDNVHLLGYSLGAHAAGIAGSLTNKKVNRITGLDPAGPNFEYAEAPSRLSPDDADFVDVLHTFTRGSPGRSIGIQKPVGHVDIYPNGGTFQPGCNIGEAIRVIAERGLGDVDQLVKCSHERSIHLFIDSLLNEENPSKAYRCSSKEAFEKGLCLSCRKNRCNNLGYEINKVRAKRSSKMYLKTRSQMPYKVFHYQVKIHFSGTESETHTNQAFEISLYGTVAESENIPFTLPEVSTNKTYSFLIYTEVDIGELLMLKLKWKSDSYFSWSDWWSSPGFAIQKIRVKAGETQKKVIFCSREKVSHLQKGKAPAVFVKCHDKSLNKKSG

SEQ ID NO: 747 - DNA, 3000 bp, Homo sapien
ggcgccgacccatgctggctgggaacgtgtctcccggtgacgcagccccgggtggggaacgtggtgcggcggcggcggcggcggcgactgtacgcgcctccgccgcccccgagaggacgcgccgtgcagcggctgagtggcggcggcggcgacggcaaacccggagctgccggccggcgcgcgggaggaggacgcgggtgcggtctaggaaacggagctgcgggcggaggctccatgttgggaagcggcgccgttcgtgcttgttagcgggaatccgggagccgcggggtgagctggcgggggccgggccctaagtgaagatggaggccccgctgcggcctgccgcggacatcctgaggcggaacccgcagcaggactacgaactcgtccagagggtcggcagcggcacctacggggacgtctataaggccagaaatgtacacacaggagagctggctgcagtaaaaatcattaaattggagcctggagatgatttttctttgattcaacaagaaatatttatggttaaagaatgtaaacattgtaacatcgttgcctactttgggagttatcttagtcgggaaaaactatggatttgtatggaatactgtggtggcggatcacttcaagatatttaccatgttactggaccattatcagaattgcaaatagcctatgtatgcagagaaaccttacagggtcttgcctatttgcatactaaaggcaaaatgcatagagatatcaaaggtgctaatattttattgacagaccatggcgatgtaaaattagctgactttggtgtggctgcaaaaataacagctaccattgcaaaacgaaaatctttcattggcaccccttactggatggccccagaagttgcagcagtagagaagaatggtggctacaaccaactctgtgatatctgggcagtaggaataacagcaattgaacttggagaacttcagccacctatgtttgatctccacccaatgagggctctcttcttaatgtcaaaaagtaattttcagcctccaaaactaaaggacaaaacaaaatggtcatcaacattccataattttgtcaaaatagcactaaccaaaaacccaaaaaaaagaccaactgctgaaagacttctgactcacacttttgttgcacagccaggtctctctagagccctagcagttgaactgttagacaaagtgaacaatccagataaccacgcacattacactgaagcagatgacgatgactttgagccccatgcaatcattcgtcataccattagatctacaaacaggaatgccagagctgaacggacagcttcagaaataaattttgacaaattacaatttgaacctcctctgagaaaagaaacagaagcacgagatgaaatgggattgtcatcagacccaaatttcatgttacagtggaatccttttgttgatggtgcaaatactggcaaatcaacctcaaaacgtgcaataccacctcccctacctcctaagccaaggataagcagttaccctgaagacaactttccggatgaagaaaaagcatcaaccataaaacattgtcctgattcagaaagcagagctccccaaattctcagaagacagagtagcccaagttgtgggcctgtggcagagacttcttctattggaaatggtgatggtatttcaaaactgatgagtgaaaatacagaaggatcagcacaagcaccacagttaccacgaaaaaaggacaaacgagacttccctaaaccagccatcaatggccttccacccaccccaaaagttctgatgggagcatgcttttcaaaagtttttgatggctgtcctttgaaaattaattgtgcaacatcctggatacatcctgatacaaaagatcagtacattatttttggaactgaagatggtatttacacactgaatctcaatgagctacatgaggcaacgatggaacagttatttccacggaagtgtacttggctgtatgttatcaataatactttaatgtcattatcagaaggaaaaacctttcagctctactctcacaatcttatagctttgtttgaacatgccaaaaaaccaggattagctgcccatattcaaactcacaggtttccagaccgaatactaccaagaaaattcgctttaacaacaaagattcctgatacaaaaggctgccacaaatgttgcatagtcagaaacccttacacgggacataaatacctctgtggagctttacagtctggaattgttttacttcagtggtatgagccaatgcagaaattcatgttgataaagcactttgattttcctttgccaagtcctttgaatgtttttgaaatgctggtgatacctgaacaggaataccctatggtctgtgtagctattagcaaaggcactgaatcgaatcaggtagttcagtttgagacaatcaatttgaactctgcatcttcatggtttacagaaattggtgcaggcagccagcagttagattccattcatgtaacacagttggagagagataccgttttagtgtgtttagacaaatttgtgaaaattgtaaatctacaaggaaaattaaaatcaagtaagaaactggcctctgagttaagttttgattttcgcattgaatctgtagtatgccttcaagacagtgtgttggctttctggaaacatgggatgcagggtaaaagcttcaagtcagatgaggttacccaggagatttcagatgaaacaagagttttccgcttattaggatcagacagggttgtcgttttggaaagtaggccaacagaaaatcctactgcacacagcaatctctacatcttggctggacatgaaaatagttactaagcaacagaaactgatctcaaatgacaggaaaatgaatatactccattgaaaggaaaaataaggaaattcaatacaaactgcactatgatttgctttaactattatgggttatattgcaaatgatctgtactttagggta

SEQ ID NO: 748 - protein, 846 aa, Homo sapien
MEAPLRPAADILRRNPQQDYELVQRVGSGTYGDVYKARNVHTGELAAVKIIKLEPGDDFSLIQQEIFMVKECKHCNIVAYFGSYLSREKLWICMEYCGGGSLQDIYHVTGPLSELQIAYVCRETLQGLAYLHTKGKMHRDIKGANILLTDHGDVKLADFGVAAKITATIAKRKSFIGTPYWMAPEVAAVEKNGGYNQLCDIWAVGITAIELGELQPPMFDLHPMRALFLMSKSNFQPPKLKDKTKWSSTFHNFVKIALTKNPKKRPTAERLLTHTFVAQPGLSRALAVELLDKVNNPDNHAHYTEADDDDFEPHAIIRHTIRSTNRNARAERTASEINFDKLQFEPPLRKETEARDEMGLSSDPNFMLQWNPFVDGANTGKSTSKRAIPPPLPPKPRISSYPEDNFPDEEKASTIKHCPDSESRAPQILRRQSSPSCGPVAETSSIGNGDGISKLMSENTEGSAQAPQLPRKKDKRDFPKPAINGLPPTPKVLMGACFSKVFDGCPLKINCATSWIHPDTKDQYIIFGTEDGIYTLNLNELHEATMEQLFPRKCTWLYVINNTLMSLSEGKTFQLYSHNLIALFEHAKKPGLAAHIQTHRFPDRILPRKFALTTKIPDTKGCHKCCIVRNPYTGHKYLCGALQSGIVLLQWYEPMQKFMLIKHFDFPLPSPLNVFEMLVIPEQEYPMVCVAISKGTESNQVVQFETINLNSASSWFTEIGAGSQQLDSIHVTQLERDTVLVCLDKFVKIVNLQGKLKSSKKLASELSFDFRIESVVCLQDSVLAFWKHGMQGKSFKSDEVTQEISDETRVFRLLGSDRVVVLESRPTENPTAHSNLYILAGHENSY

SEQ ID NO: 749 - DNA, 624 bp, Rattus norvegicus
cacctgctgccgcccgcgccatggctggcaaagcacacaggctgagcgctgaggagagggaccagctgctgccaaacctgagggctgtggggtggaatgagctggaaggccgtgatgccatcttcaagcagtttcatttcaaagacttcaacagggcctttgggttcatgacaagagtggccctgcaggctgagaaactggaccaccatcctgaatggtttaacgtgtacaacaaggtccacatcacgctgagcacccatgagtgtgccggcctttcagaacgggacataaacctggccagcttcatcgaacaagtagcagtgtccatgacatagaccctgcccttcctctttgaattcttccgggggaaggggtgactgaactgggagtccagggagggagctgaggagcccttaccctcccaccactcccctcccaagacccagccgccgccgttgagggctgagtccttgctgtgggatgtgccagtgtccccaccaacaccaggaatttagaccttttccctgcaccactctcttcatcctgggggctctgttacactaatttgaataaactctcccctttctttgcaacttcccagcaacaataatgattttcttgcca

SEQ ID NO: 750 - protein, 104 aa, Rattus norvegicus
MAGKAHRLSAEERDQLLPNLRAVGWNELEGRDAIFKQFHFKDFNRAFGFMTRVALQAEKLDHHPEWFNVYNKVHITLSTHECAGLSERDINLASFIEQVAVSMT

SEQ ID NO: 751 - DNA, 1280 bp, Homo sapien
tgccgcagcccccgcccgcccgcagagcttttgaaaggcggcgggaggcggcgagcgccatggccagtccgggctgcctgctgtgcgtgctgggcctgctactctgcggggcggcgagcctcgagctgtctagaccccacggcgacaccgccaagaagcccatcatcggaatattaatgcaaaaatgccgtaataaagtcatgaaaaactatggaagatactatattgctgcgtcctatgtaaagtacttggagtctgcaggtgcgagagttgtaccagtaaggctggatcttacagagaaagactatgaaatacttttcaaatctattaatggaatccttttccctggaggaagtgttgacctcagacgctcagattatgctaaagtggccaaaatattttataacttgtccatacagagttttgatgatggagactattttcctgtgtggggcacatgccttggatttgaagagctttcactgctgattagtggagagtgcttattaactgccacagatactgttgacgtggcaatgccgctgaacttcactggaggtcaattgcacagcagaatgttccagaattttcctactgagttgttgctgtcattagcagtagaacctctgactgccaatttccataagtggagcctctccgtgaagaattttacaatgaatgaaaagttaaagaagtttttcaatgtcttaactacaaatacagatggcaagattgagtttatttcaacaatggaaggatataagtatccagtatatggtgtccagtggcatccagagaaagcaccttatgagtggaagaatttggatggcatttcccatgcacctaatgctgtgaaaaccgcattttatttagcagagttttttgttaatgaagctcggaaaaacaaccatcattttaaatctgaatctgaagaggagaaagcattgatttatcagttcagtccaatttatactggaaatatttcttcatttcagcaatgttacatatttgattgaaagtcttcaatttgttaacagagcaaatttgaataattccatgattaaactgttagaataacttgctactcatggcaagattaggaagtcacagattcttttctataatgtgcctggctctgattcttcattatgtatgtgactatttatataacattagataattaaatagtgagacataaatagagtgctttttcatggaaaagccttcttatatctgaagattgaaaaataaatttactgaaatacaaaaaaaaaaaaaaa

SEQ ID NO: 752 - protein, 318 aa, Homo sapien
MASPGCLLCVLGLLLCGAASLELSRPHGDTAKKPIIGILMQKCRNKVMKNYGRYYIAASYVKYLESAGARVVPVRLDLTEKDYEILFKSINGILFPGGSVDLRRSDYAKVAKIFYNLSIQSFDDGDYFPVWGTCLGFEELSLLISGECLLTATDTVDVAMPLNFTGGQLHSRMFQNFPTELLLSLAVEPLTANFHKWSLSVKNFTMNEKLKKFFNVLTTNTDGKIEFISTMEGYKYPVYGVQWHPEKAPYEWKNLDGISHAPNAVKTAFYLAEFFVNEARKNNHHFKSESEEEKALIYQFSPIYTGNISSFQQCYIFD

SEQ ID NO: 753 - DNA, 2295 bp, Homo sapien
gaattccaactatggagacccaaatgtctcagaatgtatgtcccagaaacctgtggctgcttcaaccattgacagttttgctgctgctggcttctgcagacagtcaagctgcagctcccccaaaggctgtgctgaaacttgagcccccgtggatcaacgtgctccaggaggactctgtgactctgacatgccagggggctcgcagccctgagagcgactccattcagtggttccacaatgggaatctcattcccacccacacgcagcccagctacaggttcaaggccaacaacaatgacagcggggagtacacgtgccagactggccagaccagcctcagcgaccctgtgcatctgactgtgctttccgaatggctggtgctccagacccctcacctggagttccaggagggagaaaccatcatgctgaggtgccacagctggaaggacaagcctctggtcaaggtcacattcttccagaatggaaaatcccagaaattctcccgtttggatcccaccttctccatcccacaagcaaaccacagtcacagtggtgattaccactgcacaggaaacataggctacacgctgttctcatccaagcctgtgaccatcactgtccaagtgcccagcatgggcagctcttcaccaatggggatcattgtggctgtggtcattgcgactgctgtagcagccattgttgctgctgtagtggccttgatctactgcaggaaaaagcggatttcagccaattccactgatcctgtgaaggctgcccaatttgagccacctggacgtcaaatgattgccatcagaaagagacaacttgaagaaaccaacaatgactatgaaacagctgacggcggctacatgactctgaaccccagggcacctactgacgatgataaaaacatctacctgactcttcctcccaacgaccatgtcaacagtaataactaaagagtaacgttatgccatgtggtcatactctcagcttgctgagtggatgacaaaaagaggggaattgttaaaggaaaatttaaatggagactggaaaaatcctgagcaaacaaaaccacctggcccttagaaatagctttaactttgcttaaactacaaacacaagcaaaacttcacggggtcatactacatacaagcataagcaaaacttaacttggatcatttctggtaaatgcttatgttagaaataagacaaccccagccaatcacaagcagcctactaacatataattaggtgactagggactttctaagaagatacctacccccaaaaaacaattatgtaattgaaaaccaaccgattgcctttattttgcttccacattttcccaataaatacttgcctgtgacattttgccactggaacactaaacttcatgaattgcgcctcagatttttcctttaacatcttttttttttttgacagagtctcaatctgttacccaggctggagtgcagtggtgctatcttggctcactgcaaacccgcctcccaggtttaagcgattctcatgcctcagcctcccagtagctgggattagaggcatgtgccatcatacccagctaatttttgtattttttattttttttttttagtagagacagggtttcgcaatgttggccaggccgatctcgaacttctggcctctagcgatctgcccgcctcggcctcccaaagtgctgggatgaccagcatcagccccaatgtccagcctctttaacatcttctttcctatgccctctctgtggatccctactgctggtttctgccttctccatgctgagaacaaaatcacctattcactgcttatgcagtcggaagctccagaagaacaaagagcccaattaccagaaccacattaagtctccattgttttgccttgggatttgagaagagaattagagaggtgaggatctggtatttcctggactaaattccccttggggaagacgaagggatgctgcagttccaaaagagaaggactcttccagagtcatctacctgagtcccaaagctccctgtcctgaaagccacagacaatatggtcccaaatgactgactgcaccttctgtgcctcagccgttcttgacatcaagaatcttctgttccacatccacacagccaatacaattagtcaaaccactgttattaacagatgtagcaacatgaaagacgctatgttacaggttacatgagagcaatcatgtaagtctatatgacttcagaaatgttaaaatagactaacctctaacaacaaattaaaagtgcggaattc

SEQ ID NO: 754 - protein, 315 aa, Homo sapien
METQMSQNVCPRNLWLLQPLTVLLLLASADSQAAAPPKAVLKLEPPWINVLQEDSVTLTCQGARSPESDSIQWFHNGNLIPTHTQPSYRFKANNNDSGEYTCQTGQTSLSDPVHLTVLSEWLVLQTPHLEFQEGETIMLRCHSWKDKPLVKVTFFQNGKSQKFSRLDPTFSIPQANHSHSGDYHCTGNIGYTLFSSKPVTITVQVPSMGSSSPMGIIVAVVIATAVAAIVAAVVALIYCRKKRISANSTDPVKAAQFEPPGRQMIAIRKRQLEETNNDYETADGGYMTLNPRAPTDDDKNIYLTLPPNDHVNSNN

SEQ ID NO: 755 - DNA, 1219 bp, Homo sapien
gggaagatggcgaaggtctcagagctttacgatgtcacttgggaagaaatgagagataaaatgagaaaatggagagaagaaaactcaagaaatagtgagcaaattgtggaagttggagaagaattaattaatgaatatgcttctaagctgggagatgatatttggatcatatatgaacaggtgatgattgcagcactagactatggtcgggatgacttggcattgttttgtcttcaagagctgagaagacagttccctggcagtcacagagtcaagcgattaacaggcatgagatttgaagccatggaaagatatgatgatgctatacagctatatgataggattttacaagaagatccaactaacactgctgcaagaaagcgtaagattgccattcgaaaagcccaggggaaaaatgtggaggccattcgggagctgaatgagtatctggaacaatttgttggagaccaagaagcctggcatgaacttgcagaactttacatcaatgaacatgactatgcaaaagcagccttttgtttagaggaactaatgatgactaatccacacaaccacttatactgtcagcagtatgctgaagttaagtatacccaaggtggacttgaaaacctcgaactttcaagaaagtattttgcacaggcattgaaactgaacaacagaaatatgagagctttgtttggactttatatgtcggcaagtcatattgcttctaatccaaaagcaagtgcaaaaacgaaaaaggacaacatgaaatatgctagttgggcagctagtcaaataaacagagcttatcagtttgcaggtcgaagtaagaaggaaaccaaatattctcttaaggctgtcgaagacatgttggaaacattgcagatcacccagtcttaaggtttcaaaaactctttgacattagatttcacaactgcacaattgaacttattggcctgtaacttatttactaaatgctcagtgctatttatatactacagtaattttctgttaagaaggcagttgtaaagaatgtgtttatataaacctaaaaatgccttttactgctaagtggggagatgggggaaatccatggaagagagatttaagacttattgattgtacatcagtctcttcatatcacatatacatgtatatatataaaactctaatgtagtataaccttgttaaataaaccatgatgatttattaaacttgc

SEQ ID NO: 756 - protein, 297 aa, Homo sapien
MAKVSELYDVTWEEMRDKMRKWREENSRNSEQIVEVGEELINEYASKLGDDIWIIYEQVMIAALDYGRDDLALFCLQELRRQFPGSHRVKRLTGMRFEAMERYDDAIQLYDRILQEDPTNTAARKRKIAIRKAQGKNVEAIRELNEYLEQFVGDQEAWHELAELYINEHDYAKAAFCLEELMMTNPHNHLYCQQYAEVKYTQGGLENLELSRKYFAQALKLNNRNMRALFGLYMSASHIASNPKASAKTKKDNMKYASWAASQINRAYQFAGRSKKETKYSLKAVEDMLETLQITQS

SEQ ID NO: 757 - DNA, 2943 bp, Homo sapien
gaagctggactgcagctggtttcaggaacttctcttgacgagaagagagaccaaggaggccaagcaggggctgggccagaggtgccaacatggggaaactgaggctcggctcggaaaggtgaagtaacttgtccaagatcacaaagctggtgaacatcaagttggtgctatggcaaggctgggaaactgcagcctgacttgggctgccctgatcatcctgctgctccccggaagtctggaggagtgcgggcacatcagtgtctcagcccccatcgtccacctgggggatcccatcacagcctcctgcatcatcaagcagaactgcagccatctggacccggagccacagattctgtggagactgggagcagagcttcagcccgggggcaggcagcagcgtctgtctgatgggacccaggaatctatcatcaccctgccccacctcaaccacactcaggcctttctctcctgctgcctgaactggggcaacagcctgcagatcctggaccaggttgagctgcgcgcaggctaccctccagccataccccacaacctctcctgcctcatgaacctcacaaccagcagcctcatctgccagtgggagccaggacctgagacccacctacccaccagcttcactctgaagagtttcaagagccggggcaactgtcagacccaaggggactccatcctggactgcgtgcccaaggacgggcagagccactgctgcatcccacgcaaacacctgctgttgtaccagaatatgggcatctgggtgcaggcagagaatgcgctggggaccagcatgtccccacaactgtgtcttgatcccatggatgttgtgaaactggagccccccatgctgcggaccatggaccccagccctgaagcggcccctccccaggcaggctgcctacagctgtgctgggagccatggcagccaggcctgcacataaatcagaagtgtgagctgcgccacaagccgcagcgtggagaagccagctgggcactggtgggccccctccccttggaggcccttcagtatgagctctgcgggctcctcccagccacggcctacaccctgcagatacgctgcatccgctggcccctgcctggccactggagcgactggagccccagcctggagctgagaactaccgaacgggcccccactgtcagactggacacatggtggcggcagaggcagctggaccccaggacagtgcagctgttctggaagccagtgcccctggaggaagacagcggacggatccaaggttatgtggtttcttggagaccctcaggccaggctggggccatcctgcccctctgcaacaccacagagctcagctgcaccttccacctgccttcagaagcccaggaggtggcccttgtggcctataactcagccgggacctctcgccccaccccggtggtcttctcagaaagcagaggcccagctctgaccagactccatgccatggcccgagaccctcacagcctctgggtaggctgggagccccccaatccatggcctcagggctatgtgattgagtggggcctgggcccccccagcgcgagcaatagcaacaagacctggaggatggaacagaatgggagagccacggggtttctgctgaaggagaacatcaggccctttcagctctatgagatcatcgtgactcccttgtaccaggacaccatgggaccctcccagcatgtctatgcctactctcaagaaatggctccctcccatgccccagagctgcatctaaagcacattggcaagacctgggcacagctggagtgggtgcctgagccccctgagctggggaagagcccccttacccactacaccatcttctggaccaacgctcagaaccagtccttctccgccatcctgaatgcctcctcccgtggctttgtcctccatggcctggagcccgccagtctgtatcacatccacctcatggctgccagccaggctggggccaccaacagtacagtcctcaccctgatgaccttgaccccagaggggtcggagctacacatcatcctgggcctgttcggcctcctgctgttgctcacctgcctctgtggaactgcctggctctgttgcagccccaacaggaagaatcccctctggccaagtgtcccagacccagctcacagcagcctgggctcctgggtgcccacaatcatggaggaggatgccttccagctgcccggccttggcacgccacccatcaccaagctcacagtgctggaggaggatgaaaagaagccggtgccctgggagtcccataacagctcagagacctgtggcctccccactctggtccagacctatgtgctccagggggacccaagagcagtttccacccagccccaatcccagtctggcaccagcgatcaggtcctttatgggcagctgctgggcagccccacaagcccagggccagggcactatctccgctgtgactccactcagcccctcttggcgggcctcacccccagccccaagtcctatgagaacctctggttccaggccagccccttggggaccctggtaaccccagccccaagccaggaggacgactgtgtctttgggccactgctcaacttccccctcctgcaggggatccgggtccatgggatggaggcgctggggagcttctagggcttcctggggttcccttcttgggcctgcctcttaaaggcctgagctagctggagaagaggggagggtccataagcccatgactaaaaactaccccagcccaggctctcaccatctccagtcaccagcatctccctctcctcccaatctccataggctgggcctcccaggcgatctgcatactttaaggaccagatcatgctccatccagccccacccaatggccttttgtgcttgtttcctataacttcagtattgtaaac

SEQ ID NO: 758 - protein, 836 aa, Homo sapien
MARLGNCSLTWAALIILLLPGSLEECGHISVSAPIVHLGDPITASCIIKQNCSHLDPEPQILWRLGAELQPGGRQQRLSDGTQESIITLPHLNHTQAFLSCCLNWGNSLQILDQVELRAGYPPAIPHNLSCLMNLTTSSLICQWEPGPETHLPTSFTLKSFKSRGNCQTQGDSILDCVPKDGQSHCCIPRKHLLLYQNMGIWVQAENALGTSMSPQLCLDPMDVVKLEPPMLRTMDPSPEAAPPQAGCLQLCWEPWQPGLHINQKCELRHKPQRGEASWALVGPLPLEALQYELCGLLPATAYTLQIRCIRWPLPGHWSDWSPSLELRTTERAPTVRLDTWWRQRQLDPRTVQLFWKPVPLEEDSGRIQGYVVSWRPSGQAGAILPLCNTTELSCTFHLPSEAQEVALVAYNSAGTSRPTPVVFSESRGPALTRLHAMARDPHSLWVGWEPPNPWPQGYVIEWGLGPPSASNSNKTWRMEQNGRATGFLLKENIRPFQLYEIIVTPLYQDTMGPSQHVYAYSQEMAPSHAPELHLKHIGKTWAQLEWVPEPPELGKSPLTHYTIFWTNAQNQSFSAILNASSRGFVLHGLEPASLYHIHLMAASQAGATNSTVLTLMTLTPEGSELHIILGLFGLLLLLTCLCGTAWLCCSPNRKNPLWPSVPDPAHSSLGSWVPTIMEEDAFQLPGLGTPPITKLTVLEEDEKKPVPWESHNSSETCGLPTLVQTYVLQGDPRAVSTQPQSQSGTSDQVLYGQLLGSPTSPGPGHYLRCDSTQPLLAGLTPSPKSYENLWFQASPLGTLVTPAPSQEDDCVFGPLLNFPLLQGIRVHGMEALGSF

SEQ ID NO: 759 - DNA, 1539 bp, Homo sapien
gctgactccagtgtcccgagaggcgccgcttcttccgctttctcgtcaggctcctgcaaccccaggcatgaaccaaggtttctgaactactgggcgggagccaacgtctcttctttctcccgctctggcggaggctttgtcgctgcgggctgggccccagggtgtcccccatggcggggccgcgggtggaggtcgatggcagcatcatggaagggggcggccagatcctgagagtctctacggccttgagctgtctcctaggcctccccttgcgggtgcagaagatccgagccggccggagcacgccaggcctgaggcctcaacatttatctggactggaaatgattcgagatttgtgtgatgggcaactggagggggcagaaattggctcaacagaaataacctttacaccagagaagatcaaaggtggaatccacacagcagataccaagacagcagggagtgtgtgcctcttgatgcaggtctcaatgccgtgtgttctctttgctgcttctccatcagaacttcatttgaaaggtggaactaatgctgaaatggcaccacagatcgattatacagtgatggtcttcaagccaattgttgaaaaatttggtttcatatttaattgtgacattaaaacaaggggatattacccaaaagggggtggtgaagtgattgttcgaatgtcaccagttaaacaattgaaccctataaatttaactgagcgtggctgtgtgactaagatatatggaagagctttcgttgctggtgttttgccatttaaagtagcaaaagatatggcagcggcagcagttagatgcatcagaaaggagatccgggatttgtatgttaacatccagcctgttcaagaacctaaagaccaagcatttggcaatggaaatggaataataattattgctgagacctccactggctgtttgtttgctggatcatcgcttggtaaacgaggtgtaaatgcagacaaagttggaattgaagctgccgaaatgctattagcaaatcttagacatggtggtactgtggatgagtatctgcaagaccagctgattgttttcatggcattagccaatggagtttccagaataaaaacaggaccagttacactccatacgcaaaccgcgatacattttgctgaacaaatagcaaaggctaaatttattgtgaagaaatcagaagatgaagaagacgccgctaaagatacttatattattgaatgccaaggaattgggatgacaaatccaaatctatagagtatttgcctcttaaatgatacctcattgatatattgcactatttcataaatactataaaataatgactaggaagtaacttattaaaggctatgacttaaatttgaagatgaagtacagtgttctaggtttgctgagaaggcttcattaaattaatctcactttgaatatctcctgagagatggacaatgaaatatcagttggtggatatgtgtgatagctgatttcaatattgaagtattgaaataaaatattctttacacctgag

SEQ ID NO: 760 - protein, 366 aa, Homo sapien
MAGPRVEVDGSIMEGGGQILRVSTALSCLLGLPLRVQKIRAGRSTPGLRPQHLSGLEMIRDLCDGQLEGAEIGSTEITFTPEKIKGGIHTADTKTAGSVCLLMQVSMPCVLFAASPSELHLKGGTNAEMAPQIDYTVMVFKPIVEKFGFIFNCDIKTRGYYPKGGGEVIVRMSPVKQLNPINLTERGCVTKIYGRAFVAGVLPFKVAKDMAAAAVRCIRKEIRDLYVNIQPVQEPKDQAFGNGNGIIIIAETSTGCLFAGSSLGKRGVNADKVGIEAAEMLLANLRHGGTVDEYLQDQLIVFMALANGVSRIKTGPVTLHTQTAIHFAEQIAKAKFIVKKSEDEEDAAKDTYIIECQGIGMTNPNL

SEQ ID NO: 761 - DNA, 4933 bp, Homo sapien
  Unsure 3211-3534: Unknown base
gcggccgctggctcccggccgccgccaccttccccgtgcaagacccggccagcggcgccgctctgggcatggtagccgactgcggggtgcgagaggcccgcgccgccgtgcgcgctgcctacgaggctttctgccgctggagggaggtctccgccaaggagaggagttcattacttcggaagtggtacaatttaatgatacaaaataaggatgaccttgccagaataatcacagctgaaagtggaaagccactgaaggaggcacatggagaaattctctattccgcctttttcctagagtggttctctgaggaagcccgccgtgtttacggagacattatctacaccccggcaaaggacaggcggggccctggtcctcaagcagcccataggcgtgggctgcagtcatcaccccgtggaatttccccagtgccatgatcacccggaaggtgggggccgccctggcagccggctgtactgtcgtggtgaagcctgccgaagacacgcccttctccgccctggccctggctgagcttgcaagccaggctgggattccttcaggtgtatacaatgttattccctgttctcgaaagaatgccaaggaagtaggggaggcaatttgtactgatcctctggtgtccaaaatttcctttactggttcaacaactacaggaaagatcctgttgcaccacgcagcaaactctgtgaaaagggtctctatggagctgggcggccttgctccatttatagtatttgacagtgccaacgtggaccaggctgtagcaggggccatggcatctaaatttaggaacactggacagacttgtgtttgctcaaaccaattcttggtgcaaaggggcatccatgatgcctttgtaaaagcattcgccgaggccatgaagaagaacctgcgcgtaggtaatggatttgaggaaggaactactcagggcccattaattaatgaaaaagcggtagaaaaggtggagaaacaggtgaatgatgccgtttctaaaggtgccaccgttgtgacaggtggaaaacgacaccaacttggaaaaaatttctttgagcctaccctgctgtgcaatgtcacccaggacatgctgtgcactcatgaagagactttcgggcctctggcaccagttatcaagttcgatacagaggaggaggctatagcaatcgctaacgcagctgatgttgggttagcaggttatttttactctcaagacccagcccagatctggagagtggcagagcagctggaagtgggcatggttggcgtcaacgaaggattaatttcctctgtggagtgcccttttggtggagtgaagcagtccggccttgggcgagaggggtccaagtatggcattgatgagtatctggaactcaagtatgtgtgttacgggggcttgtaggattctttggttctttaaaaaaatttaaaaggagacttatctacatatataggtacatgccatccattattttaaataaactaataggttttcagaattatgaatttttcagaactcatccagtccttgtaatcttaaacagatgcaaatcctacccctgcccttaatgtaactagggaccaatatgtgccacgtgcctgtggctgcagactcccagagaaccagcactgggtttacagaatgaggccctggctccccaccacagccccagctgcctcagagcaggcacagcacaaggcaggcccagccccatgggccgtcacaaaggcttgatcactgcctgggcagtggcacaaccatcccccatgtcgctacagaacatgggcccagagcaccttgaaggagacccttgactgtgactggcaggcaggtgaggggcacagcacccctccccggcatctgccagctcagcacagaagacaccgaatgtgcatctggaggtgttgcggcagaggtttgagtgaaccctctttcaaagacaataaatagcacagaattgtccgtgcttctgtgaggcacgaaggagcacctctccctattcctgaaccatattttaattgatgcctttattgtcccaaatttaccacttaaagaattctattttcatttctgtcctgtttgccacttcatttcatttccttgagtaaatgagctgaagtgtaaagcaaagaatagcagaagcagcttggtaggatggaaggcacgcagtggcatggcctggctccttccctgagtggccttgttgccttgggcgtgtgttcagcacctcccatcccatggatacagtggagattccatacaggccttacttagctccttgcgatactgtgagccagagagaaagtaaaagcacttcacaaaaaaatgaaaattctaaggacatacaagagccattgttacgagcagcaccgcccagcccttccttgcctactgtcagtggctttgccaagatgggaggaggccagtgcccacttgcccaccgacctgagcctgagtaagtggctgtcacctgagcctgttctttctgtcctggtgtggtgctgctccctcacctccaaaagagcaaaagtactttcaccacagtcaacccaaaagggaaagaatttctgtaattgccaacccactttgtagaagaggcatgagcccttgaatttcaggcaccttttatctaatgagagtttttacagctcatcattcaaataacgcacaaaaaacaaaagccgctatgaccggcgttgcctctcactttgaaagaaagactccgtaatcttaaacagatgcaaatccaattaggcggccaagtaggtggagacgaagcaccttcctttccccatctctgtctgtgtagactccacttacatcttgtggttattctgggttgtggaaggaaaatgtgaatgaaagtagtgctggatgcaattactcctgaaccccacctaggatttaacatccctcattgagccactgggaagctatggttgagtaactaaaggtctggcaagaccctgggcacacagggagctgcctagcatctggcctggagtgtactagccacattcccaaggtcccaaggagaaggaagagctgaaattcatctcctagtgacagtgccccggccctgtcaagaatcacatactcagcattttgacagttaatgtcttctctttatttgtgtagtttttaggtggttttatataacattttaattacttgtgatttagatgtatccatcctttnnnnnnnnnnnnnnnnnnnnnnnnnnnnnnnnnnnnnnnnnnnnnnnnnnnnnnnnnnnnnnnnnnnnnnnnnnnnnnnnnnnnnnnnnnnnnnnnnnnnnnnnnnnnnnnnnnnnnnnnnnnnnnnnnnnnnnnnnnnnnnnnnnnnnnnnnnnnnnnnnnnnnnnnnnnnnnnnnnnnnnnnnnnnnnnnnnnnnnnnnnnnnnnnnnnnnnnnnnnnnnnnnnnnnnnnnnnnnnnnnnnnnnnnnnnnnnnnnnnnnnnnnnnnnnnnnnnnnnnnnnnnnnnnnnnnnnnnnnnnnnnnnnnnnnnnnnnnnnnnnnnntgctccaacattattttttataactctggattaccgatgctgagatgtgtgcaggaatacttccaaataaatttttaacattgtaagccagtagattctttggctgggtggcaaattttgagtcttcttgcatatttggctcatgggttcataaattgaggccagagactcattgtatatccttgatcaattttctaattaaaggaaatagcttattgtttagtaaaatggcccttggttgtgggaagaaagagaattatttttaactgaacgtttttgttgttttttaaataaagtagccatatgtaacgggattttaaaaatatatacattttacaacatggactagaaaaggaccattagatcaggggttggcaaactatggcccacgaatcaaacctggcctgccacctgtttttatacaacctgtgagctaagaatggtttatatgttttcaaatgattgggcagaaaatcaaaagaagaacaatatttcatgacacctgaaaattctatgaaattcagatttcagtgtccataaacaaaatgttattagagcatagccacacccattcatttatggtattgtctgggactgctttcttggcagagttgaatagttgggacagggacagtatagcctgcaaagcctaaaagatttactacttgtctccttaaagaaaaagtttgccagctcctgatctagaccaagagggagatattgaccttacttgcatttatccggcattatttcaacacctcctgtgaagaaagtacttttctggcatagctaccgtgagttctcagcaggaacttcccagcgatgataatgtacatgaaattagccacgtaacaagagtctatttgccttgaaaaaacaattatccttgaacttcctccagctatgcagggattctcattaaagagctgatctgcatctgtttatccattttagtagcttttaaatatgattttatgtgaagtgccatttctttattctactaaagagagacagcagaaataaagatcagaagcaaatgtgagcaaatctgttttactgttaacttcaattatgaacttgaaattgtgccacatgactttttcctctaaaaactggatcctagtgttttaattacctgtgtgcagctattttaaatagcattttacttgaataatatgtatgttgtcattgtttcatgctatactttgtgggataaaacttgggaatgagtgtggtaagaaatttataaagttttgcttttaaaacgtggacataactcatttttctagtttttgacaattgtgtgttttagtgtctagtctgcagagagctgtgtgattaataaacgtggaattaacagaatttcctctccctgtaaaaaaagaaaaaaaaaacgaaa

SEQ ID NO: 762 - protein, 470 aa, Homo sapien
GRWLPAAATFPVQDPASGAALGMVADCGVREARAAVRAAYEAFCRWREVSAKERSSLLRKWYNLMIQNKDDLARIITAESGKPLKEAHGEILYSAFFLEWFSEEARRVYGDIIYTPAKDRRGPGPQAAHRAWAAVITPWNFPSAMITRKVGAALAAGCTVVVKPAEDTPFSALALAELASQAGIPSGVYNVIPCSRKNAKEVGEAICTDPLVSKISFTGSTTTGKILLHHAANSVKRVSMELGGLAPFIVFDSANVDQAVAGAMASKFRNTGQTCVCSNQFLVQRGIHDAFVKAFAEAMKKNLRVGNGFEEGTTQGPLINEKAVEKVEKQVNDAVSKGATVVTGGKRHQLGKNFFEPTLLCNVTQDMLCTHEETFGPLAPVIKFDTEEEAIAIANAADVGLAGYFYSQDPAQIWRVAEQLEVGMVGVNEGLISSVECPFGGVKQSGLGREGSKYGIDEYLELKYVCYGGL

SEQ ID NO: 763 - DNA, 733 bp, Homo sapien
gggggttcccgcaaggtcgctttgcagagcgggagcgcgcttaagtaactagtccgtagttcgagggtgcgccgtgtccttttgcgttggtaccagcggcgacatgacggggtacactccggatgagaaactgcggctgcagcagctgcgagagctgagaaggcgatggctgaaggaccaggagctgagccctcgggagccggtgctgcccccacagaagatggggcctatggagaaattctggaataaatttttggagaataaatccccttggaggaaaatggtccatggggtatacaaaaagagtatctttgttttcactcatgtacttgtacctgtctggattattcattattacatgaagtatcatgtttctgaaaaaccatatggcatagttgaaaagaagtccagaatattccctggtgatacaattctggagactggagaagtaattccaccaatgaaagaatttcctgatcaacatcattaaagattatgtaaaaagttaaaaggcttatgagcctaagtttgttcctatattaccatatttactgaattttctggaaaagtaactttaataaagtttaatctcagaaaaaaaaaaaaaaaaaaaaaaaaaaaaaaaaaaaaaaaaaaaaaaaaaaaaaaaaaaaaaaaaaaaaaaaaaaaaaaaaaaaaaaaaaaaaaaaaaaaaaaaaaaaaaaaaaaaaaaaaaaaaaaaaaaaaaaaaaaa

SEQ ID NO: 764 - protein, 128 aa, Homo sapien
MTGYTPDEKLRLQQLRELRRRWLKDQELSPREPVLPPQKMGPMEKFWNKFLENKSPWRKMVHGVYKKSIFVFTHVLVPVWIIHYYMKYHVSEKPYGIVEKKSRIFPGDTILETGEVIPPMKEFPDQHH

SEQ ID NO: 765 - DNA, 1585 bp, Homo sapien
tttccacatgtgaggggctgaggggctcaaggaggggagcatctccactgggtggaggctgggggtcccagcaggaaatggtgagacaaagggcgctggctggcagggagacagcacaggaaggtcctagagcttcctcagtgcagctggactctcctggagaccttcacacaccctgatatctgggccttgcccgacgagggtgctttcactggtctgcaccatggcccaggccctgggattttgaacagctccgcaggtgaatgaaaggtgaggccaggctggggaaccaccgcattagagcccgacctggttttcagccccagccccgccactgactggctttgtgagtgcgggcaagtcactcagcctccctaggcctcagtgacttccctgaaagcaagaattccactttcttgctgttgtgatggtggtaagggaacgggcctggctctggcccctgacgcaggaacatggagctgatccaggacacctcccgcccgccactggagtacgtgaagggggtcccgctcatcaagtactttgcagaggcactggggcccctgcagagcttccaggcccggcctgatgacctgctcatcagcacctaccccaagtccggcaccacctgggtgagccagattctggacatgatctaccagggtggtgacctggagaagtgtcaccgagctcccatcttcatgcgggtgcccttccttgagttcaaagccccagggattccctcagggatggagactctgaaagacacaccggccccacgactcctgaagacacacctgcccctggctctgctcccccagactctgttggatcagaaggtcaaggtggtctatgttgcccgcaacgcaaaggatgtggcagtttcctactaccacttctaccacatggccaaggtgcaccctgagcctgggacctgggacagcttcctggagaagttcatggtcggagaagtgtcctacggatcctggtaccagcacgtgcaggagtggtgggagctgagccgcacccaccctgttctctacctcttctatgaagacatgaaggagaaccccaaaagggagattcaaaagatcctggagtttgtggggcactccctgccagaggagaccgtggacttcatggttcagcacacgtcgttcaaggagatgaagaagaaccctatgaccaactacaccaccgtcccccaggagttcatggaccacagcatctcccccttcatgaggaaaggcatggctggggactggaagaccaccttcaccgtggcgcagaatgagcgcttcgatgcggactatgcggagaagatggcaggctgcagcctcagcttccgctctgagctgtgagaggggctcctggggtcactgcagagggagtgtgcgaatcaaacctgaccaagcggctcaagaataaaatatgaattgagggcctgggacggtaggtcatgtctgtaatcccagcaatttggaggctgaggtgggaggatcatttgagcccaggagttcgagaccaacctgggcaacatagtgagattctgttaaaaaaataaaataaaataaaaccaattttt

SEQ ID NO: 766 - protein, 295 aa, Homo sapien
MELIQDTSRPPLEYVKGVPLIKYFAEALGPLQSFQARPDDLLISTYPKSGTTWVSQILDMIYQGGDLEKCHRAPIFMRVPFLEFKAPGIPSGMETLKDTPAPRLLKTHLPLALLPQTLLDQKVKVVYVARNAKDVAVSYYHFYHMAKVHPEPGTWDSFLEKFMVGEVSYGSWYQHVQEWWELSRTHPVLYLFYEDMKENPKREIQKILEFVGHSLPEETVDFMVQHTSFKEMKKNPMTNYTTVPQEFMDHSISPFMRKGMAGDWKTTFTVAQNERFDADYAEKMAGCSLSFRSEL

SEQ ID NO: 767 - DNA, 3233 bp, Homo sapien
gacggcggtggcggcgtcggaggcgcctccgggggacggtggcggctcccggcggtgaggccgcgcctgtccggggatcgtcgagggacggcgggagcttgggccagcggcggcggcggcctgggacgcaggcggagccccgcgcaggcccaaggtcccggaggctatggcagcggctaccatcgtgcacgacacgtctgaggccgtggagctctgccctgcttacggcttgtacctgaagcccatcaccaagatgaccatcagcgtggcactcccgcagctgaagcagccggggaagtccatctccaactgggaggtgatggagaggctgaagggcatggtgcagaaccaccagttctccacgctgcgtatttccaagagcaccatggacttcatccgcttcgagggggaggtggagaacaagagcctggtcaagtcttttctggcctgcctggacggcaagaccatcaagctcagcggcttctccgacatcctgaaggtgcgcgcggccgagttcaagatcgacttccccacccgccacgactgggactccttcttccgcgacgccaaggacatgaacgagaccctgccgggggagcggccggacaccatccacctggaggggctgccctgcaagtggttcgccctgaaggagtcgggctccgagaagcccagcgaggacgtcctggtcaaggtgtttgagaagttcggggagatccggaatgtggacatccccatgctggacccctaccgggaggagatgacgggccgcaacttccacaccttcagtttcggggggcacttgaacttcgaggcctatgtgcagtaccgtgagtacatgggcttcatccaggccatgagcgccctgcgcgggatgaaactcatgtacaagggcgaggacggcaaggccgtggcctgcaacatcaaggtttcttttgattcgaccaaacacctgagtgatgcctcaattaagaagcggcagctggagaggcagaagcttcaggaactggagcagcaaagagaagaacaaaagcgcagagagaaggaagcggaggagaggcagcgagcggaggaaaggaaacaaaaggagctggaagagctggagcgagagaggaaaagagaagagaagcttcgcaagagggagcagaagcagagggaccgtgagctgcgccggaatcagaagaagctggagaagctgcaggcggaggagcagaagcagctgcaggagaagatcaagctggaggagcgcaagctgctgctggcccagaggaacctgcagtccatccggctcatcgccgagctgctcagcagagccaagttgtgataagtccccgggaaggagcatgacaagaggctgagacatgtggcagcccagtccttacctcatggctgtgaagctacgggaacaggagcagaaggaggagaagctgaggctccagcagcaggaggagcggcggcggctgcaggaggccgagctgcggcgcgtggaggaggagaaggagcgcgcgctgggcctgcagcggaaagagcgggagctgcgcgagcggctgctgagcatcctgctgagcaagaagccggacgacagccacacacacgacgagctgggcgtggcacacgccgacctgctgcagcccgtcctggacatcctgcagaccgtgtcgtccggctgtgtgagcgccaccacgctgcaccccctcgggggccagcccccggccggtgcccccaaggagagcgcggcccacccagaggccgacggcgctcccaaaagcgtgaacgggagcgtggccgaggaggccccatgcaaggaggttcagagctcctgtcgtgtggtccccgaggatggctctccagagaagaggtgcccgggcggcgtcctctcctgcattcctgacaacaaccaacagcccaagggcatccctgcctgcgagcagaatgtctccagaaaggacacccggtcagaacaggacaagtgcaaccgggagcccagcaagggccggggccgggccaccggagacgggcttgctgaccggcacaagcgggagaggagccgggccaggcgggccagcagcagggaggacgggaggccacgcaaggagcggcggccccacaagaagcacgcctacaaggatgacagcccccgccggcgcagcacgagcccggaccacacccggtcccggaggtcccacagcaaagacaggcaccggagggagcggagccgggagcggaggggcagcgccagcaggaagcacagccgccaccgccgccgaagcgagcggtcgcgctcccggtccccgagcaggcaccgcagtacctggaacaggtaatgacgggcacggcctccccacggcctgtccgggaaagaccaggacctgctcgagcctcctggccgctccttggccgctctccgtccacccctgcaaagccaagacccttctgcagccacgaacgtccacggagcctgccggcaggaaggaagacaccatgctttagagatccatctttctccactcaccgcagcgtacttggcacttcagtttcaaacacgtagtcctttaaaacttgatccgatagctttaatgcggccggtcctctctcagtcaggaaaattgcacagaccgacagtcgtgaggatggcagagctgctgcattcccccacacggggatttctgtgtctgcttggcgacctccctgcgtgcacggcctaggaggtgcacgggccaccatagtcacactggcactgaaaagaaagcgttgccctggtgattctttcccccccgtttgtaatgttaactgatcaggaagtgcagtttgggtgggatgccgaatcgtcgtgctgacattgagtcacggatgaggaaggtacaagtcctttaagatcaaaactcaaacgggccgttctttctaaggtgtcggtatgtggggagtggtacaaaatggtctgatgctccttcaaaaacattcactttttacaacgtcaaggaattaagcataaaaaagattggttaaaagctttggtttctagtaaaggttagtgtgtgtggtttttttaagaagctgttttgctaaattatttttacttggaatgtttcaaacagatttcaggctgcaaacttgttttataatcgtttgcttctccaagtgaagctcagaaatacctaaaaatagctgtaacgttcgcgttaggaaagatggtgtttattccagtttgcatttttatggtgaaataaaatccg

SEQ ID NO: 768 - protein, 385 aa, Homo sapien
MAAATIVHDTSEAVELCPAYGLYLKPITKMTISVALPQLKQPGKSISNWEVMERLKGMVQNHQFSTLRISKSTMDFIRFEGEVENKSLVKSFLACLDGKTIKLSGFSDILKVRAAEFKIDFPTRHDWDSFFRDAKDMNETLPGERPDTIHLEGLPCKWFALKESGSEKPSEDVLVKVFEKFGEIRNVDIPMLDPYREEMTGRNFHTFSFGGHLNFEAYVQYREYMGFIQAMSALRGMKLMYKGEDGKAVACNIKVSFDSTKHLSDASIKKRQLERQKLQELEQQREEQKRREKEAEERQRAEERKQKELEELERERKREEKLRKREQKQRDRELRRNQKKLEKLQAEEQKQLQEKIKLEERKLLLAQRNLQSIRLIAELLSRAKL

SEQ ID NO: 769 - DNA, 1468 bp, Homo sapien
gccactccagccccgcgcccctcgccgcggccctcgggcgtctgcgccgcagctgccgcccccgcctctttggagtctctcgcggcctcaaagcgcggcctgcgtcgcttccggcagttccagaccgcgggcgatggctgccgctgggggcgcccggctgctgcgcgccgcttctgctgtcctcggcggcccggccggccggtggctgcaccacgctgggtcccgcgctggatccagcggcctgctgaggaaccgggggccgggcgggagcgcggaggcgagccggtcgctgagcgtgtcggcgcgggcccggagcagctcagaagataaaataacagtccactttataaaccgtgatggtgaaacattaacaaccaaaggaaaagttggtgattctctgctagatgttgtggttgaaaataatctagatattgatggctttggtgcatgtgagggaaccctggcttgttcaacctgtcacctcatctttgaagatcacatatatgagaagttagatgcaatcactgatgaggagaatgacatgctcgatctggcatatggactaacagacagatcacggttgggctgccaaatctgtttgacaaaatctatggacaatatgactgttcgagtgcctgaaacagtggctgatgccagacaatccattgatgtgggcaagacctcctgaactagaacaaataggaatattttcatggaattttacctatttttataattattatttcttaaagtgattaaatgagaacatggatgagtggacttcatattatgactagctttactattttaattcaccttgcataactactgaattttgtcattcttgaaagtatgcaatttttattttggttatattacaaaaatgtcaatcaaatattaaaaaatagttaatgtgatagaaaaaccttacatatttttttcttatgtttgtttagcgactttagcaaaatgttttcatataatctcatctgtttacctagaagataggttaaggaaatatattattattcctgtttgatgtgggtgaaggcagagatctaacctggcttgtttagggccataccactaattagaaaatctgtgctagaacctgtgtcttattcctataagctatgtgttcagactgaaactggagaaattatgactattttatttatagtagtagttaaatctgaatgtgtatggactaaaaatatttaattgctgagtaaactgcttaacttcaaagatagttattgaccttataaataaatatttcaaaattttgattcggaagactaagtctggagctagacattataatgctatcaaagaagttgatctctgttttgactaaactagaggaaaaatgattggatgagtttattcttttctaagcagaatggtttaactttgtactcaaagaaaaataatgctgatttataaatctctgcctataatagaatgg

SEQ ID NO: 770 - protein, 184 aa, Homo sapien
MAAAGGARLLRAASAVLGGPAGRWLHHAGSRAGSSGLLRNRGPGGSAEASRSLSVSARARSSSEDKITVHFINRDGETLTTKGKVGDSLLDVVVENNLDIDGFGACEGTLACSTCHLIFEDHIYEKLDAITDEENDMLDLAYGLTDRSRLGCQICLTKSMDNMTVRVPETVADARQSIDVGKTS

SEQ ID NO: 771 - DNA, 1381 bp, Homo sapien
cttctcttttccctagactgcagccagcggagcccgcagccggcccgagccaggaacccaggtccggagcctcaacttcaggatgttgacaacattgctgccgatactgctgctgtctggctgggccttttgtagccaagacgcctcagatggcctccaaagacttcatatgctccagatctcctacttccgcgacccctatcacgtgtggtaccagggcaacgcgtcgctggggggacacctaacgcacgtgctggaaggcccagacaccaacaccacgatcattcagctgcagcccttgcaggagcccgagagctgggcgcgcacgcagagtggcctgcagtcctacctgctccagttccacggcctcgtgcgcctggtgcaccaggagcggaccttggcctttcctctgaccatccgctgcttcctgggctgtgagctgcctcccgagggctctagagcccatgtcttcttcgaagtggctgtgaatgggagctcctttgtgagtttccggccggagagagccttgtggcaggcagacacccaggtcacctccggagtggtcaccttcaccctgcagcagctcaatgcctacaaccgcactcggtatgaactgcgggaattcctggaggacacctgtgtgcagtatgtgcagaaacatatttccgcggaaaacacgaaagggagccaaacaagccgctcctacacttcgctggtcctgggcgtcctggtgggcggtttcatcattgctggtgtggctgtaggcatcttcctgtgcacaggtggacggcgatgttaattactctccagccccgtcagaaggggctggattgatggaggctggcaagggaaagtttcagctcactgtgaagccagactccccaactgaaacaccagaaggtttggagtgacagctcctttcttctcccacatctgcccactgaagatttgagggaggggagatggagaggagaggtggacaaagtacttggtttgctaagaacctaagaacgtgtatgctttgctgaattagtctgataagtgaatgtttatctatctttgtggaaaacagataatggagttggggcaggaagcctatggcccatcctccaaagacagacagaatcacctgaggcgttcaaaagatataaccaaataaacaagtcatccacaatcaaaatacaacattcaatacttccaggtgtgtcagacttgggatgggacgctgatataatagggtagaaagaagtaacacgaagaagtggtggaaatgtaaaatccaagtcatatggcagtgatcaattattaatcaattaataatattaataaatttcttatatttaaggcaaaaaaaaaataaaaaaaaaaaaaaaaaaaaaaa

SEQ ID NO: 772 - protein, 238 aa, Homo sapien
MLTTLLPILLLSGWAFCSQDASDGLQRLHMLQISYFRDPYHVWYQGNASLGGHLTHVLEGPDTNTTIIQLQPLQEPESWARTQSGLQSYLLQFHGLVRLVHQERTLAFPLTIRCFLGCELPPEGSRAHVFFEVAVNGSSFVSFRPERALWQADTQVTSGVVTFTLQQLNAYNRTRYELREFLEDTCVQYVQKHISAENTKGSQTSRSYTSLVLGVLVGGFIIAGVAVGIFLCTGGRRC

SEQ ID NO: 773 - DNA, 6632 bp, Homo sapien
actcccggccggggtagctcttcactcctcagcgcgacgtcgtgtcgagttcccaaaaagctccgcaggggctgtagggaggtgatctcatccattaacagctgtgtgttgccagttcccaaatctttatctatctcagacttctctcctgcattccagattcttatattcagctgccttttggatatctctcccaggatgttctcaaggcatacaagaattaaattctgaataagtctgcaggtaggatggacagttattttaaagcagctgtcagtgacttggacaaactccttgatgattttgaacagaacccagatgaacaagattatctccaagatgtacaaaatgcatatgattctaaccactgctcagtttcttcagagttggcttcctcacagcgaacttcattgctcccaaaagaccaagagtgcgttaatagttgtgcctcatcagaaacaagctatggaacaaatgagagttccctgaatgaaaaaacactcaagggacttacttctatacaaaatgaaaaaaatgtaacaggacttgatcttctttcttctgtggatggtggtacttcagatgaaatccagccgttatatatgggacgatgtagtaaacctatctgtgatctgataagtgacatgggtaacttagttcatgcaaccaatagtgaagaagatattaaaaaattattgccagatgattttaagtctaatgcagattccttgattggattggatttatcttcagtgtcagatactccctgtgtttcttcaacagaccatgatagtgatactgtcagagaacaacagaatgataccagttctgaattacaaaatagagaaatcggaggaatcaaagaattgggtataaaagtagatacaacactttcagattcctataattacagtggaacagaaaatttaaaagataaaaagatctttaatcagttagaatcaattgttgattttaacatgtcatctgctttgactcgacaaagttccaaaatgtttcatgccaaagacaagctacaacacaagagccagccatgtggattactaaaagatgttggcttagtaaaagaggaagtagatgtggcagtcataactgccgcagaatgtttaaaagaagagggcaagacaagtgctttgacctgcagccttccgaaaaatgaagatttatgcttaaatgattcaaattcaagagatgaaaatttcaaattacctgacttttcctttcaggaagataagactgttataaaacaatctgcacaagaagactcaaaaagtttagaccttaaggataatgatgtaatccaagattcctcttcagctttacatgtttccagtaaagatgtgccgtcctcattgtcctgtcttcctgcgtctgggtctatgtgtggatcattaattgaaagtaaagcacggggtgattttttacctcagcatgaacataaagataatatacaagatgcagtgactatacatgaagaaatacagaacagtgttgttctaggtggggaaccattcaaagagaatgatcttttgaaacaggaaaaatgtaaaagcatactccttcagtcattaattgaagggatggaagacagaaagatagatcctgaccagacagtaatcagagctgagtctttggatggtggtgacaccagttctacagttgtagaatctcaagaggggctttctggcactcatgtcccagagtcttctgattgttgtgaaggttttattaatactttttcaagcaatgatatggatgggcaagacttagattactttaatattgatgaaggcgcaaaaagtggcccactaattagtgatgctgaacttgatgcctttctgacagaacagtatcttcagaccactaacataaagtcttttgaagaaaatgtaaatgactctaaatcgcaaatgaatcagatagatatgaaaggcttagatgatggaaacatcaataatatatatttcaatgcagaagcaggagctattggggaaagtcatggtattaatataatttgtgaaacagttgataaacaaaatacaatagaaaatggcctttctttaggagaaaaaagcactattccagttcaacaagggttacctaccagtaagtctgagattacaaatcaattatcagtctctgatattaacagtcaatctgttggaggggccagacctaagcaattgtttagccttccatcaagaacaaggagttcaaaggacctgaataagccagatgttccagatacaatagaaagtgaacccagcacagcagataccgttgttccaatcacttgtgctatagattctacagctgatccacaggttagcttcaactctaattacattgatatagaaagtaattctgaaggtggatctagtttcgtaactgcaaatgaagattctgtacctgaaaacacttgcaaagaaggcttggttttgggccagaaacagcctacttgggttcctgattcagaagctccaaactgtatgaactgccaagtcaaatttacttttaccaaacggcgacaccattgccgagcatgtgggaaagtattttgtggtgtctgttgtaataggaagtgtaaactgcaatatctagaaaaggaagcaagagtatgtgtagtctgctatgaaactattagtaaagctcaggcatttgaaaggatgatgagtccaactggttctaatcttaagtctaatcattctgatgaatgtactactgtccagcctcctcaggagaaccaaacatccagtataccttcaccagcaactttgccagtctcagcacttaaacaaccaggtgttgaaggactatgttccaaagaacagaagagagtatggtttgcagatggtatattgcccaatggtgaagttgcagatacaacaaaattatcatctggaagtaaaagatgttctgaagactttagtcctctctcacctgatgtgcctatgacagtaaacacagtggatcattcccattctactacagtggaaaagccaaacaatgagacaggagatattacaagaaatgagataattcagagtcctatttctcaggttccatcagtggaaaaattgtctatgaacacaggaaatgaggggttacctacttctggttcatttacactagatgatgatgtttttgcagaaactgaagaaccatctagtcctactggtgtcttagttaacagcaatttacctattgctagtatttcagattataggttactgtgtgatattaacaagtatgtctgcaataagattagtcttctacctaatgatgaggacagtttgcccccacttctggttgcatctggagaaaagggatcagtgcctgtagtagaagaacatccatctcatgagcagatcattttgcttcttgaaggtgaaggctttcatcctgttacatttgtcctaaatgctaatctactcgtgaatgtcaaattcatattttattcctcagacaaatattggtacttttcaaccaatggattgcatggcttgggacaggcagaaattattattctattgttatgtttgccaaatgaagatactattcctaaggacatcttcagactatttatcaccatatataaggatgctctaaaaggaaaatacatagaaaacttggacaatattacctttactgagagttttctcagtagcaaggatcacggaggattcctgtttattacacctacttttcagaaacttgatgatctctcattaccaagtaatccttttctttgtggaattcttatccagaagcttgagattccctgggcaaaggtttttcctatgcgtttaatgttgagattgggtgcagaatataaagcatatcctgctcctctaacaagcatcagaggccgaaaacctctttttggagaaataggacacactattatgaacttacttgttgaccttcgaaattaccagtataccttgcataatatagatcaactgttgattcatatggaaatgggaaaaagctgcataaaaataccacggaaaaagtacagtgatgtaatgaaagtactaaattcttccaatgagcatgtcattagcattggagcaagtttcagtacagaagcagattctcatctagtctgtatacagaatgatggaatttatgaaacacaggccaacagtgccactggccatcctagaaaagtgacaggtgcaagttttgtggtattcaatggagctctaaaaacatcttcaggatttcttgctaagtccagcatagttgaagatggcttaatggtacaaataactccagagaccatgaatggcttgcggctagctttacgagaacagaaagactttaaaattacatgtgggaaagttgatgcagtagacctgagagaatacgtggatatctgctgggtagatgctgaagaaaaaggaaacaaaggagttatcagttcagtggatggaatatcattacaaggatttccaagtgaaaaaataaaactggaagcagattttgaaaccgatgagaagattgtaaaatgtaccgaggtgttctactttctaaaggaccaggatttatctattttatcaacttcttatcagtttgcaaaagaaatagccatggcttgtagtgctgcgctgtgccctcacctgaaaactctaaaaagtaatgggatgaataaaattggactcagagtttccattgacactgatatggttgaatttcaggcaggatctgaaggccaacttctgcctcagcattatctaaatgatcttgatagtgctctgatacctgtgatccatggtgggacctccaactctagtttaccattagaaatagaattagtgtttttcattatagaacatcttttttagtgaaagaatgtgccatattacatattgcaacctaatttgttaaaactaactccagcactaaagctgaaatgccacaaacactaaaagtataaatatgtctgatttttgaaacacataagctttgctctttaggcaggaatgatcttttcaaatcattagcacaatatttaaatatctaaaaatttaagagatccatactttctgtagctttacaattaatttaagtactaaaaagacaaggatttcttttaagaaatttatagcatttactgtgttatttaaatgctaagccaaagtatctgcacttaggtatacctctttatgccaataatgattttaatgaaggctcttttcagatgtaaccttatgaaggaaatatctgctttgtgtatatgccagttagaatactggtttctaaagtctgtcaaattgtatttcagtggcacaaaaaccagttttgaggtcttagacttataattctttgaataaaactgataacttatttgtataattggagtggagacctacctccataattagataaactctttttggattataatcagaattttgccttttttcttctcaaattattacatatgtatgtattatatatccacatatatagttttccctgattaaatggatattaaaataattgcgggtgcttcaggactttttgcttctatatttaagtatattgtttttatagcaagaacatattctgaatgttttataaatctttaataatttatatgtaggtaatatttttgtatcacaatgcattattttttttcctcctttccttccaaactataccactgtatttaccacttctaagagtgactgacgacgggccagatgacccttgaagtagtcattatgtagcaataaatgaagcctgaaacaggtttttttacttccactttaatccttagaaatttcttggcaacttcgcatattttcattgacactggtgtataagtataaatttaaatgaactaattacttttgcatattttaaattctttatatggtagttattttttataacaggatattaacataagttaaatcctatgtatttgaaattgttacagagctttcctctttacttcaaacagcaaaaaagtggggggcatattgtagtcctgtcatttaagttatgtaaaaaatttaatcattattttgatgctttaaacattctcatgtgtaatatatgtttttgtatcaaaaacactcatatatttcaagaaaaagaaattatgttaaatagccctgttttaagaaaaatatttatgaagcatctcaacttgaagatcaagtcaaagttataactcaggatctgaggtctcaagctaggagagactgagaattttaatcagtttgggcatatagtttggactgaatcacatctgtagtacttagccaaagacaatttggaggagaatatcagccttctggaagtagctacttcctgaacaatgtaaagtgtcgcagatattcaataaaatggcaacctgttataatttgtgaaatttattgaaatggtgtaagatgaaaacaattgcatatcaaacccaatttatgttttctaaatatagtgtatgtattctgccatgtaagtaattgaacagtcttaaaataaccaaatggtagagggctgttccatgatgggacagctttggatttgttttcataaaatctctacattcaataaaaattggaattatgtgcctgaagtttggaggcacattttgaagt

SEQ ID NO: 774 - protein, 1539 aa, Homo sapien
MDSYFKAAVSDLDKLLDDFEQNPDEQDYLQDVQNAYDSNHCSVSSELASSQRTSLLPKDQECVNSCASSETSYGTNESSLNEKTLKGLTSIQNEKNVTGLDLLSSVDGGTSDEIQPLYMGRCSKPICDLISDMGNLVHATNSEEDIKKLLPDDFKSNADSLIGLDLSSVSDTPCVSSTDHDSDTVREQQNDTSSELQNREIGGIKELGIKVDTTLSDSYNYSGTENLKDKKIFNQLESIVDFNMSSALTRQSSKMFHAKDKLQHKSQPCGLLKDVGLVKEEVDVAVITAAECLKEEGKTSALTCSLPKNEDLCLNDSNSRDENFKLPDFSFQEDKTVIKQSAQEDSKSLDLKDNDVIQDSSSALHVSSKDVPSSLSCLPASGSMCGSLIESKARGDFLPQHEHKDNIQDAVTIHEEIQNSVVLGGEPFKENDLLKQEKCKSILLQSLIEGMEDRKIDPDQTVIRAESLDGGDTSSTVVESQEGLSGTHVPESSDCCEGFINTFSSNDMDGQDLDYFNIDEGAKSGPLISDAELDAFLTEQYLQTTNIKSFEENVNDSKSQMNQIDMKGLDDGNINNIYFNAEAGAIGESHGINIICETVDKQNTIENGLSLGEKSTIPVQQGLPTSKSEITNQLSVSDINSQSVGGARPKQLFSLPSRTRSSKDLNKPDVPDTIESEPSTADTVVPITCAIDSTADPQVSFNSNYIDIESNSEGGSSFVTANEDSVPENTCKEGLVLGQKQPTWVPDSEAPNCMNCQVKFTFTKRRHHCRACGKVFCGVCCNRKCKLQYLEKEARVCVVCYETISKAQAFERMMSPTGSNLKSNHSDECTTVQPPQENQTSSIPSPATLPVSALKQPGVEGLCSKEQKRVWFADGILPNGEVADTTKLSSGSKRCSEDFSPLSPDVPMTVNTVDHSHSTTVEKPNNETGDITRNEIIQSPISQVPSVEKLSMNTGNEGLPTSGSFTLDDDVFAETEEPSSPTGVLVNSNLPIASISDYRLLCDINKYVCNKISLLPNDEDSLPPLLVASGEKGSVPVVEEHPSHEQIILLLEGEGFHPVTFVLNANLLVNVKFIFYSSDKYWYFSTNGLHGLGQAEIIILLLCLPNEDTIPKDIFRLFITIYKDALKGKYIENLDNITFTESFLSSKDHGGFLFITPTFQKLDDLSLPSNPFLCGILIQKLEIPWAKVFPMRLMLRLGAEYKAYPAPLTSIRGRKPLFGEIGHTIMNLLVDLRNYQYTLHNIDQLLIHMEMGKSCIKIPRKKYSDVMKVLNSSNEHVISIGASFSTEADSHLVCIQNDGIYETQANSATGHPRKVTGASFVVFNGALKTSSGFLAKSSIVEDGLMVQITPETMNGLRLALREQKDFKITCGKVDAVDLREYVDICWVDAEEKGNKGVISSVDGISLQGFPSEKIKLEADFETDEKIVKCTEVFYFLKDQDLSILSTSYQFAKEIAMACSAALCPHLKTLKSNGMNKIGLRVSIDTDMVEFQAGSEGQLLPQHYLNDLDSALIPVIHGGTSNSSLPLEIELVFFIIEHLF

SEQ ID NO: 775 - DNA, 1181 bp, Homo sapien
ggcacgagggcgatgcgggcgcccccggcgggcggccccggcgggcaccatgagccctctgctccgccgcctgctgctcgccgcactcctgcagctggcccccgcccaggcccctgtctcccagcctgatgcccctggccaccagaggaaagtggtgtcatggatagatgtgtatactcgcgctacctgccagccccgggaggtggtggtgcccttgactgtggagctcatgggcaccgtggccaaacagctggtgcccagctgcgtgactgtgcagcgctgtggtggctgctgccctgacgatggcctggagtgtgtgcccactgggcagcaccaagtccggatgcagatcctcatgatccggtacccgagcagtcagctgggggagatgtccctggaagaacacagccagtgtgaatgcagacctaaaaaaaaggacagtgctgtgaagccagacagggctgccactccccaccaccgtccccagccccgttctgttccgggctgggactctgcccccggagcaccctccccagctgacatcacccatcccactccagccccaggcccctctgcccacgctgcacccagcaccaccagcgccctgacccccggacctgccgctgccgctgccgacgccgcagcttcctccgttgccaagggcggggcttagagctcaacccagacacctgcaggtgccggaagctgcgaaggtgacacatggcttttcagactcagcagggtgacttgcctcagaggctatatcccagtgggggaacaaagaggagcctggtaaaaaacagccaagcccccaagacctcagcccaggcagaagctgctctaggacctgggcctctcagagggctcttctgccatcccttgtctccctgaggccatcatcaaacaggacagagttggaagaggagactgggaggcagcaagaggggtcacataccagctcaggggagaatggagtactgtctcagtttctaaccactctgtgcaagtaagcatcttacaactggctcttcctcccctcactaagaagacccaaacctctgcataatgggatttgggctttggtacaagaactgtgacccccaaccctgataaaagagatggaaggaaaaaaaaaaaaaaaaaaaaaaaaaaaaaaaaaaaaaaaaaaaaaaaaaaaaaaa

SEQ ID NO: 776 - protein, 207 aa, Homo sapien
MSPLLRRLLLAALLQLAPAQAPVSQPDAPGHQRKVVSWIDVYTRATCQPREVVVPLTVELMGTVAKQLVPSCVTVQRCGGCCPDDGLECVPTGQHQVRMQILMIRYPSSQLGEMSLEEHSQCECRPKKKDSAVKPDRAATPHHRPQPRSVPGWDSAPGAPSPADITHPTPAPGPSAHAAPSTTSALTPGPAAAAADAAASSVAKGGA

SEQ ID NO: 777 - DNA, 2230 bp, Homo sapien
gcagcccactcttcccgagaggccccgacatctcccggataatctggagctttcaaaatgtttgccaaagcaaccaggaattttcttagagaagttgatgctgatggtgacctgattgcagtatcaaatctgaatgactctgataagttacagcttctaagtctggtgacaaaaaagaagagattctggtgctggcagagacccaagtaccagtttttatccctcacccttggcgatgtactcatagaagaccaatttccgagtccagtggtcgtggagtcggactttgtgaaatacgagggcaagtttgcaaaccacgtgagtggaaccctggagactgcactggggaaggtcaagctgaacctggggggcagcagccgcgtagagagccagtcttcatttggaaccctgaggaagcaggaggtggatttgcagcagctcatcagagactctgccgagagaacaataaatctgagaaaccctgtgctccagcaggtgctggaaggaaggaatgaggtcctgtgcgttttgacacagaagatcacgacgatgcagaagtgtgtgatctctgagcacatgcaggtcgaggagaagtgtggtggcatcgtgggcatccagaccaagacggtgcaggtgtcagcgacggaggatgggaatgtcaccaaggactccaacgtggtgctggagatcccagctgccaccaccattgcctacggtgtcattgagttatacgtgaaactggacggccagttcgagttctgccttctccgagggaagcaaggtggcttcgagaacaagaagagaattgactctgtctacctggaccccctggtctttcgagagtttgcattcatagacatgccagatgctgcgcatgggatatcttcccaggatggaccattaagtgttttaaagcaagcgaccctgctcctggagaggaatttccatccatttgcggagctgcctgagccacaacagacagctttgagtgacatcttccaggcggtcctatttgatgatgaactactcatggtcctggaaccagtgtgcgatgacctggtcagcggcctctcgcccacagtggcggtgctgggggagctgaagccccggcagcagcaggaccttgtggccttcctgcagctggtggggtgcagcttacagggtgggtgtccgggccccgaggatgcaggcagcaagcagctgtttatgacagcctacttcttggtcagtgccctcgcagaaatgccagatagcgcggcagctctgctgggcacttgctgcaaactccagatcattcccacactgtgccacttgcttcgtgctctgtctgatgatggagtatctgatcttgaagacccaaccttgactcccctgaaagatacagaaaggtttgggattgtgcagcgcttgtttgcctcagctgacattagtctggagagactgaagtcatctgtgaaagctgtcattctgaaggactctaaagtcttcccactgcttctttgtataaccctgaatggactctgtgctttaggcagagaacattcatgatgtcatatgtgaactagaagtacgtgttactggccaaggctatttttcagaactgttaaaggtcatatgcacgttaaaagttgaccaatgaaatgaatttacagaacagtttaagaagtggtgacattttgcatgatgaatgacctgacttttagccaccaggtactctttaaacagttttccttatcagaggccctcctgtgctggtgacccagcatctgagttaggttccagcatgtaaagagctgggagggcggagaattcttagcatacattcagacgttttttctgcacaataataagtccatctgtcacttgcattccactttttgttacatagaaagagtctgaccctttaatccaaaaggtctttttacattgtgaatgctgtgggaaggcaatttctctgcacacaagaggctacgttttggaagtgatgtatgttatttgatgactgaaaatgaactgtaaatgctcctagagtatattcctctgctgaacaaaattaaacttcaaaaaaatctaacagtaacacacccctgcttgggaccctagctatatgcattttatgtgaccttgccatgcttcagtgaacatactaattctatgtctagcacatgttgatttcctatgtattctgggtattctattaaaggaaactttgaactattaaaaaaaaaaa

SEQ ID NO: 778 - protein, 496 aa, Homo sapien
MFAKATRNFLREVDADGDLIAVSNLNDSDKLQLLSLVTKKKRFWCWQRPKYQFLSLTLGDVLIEDQFPSPVVVESDFVKYEGKFANHVSGTLETALGKVKLNLGGSSRVESQSSFGTLRKQEVDLQQLIRDSAERTINLRNPVLQQVLEGRNEVLCVLTQKITTMQKCVISEHMQVEEKCGGIVGIQTKTVQVSATEDGNVTKDSNVVLEIPAATTIAYGVIELYVKLDGQFEFCLLRGKQGGFENKKRIDSVYLDPLVFREFAFIDMPDAAHGISSQDGPLSVLKQATLLLERNFHPFAELPEPQQTALSDIFQAVLFDDELLMVLEPVCDDLVSGLSPTVAVLGELKPRQQQDLVAFLQLVGCSLQGGCPGPEDAGSKQLFMTAYFLVSALAEMPDSAAALLGTCCKLQIIPTLCHLLRALSDDGVSDLEDPTLTPLKDTERFGIVQRLFASADISLERLKSSVKAVILKDSKVFPLLLCITLNGLCALGREHS

SEQ ID NO: 779 - DNA, 817 bp, Homo sapien
gaaggaggcccagacagtgagggcaggagggagagaagagacgcagaaggagagcgagcgagagagaaagggttctggattggaggggagagcaagggagggaggaaggcggtgagagaggcgggggcctcgggagggtgaaaggagggaggagaagggcggggcacggaggcccgagcgagggacaagactccgactccagctctgacttttttcgcggctctcggcttccactgcagccatgtcactcctcttgctggtggtctcagcccttcacatcctcattcttatactgcttttcgtggccactttggacaagtcctggtggactctccctgggaaagagtccctgaatctctggtacgactgcacgtggaacaacgacaccaaaacatgggcctgcagtaatgtcagcgagaatggctggctgaaggcggtgcaggtcctcatggtgctctccctcattctctgctgtctctccttcatcctgttcatgttccagctctacaccatgcgacgaggaggtctcttctatgccaccggcctctgccagctttgcaccagcgtggcggtgtttactggcgccttgatctatgccattcacgccgaggagatcctggagaagcacccgcgagggggcagcttcggatactgcttcgccctggcctgggtggccttccccctcgccctggtcagcggcatcatctacatccacctacggaagcgggagtgagcgccccgcctcgctcggctgcccccgccccttcccggcccccctcgccgcgcgtcctccaaaaaaataaaactttaacggcgg

SEQ ID NO: 780 - protein, 163 aa, Homo sapien
MSLLLLVVSALHILILILLFVATLDKSWWTLPGKESLNLWYDCTWNNDTKTWACSNVSENGWLKAVQVLMVLSLILCCLSFILFMFQLYTMRRGGLFYATGLCQLCTSVAVFTGALIYAIHAEEILEKHPRGGSFGYCFALAWVAFPLALVSGIIYIHLRKRE

SEQ ID NO: 781 - DNA, 2665 bp, Homo sapien
ggctctgggcatcaccagcggccccagggaaaaagaaagaaatgggaaacagcatgaaatccacccctgcgcctgccgagaggcccctgcccaacccggagggactggatagcgacttccttgccgtgctaagtgactacccgtctcctgacatcagccccccgatattccgccgaggggagaaactgcgtgtgatttctgatgaagggggctggtggaaagctatttctcttagcactggtcgagagagttacatccctggaatatgtgtggccagagtttaccatggctggctgtttgagggcctgggcagagacaaggccgaggagctgctgcagctgccagacacaaaggtcggctccttcatgatcagagagagtgagaccaagaaagggttttactcactgtcggtgagacacaggcaggtaaagcattaccgcattttccgtctgccgaacaactggtactacatttccccgaggctcaccttccagtgcctggaggacctggtgaaccactattctgaggtggctgatggcctgtgctgtgtgctcaccacgccctgcctgacacaaagcacggctgccccagcagtgagggcctccagctcacctgtcaccttgcgtcagaagactgtggactggaggagagtgtccagactgcaggaggaccccgagggaacagagaacccgcttggggtagacgagtcccttttcagctatggccttcgagagagcattgcctcttacctgtccctgaccagtgaggacaacacctcctttgatcgaaagaagaaaagcatctccctgatgtatggtggcagcaagagaaagagctcattcttctcatcaccaccttactttgaggactagccaagaacagacacaatggttcatgcccaaaaggaacagaagttccaactattgcctgggatcttgcgaaaagcgaggttccctgatccctgggagcctcacgtattttagaagccaagagaagccacatggagactcaaattcgcatcttctctatccacatcatgaccaaaggaacccctccctggtgtctgatcagggctgtggcatcacaaaacattggatcatgacatgtcgggcgatgcttggaaaagcccagcatgtatgtatgcacacattgtgtgtgtgggaaggacaaagccactctcacaagaaagggcaccaggactgctctccaaggaactggacctgtccagacagttacactccaaggtcattggagagaacttctgtatgggcaagcctgagagggagaggaaacaaaagctgtgtcctggcagaaggtctgggtttgcagatgggtgccctgaatggaactactttaactaatccatagggacttctggtatgctttcctctctttttaaaggaacttcgtgacactaaacattagcccaaaggacttcttagccttcaattgggagatacctttggtctgctcctgcaccaaagccatatgggtggaagtcagttggcctccctggttctgcagagggccagaagaatgagagagaggaagactgctggcagggaaatcgaggaggcgagactagaactgcaccagcttccctgatgtctgcagccatggctttgcagcgcaaacagaacttctctgggatgctgggattcttgcctgtatgaatgcatcaagtattcatttattgcccgaataggcattgcattaagtcctctgttaggtgtcaggcaagccaaaaaaaaaaaaaagatgctaagtcctaacccccaacagaagtgttcacagtgtagacgggaaaaaatgtataaacaaatgtgtaaaaagagaaatcagctcatggcttaggatggaattagagacaggtgagggacactcaggagctcattttccagctgctcttcagagtggaagggctggctggatcgggtaggtaagaatagctggattttttagaaaagaaatggatacagtctaaagaattaactcacccggtactttattctaagaagggtctggcatccatatgaggaaaaatgctcagctccaggaaagatggggagtccaagtggattaatgatgtcatgcataattttaagagacaagggagaaaacacaatgtatagccagagaaggagaagctcccatccaaatcctactaggaagagagtgggctgcagatgaatctgtgactcatgtttccctgtttcaaagggatcctggggaaggaggggaacatgcttgcagtatctctccctgtctgtctgctcacataagcattccgtccatctaagctcatcgtgctactggtatgtgtatgtgcagttacacagtttcctgtatcataaatcctagtgtgtttatacaaggagacatctgtggtttccccaaccgttccaaaaggctatttcaaaggaaccagcccacgtatgagaaatgaatgtaacactgtggacattgacttcccgcataaggcagggtgaccccctgaactccagatgtttgcacagtatcttatgtgttgttttccgttgtgacgaatgtgattggaacatttggggagcacccagagggatttttcagtgggaagcattacactttgctaaatcatgtatttattcctgattaaaacaaacctaataaatatttaacccttggc

SEQ ID NO: 782 - protein, 276 aa, Homo sapien
MGNSMKSTPAPAERPLPNPEGLDSDFLAVLSDYPSPDISPPIFRRGEKLRVISDEGGWWKAISLSTGRESYIPGICVARVYHGWLFEGLGRDKAEELLQLPDTKVGSFMIRESETKKGFYSLSVRHRQVKHYRIFRLPNNWYYISPRLTFQCLEDLVNHYSEVADGLCCVLTTPCLTQSTAAPAVRASSSPVTLRQKTVDWRRVSRLQEDPEGTENPLGVDESLFSYGLRESIASYLSLTSEDNTSFDRKKKSISLMYGGSKRKSSFFSSPPYFED

SEQ ID NO: 783 - DNA, 3150 bp, Homo sapien
ggccaggaacgcacgctgcctggccgtatcgccgcccccaccgacgccgccgccgggactagaagtgagccgcccgggtcccaaacgccagccagccagtcagtgggtcccgcagtcgcccgcaaccggggcgaatcatggcggccgccaaggtggctttaaccaagagagcagatccagctgagcttagaacaatatttttgaagtatgcaagcattgagaaaaacggtgaatttttcatgtcccccaatgactttgtcactcgatacttgaacatttttggagaaagccagcctaatccaaagactgtggaacttttaagtggagtggtggatcagaccaaagatggattaatatcttttcaagaatttgttgcctttgaatctgtcctgtgtgcccctgatgctttgtttatggtagcctttcagctgtttgacaaagctggcaaaggagaagtaacttttgaggatgttaagcaagtttttggacagaccacaattcatcaacatattccatttaactgggattcagaatttgtgcaactacattttggaaaagaaagaaaaagacacctgacatatgcggaatttactcagtttttattggaaatacaactggagcacgcaaagcaagcctttgtgcaacgggacaatgctaggactgggagagtcacagccatcgacttccgagacatcatggtcaccatccgcccccatgtcttgactccttttgtagaagaatgtctagtagctgctgctggaggtaccacatcccatcaagttagtttctcctattttaatggatttaattcgctccttaacaacatggaactcattagaaagatctatagcactctggctggcaccaggaaagatgttgaagtgactaaggaggagtttgttctggcagctcagaaatttggtcaggttacacccatggaagttgacatcttgtttcagttagcagatttatatgagccaaggggacgtatgaccttagcagacattgaacggattgctcctctggaagagggaactctgccctttaacttggctgaggcccagaggcagaaggcctcaggtgattcagctcgaccagttcttctacaagttgcagagtcggcctacaggtttggtctgggttctgttgctggagctgttggagccactgctgtgtatcctatcgatcttgtaaaaactcgaatgcagaaccaacgatcaactggctcttttgtgggagaactcatgtataaaaacagctttgactgttttaagaaagtgctacgctatgaaggcttctttggactgtatagaggtctgttgccacagttattgggagttgccccagagaaggccataaaacttacagtgaacgattttgtgagggataaatttatgcacaaagatggttcggtcccacttgcagcagaaattcttgctggaggctgcgctggaggctcccaggtgattttcacaaatcctttagaaatcgtcaagatccgtttgcaagtggcaggagaaatcaccactggtcctcgagtcagtgctctgtctgtcgtgcgggacctggggttttttgggatctacaagggtgccaaagcatgctttctgcgggacattcctttctcggccatctactttccgtgctatgctcatgtgaaggcttcctttgcaaatgaagatgggcaggttagcccaggaagcctgctcttagctggtgccatagctggtatgcctgcagcatctttagtgacccctgctgatgttatcaagacgagattacaggtggctgcccgggctggccaaaccacttacagcggagtgatagactgctttagaaagatactgcgtgaagaaggaccaaaagctctgtggaagggagctggtgctcgtgtatttcgatcctcaccccagtttggtgtaactttgctgacttacgaattgctacagcgatggttctacattgattttggaggagtaaaacccatgggatcagagccagttcctaaatccaggatcaacctgcctgccccgaatcctgatcacgttgggggctacaaactggcagttgctacatttgcagggattgaaaacaaatttggactttacctacctctcttcaagccatcagtatctacctcaaaggctattggtggaggcccataggaagatcagccctgggatagtgctgtctttttgtgggtactgcagtaaagaacatccctcctgggaatgaagcaatgcttcatcccttttacgtccatctcttgtttaaattcaagtccaggcttttttatcatgtgaaatcattcattttctgggtgttttcttaaccagatcattgtgaaattattcataattattatttggccctctgcccagaaacctttgtttgcatctgaaaattgatgggatttggtcaacactaacatgatttggggaaaggagcaagtcagaatagaaattagtactcccctccttgaactaggattgtagtcccaaagaggctactgtaaggcaatcatggtgctcagagcagtgtttcgtgtgtgttttaaactggtaggaaactaggtgcatatttataaaaataaaaaacactgggagaaatgaaaaaatatatatcaaatatattcagcctggcttcaaattgtaagcatgcacaaattctgtctctggattatattatgaagcttttatgtgaaacatgtttctttgtaatgaaaaccacattggagatgtttagtaatcatattgttactggtaccaagactactagggaaatgcctttgtactttagggaagtacttttggcattttactgtacagacagaaaaaactgagatgtagcccctctcctggaagtgctaattttgaaaaactgctcatatgatgtacatgtactgattactgcctattttaataaacactcttgaaaaatgcatgttgccctgttgctgcctgccctattctcctcatctccccatcattggtacccacttgcttttaaaatccactttatcttgaataatgtaagacaaatatgttctgacataagtatttaattcatgttgccttgcataatggtcagaggcgcatgaatttgtgaaggtggaaataaactatttgtaaagtgaaaaaaaaaaaaaaa

SEQ ID NO: 784 - protein, 675 aa, Homo sapien
MAAAKVALTKRADPAELRTIFLKYASIEKNGEFFMSPNDFVTRYLNIFGESQPNPKTVELLSGVVDQTKDGLISFQEFVAFESVLCAPDALFMVAFQLFDKAGKGEVTFEDVKQVFGQTTIHQHIPFNWDSEFVQLHFGKERKRHLTYAEFTQFLLEIQLEHAKQAFVQRDNARTGRVTAIDFRDIMVTIRPHVLTPFVEECLVAAAGGTTSHQVSFSYFNGFNSLLNNMELIRKIYSTLAGTRKDVEVTKEEFVLAAQKFGQVTPMEVDILFQLADLYEPRGRMTLADIERIAPLEEGTLPFNLAEAQRQKASGDSARPVLLQVAESAYRFGLGSVAGAVGATAVYPIDLVKTRMQNQRSTGSFVGELMYKNSFDCFKKVLRYEGFFGLYRGLLPQLLGVAPEKAIKLTVNDFVRDKFMHKDGSVPLAAEILAGGCAGGSQVIFTNPLEIVKIRLQVAGEITTGPRVSALSVVRDLGFFGIYKGAKACFLRDIPFSAIYFPCYAHVKASFANEDGQVSPGSLLLAGAIAGMPAASLVTPADVIKTRLQVAARAGQTTYSGVIDCFRKILREEGPKALWKGAGARVFRSSPQFGVTLLTYELLQRWFYIDFGGVKPMGSEPVPKSRINLPAPNPDHVGGYKLAVATFAGIENKFGLYLPLFKPSVSTSKAIGGGP

SEQ ID NO: 785 - DNA, 5177 bp, Homo sapien
ggactgcgaaaggagcagggttgcggagctagggctccagcctgcggccgcgcattcttgcgtctggccagccgcgagctctaagggtcggccccgcccggtccgcccccgcggctccctgccaggctctcgcgggcgcgctcggggtggggcctcgcggctggcggagatgcggccggggctgcgcggtggtgatgcgagcctgctgggcggcgcgccggggcagccggagccgcgcgccgcggcgctgtaatcggacaccaagagcgctcgcccccggcctccggccactttccattcactccgaggtgcttgattgagcgacgcggagaagagctccgggtgccgcggcactgcagcgctgagattcctttacaaagaaactcagaggaccgggaagaaagaatttcacctttgcgacgtgctagaaaataaggtcgtctgggaaaaggactggagacacaagcgcatccaaccccggtagcaaactgatgacttttccgtgctgatttctttcaacctcggtattttcccttggatattaacttgcatatctgaagaaatggcattccggacaatttgcgtgttggttggagtatttatttgttctatctgtgtgaaaggatcttcccagccccaagcaagagtttatttaacatttgatgaacttcgagaaaccaagacctctgaatacttcagcctttcccaccatcctttagactacaggattttattaatggatgaagatcaggaccggatatatgtgggaagcaaagatcacattctttccctgaatattaacaatataagtcaagaagctttgagtgttttctggccagcatctacaatcaaagttgaagaatgcaaaatggctggcaaagatcccacacacggctgtgggaactttgtccgtgtaattcagactttcaatcgcacacatttgtatgtctgtgggagtggcgctttcagtcctgtctgtacttacttgaacagagggaggagatcagaggaccaagttttcatgattgactccaagtgtgaatctggaaaaggacgctgctctttcaaccccaacgtgaacacggtgtctgttatgatcaatgaggagcttttctctggaatgtatatagatttcatggggacagatgctgctatttttcgaagtttaaccaagaggaatgcggtcagaactgatcaacataattccaaatggctaagtgaacctatgtttgtagatgcacatgtcatcccagatggtactgatccaaatgatgctaaggtgtacttcttcttcaaagaaaaactgactgacaataacaggagcacgaaacagattcattccatgattgctcgaatatgtcctaatgacactggtggactgcgtagccttgtcaacaagtggaccactttcttaaaggcgaggctggtgtgctcggtaacagatgaagacggcccagaaacacactttgatgaattagaggatgtgtttctgctggaaactgataacccgaggacaacactagtgtatggcatttttacaacatcaagctcagttttcaaaggatcagccgtgtgtgtgtatcatttatctgatatacagactgtgtttaatgggccttttgcccacaaagaagggcccaatcatcagctgatttcctatcagggcagaattccatatcctcgccctggaacttgtccaggaggagcatttacacccaatatgcgaaccaccaaggagttcccagatgatgttgtcacttttattcggaaccatcctctcatgtacaattccatctacccaatccacaaaaggcctttgattgttcgtattggcactgactacaagtacacaaagatagctgtggatcgagtgaacgctgctgatgggagataccatgtcctgtttctcggaacagatcggggtactgtgcaaaaagtggttgttcttcctactaacaactctgtcagtggcgagctcattctggaggagctggaagtctttaagaatcatgctcctataacaacaatgaaaatttcatctaaaaagcaacagttgtatgtgagttccaatgaaggggtttcccaagtatctctgcaccgctgccacatctatggtacagcctgtgctgactgctgcctggcgcgggacccttattgcgcctgggatggccattcctgttccagattctacccaactgggaaacggaggagccgaagacaagatgtgagacatggaaacccactgactcaatgcagaggatttaatctaaaagcatacagaaatgcagctgaaattgtgcagtatggagtaaaaaataacaccacttttctggagtgtgcccccaagtctccgcaggcatctatcaagtggctgttacagaaagacaaagacaggaggaaagaggttaagctgaatgaacgaataatagccacttcacagggactcctgatccgctctgttcagggttctgaccaaggactttatcactgcattgctacagaaaatagtttcaagcagaccatagccaagatcaacttcaaagttttagattcagaaatggtggctgttgtgacggacaaatggtccccgtggacctgggccagctctgtgagggctttacccttccacccgaaggacatcatgggggcattcagccactcagaaatgcagatgattaaccaatactgcaaagacactcggcagcaacatcagcagggagatgaatcacagaaaatgagaggggactatggcaagttaaaggccctcatcaatagtcggaaaagtagaaacaggaggaatcagttgccagagtcataatattttcttatgtgggtcttatgcttccattaacaaatgctctgtcttcaatgatcaaattttgagcaaagaaacttgtgctttaccaaggggaattactgaaaaaggtgattactcctgaagtgagttttacacgaactgaaatgagcatgcattttcttgtatgatagtgactagcactagacatgtcatggtcctcatggtgcatataaatatatttaacttaacccagattttatttatatctttattcaccttttcttcaaaatcgatatggtggctgcaaaactagaattgttgcatccctcaattgaatgagggccatatccctgtggtattcctttcctgctttggggctttagaattctaattgtcagtgattttgtatatgaaaacaagttccaaatccacagcttttacgtagtaaaagtcataaatgcatatgacagaatggctatcaaaagaaatagaaaaggaagacggcatttaaagttgtataaaaacacgagttattcataaagagaaaatgatgagtttttatggttccaatgaaatatcttcccctttttttaagattgtaaaaataatcagttactggtatctgtcactgacctttgtttccttattcaggaagataaaaatcagtaacctaccccatgaagatatttggtgggagttatatcagtgaagcagtttggtttatattcttatgttatcaccttccaaacaaaagcacttactttttttggaagttatttaatttattttagactcaaagaatataatcttgcactactcagttattactgtttgttctcttattccctagtctgtgtggcaaattaaacaatataagaaggaaaaatttgaagtattagacttctaaataaggggtgaaatcatcagaaagaaaaatcaaagtagaaactactaattttttaagaggaatttataacaaatatggctagttttcaacttcagtactcaaattcaatgattcttccttttattaaaaccagtctcagatatcatactgatttttaagtcaacactatatattttatgatcttttcagtgtgatggcaaggtgcttgttatgtctagaaagtaagaaaacaatatgaggagacattctgtctttcaaaaggtaatggtacatacgttcactggtctctaagtgtaaaagtagtaaattttgtgatgaataaaataattatctcctaattgtatgttagaataattttattagaataatttcatactgaaattattttctccaaataaaaattagatggaaaaatgtgaaaaaaattattcatgctctcatatatattttaaaaacactacttttgcttttttatttaccttttaagacattttcatgcttccaggtaaaaacagatattgtaccatgtacctaatccaaatatcatataaacattttatttatagttaataatctatgatgaaggtaattaaagtagattatggcctttttaagtattgcagtctaaaacttcaaaaactaaaatcattgtcaaaattaatatgattattaatcagaatatcagatatgattcactatttaaactatgataaattatgataatatatgaggaggcctcgctatagcaaaaatagttaaaatgctgacataacaccaaacttcattttttaaaaaatctgttgttccaaatgtgtataattttaaagtaatttctaaagcagtttattataatggtttgcctgcttaaaaggtataattaaacttcttttctcttctacattgacacacagaaatgtgtcaatgtaaagccaaaaccatcttctgtgtttatggccaatctattctcaaagttaaaagtaaaattgtttcagagtcacagttccctttatttcacataagcccaaactgatagacagtaacggtgtttagttttatactatatttgtgctatttaattctttctattttcacaattattaaattgtgtacactttcattacttttaaaaatgtagaaattcttcatgaacataactctgctgaatgtaaaagaaaattttttttcaaaaatgctgttaatgtatactactggtggttgattggttttattttatgtagcttgacaattcagtgacttaatatctattccatttgtattgtacataaaattttctagaaatacacttttttccaaagtgtaagtttgtgaatagattttagcatgatgaaactgtcataatggtgaatgttcaatctgtgtaagaaaacaaactaaatgtagttgtcacactaaaatttaattggatattgatgaaatcattggcctggcaaaataaaacatgttgaattcccc

SEQ ID NO: 786 - protein, 751 aa, Homo sapien
MAFRTICVLVGVFICSICVKGSSQPQARVYLTFDELRETKTSEYFSLSHHPLDYRILLMDEDQDRIYVGSKDHILSLNINNISQEALSVFWPASTIKVEECKMAGKDPTHGCGNFVRVIQTFNRTHLYVCGSGAFSPVCTYLNRGRRSEDQVFMIDSKCESGKGRCSFNPNVNTVSVMINEELFSGMYIDFMGTDAAIFRSLTKRNAVRTDQHNSKWLSEPMFVDAHVIPDGTDPNDAKVYFFFKEKLTDNNRSTKQIHSMIARICPNDTGGLRSLVNKWTTFLKARLVCSVTDEDGPETHFDELEDVFLLETDNPRTTLVYGIFTTSSSVFKGSAVCVYHLSDIQTVFNGPFAHKEGPNHQLISYQGRIPYPRPGTCPGGAFTPNMRTTKEFPDDVVTFIRNHPLMYNSIYPIHKRPLIVRIGTDYKYTKIAVDRVNAADGRYHVLFLGTDRGTVQKVVVLPTNNSVSGELILEELEVFKNHAPITTMKISSKKQQLYVSSNEGVSQVSLHRCHIYGTACADCCLARDPYCAWDGHSCSRFYPTGKRRSRRQDVRHGNPLTQCRGFNLKAYRNAAEIVQYGVKNNTTFLECAPKSPQASIKWLLQKDKDRRKEVKLNERIIATSQGLLIRSVQGSDQGLYHCIATENSFKQTIAKINFKVLDSEMVAVVTDKWSPWTWASSVRALPFHPKDIMGAFSHSEMQMINQYCKDTRQQHQQGDESQKMRGDYGKLKALINSRKSRNRRNQLPES

SEQ ID NO: 787 - DNA, 3085 bp, Homo sapien
gacggccgccggagccgcgaggccaactgtcgcctggttgggcccggaaatgggacgtcgcgctttctcagggagcgtagaagcagccagggcctctccaagccgctgctgtgacagaaagtgagtgagctgccggaggatgtccaccgccacgacagtcgcccccgcggggatcccggcgaccccgggccctgtgaacccaccccccccggaggtctccaaccccagcaagcccggccgcaagaccaaccagctgcagtacatgcagaatgtggtggtgaagacgctctggaaacaccagttcgcctggcccttctaccagcccgtggacgcaatcaaattgaacctgccggattatcataaaataattaaaaacccaatggatatggggactattaagaagagactagaaaataattattattggagtgcaagcgaatgtatgcaggacttcaacaccatgtttacaaattgttacatttataacaagcccacagatgacatagtgctaatggcccaagctttagagaaaatttttctacaaaaagtggcccagatgccccaagaggaagttgaattattaccccctgctccaaagggcaaaggtcggaagccggctgcgggagcccagagcgcaggtacacagcaagtggcggccgtgtcctctgtctccccagcgaccccctttcagagcgtgccccccaccgtctcccagacgcccgtcatcgctgccacccctgtaccaaccatcactgcaaacgtcacgtcggtcccagtccccccagctgccgccccacctcctcctgccacacccatcgtccccgtggtccctcctacgccgcctgtcgtcaagaaaaagggcgtgaagcggaaagcagacacaaccactcccacgacgtcggccatcactgccagccggagtgagtcgcccccgccgttgtcagaccccaagcaggccaaagtggtggcccggcgggagagtggtggccgccccatcaagcctcccaagaaggacctggaggacggcgaggtgccccagcacgcaggcaagaagggcaagctgtcggagcacctgcgctactgcgacagcatcctcagggagatgctatccaagaagcacgcggcctacgcctggcccttctacaagccagtggatgccgaggccctggagctgcacgactaccacgacatcatcaagcacccgatggacctcagcaccgtgaaaaggaagatggatggccgagagtacccagacgcacagggctttgctgctgatgtccggctgatgttctcgaattgctacaaatacaatcccccagaccacgaggttgtggccatggcccggaagctccaggacgtgtttgagatgaggtttgccaagatgccagatgagcccgtggaggcaccggcgctgcctgcccccgcggcccccatggtgagcaagggcgctgagagcagccgtagcagtgaggagagctcttcggactcaggcagctcggactcggaggaggagcgggccaccaggctggcggagctgcaggagcagctgaaggccgtgcacgagcagctggccgccctgtctcaggccccagtaaacaaaccaaagaagaagaaggagaagaaggagaaggagaagaagaagaaggacaaggagaaggagaaggagaagcacaaagtgaaggccgaggaagagaagaaggccaaggtggctccgcctgccaagcaggctcagcagaagaaggctcctgccaagaaggccaacagcacgaccacggccggcagacagctgaagaaaggcggcaagcaggcatctgcctcctacgactcagaggaagaggaggagggcctgcccatgagctacgatgaaaagcgccagcttagcctggacatcaaccggctgcccggggagaagctgggccgggtagtgcacatcatccaatctcgggagccctcgctcagggactccaaccccgacgagatagaaattgactttgagactctgaaacccaccactttgcgggaactggagagatatgtcaagtcttgtttacagaaaaagcaaaggaaaccgttctcagcaagcgggaagaaacaggcagccaagtcgaaagaggagctagctcaggaaaagaagaaggagctggaaaagcgtctgcaggatgtcagcgggcagctgagcagcagcaagaagcccgcccggaaagagaagcccggctcagcaccctcagggggcccgtccaggctcagcagcagcagctcctccgagtctgggagcagcagctccagcgggtccagctctgacagcagtgactcagaatgaactggcttcggacagaacaggacagatggatgtcgcacacgccgagactctgccgtacccctctgtggttcatattactacttctgttccatggtgtgcaggtctgcttcttaattcagtgttatgatatcttccagtttttgctttcataggtcagagatctatcttgtgtgtgcgttagacttgatgagaaggtgtgaactctgcagaaagtctcttcttcatcactgaattcagtcacttggagatgacaacttcaaatgctaacccgatgaccccagaaaaccgtgtgagattcgtaccgaagaaccttgtggaatccctttgcttaggcccaacctggtcgatagctcgagaaagaattttttccaaggaaatgtctcggatatgggtactgtatttgaaagctgttagctttgtcaacacgcattgtccttgtcatttgggccccgagctctgaccctcgtgtctgacgcggccacctctttctggaggggctgaggacagatgtgcctgcttgtggagaccaggctgggcctaagcgaagggtcatcgcagccccagcccggagcgtggagcccttggggggtggtcgggtgggatgtgcgttctccgctcgtggtgatgtcaggagctcctcggagggaacagagcggctgtgtatgcagcctgcaggtttccatacactgaagcttttacctcaactttaaaaaaaaaaaagaagaaaagattaaaaaaaaaaaaaaaaaactcgaggcatctatg

SEQ ID NO: 788 - protein, 726 aa, Homo sapien
MSTATTVAPAGIPATPGPVNPPPPEVSNPSKPGRKTNQLQYMQNVVVKTLWKHQFAWPFYQPVDAIKLNLPDYHKIIKNPMDMGTIKKRLENNYYWSASECMQDFNTMFTNCYIYNKPTDDIVLMAQALEKIFLQKVAQMPQEEVELLPPAPKGKGRKPAAGAQSAGTQQVAAVSSVSPATPFQSVPPTVSQTPVIAATPVPTITANVTSVPVPPAAAPPPPATPIVPVVPPTPPVVKKKGVKRKADTTTPTTSAITASRSESPPPLSDPKQAKVVARRESGGRPIKPPKKDLEDGEVPQHAGKKGKLSEHLRYCDSILREMLSKKHAAYAWPFYKPVDAEALELHDYHDIIKHPMDLSTVKRKMDGREYPDAQGFAADVRLMFSNCYKYNPPDHEVVAMARKLQDVFEMRFAKMPDEPVEAPALPAPAAPMVSKGAESSRSSEESSSDSGSSDSEEERATRLAELQEQLKAVHEQLAALSQAPVNKPKKKKEKKEKEKKKKDKEKEKEKHKVKAEEEKKAKVAPPAKQAQQKKAPAKKANSTTTAGRQLKKGGKQASASYDSEEEEEGLPMSYDEKRQLSLDINRLPGEKLGRVVHIIQSREPSLRDSNPDEIEIDFETLKPTTLRELERYVKSCLQKKQRKPFSASGKKQAAKSKEELAQEKKKELEKRLQDVSGQLSSSKKPARKEKPGSAPSGGPSRLSSSSSSESGSSSSSGSSSDSSDSE

SEQ ID NO: 789 - DNA, 4548 bp, Homo sapien
gaattccgggagcccgcggaggctgctgcagcagcccgaaccggcgtccgagtccggggaaggcccccgcgagcgcagggaggggccggaaagttccggcgaactgggggagcggcagtgggagagcgtcgggcgggaggcggtggtcctgggagcggccccggcgcccgaagccgccccgagctggtggggagggtcccggccggtggggccgggctggcgggggaggggcgcctgggggtgcaagaggcgaattggctgcccggggtgcaggagggacaggtggtgcgggctgtcaggaaacctacctgaacgggaaggagccccaggagggagagggacccggcgagggctcaggacccggaggcgccggcggaggaggaggtggtgactggcaggcccgggccccacggtacctccggggctgaaggggacgcaggatgtaggggcatggggagtcgggcgcagaagagtgcggggaacgctgagctctgggagccactgcctgagggcaggccgcggccggcgggaacctcttctgccgtctcagcctgggcgtcgctgaagctgtgtctgcggggaggcagcggaaggcggcagaggctgggaggcggcagaatgcagccagaggagggcacaggctggctgctggagctgctgtccgaggtgcagctgcaacagtacttcctgcggctccgagatgacctcaacgtcacccgcctgtcccactttgagtacgtcaagaatgaggacctggagaagatcggcatgggtcggcctggccagcggcggctgtgggaggctgtgaagaggaggaaggccttgtgcaaacgcaagtcgtggatgagtaaggtgttcagtggaaagcgactggaggctgagttcccacctcatcactctcagagcaccttccggaagacctcgcccgcccctgggggcccagcaggggaggggcccctgcagagcctcacctgcctcattggggagaaggacctgcgcctcctggagaagctgggtgatggttcctttggcgtggtgcgcaggggcgagtgggacgcgccctcagggaagacggtgagtgtggctgtgaagtgcctgaagcccgatgtcctgagccagccagaagccatggacgacttcatccgggaggtcaatgccatgcactcgctcgaccaccgaaacctcatccgcctctacggggtggtgctcacgccgcccatgaagatggtgacagagctggcacctctgggatcgttgttggaccggctacgtaagcaccagggccacttcctcctggggactctgagccgctacgctgtgcaggtggctgagggcatgggctacctggagtccaagcgctttattcaccgtgacctggctgcccgcaatctgctgttggctacccgcgacctggtcaagatcggggactttgggctgatgcgagcactacctcagaatgacgaccattacgtcatgcaggaacatcgcaaggtgcccttcgcctggtgtgcccccgagagcctgaagacacgcaccttctcccatgccagcgacacctggatgttcggggtgacactgtgggaaatgttcacctacggccaggagccctggatcggcctcaacggcagtcagatcctgcataagatcgacaaggagggggagcggctgccccggcccgaggactgtccccaggacatctacaacgtcatggtccagtgctgggctcacaagccagaggacagacccacgtttgtggccctgcgggacttcctgctggaggcccagcccacagacatgcgggcccttcaggactttgaggaaccggacaagctgcacatccagatgaatgatgtcatcaccgtcatcgagggaagggccgagaactactggtggcgtggccagaacacacggacgctgtgtgtggggcccttccctcgcaacgtggtgacctccgtggccggcctgtcggcccaggacatcagccagcccctgcagaacagcttcatccacacagggcatggcgacagtgacccccgccactgctggggcttcccggacaggattgacgaactgtatctgggaaaccccatggacccccccgacctcctgagcgtggaactgagcacctcccggcccccccagcatctaggaggggtgaaaaaaccaacctatgaccctgtgagcgaggaccaagaccccttgtccagcgacttcaagaggctgggcctgcggaagccaggcctgccccgagggctgtggctggcgaagccctcggcgcgggtgccgggcaccaaggccagccgaggcagcggggctgaggtcacgctcatcgacttcggtgaggagcccgtggtcccggccctacggccctgcccgccctccctggcgcagctggccatggacgcctgctccctgctggacgagaccccgcctcagagccccacgcgggcactgccccggcccctgcaccccacgcctgtggtggactgggacgcacgcccgctgccccccccgcccgcctatgacgacgtggcccaggatgaggatgactttgagatctgctccatcaacagcaccctcgtgggcgcgggggtccctgccgggcccagccagggccagaccaactacgcctttgtgcctgagcaggcgcggccgccccctcccctggaggacaacctgttcctcccgccccagggtgggggcaagccgcccagctccgcacagaccgcagagatcttccaggcgctacagcaggagtgcatgaggcaactgcaggctccgggctccccggccccctctcccagcccggggggtgacgacaagccccaggtgcctcctcgggtacccatcccccctcggcccacgcgcccacacgtccagctgtctccagcccccccgggcgaggaggagaccagccagtggcctggacctgcttcccctccccgggtgcctccgcgggagcccctgtcccctcaaggctcgaggacacccagccccctggtaccacctggcagctccccgctgccaccccggctctcaagctcacctgggaagaccatgcccaccacccagagctttgcctcagaccccaagtacgccaccccccaggtgatccaggcccctggcgcgggtggtccctgcatcctgcccatcgtccgggatggcaagaaggtcagcagcacccactattacttgctgcccgagcgaccatcctacctggagcgctaccagcgcttcctgcgtgaggcccagagccccgaggagcctacccccctgcctgtgcctctgctgctgcccccacccagcaccccagcccccgccgcccccacggccaccgtgcggccgatgccccaggctgccttggaccccaaggccaacttctccaccaacaacagcaacccaggggcccggccaccacccccgagggccactgctcggctgccacagaggggctgccctggcgatgggccagaggcgggccggccagcagacaagatccagatggccatggtgcatggggtgaccacagaggagtgccaggcggccctgcagtgccacggctggagcgtgcagagggctgcccagtatctgaaggtggagcagctcttcgggctgggtctgcggcccagaggggagtgccacaaagtgctggagatgttcgactggaacctggagcaggccggctgccaccttctgggctcctggggccctgcccaccacaagcgctgagatgcgtctggagagccagagggcctgcctgaaggaatcacctgagcctgtccgtccaccaggagtggggagatgcccccatccagtcctggaggacccgctgctcctgctgctcccggggatggagcaaggccaaggctgcgggaggctgggagccctgccctgcccatccctcccgcaccagtgctgtccctgcacactttggttcagtcccggtgcccctgccaagatgtggaaggggccgggtgaagacaggcttgagggccgccccagcaggctctgggtatgacctgcctctggccctggtcctgggcggggcctgtgggtggagtagtacccccaggccctgccctgggtgacagactgggaggaaaccaggctggacctgggcaggcgggatgtgttggccacagggagaggcggaccggcacccggtgggacctcctaggactgggccttcttccagggggcccctggcagcagctggggtgtcgggcagaatgtgacttgtggccttaccatggacttgaatgggacttggctggcctcaggatcttgtgcctggaaatagcctgaggtggctcaggaagcggagaaagggtgccagaccattctctggcggggaccagggcccaaggccagggctggaaggagaccaaggggcagcccctggaggacatcagtgcttcctcttccacccaattcccccacgcggttccatgttttcccaccagcctgttgggcgaagttgctgctccggcattcagtcctgcttcttccagagaaataaagttagtttctattttatgttaaaaaaaa

SEQ ID NO: 790 - protein, 1036 aa, Homo sapien
MQPEEGTGWLLELLSEVQLQQYFLRLRDDLNVTRLSHFEYVKNEDLEKIGMGRPGQRRLWEAVKRRKALCKRKSWMSKVFSGKRLEAEFPPHHSQSTFRKTSPAPGGPAGEGPLQSLTCLIGEKDLRLLEKLGDGSFGVVRRGEWDAPSGKTVSVAVKCLKPDVLSQPEAMDDFIREVNAMHSLDHRNLIRLYGVVLTPPMKMVTELAPLGSLLDRLRKHQGHFLLGTLSRYAVQVAEGMGYLESKRFIHRDLAARNLLLATRDLVKIGDFGLMRALPQNDDHYVMQEHRKVPFAWCAPESLKTRTFSHASDTWMFGVTLWEMFTYGQEPWIGLNGSQILHKIDKEGERLPRPEDCPQDIYNVMVQCWAHKPEDRPTFVALRDFLLEAQPTDMRALQDFEEPDKLHIQMNDVITVIEGRAENYWWRGQNTRTLCVGPFPRNVVTSVAGLSAQDISQPLQNSFIHTGHGDSDPRHCWGFPDRIDELYLGNPMDPPDLLSVELSTSRPPQHLGGVKKPTYDPVSEDQDPLSSDFKRLGLRKPGLPRGLWLAKPSARVPGTKASRGSGAEVTLIDFGEEPVVPALRPCPPSLAQLAMDACSLLDETPPQSPTRALPRPLHPTPVVDWDARPLPPPPAYDDVAQDEDDFEICSINSTLVGAGVPAGPSQGQTNYAFVPEQARPPPPLEDNLFLPPQGGGKPPSSAQTAEIFQALQQECMRQLQAPGSPAPSPSPGGDDKPQVPPRVPIPPRPTRPHVQLSPAPPGEEETSQWPGPASPPRVPPREPLSPQGSRTPSPLVPPGSSPLPPRLSSSPGKTMPTTQSFASDPKYATPQVIQAPGAGGPCILPIVRDGKKVSSTHYYLLPERPSYLERYQRFLREAQSPEEPTPLPVPLLLPPPSTPAPAAPTATVRPMPQAALDPKANFSTNNSNPGARPPPPRATARLPQRGCPGDGPEAGRPADKIQMAMVHGVTTEECQAALQCHGWSVQRAAQYLKVEQLFGLGLRPRGECHKVLEMFDWNLEQAGCHLLGSWGPAHHKR

SEQ ID NO: 791 - DNA, 5220 bp, Homo sapien
cagtcgctccgagcggccgcgagcagagccgcccagccctgtcagctgcgccgggacgataaggagtcaggccagggcgggatgacactcattgattctaaagcatctttaatctgccaggcggagggggctttgctggtctttcttggactattccagagaggacaactgtcatctgggaagtaacaacgcaggatgccccctggggtggactgccccatggaattctggaccaaggaggagaatcagagcgttgtggttgacttcctgctgcccacaggggtctacctgaacttccctgtgtcccgcaatgccaacctcagcaccatcaagcagctgctgtggcaccgcgcccagtatgagccgctcttccacatgctcagtggccccgaggcctatgtgttcacctgcatcaaccagacagcggagcagcaagagctggaggacgagcaacggcgtctgtgtgacgtgcagcccttcctgcccgtcctgcgcctggtggcccgtgagggcgaccgcgtgaagaagctcatcaactcacagatcagcctcctcatcggcaaaggcctccacgagtttgactccttgtgcgacccagaagtgaacgactttcgcgccaagatgtgccaattctgcgaggaggcggccgcccgccggcagcagctgggctgggaggcctggctgcagtacagtttccccctgcagctggagccctcggctcaaacctgggggcctggtaccctgcggctcccgaaccgggcccttctggtcaacgttaagtttgagggcagcgaggagagcttcaccttccaggtgtccaccaaggacgtgccgctggcgctgatggcctgtgccctgcggaagaaggccacagtgttccggcagccgctggtggagcagccggaagactacacgctgcaggtgaacggcaggcatgagtacctgtatggcaactacccgctctgccagttccagtacatctgcagctgcctgcacagtgggttgacccctcacctgaccatggtccattcctcctccatcctcgccatgcgggatgagcagagcaaccctgccccccaggtccagaaaccgcgtgccaaaccacctcccattcctgcgaagaagccttcctctgtgtccctgtggtccctggagcagccgttccgcatcgagctcatccagggcagcaaagtgaacgccgacgagcggatgaagctggtggtgcaggccgggcttttccacggcaacgagatgctgtgcaagacggtgtccagctcggaggtgagcgtgtgctcggagcccgtgtggaagcagcggctggagttcgacatcaacatctgcgacctgccccgcatggcccgtctctgctttgcgctgtacgccgtgatcgagaaagccaagaaggctcgctccaccaagaagaagtccaagaaggcggactgccccattgcctgggccaacctcatgctgtttgactacaaggaccagcttaagaccggggaacgctgcctctacatgtggccctccgtcccagatgagaagggcgagctgctgaaccccacgggcactgtgcgcagtaaccccaacacggatagcgccgctgccctgctcatctgcctgcccgaggtggccccgcaccccgtgtactaccccgccctggagaagatcttggagctggggcgacacagcgagtgtgtgcatgtcaccgaggaggagcagctgcagctgcgggaaatcctggagcggcgggggtctggggagctgtatgagcacgagaaggacctggtgtggaagctgcggcatgaagtccaggagcacttcccggaggcgctagcccggctgctgctggtcaccaagtggaacaagcatgaggatgtggcccagatgctctacctgctgtgctcctggccggagctgcccgtcctgagcgccctggagctgctagacttcagcttccccgattgccacgtaggctccttcgccatcaagtcgctgcggaaactgacggacgatgagctgttccagtacctgctgcagctggtgcaggtgctcaagtacgagtcctacctggactgcgagctgaccaaattcctgctggaccgggccctggccaaccgcaagatcggccacttccttttctggcacctccgctccgagatgcacgtgccgtcggtggccctgcgcttcggcctcatcctggaggcctactgcaggggcagcacccaccacatgaaggtgctgatgaagcagggggaagcactgagcaaactgaaggccctgaatgacttcgtcaagctgagctctcagaagacccccaagccccagaccaaggagctgatgcacttgtgcatgcggcaggaggcctacctagaggccctctcccacctgcagtccccactcgaccccagcaccctgctggctgaagtctgcgtggagcagtgcaccttcatggactccaagatgaagcccctgtggatcatgtacagcaacgaggaggcaggcagcggcggcagcgtgggcatcatctttaagaacggggatgacctccggcaggacatgctgaccctgcagatgatccagctcatggacgtcctgtggaagcaggaggggctggacctgaggatgaccccctatggctgcctccccaccggggaccgcacaggcctcattgaggtggtactccgttcagacaccatcgccaacatccaactcaacaagagcaacatggcagccacagccgccttcaacaaggatgccctgctcaactggctgaagtccaagaacccgggggaggccctggatcgagccattgaggagttcaccctctcctgtgctggctattgtgtggccacatatgtgctgggcattggcgatcggcacagcgacaacatcatgatccgagagagtgggcagctgttccacattgattttggccactttctggggaatttcaagaccaagtttggaatcaaccgcgagcgtgtcccattcatcctcacctatgactttgtccatgtgattcagcaggggaagactaataatagtgagaaatttgaacggttccggggctactgtgaaagggcctacaccatcctgcggcgccacgggcttctcttcctccacctctttgccctgatgcgggcggcaggcctgcctgagctcagctgctccaaagacatccagtatctcaaggactccctggcactggggaaaacagaggaggaggcactgaagcacttccgagtgaagtttaacgaagccctccgtgagagctggaaaaccaaagtgaactggctggcccacaacgtgtccaaagacaacaggcagtagtggctcctcccagccctgggcccaagaggaggcggctgcgggtcgtggggaccaagcacattggtcctaaaggggctgaagagcctgaactgcacctaacgggaaagaaccgacatggctgccttttgtttacactggttatttatttatgacttgaaatagtttaaggagctaaacagccataaacggaaacgcctccttcattcagcggcggtgctgggccccccgaggctgcacctggctctcggctgaggattgtcaccccaagtcttccagctggtggatctgggcccagcaaagactgttctcctcccgagggaaccttcttcccaggcctcccgccagactgcctgggtcctggcgcctggcggtcacctggtgcctactgtccgacaggatgcctcgatcctcgtgcgacccaccctgtgtatcctccctagactgagttctggcagctccccgaggcagccggggtaccctctagattcagggatgcttgctctccacttttcaagtgggtcttgggtacgagaattccctcatctttctctactgtaaagtgattttgtttgcaggtaagaaaataatagatgactcaccacacctctacggctggggagatcaggcccagccccataaaggagaatctacgctggtcctcaggacgtgttaaagagatctgggcctcatgtagctcaccccggtcacgcatgaaggcaaaagcaggtcagaagcgaatactctgccattatctcaaaaatctttttttttttttttttgagatggggtcttcctctgttgcccaggctggagtgcagtggtgcaatcttggctcactgtaacctccgcctcccaggttcaagtgattcttcttgcctcagcctcctgagtagctgggattacaggtgtgcaccacccgtacccagctaatttttgtattttagtagagacgggggtttcaccatgttggctgggctggtctcgaactcctgacctcaggtgatccacccgcctgagcctcccaaagtgctgggattacaggcatgagccaccacgcccggcccactctgccattgtctaagccacctctgaaagcaggttttaacaaaaggatgaggccagaactcttccagaaccatcacctttgggaacctgctgtgagagtgctgaggtaccagaagtgtgagaacgagggggcgtgctgggatctttctctctgactatacttagtttgaaatggtgcaggcttagtcttaagcctccaaaggcctggatttgagcagctttagaaatgcaggttctagggcttctcccagccttcagaagccaactaactctgcagatggggctaggactgtgggcttttagcagcccacaggtgatcctaacatatcaggccatggactcaggacctgcccggtgatgctgttgatttctcaaaggtcttccaaaactcaacagagccagaagtagccgcccgctcagcggctcaggtgccagctctgttctgattcaccaggggtccgtcagtagtcattgccacccgcggggcacctccctggccacacgcctgttcccagcaagtgctgaaactcactagaccgtctgcctgtttcgaaatggggaaagccgtgcgtgcgcgttatttatttaagtgcgcctgtgtgcgcgggtgtgggagcacactttgcaaagccacagcgtttctggttttgggtgtacagtcttgtgtgcctggcgagaagaatattttctatttttttaagtcatttcatgtttctgtctggggaaggcaagttagttaagtatcactgatgtgggttgagaccagcactctgtgaaaccttgaaatgagaagtaaaggcagatgaaaagaaaaaaaaaaaaaaa

SEQ ID NO: 792 - protein, 1044 aa, Homo sapien
MPPGVDCPMEFWTKEENQSVVVDFLLPTGVYLNFPVSRNANLSTIKQLLWHRAQYEPLFHMLSGPEAYVFTCINQTAEQQELEDEQRRLCDVQPFLPVLRLVAREGDRVKKLINSQISLLIGKGLHEFDSLCDPEVNDFRAKMCQFCEEAAARRQQLGWEAWLQYSFPLQLEPSAQTWGPGTLRLPNRALLVNVKFEGSEESFTFQVSTKDVPLALMACALRKKATVFRQPLVEQPEDYTLQVNGRHEYLYGNYPLCQFQYICSCLHSGLTPHLTMVHSSSILAMRDEQSNPAPQVQKPRAKPPPIPAKKPSSVSLWSLEQPFRIELIQGSKVNADERMKLVVQAGLFHGNEMLCKTVSSSEVSVCSEPVWKQRLEFDINICDLPRMARLCFALYAVIEKAKKARSTKKKSKKADCPIAWANLMLFDYKDQLKTGERCLYMWPSVPDEKGELLNPTGTVRSNPNTDSAAALLICLPEVAPHPVYYPALEKILELGRHSECVHVTEEEQLQLREILERRGSGELYEHEKDLVWKLRHEVQEHFPEALARLLLVTKWNKHEDVAQMLYLLCSWPELPVLSALELLDFSFPDCHVGSFAIKSLRKLTDDELFQYLLQLVQVLKYESYLDCELTKFLLDRALANRKIGHFLFWHLRSEMHVPSVALRFGLILEAYCRGSTHHMKVLMKQGEALSKLKALNDFVKLSSQKTPKPQTKELMHLCMRQEAYLEALSHLQSPLDPSTLLAEVCVEQCTFMDSKMKPLWIMYSNEEAGSGGSVGIIFKNGDDLRQDMLTLQMIQLMDVLWKQEGLDLRMTPYGCLPTGDRTGLIEVVLRSDTIANIQLNKSNMAATAAFNKDALLNWLKSKNPGEALDRAIEEFTLSCAGYCVATYVLGIGDRHSDNIMIRESGQLFHIDFGHFLGNFKTKFGINRERVPFILTYDFVHVIQQGKTNNSEKFERFRGYCERAYTILRRHGLLFLHLFALMRAAGLPELSCSKDIQYLKDSLALGKTEEEALKHFRVKFNEALRESWKTKVNWLAHNVSKDNRQ

SEQ ID NO: 793 - DNA, 1152 bp, Homo sapien
cgctcctcgggctgcccctcggttgacaatggtctccaggatggtctctaccatgctatctggcctactgttttggctggcatctggatggactccagcatttgcttacagcccccggacccctgaccgggtctcagaagcagatatccagaggctgcttcatggtgttatggagcaattgggcattgccaggccccgagtggaatatccagctcaccaggccatgaatcttgtgggcccccagagcattgaaggtggagctcatgaaggacttcagcatttgggtccttttggcaacatccccaacatcgtggcagagttgactggagacaacattcctaaggactttagtgaggatcaggggtacccagaccctccaaatccctgtcctgttggaaaaacagatgatggatgtctagaaaacacccctgacactgcagagttcagtcgagagttccagttgcaccagcatctctttgatccggaacatgactatccaggcttgggcaagtggaacaagaaactcctttacgagaagatgaagggaggagagagacgaaagcggaggagtgtcaatccatatctacaaggacagagactggataatgttgttgcaaagaagtctgtcccccatttttcagatgaggataaggatccagagtaaagagaagatgctagacgaaaacccacattacctgttaggcctcagcatggcttatgtgcacgtgtaaatggagtccctgtgaatgacagcatgtttcttacatagataattatggatacaaagcagctgtatgtagatagtgtattgtcttcacaccgatgattctgctttttgctaaattagaataagagcttttttgtttcttgggtttttaaaatgtgaatctgcaatgatcataaaaattaaaatgtgaatgtcaacaataaaaagcaagactatgaaaggctcagatttcttgcagtttaaaatggtgtctgaggttgtactattttggccaagtctgtagaaagctgtcatttgattttgattatgtagttcatccagcccttgggcattgttatacaccagtaaagaaggctgtactcaagaggaggagctgacacatttcacttggctgcgtcttaataaacatgaatgcaagcattggc

SEQ ID NO: 794 - protein, 211 aa, Homo sapien
MVSRMVSTMLSGLLFWLASGWTPAFAYSPRTPDRVSEADIQRLLHGVMEQLGIARPRVEYPAHQAMNLVGPQSIEGGAHEGLQHLGPFGNIPNIVAELTGDNIPKDFSEDQGYPDPPNPCPVGKTDDGCLENTPDTAEFSREFQLHQHLFDPEHDYPGLGKWNKKLLYEKMKGGERRKRRSVNPYLQGQRLDNVVAKKSVPHFSDEDKDPE

SEQ ID NO: 795 - DNA, 891 bp, Homo sapien
gcgaggcgcccgaagccgtcgcggcggggaccatgttgcttccgaacatcctgctcaccggtacaccaggggttggaaaaaccacactaggcaaagaacttgcgtcaaaatcaggactgaaatacattaatgtgggtgatttagctcgagaagagcaattgtatgatggctatgatgaagagtatgactgtcccattttagatgaagacagagtagttgatgagttagataaccaaatgagagaaggtggagttattgttgattaccatggttgtgatttcttccctgaacgctggtttcatatagtttttgtgctgagaacagataccaatgtattgtacgaaagacttgaaacaaggggttataatgagaagaaactaacagacaatattcagtgtgagatttttcaagttctttatgaagaagccacagcatcctacaaggaagaaatcgtgcatcagctgcccagtaataaaccagaagagctagaaaataatgtagatcagatcttgaaatggattgagcagtggatcaaagatcataactcttgacttataaggctagctacttaataatcactcttgttgatatctctgccgacatcatagaaattgttcaagtgtcagtaacactttattaaaatcatgttgcagaaccagcaggtggatagtatataggtttatgcctgtgtttctttttctccatgagaaagctaaacatgaaatataatgaatatagtattattaaggattgagacaaaaactgtgattttaatacttaaattgctaaagaataaataaatctgacaaaatgggtggatatcttttaagtttattacagaaaaaaatgcagatgatctcttaaaataaaactaaagataaagcaaaaaaa

SEQ ID NO: 796 - protein, 172 aa, Homo sapien
MLLPNILLTGTPGVGKTTLGKELASKSGLKYINVGDLAREEQLYDGYDEEYDCPILDEDRVVDELDNQMREGGVIVDYHGCDFFPERWFHIVFVLRTDTNVLYERLETRGYNEKKLTDNIQCEIFQVLYEEATASYKEEIVHQLPSNKPEELENNVDQILKWIEQWIKDHNS

SEQ ID NO: 797 - DNA, 1528 bp, Homo sapien
cagtgccttggtaatgaccagggctccagaaagagatgtccttgtggctgggggcccctgtgcctgacattcctcctgactctgcggtggagctgtggaagccaggcgcacaggatgcaagcagccaggcccagggaggcagcagctgcatcctcagagaggaagccaggatgccccactctgctgggggtactgcaggggtggggctggaggctgcagagcccacagccctgctcaccagggcagagcccccttcagaacccacagagatccgtccacaaaagcggaaaaaggggccagcccccaaaatgctggggaacgagctatgcagcgtgtgtggggacaaggcctcgggcttccactacaatgttctgagctgcgagggctgcaagggattcttccgccgcagcgtcatcaagggagcgcactacatctgccacagtggcggccactgccccatggacacctacatgcgtcgcaagtgccaggagtgtcggcttcgcaaatgccgtcaggctggcatgcgggaggagtgtgtcctgtcagaagaacagatccgcctgaagaaactgaagcggcaagaggaggaacaggctcatgccacatccttgccccccaggcgttcctcacccccccaaatcctgccccagctcagcccggaacaactgggcatgatcgagaagctcgtcgctgcccagcaacagtgtaaccggcgctccttttctgaccggcttcgagtcacgccttggcccatggcaccagatccccatagccgggaggcccgtcagcagcgctttgcccacttcactgagctggccatcgtctctgtgcaggagatagttgactttgctaaacagctacccggcttcctgcagctcagccgggaggaccagattgccctgctgaagacctctgcgatcgaggtgatgcttctggagacatctcggaggtacaaccctgggagtgagagtatcaccttcctcaaggatttcagttataaccgggaagactttgccaaagcagggctgcaagtggaattcatcaaccccatcttcgagttctccagggccatgaatgagctgcaactcaatgatgccgagtttgccttgctcattgctatcagcatcttctctgcagaccggcccaacgtgcaggaccagctccaggtggagaggctgcagcacacatatgtggaagccctgcatgcctacgtctccatccaccatccccatgaccgactgatgttcccacggatgctaatgaaactggtgagcctccggaccctgagcagcgtccactcagagcaagtgtttgcactgcgtctgcaggacaaaaagctcccaccgctgctctctgagatctgggatgtgcacgaatgactgttctgtccccatattttctgttttcttggccggatggctgaggcctggtggctgcctcctagaagtggaacagactgagaagggcaaacattcctgggagctgggcaaggagatcctcccgtggcattaaaagagagtcaaagggt

SEQ ID NO: 798 - protein, 447 aa, Homo sapien
MSLWLGAPVPDIPPDSAVELWKPGAQDASSQAQGGSSCILREEARMPHSAGGTAGVGLEAAEPTALLTRAEPPSEPTEIRPQKRKKGPAPKMLGNELCSVCGDKASGFHYNVLSCEGCKGFFRRSVIKGAHYICHSGGHCPMDTYMRRKCQECRLRKCRQAGMREECVLSEEQIRLKKLKRQEEEQAHATSLPPRRSSPPQILPQLSPEQLGMIEKLVAAQQQCNRRSFSDRLRVTPWPMAPDPHSREARQQRFAHFTELAIVSVQEIVDFAKQLPGFLQLSREDQIALLKTSAIEVMLLETSRRYNPGSESITFLKDFSYNREDFAKAGLQVEFINPIFEFSRAMNELQLNDAEFALLIAISIFSADRPNVQDQLQVERLQHTYVEALHAYVSIHHPHDRLMFPRMLMKLVSLRTLSSVHSEQVFALRLQDKKLPPLLSEIWDVHE

SEQ ID NO: 799 - DNA, 1610 bp, Homo sapien
ggcacgaggctgcggccgcagtagccggagccggagccgcagccaccggtgccttcctttcccgccgccgcccagccgccgtccggcctccctcgggcccgagcgcagaccaggctccagccgcgcggcgccggcagcctcgcgctccctctcgggtctctctcgggcctcgggcaccgcgtcctgtgggcggccgcctgcctgcccgcccgcccgcagccccttgcctgccggcccctgggcggcccgtgccatgggcaccgacagccgcgcggccaaggcgctcctggcgcgggcccgcaccctgcacctgcagacggggaacctgctgaactggggccgcctgcggaagaagtgcccgtccacgcacagcgaggagcttcatgattgtatccaaaaaaccttgaatgaatggagttcccaaatcaacccagatttggtcagggagtttccagatgtcttggaatgcactgtatctcatgcagtagaaaagataaatcctgatgaaagagaagaaatgaaagtttctgcaaaactgttcattgtagaatcaaactcttcatcatcaactagaagtgcagttgacatggcctgttcagtccttggagttgcacagctggattctgtgatcattgcttcacctcctattgaagatggagttaatctttccttggagcatttacagccttactgggaggaattagaaaacttagttcagagcaaaaagattgttgccataggtacctctgatctagacaaaacacagttggaacagctgtatcagtgggcacaggtaaaaccaaatagtaaccaagttaatcttgcctcctgctgtgtgatgccaccagatttgactgcatttgctaaacaatttgacatacagctgttgactcacaatgatccaaaagaactgctttctgaagcaagtttccaagaagctcttcaggaaagcattcctgacattcaagcgcacgagtgggtgccgctgtggctactgcggtattcggtcattgtgaaaagtagaggaattatcaaatcaaaaggctacattttacaagctaaaagaaggggttcttaactgacttaggagcataacttacctgtaatttccttcaatatgagagaaaattgagatgtgtaaaatctagttactgcctgtaaatggtgtcattgaggcagatattctttcgtcatatttgacagtatgttgtctgtcaagttttaaatacttatcttgcctccatatcaatccattctcatgaacctctgtattgctttccttaaactattgttttctaattgaaattgtctataaagaaaatacttgcaatatatttttcctttatttttatgactaatataaatcaagaaaatttgttgttagatatattttggcctaggtatcagggtaatgtatatacatattttttatttccaaaaaaaattcattaattgcttcttaactcttattataaccaagcaatttaattacaattgttaaaactgaaatactggaagaagatatttttcctgtcattgatgagatatatcagagtaactggagtagctgggatttactagtagtgtaaataaaattcactcttcaatac

SEQ ID NO: 800 - protein, 274 aa, Homo sapien
MGTDSRAAKALLARARTLHLQTGNLLNWGRLRKKCPSTHSEELHDCIQKTLNEWSSQINPDLVREFPDVLECTVSHAVEKINPDEREEMKVSAKLFIVESNSSSSTRSAVDMACSVLGVAQLDSVIIASPPIEDGVNLSLEHLQPYWEELENLVQSKKIVAIGTSDLDKTQLEQLYQWAQVKPNSNQVNLASCCVMPPDLTAFAKQFDIQLLTHNDPKELLSEASFQEALQESIPDIQAHEWVPLWLLRYSVIVKSRGIIKSKGYILQAKRRGS

SEQ ID NO: 801 - DNA, 2334 bp, Homo sapien
agacacctctgccctcaccatgagcctctggcagcccctggtcctggtgctcctggtgctgggctgctgctttgctgcccccagacagcgccagtccacccttgtgctcttccctggagacctgagaaccaatctcaccgacaggcagctggcagaggaatacctgtaccgctatggttacactcgggtggcagagatgcgtggagagtcgaaatctctggggcctgcgctgctgcttctccagaagcaactgtccctgcccgagaccggtgagctggatagcgccacgctgaaggccatgcgaaccccacggtgcggggtcccagacctgggcagattccaaacctttgagggcgacctcaagtggcaccaccacaacatcacctattggatccaaaactactcggaagacttgccgcgggcggtgattgacgacgcctttgcccgcgccttcgcactgtggagcgcggtgacgccgctcaccttcactcgcgtgtacagccgggacgcagacatcgtcatccagtttggtgtcgcggagcacggagacgggtatcccttcgacgggaaggacgggctcctggcacacgcctttcctcctggccccggcattcagggagacgcccatttcgacgatgacgagttgtggtccctgggcaagggcgtcgtggttccaactcggtttggaaacgcagatggcgcggcctgccacttccccttcatcttcgagggccgctcctactctgcctgcaccaccgacggtcgctccgacggcttgccctggtgcagtaccacggccaactacgacaccgacgaccggtttggcttctgccccagcgagagactctacacccgggacggcaatgctgatgggaaaccctgccagtttccattcatcttccaaggccaatcctactccgcctgcaccacggacggtcgctccgacggctaccgctggtgcgccaccaccgccaactacgaccgggacaagctcttcggcttctgcccgacccgagctgactcgacggtgatggggggcaactcggcgggggagctgtgcgtcttccccttcactttcctgggtaaggagtactcgacctgtaccagcgagggccgcggagatgggcgcctctggtgcgctaccacctcgaactttgacagcgacaagaagtggggcttctgcccggaccaaggatacagtttgttcctcgtggcggcgcatgagttcggccacgcgctgggcttagatcattcctcagtgccggaggcgctcatgtaccctatgtaccgcttcactgaggggccccccttgcataaggacgacgtgaatggcatccggcacctctatggtcctcgccctgaacctgagccacggcctccaaccaccaccacaccgcagcccacggctcccccgacggtctgccccaccggaccccccactgtccacccctcagagcgccccacagctggccccacaggtcccccctcagctggccccacaggtccccccactgctggcccttctacggccactactgtgcctttgagtccggtggacgatgcctgcaacgtgaacatcttcgacgccatcgcggagattgggaaccagctgtatttgttcaaggatgggaagtactggcgattctctgagggcagggggagccggccgcagggccccttccttatcgccgacaagtggcccgcgctgccccgcaagctggactcggtctttgaggagccgctctccaagaagcttttcttcttctctgggcgccaggtgtgggtgtacacaggcgcgtcggtgctgggcccgaggcgtctggacaagctgggcctgggagccgacgtggcccaggtgaccggggccctccggagtggcagggggaagatgctgctgttcagcgggcggcgcctctggaggttcgacgtgaaggcgcagatggtggatccccggagcgccagcgaggtggaccggatgttccccggggtgcctttggacacgcacgacgtcttccagtaccgagagaaagcctatttctgccaggaccgcttctactggcgcgtgagttcccggagtgagttgaaccaggtggaccaagtgggctacgtgacctatgacatcctgcagtgccctgaggactagggctcccgtcctgctttgcagtgccatgtaaatccccactgggaccaaccctggggaaggagccagtttgccggatacaaactggtattctgttctggaggaaagggaggagtggaggtgggctgggccctctcttctcacctttgttttttgttggagtgtttctaataaacttggattctctaaccttt

SEQ ID NO: 802 - protein, 707 aa, Homo sapien
MSLWQPLVLVLLVLGCCFAAPRQRQSTLVLFPGDLRTNLTDRQLAEEYLYRYGYTRVAEMRGESKSLGPALLLLQKQLSLPETGELDSATLKAMRTPRCGVPDLGRFQTFEGDLKWHHHNITYWIQNYSEDLPRAVIDDAFARAFALWSAVTPLTFTRVYSRDADIVIQFGVAEHGDGYPFDGKDGLLAHAFPPGPGIQGDAHFDDDELWSLGKGVVVPTRFGNADGAACHFPFIFEGRSYSACTTDGRSDGLPWCSTTANYDTDDRFGFCPSERLYTRDGNADGKPCQFPFIFQGQSYSACTTDGRSDGYRWCATTANYDRDKLFGFCPTRADSTVMGGNSAGELCVFPFTFLGKEYSTCTSEGRGDGRLWCATTSNFDSDKKWGFCPDQGYSLFLVAAHEFGHALGLDHSSVPEALMYPMYRFTEGPPLHKDDVNGIRHLYGPRPEPEPRPPTTTTPQPTAPPTVCPTGPPTVHPSERPTAGPTGPPSAGPTGPPTAGPSTATTVPLSPVDDACNVNIFDAIAEIGNQLYLFKDGKYWRFSEGRGSRPQGPFLIADKWPALPRKLDSVFEEPLSKKLFFFSGRQVWVYTGASVLGPRRLDKLGLGADVAQVTGALRSGRGKMLLFSGRRLWRFDVKAQMVDPRSASEVDRMFPGVPLDTHDVFQYREKAYFCQDRFYWRVSSRSELNQVDQVGYVTYDILQCPED

SEQ ID NO: 803 - DNA, 1804 bp, Homo sapien
gcggtggtggacacgtcgagccgggtagaagtggaggggccgttcgaagagtcgtgagggggtgacgggttaagattcggagagagaggtgctagtggctggacttgacctggaaagaatcttctgctgactctcaacttttcctggaaaaaatggatcattcccaccatatggggatgagctatatggactccaacagtaccatgcaaccttctcaccatcacccaaccacttcagcctcacactcccatggtggaggagacagcagcatgatgatgatgcctatgaccttctactttggctttaagaatgtggaactactgttttccggtttggtgatcaatacagctggagaaatggctggagcttttgtggcagtgtttttactagcaatgttctatgaaggactcaagatagcccgagagagcctgctgcgtaagtcacaagtcagcattcgctacaattccatgcctgtcccaggaccaaatggaaccatccttatggagacacacaaaactgttgggcaacagatgctgagctttcctcacctcctgcaaacagtgctgcacatcatccaggtggtcataagctacttcctcatgctcatcttcatgacctacaacgggtacctctgcattgcagtagcagcaggggccggtacaggatacttcctcttcagctggaagaaggcagtggtagtggatatcacagagcattgccattgacatcaaactctatggcgtggccttatcgattgcagtgggaagttgttgaagacttgaagacgtgattcctgctccaatcatcccttcttgctcctctttgtgcacgtacacacacacacacacacacacacacacacacacacccctgctcaacagaggtttagtttacagtctctgaactaaagtagtaacctcccaaattgttttttctaataagctgagattcccatttctcttaaggagaagccacccatgagatgtcttttccttctccatcatcttagagccaagttatatgttcttgtctaatccatgtagctttttgttcaatgacttgatcatctgcttcctttttgaatttttaacagatagtaagtaaatttggtggttttttcccctgggtcagtgatggaaaggggttaacttcagccaggattgatggcagctgagggaaattcttgcccaactaaacccagaactcaaacttaacattagaaaataaggtccagggccggacacagtggcccatgcctgtaatcccagcactttggggggccaaggcaggctggatcacctgaggacaggagttcgagaccagtctggccaacatggggaaaccccgtctctactaaaaatacaaaaattagccgggcatggtggtgggcgcctgtaatcccagctactcagaaggctgaggcaggagaatcacttgaacctaggaggcggaggttgcagtgagccaagatggcgccattgcactccagcctgggtgacaagagtgaaactccatctcaaaaaaaaagaaaagaaggtccagcttttggattcaatgagtgggaaatacattgtgcctttctctagatgtgatacgttataccaaaatctttgtagtgtgcagagcggtggtttgagactaaatacaggcttagaacttgcagagtgtgtattcttggatggctgatgcatcgacttgcattcccacttaacactttgattagccatgaacttgccaatcaaaaaatgacaatcaatttgagaaaatagaaatagatatttttaaataaaaccattcacagttt

SEQ ID NO: 804 - protein, 190 aa, Homo sapien
MDHSHHMGMSYMDSNSTMQPSHHHPTTSASHSHGGGDSSMMMMPMTFYFGFKNVELLFSGLVINTAGEMAGAFVAVFLLAMFYEGLKIARESLLRKSQVSIRYNSMPVPGPNGTILMETHKTVGQQMLSFPHLLQTVLHIIQVVISYFLMLIFMTYNGYLCIAVAAGAGTGYFLFSWKKAVVVDITEHCH

SEQ ID NO: 805 - DNA, 1248 bp, Homo sapien
gacagcctcgcttggacgcagagcccggcccgacgccgccatgagcgccgcgctcttcagcctggacggcccggcgcgcggcgcgccctggcctgcggagcctgcgcccttctacgaaccgggccgggcgggcaagccgggccgcggggccgagccaggggccctaggcgagccaggcgccgccgcccccgccatgtacgacgacgagagcgccatcgacttcagcgcctacatcgactccatggccgccgtgcccaccctggagctgtgccacgacgagctcttcgccgacctcttcaacagcaatcacaaggcgggcggcgcggggcccctggagcttcttcccggcggccccgcgcgccccttgggcccgggccctgccgctccccgcctgctcaagcgcgagcccgactggggcgacggcgacgcgcccggctcgctgttgcccgcgcaggtgggcccgtgcgcacagaccgtggtgagcttggcggccgcagggcagcccaccccgcccacgtcgccggagccgccgcgcagcagccccaggcagacccccgcgcccggccccgcccgggagaagagcgccggcaagaggggcccggaccgcggcagccccgagtaccggcagcggcgcgagcgcaacaacatcgccgtgcgcaagagccgcgacaaggccaagcggcgcaaccaggagatgcagcagaagttggtggagctgtcggctgagaacgagaagctgcaccagcgcgtggagcagctcacgcgggacctggccggcctccggcagttcttcaagcagctgcccagcccgcccttcctgccggccgccgggacagcagactgccggtaacgcgcggccggggcgggagagactcagcaacgacccatacctcagacccgacggcccggagcggagcgcgccctgccctggcgcagccagagccgccgggtgcccgctgcagtttcttgggacataggagcgcaaagaagctacagcctggacttaccaccactaaactgcgagagaagctaaacgtgtttattttcccttaaattatttttgtaatggtagctttttctacatcttactcctgttgatgcagctaaggtacatttgtaaaaagaaaaaaaaccagacttttcagacaaaccctttgtattgtagataagaggaaaagactgagcatgctcacttttttatattaatttttacagtatttgtaagaataaagcagcatttgaaatcgc

SEQ ID NO: 806 - protein, 269 aa, Homo sapien [sequence omitted]

SEQ ID NO: 807 - DNA, 2059 bp, Homo sapien
gtggatatccccgagtcaccgcgtccctctcctgcagctcccgcgtcgctgggaggagcgagggagcgagcgggaaggggtctagctggcctttgctcggccctccccagcgcccggctttgaacccgccctgcactgctgtctgggcgggtccggggactcagcactcgacccaaaggtgcaggcgcgcgagcacaacccatggctgcgctgggctgcgcgaggctgaggtgggcgctgcgaggggccggccgtggcctctgcccccacggggccagagccaaggccgcgatccctgccgccctcccctcggacaaggccaccggagctcccggagccgggcctggtgtccggcggcggcaacggagcttagaggagattccacgtctaggacagctgcgcttcttctttcagctgttcgttcaaggctatgccctgcaactgcaccagttacaggtgctttacaaggccaagtacggtccaatgtggatgtcctacttagggcctcagatgcacgtgaacctggccagtgccccgctcttggagcaagtgatgcggcaagagggaaagtacccagtacggaacgacatggagctatggaaggagcaccgggaccagcacgacctgacctatgggccgttcaccacggaaggacaccactggtaccagctgcgccaggctctgaaccagcggttgctgaagccagcggaagcagcgctctatacggatgctttcaatgaggtgattgatgactttatgactcgactggaccagctgcgggcagagagtgcttcggggaaccaggtgtcggacatggctcaactcttctactactttgccttggaagctatttgctacatcctgttcgagaaacgcattggctgcctgcagcgatccatccccgaggacaccgtgaccttcgtcagatccatcgggttaatgttccagaactcactctatgccaccttcctccccaagtggactcgccccgtgctgcctttctggaagcgatacctggatggttggaatgccatcttttcctttgggaagaagctgattgatgagaagctcgaagatatggaggcccaactgcaggcagcagggccagatggcatccaggtgtctggctacctgcacttcttactggccagtggacagctcagtcctcgggaggccatgggcagcctgcctgagctgctcatggctggagtggacacgacatccaacacgctgacatgggccctgtaccacctctcaaaggaccctgagatccaggaggccttgcacgaggaagtggtgggtgtggtgccagccgggcaagtgccccagcacaaggactttgcccacatgccgttgctcaaagctgtgcttaaggagactctgcgtctctaccctgtggtccccacaaactcccggatcatagaaaaggaaattgaagttgatggcttcctcttccccaagaacacccagtttgtgttctgccactatgtggtgtcccgggaccccactgccttctctgagcctgaaagcttccagccccaccgctggctgagaaacagccagcctgctacccccaggatccagcacccatttggctctgtgccctttggctatggggtccgggcctgcctgggccgcaggattgcagagctggagatgcagctactcctcgcaaggctgatccagaagtacaaggtggtcctggccccggagacgggggagttgaagagtgtggcccgcattgtcctggttcccaataagaaagtgggcctgcagttcctgcagagacagtgctgagctgagtctccgccttgctggggcttgtcctagaggctccagctctggcacagtggttcctggctgctgccatgtctcagatgaggagggagagaaggaggccgccagactcgagaggtgggaggaactccttgcacacaccctgagcttttgccacttctatcatttttgagcaactccctctcagctaaaaggccacccctttatcgcattgctgtccttgggtagaatataaaataaagggacttttatttcttattgg

SEQ ID NO: 808 - protein, 531 aa, Homo sapien
MAALGCARLRWALRGAGRGLCPHGARAKAAIPAALPSDKATGAPGAGPGVRRRQRSLEEIPRLGQLRFFFQLFVQGYALQLHQLQVLYKAKYGPMWMSYLGPQMHVNLASAPLLEQVMRQEGKYPVRNDMELWKEHRDQHDLTYGPFTTEGHHWYQLRQALNQRLLKPAEAALYTDAFNEVIDDFMTRLDQLRAESASGNQVSDMAQLFYYFALEAICYILFEKRIGCLQRSIPEDTVTFVRSIGLMFQNSLYATFLPKWTRPVLPFWKRYLDGWNAIFSFGKKLIDEKLEDMEAQLQAAGPDGIQVSGYLHFLLASGQLSPREAMGSLPELLMAGVDTTSNTLTWALYHLSKDPEIQEALHEEVVGVVPAGQVPQHKDFAHMPLLKAVLKETLRLYPVVPTNSRIIEKEIEVDGFLFPKNTQFVFCHYVVSRDPTAFSEPESFQPHRWLRNSQPATPRIQHPFGSVPFGYGVRACLGRRIAELEMQLLLARLIQKYKVVLAPETGELKSVARIVLVPNKKVGLQFLQRQC

SEQ ID NO: 809 - DNA, 619 bp, Homo sapien
tgcagcttccttctcaccttgaagaataatcctagaaaactcacaaaatgtgtgatgcttttgtaggtacctggaaacttgtctccagtgaaaactttgatgattatatgaaagaagtaggagtgggctttgccaccaggaaagtggctggcatggccaaacctaacatgatcatcagtgtgaatggggatgtgatcaccattaaatctgaaagtacctttaaaaatactgagatttccttcatactgggccaggaatttgacgaagtcactgcagatgacaggaaagtcaagagcaccataaccttagatgggggtgtcctggtacatgtgcagaaatgggatggaaaatcaaccaccataaagagaaaacgagaggatgataaactggtggtggaatgcgtcatgaaaggcgtcacttccacgagagtttatgagagagcataagccaagggacgttgacctggactgaagttcgcattgaactctacaacattctgtgggatatattgttcaaaaagatattgttgttttccctgatttagcaagcaagtaattttctcccaagctgattttattcaatatggttacgttggttaaataactttttttagatttag

SEQ ID NO: 810 - protein, 132 aa, Homo sapien
MCDAFVGTWKLVSSENFDDYMKEVGVGFATRKVAGMAKPNMIISVNGDVITIKSESTFKNTEISFILGQEFDEVTADDRKVKSTITLDGGVLVHVQKWDGKSTTIKRKREDDKLVVECVMKGVTSTRVYERA

SEQ ID NO: 811 - DNA, 2126 bp, Homo sapien
gtaaggccgttttcttttcccattcgctcatctgccaggaaaagggacttgccgttggcgcttcggcctcttgttcattgagaaaaaagaggaaatactccgcgtgcgcttgtagaaggggagtcgtctccagctccgaaccccggagtgttcatcagcggggaatctggctccgaattctctttttttctcccgccgattgctcggaagttggtctaaagcagaggttggaaagaaaggaaaaaagtttgcatcgagactggatttatttgcacatcgcagaaagaagagaatccaagggagaggggttggtgcaaagccgcgatcacggagttcagatgtgttctaagcctgctggagtgaccacacttccaagacctgatggaggccagagctcagagtggcaacgggtcgcagcccttgctgcagacgccccgtgacggtggcagacagcgtggggagcccgaccccagagacgccctcacccagcaggtacatgtcttgtctctggatcagatcagagccatccgaaacaccaatgagtacacagaggggcctactgtcgtcccaagacctgggctcaagcctgctcctcgcccctccactcagcacaaacacgagagactccacggtctgcctgagcaccgccagcctcctaggctccagcactcgcaggtccattcttctgcacgagcccctctgtccagatccataagcacggtcagctcagggtcgcggagcagtacgaggacaagtaccagcagcagctcctctgaacagagactgctaggatcatccttctcctccgggcctgttgctgatggcataatccgggtgcaacccaaatctgagctcaagccaggtgagcttaagccactgagcaaggaagatttgggcctgcacgcctacaggtgtgaggactgtggcaagtgcaaatgtaaggagtgcacctacccaaggcctctgccatcagactggatctgcgacaagcagtgcctttgctcggcccagaacgtgattgactatgggacttgtgtatgctgtgtgaaaggtctcttctatcactgttctaatgatgatgaggacaactgtgctgacaacccatgttcttgcagccagtctcactgttgtacacgatggtcagccatgggtgtcatgtccctctttttgccttgtttatggtgttaccttccagccaagggttgccttaaattgtgccaggggtgttatgaccgggttaacaggcctggttgccgctgtaaaaactcaaacacagtttgctgcaaagttcccactgtcccccctaggaactttgaaaaaccaacatagcatcattaatcaggaatattacagtaatgaggattttttctttctttttttaatacacatatgcaaccaactaaacagttataatcttggcactgttaatagaaaggtgggatagtctttgctgtttgcggtgaaatgctttttgtccatgtgccgttttaactgatatgcttgttagaactcagctaatggagctcaaagtatgagatacagaacttggtgacccatgtattgcataagctaaagcaacacagacactcctaggcaaagtttttgtttgtgaatagtacttgcaaaacttgtaaattagcagatgacttttttccattgttttctccagagagaatgtgctatatttttgtatatacaataatatttgcaactgtgaaaaacaagttgtgccatactacatggcacagacacaaaatattatactaatatgttgtacattcggaagaatgtgaatcaatcagtatgtttttagattgtattttgccttacagaaagcctttattgtaagactctgatttccctttggacttcatgtatattgtacagttacagtaaaattcaacctttattttctaattttttcaacatattgtttagtgtaaagaatatttatttgaagttttattattttataaaaaagaatatttattttaagaggcatcttacaaattttgccccttttatgaggatgtgatagttgctgcaaatgaggggttacagatgcatatgtccaatataaaatagaaaatatattaacgtttgaaattaaaaaaaaaaaaaaaaaa

SEQ ID NO: 812 - protein, 315 aa, Homo sapien
MEARAQSGNGSQPLLQTPRDGGRQRGEPDPRDALTQQVHVLSLDQIRAIRNTNEYTEGPTVVPRPGLKPAPRPSTQHKHERLHGLPEHRQPPRLQHSQVHSSARAPLSRSISTVSSGSRSSTRTSTSSSSSEQRLLGSSFSSGPVADGIIRVQPKSELKPGELKPLSKEDLGLHAYRCEDCGKCKCKECTYPRPLPSDWICDKQCLCSAQNVIDYGTCVCCVKGLFYHCSNDDEDNCADNPCSCSQSHCCTRWSAMGVMSLFLPCLWCYLPAKGCLKLCQGCYDRVNRPGCRCKNSNTVCCKVPTVPPRNFEKPT

SEQ ID NO: 813 - DNA, 3004 bp, Homo sapien
ggaggtccagagatcctgagagcccgagcgcccagcgccgcgccgggagagttgagaattatggctgcaggaaaatttgcaagccttcccagaaacatgccggtgaatcaccagttccccctggcctcatccatggaccttctgagcagcaggtcccctctcgctgagcatcgcccagatgcctatcaagatgtgtctatacatggcacccttccacggaagaaaaaaggtcctcctcccataaggtcctgtgatgacttcagtcacatgggcaccctcccccactccaaatccccacggcagaactcgcctgtgacccaggatggcatccaggagagcccatggcaggaccggcacggcgaaaccttcaccttcagggatccacatcttctggacccaactgtggaatatgtgaagttctccaaggagaggcacatcatggacaggacccccgagaaactgaagaaggagctggaggaggagctgctcctgagcagcgaggacctgcgcagccatgcctggtaccacggccgcatcccccgacaggtgtctgaaaaccttgtgcagcgagatggtgacttcctagttcgtgactctctgtccagccctgggaactttgtcctgacctgtcagtggaagaacctcgctcagcacttcaaaatcaaccggacagttctgcgactcagcgaggcctacagccgcgtgcagtaccagttcgagatggagagcttcgactccatccccggcctggtgcgctgctacgtgggcaaccgccggcccatctcccagcagagtggcgccatcatcttccagcccatcaacaggacggtgcctctgcggtgcctggaggagcattatggcacctccccaggccaggcccgggagggcagcctcaccaagggaaggccggatgtggccaagaggctgagcctcaccatgggtggcgtccaggcccgagagcagaatttgcccaggggaaacctcctcagaaacaaagaaaagagtggtagccagcccgcctgcctggatcacatgcaggacagaagagccttgtccctcaaagcccaccagtcagagagctacctgccgattggctgcaagctgccacctcagtcctcgggtgtggacacaagcccctgcccaaactcacctgtgttcaggacgggaagcgagcctgccctgagcccagcagtggttcggagggtctcctcagacgccagggctggggaggcgctgaggggatcagacagtcaactgtgccctaagcccccgcctaagccctgcaaggtgccgttcctcaaggttccctcgtctccctctgcctggctcaactcagaggccaactactgtgaactgaacccagcgtttgccacaggctgcggcaggggagcaaagctaccctcatgtgcccagggaagccacacagaactgctcacagccaagcagaatgaggcgccaggtccccggaactctggcgtcaactacttgatccttgatgatgatgacagggaaagaccttgggaacctgcggcagctcagatggagaaggggcagtgggacaagggcgagtttgtgacgcccctcctggagactgtctcctccttcaggcccaacgagtttgagtcaaagttccttccccctgagaataagcccctggaaacagcaatgttgaaacgtgcaaaagaactgttcaccaacaacgaccccaaggtcatcgcccagcacgtactgagcatggactgcagggttgctaggatacttggagtctctgaagagatgaggaggaacatgggggtgagctcaggcctggaactcattaccttgcctcacggacaccagctgcgcctggacataattgaaagacacaacacaatggccatcggcattgcagtggacattctgggatgcacgggcactttggaggaccgagcggccactctgagtaagatcatccaggtggcggtggaactgaaggattccatgggggacctctattccttctcagctctcatgaaagccctggaaatgccacagatcacaaggttagaaaagacgtggactgctctgcggcaccagtacacccaaactgccattctctatgagaaacagctgaagcccttcagcaaactcctgcatgaaggcagagagtccacatgtgttcccccaaacaatgtatcagtcccactgctgatgccgcttgtgacgttaatggagcgccaggctgtgacttttgaaggaaccgacatgtgggaaaaaaacgaccagagctgtgaaatcatgctgaaccatttggcaacagcgcgattcatggccgaggctgcagacagctaccggatgaatgctgagaggatcctggcaggttttcaaccagatgaagaaatgaatgaaatctgcaagactgaatttcaaatgcgattgctatggggcagcaaaggtgcacaagtcaatcagacagagagatatgagaaattcaaccagattttaactgccctctcgcgtaaattggaacctcctcctgtaaagcaggcagagctttgataactctccagagaacctttagaatatcttttcaagtttccccagcttcatctttgggaaagcttactgtttttgataaagtaataatgtgcaaatctgacaatatacaagcttttagtatccacaggatattaaacgtgtaaattgcacagagcacacttatttatgaattgtctaaagttactactgattttaaaatgaataatttattattaaggtaactactgctaatgttgatcagcaaatttaagagaagacctagctatgttggctggttgctttctattatcatggtatttgaccattttagttttaattccatgtcagataagtgtaaatagaagagtttaaaagcatgaaacatttcagaaggtatcagttatatgatattctttaaacaaatatgaaaaatgtaaatactcatgaatgaaaatacatctttttgtgaaaaaaaaaaaaaaaaaaa

SEQ ID NO: 814 - protein, 825 aa, Homo sapien
MAAGKFASLPRNMPVNHQFPLASSMDLLSSRSPLAEHRPDAYQDVSIHGTLPRKKKGPPPIRSCDDFSHMGTLPHSKSPRQNSPVTQDGIQESPWQDRHGETFTFRDPHLLDPTVEYVKFSKERHIMDRTPEKLKKELEEELLLSSEDLRSHAWYHGRIPRQVSENLVQRDGDFLVRDSLSSPGNFVLTCQWKNLAQHFKINRTVLRLSEAYSRVQYQFEMESFDSIPGLVRCYVGNRRPISQQSGAIIFQPINRTVPLRCLEEHYGTSPGQAREGSLTKGRPDVAKRLSLTMGGVQAREQNLPRGNLLRNKEKSGSQPACLDHMQDRRALSLKAHQSESYLPIGCKLPPQSSGVDTSPCPNSPVFRTGSEPALSPAVVRRVSSDARAGEALRGSDSQLCPKPPPKPCKVPFLKVPSSPSAWLNSEANYCELNPAFATGCGRGAKLPSCAQGSHTELLTAKQNEAPGPRNSGVNYLILDDDDRERPWEPAAAQMEKGQWDKGEFVTPLLETVSSFRPNEFESKFLPPENKPLETAMLKRAKELFTNNDPKVIAQHVLSMDCRVARILGVSEEMRRNMGVSSGLELITLPHGHQLRLDIIERHNTMAIGIAVDILGCTGTLEDRAATLSKIIQVAVELKDSMGDLYSFSALMKALEMPQITRLEKTWTALRHQYTQTAILYEKQLKPFSKLLHEGRESTCVPPNNVSVPLLMPLVTLMERQAVTFEGTDMWEKNDQSCEIMLNHLATARFMAEAADSYRMNAERILAGFQPDEEMNEICKTEFQMRLLWGSKGAQVNQTERYEKFNQILTALSRKLEPPPVKQAEL

SEQ ID NO: 815 - DNA, 3160 bp, Homo sapien
cctcccctcgcccggcgcggtcccgtccgcctctcgctcgcctcccgcctcccctcggtcttccgaggcgcccgggctcccggcgcggcggcggagggggcgggcaggccggcgggcggtgatgtggcaggactctttatgcgctgcggcaggatacgcgctcggcgctgggacgcgactgcgctcagttctctcctctcggaagctgcagccatgatggaagtttgagagttgagccgctgtgaggcgaggccgggctcaggcgagggagatgagagacggcggcggccgcggcccggagcccctctcagcgcctgtgagcagccgcgggggcagcgccctcggggagccggccggcctgcggcggcggcagcggcggcgtttctcgcctcctcttcgtcttttctaaccgtgcagcctcttcctcggcttctcctgaaagggaaggtggaagccgtgggctcgggcgggagccggctgaggcgcggcggcggcggcggcggcacctcccgctcctggagcgggggggagaagcggcggcggcggcggccgcggcggctgcagctccagggagggggtctgagtcgcctgtcaccatttccagggctgggaacgccggagagttggtctctccccttctactgcctccaacacggcggcggcggcggcggcacatccagggacccgggccggttttaaacctcccgtccgccgccgccgcaccccccgtggcccgggctccggaggccgccggcggaggcagccgttcggaggattattcgtcttctccccattccgctgccgccgctgccaggcctctggctgctgaggagaagcaggcccagtcgctgcaaccatccagcagccgccgcagcagccattacccggctgcggtccagagccaagcggcggcagagcgaggggcatcagctaccgccaagtccagagccatttccatcctgcagaagaagccccgccaccagcagcttctgccatctctctcctcctttttcttcagccacaggctcccagacatgacagccatcatcaaagagatcgttagcagaaacaaaaggagatatcaagaggatggattcgacttagacttgacctatatttatccaaacattattgctatgggatttcctgcagaaagacttgaaggcgtatacaggaacaatattgatgatgtagtaaggtttttggattcaaagcataaaaaccattacaagatatacaatctttgtgctgaaagacattatgacaccgccaaatttaattgcagagttgcacaatatccttttgaagaccataacccaccacagctagaacttatcaaacccttttgtgaagatcttgaccaatggctaagtgaagatgacaatcatgttgcagcaattcactgtaaagctggaaagggacgaactggtgtaatgatatgtgcatatttattacatcggggcaaatttttaaaggcacaagaggccctagatttctatggggaagtaaggaccagagacaaaaagggagtaactattcccagtcagaggcgctatgtgtattattatagctacctgttaaagaatcatctggattatagaccagtggcactgttgtttcacaagatgatgtttgaaactattccaatgttcagtggcggaacttgcaatcctcagtttgtggtctgccagctaaaggtgaagatatattcctccaattcaggacccacacgacgggaagacaagttcatgtactttgagttccctcagccgttacctgtgtgtggtgatatcaaagtagagttcttccacaaacagaacaagatgctaaaaaaggacaaaatgtttcacttttgggtaaatacattcttcataccaggaccagaggaaacctcagaaaaagtagaaaatggaagtctatgtgatcaagaaatcgatagcatttgcagtatagagcgtgcagataatgacaaggaatatctagtacttactttaacaaaaaatgatcttgacaaagcaaataaagacaaagccaaccgatacttttctccaaattttaaggtgaagctgtacttcacaaaaacagtagaggagccgtcaaatccagaggctagcagttcaacttctgtaacaccagatgttagtgacaatgaacctgatcattatagatattctgacaccactgactctgatccagagaatgaaccttttgatgaagatcagcatacacaaattacaaaagtctgaatttttttttatcaagagggataaaacaccatgaaaataaacttgaataaactgaaaatggacctttttttttttaatggcaataggacattgtgtcagattaccagttataggaacaattctcttttcctgaccaatcttgttttaccctatacatccacagggttttgacacttgttgtccagttgaaaaaaggttgtgtagctgtgtcatgtatatacctttttgtgtcaaaaggacatttaaaattcaattaggattaataaagatggcactttcccgttttattccagttttataaaaagtggagacagactgatgtgtatacgtaggaattttttccttttgtgttctgtcaccaactgaagtggctaaagagctttgtgatatactggttcacatcctacccctttgcacttgtggcaacagataagtttgcagttggctaagagaggtttccgaaaggttttgctaccattctaatgcatgtattcgggttagggcaatggaggggaatgctcagaaaggaaataattttatgctggactctggaccatataccatctccagctatttacacacacctttctttagcatgctacagttattaatctggacattcgaggaattggccgctgtcactgcttgttgtttgcgcatttttttttaaagcatattggtgctagaaaaggcagctaaaggaagtgaatctgtattggggtacaggaatgaaccttctgcaacatcttaagatccacaaatgaagggatataaaaataatgtcataggtaagaaacacagcaacaatgacttaaccatataaatgtggaggctatcaacaaagaatgggcttgaaacattataaaaattgacaatgatttattaaatatgttttctcaattgtaaaaaaaaaa

SEQ ID NO: 816 - protein, 403 aa, Homo sapien [sequence omitted]

SEQ ID NO: 817 - DNA, 3494 bp, Homo sapien
agcggccgccgccgccacagctgcagtcagcaccgtcaccccagcagcatccgcgcgcctgcaccgcgcgtgcggcccgccccggcctgaccccgccgccgaacccggcgccagccatggagcccgaagccccccgtcgccgccacacccatcagcgcggctacctgctgacacggaaccctcacctcaacaaggacttggcctttaccctggaagagagacagcaattgaacattcatggattgttgccaccttccttcaacagtcaggagatccaggttcttagagtagtaaaaaatttcgagcatctgaactctgactttgacaggtatcttctcttaatggatctccaagatagaaatgaaaaactcttttatagagtgctgacatctgacattgagaaattcatgcctattgtttatactcccactgtgggtctggcttgccaacaatatagtttggtgtttcggaaaccaagaggtctctttattactatccacgatcgagggcatattgcttcagttctcaatgcatggccagaagatgtcatcaaggccattgtggtgactgatggagagcgtattcttggcttgggagaccttggctgtaatggaatgggcatccctgtgggtaaattggctctatatacagcttgcggagggatgaatcctcaagaatgtctgcctgtcattctggatgtgggaaccgaaaatgaggagttacttaaagatccactctacattggactacggcagagaagagtaagaggttctgaatatgatgattttttggacgaattcatggaggcagtttcttccaagtatggcatgaattgccttattcagtttgaagattttgccaatgtgaatgcatttcgtctcctgaacaagtatcgaaaccagtattgcacattcaatgatgatattcaaggaacagcatctgttgcagttgcaggtctccttgcagctcttcgaataaccaagaacaaactgtctgatcaaacaatactattccaaggagctggggaggctgccctagggattgcacacctgattgtgatggccttggaaaaagaaggtttaccaaaagagaaagccatcaaaaagatatggctggttgattcaaaaggattaatagttaagggacgtgcttccttaacacaagagaaagagaagtttgcccatgaacatgaagaaatgaagaacctagaagccattgttcaagaaataaaaccaactgccctcataggagttgctgcaattggtggtgcattctcagaacaaattctcaaagatatggctgccttcaatgaacggcctattatttttgctttgagtaatccaactagcaaagcagaatgttctgcagagcagtgctacaaaataaccaagggacgtgcaatttttgccagtggcagtccttttgatccagtcactcttccaaatggacagaccctatatcctggccaaggcaacaattcctatgtgttccctggagttgctcttggtgttgtggcgtgtggattgaggcagatcacagataatattttcctcactactgctgaggttatagctcagcaagtgtcagataaacacttggaagagggtcggctttatcctcctttgaataccattagagatgtttctctgaaaattgcagaaaagattgtgaaagatgcataccaagaaaagacagccacagtttatcctgaaccgcaaaacaaagaagcatttgtccgctcccagatgtatagtactgattatgaccagattctacctgattgttattcttggcctgaagaggtgcagaaaatacagaccaaagttgaccagtaggataatagcaaacatttctaactctattaatgaggtctttaaacctttcataatttttaaaggttggaatcttttataatgattcataagacacttagattaagattttactttaacagtctaaaaattgatagaagaatatcgatataaattgggataaacatcacatgagacaattttgcttcactttgccttctggttatttatggtttctgtctgaattattctgcctacgttctctttaaaagctgttgtacgtactacggagaaactcatcatttttatacaggacactaatgggaagaccaaaattactaataaattgacataaccaacattaaaactcataattattttgttgaccattttgttaaaatctacttttcaaaaaaaaaaaagctagaaatgaatctaggcgtaggtgaacttttgctaagcagaaataacactactttgttgcctagagaaagataacttctcaagtatttttattccagtcctagatcatatatgttcttttgtgcaacggaattctaacagttctaagagaaagatcactgctgtttacagcgccttgtgcagccttagattttaatattcttttgtcattgttacatctcatagagtaaagctcttattaccttgatcctgagtcagaaatcccacctgaaatcaccttttttcccccttgatcaaacatcccatccttcagctaccatactgttgctacagggattttgtggactgtggcccctgtcccgaggttggcaccttcagttcagcacagcctgagcagtgagaaggtctgaaaggagagtatatagttaagatccttgagaaagggctgcctgaggaactgacctcttaaagatctcaggatctttaagacaacaagttaggttcctactggagttacctgccagaatggcctcttaattaactcaggtaatgaagagctaactgtgttataatcatcttgcttttgcctgaatttggagaaagtattataattaagttcccagtatcagaaatgtccttacataagattaaaatatcttgatgactaataccattctatgagaaagagtagttatatgcccagactgtattaatttactttagaaactaatgtttgaagtaatggaaaaaattttaaattataaagctaaggtgcaataacatttgctacttatttatagaattatttgaagaattttgtttttgaagtaatgctttaaggagtataagatattcaagataaattatactataaaatgattttattgaaagttgaaggttacacaaattgttttaggtatgagcagaagaggttaaggtatttctaaaggtaacatatagtcaagagtttcctcaaaatagttatttggagaagaatcagaatgtctgtgtatttcttgtctgtttctatgttgtcttatagctctgactaaatgtgtttacctatgcaaaagatttattaaagcatagaaaaggtgaatgaataacaccctaaaccccccgaagagaaaaagaaatcccgaagagagagagcaaacacacctgagaacatccgctgagtaagtagcccgctaggagaaaagaaaaagggggggcccccccgactaagagggcccctttccgcccccggggaatttattt

SEQ ID NO: 818 - protein, 610 aa, Homo sapien
RPPPPQLQSAPSPQQHPRACTARAARPGLTPPPNPAPAMEPEAPRRRHTHQRGYLLTRNPHLNKDLAFTLEERQQLNIHGLLPPSFNSQEIQVLRVVKNFEHLNSDFDRYLLLMDLQDRNEKLFYRVLTSDIEKFMPIVYTPTVGLACQQYSLVFRKPRGLFITIHDRGHIASVLNAWPEDVIKAIVVTDGERILGLGDLGCNGMGIPVGKLALYTACGGMNPQECLPVILDVGTENEELLKDPLYIGLRQRRVRGSEYDDFLDEFMEAVSSKYGMNCLIQFEDFANVNAFRLLNKYRNQYCTFNDDIQGTASVAVAGLLAALRITKNKLSDQTILFQGAGEAALGIAHLIVMALEKEGLPKEKAIKKIWLVDSKGLIVKGRASLTQEKEKFAHEHEEMKNLEAIVQEIKPTALIGVAAIGGAFSEQILKDMAAFNERPIIFALSNPTSKAECSAEQCYKITKGRAIFASGSPFDPVTLPNGQTLYPGQGNNSYVFPGVALGVVACGLRQITDNIFLTTAEVIAQQVSDKHLEEGRLYPPLNTIRDVSLKIAEKIVKDAYQEKTATVYPEPQNKEAFVRSQMYSTDYDQILPDCYSWPEEVQKIQTKVDQ

SEQ ID NO: 819 - DNA, 2212 bp, Homo sapien
ccgccgccacagctgcagtcagcaccgtcaccccagcagcatccgccgcctgcaccgcgcgtgcggcccgccccggcctgaccccgccgccgaacccggcgccagccatggagcccgaagccccccgtcgccgccacacccatcagcgcggctacctgctgacacggaaccctcacctcaacaaggacttggcctttaccctggaagagagacagcaattgaacattcatggattgttgccaccttccttcaacagtcaggagatccaggttcttagagtagtaaaaaatttcgagcatctgaactctgactttgacaggtatcttctcttaatggatctccaagatagaaatgaaaaactcttttatagagtgctgacatctgacattgagaaattcatgcctattgtttatactcccactgtgggtctggcttgccaacaatatagtttggtgtttcggaagccaagaggtctctttattactatccacgatcgagggcatattgcttcagttctcaatgcatggccagaagatgtcatcaaggccattgtggtgactgatggagagcgtattcttggcttgggagaccttggctgtaatggaatgggcatccctgtgggtaaattggctctatatacagcttgcggagggatgaatcctcaagaatgtctgcctgtcattctggatgtgggaaccgaaaatgaggagttacttaaagatccactctacattggactacggcagagaagagtaagaggttctgaatatgatgattttttggacgaattcatggaggcagtttcttccaagtatggcatgaattgccttattcagtttgaagattttgccaatgtgaatgcatttcgtctcctgaacaagtatcgaaaccagtattgcacattcaatgatgatattcaaggaacagcatctgttgcagttgcaggtctccttgcagctcttcgaataaccaagaacaaactgtctgatcaaacaatactattccaaggagctggagaggctgccctagggattgcacacctgattgtgatggccttggaaaaagaaggtttaccaaaagagaaagccatcaaaaagatatggctggttgattcaaaaggattaatagttaagggacgtgcttccttaacacaagagaaagagaagtttgcccatgaacatgaagaaatgaagaacctagaagccattgttcaagaaataaaaccaactgccctcataggagttgctgcaattggtggtgcattctcagaacaaattctcaaagatatggctgccttcaatgaacggcctattatttttgctttgagtaatccaactagcaaagcagaatgttctgcagagcagtgctacaaaataaccaagggacgtgcaatttttgccagtggcagtccttttgatccagtcactcttccaaatggacagaccctatatcctggccaaggcaacaattcctacgtgttccctggagttgctcttggtgttgtggcgtgtggattgaggcagatcacagataatattttcctcactactgctgaggttatagctcagcaagtgtcagataaacacttggaagagggtcggctttatcctcctttgaataccattagagatgtttctctgaaaattgcagaaaagattgtgaaagatgcataccaagaaaagacagccacagtttatcctgaaccgcaaaacaaagaagcatttgtccgctcccagatgtatagtactgattatgaccagattctacctgattgttattcttggcctgaagaggtgcagaaaatacagaccaaagttgaccagtaggataatagcaaacatttctaactctattaatgaggtctttaaacctttcataatttttaaaggttggaatcttttataatgattcataagacacttagattaagattttactttaacagtctaaaaattgatagaagaatatcgatataaattgggataaacatcacatgagacaattttgcttcactttgccttctggttatttatggtttctgtctgaattattctgcctacgttctctttaaaagctgttgtacgtactacggagaaactcatcatttttatacaggacactaatgggaagaccaaaattactaataaattgaaataaccaacattaaaactcataattattttgttgaccattttgttaaaatctacttttc

SEQ ID NO: 820 - protein, 572 aa, Homo sapien
MEPEAPRRRHTHQRGYLLTRNPHLNKDLAFTLEERQQLNIHGLLPPSFNSQEIQVLRVVKNFEHLNSDFDRYLLLMDLQDRNEKLFYRVLTSDIEKFMPIVYTPTVGLACQQYSLVFRKPRGLFITIHDRGHIASVLNAWPEDVIKAIVVTDGERILGLGDLGCNGMGIPVGKLALYTACGGMNPQECLPVILDVGTENEELLKDPLYIGLRQRRVRGSEYDDFLDEFMEAVSSKYGMNCLIQFEDFANVNAFRLLNKYRNQYCTFNDDIQGTASVAVAGLLAALRITKNKLSDQTILFQGAGEAALGIAHLIVMALEKEGLPKEKAIKKIWLVDSKGLIVKGRASLTQEKEKFAHEHEEMKNLEAIVQEIKPTALIGVAAIGGAFSEQILKDMAAFNERPIIFALSNPTSKAECSAEQCYKITKGRAIFASGSPFDPVTLPNGQTLYPGQGNNSYVFPGVALGVVACGLRQITDNIFLTTAEVIAQQVSDKHLEEGRLYPPLNTIRDVSLKIAEKIVKDAYQEKTATVYPEPQNKEAFVRSQMYSTDYDQILPDCYSWPEEVQKIQTKVDQ

SEQ ID NO: 821 - DNA, 768 bp, Homo sapien
ccttcagcataaaagctgatccacaaacaagaggagcaccagacctcctcttggcttcgagatggcttcgccacaccaagagcccaaacctggagacctgattgagattttccgccttggctatgagcactgggccctgtatataggagatggctacgtgatccatctggctcctccaagtgagtaccccggggctggctcctccagtgtcttctcagtcctgagcaacagtgcagaggtgaaacgggggcgcctggaagatgtggtgggaggctgttgctatcgggtcaacaacagcttggaccatgagtaccaaccacggcccgtggaggtgatcatcagttctgcgaaggagatggttggtcagaagatgaagtacagtattgtgagcaggaactgtgagcactttgtcgcccagctgagatatggcaagtcccgctgtaaacaggtggaaaaggccaaggttgaagtcggtgtggccacggcgcttggaatcctggttgttgctggatgctcttttgcgattaggagataccaaaaaaaagcaacagcctgaagcagccacaaaatcctgtgttagaagcagctgtgggggtcccagtggagatgagcctcccccatgcctccagcagcctgaccctcgtgccctgtctcaggcgttctctagatcctttcctctgtttccctctctcgctggcaaaagtatgatctaattgaaacaagactgaaggatcaataaacagccatctgccccttcaaaaaaaaaaa

SEQ ID NO: 822 - protein, 164 aa, Homo sapien
MASPHQEPKPGDLIEIFRLGYEHWALYIGDGYVIHLAPPSEYPGAGSSSVFSVLSNSAEVKRGRLEDVVGGCCYRVNNSLDHEYQPRPVEVIISSAKEMVGQKMKYSIVSRNCEHFVAQLRYGKSRCKQVEKAKVEVGVATALGILVVAGCSFAIRRYQKKATA

SEQ ID NO: 823 - DNA, 10709 bp, Homo sapien
agggggcggcgctcccggcccatcccttagccccgcggcggccgtgtgggccggaggctgcctgcaccgcgtcagggaggccggcctagaaaccctccctcccagaagaaagccgatcccagttcaggtggggtcttcctcggttgcgtacctggctggagccgagctggtgggcggccggcagccggcgtttctggtgatgacagccccgaaatgaaagcagcgcggccgccgcctccgagggctgcagggagatcagcgtccagcaaataagaagcaagtcctggacccggaggaggaggagcggccgagcatctctctctgctccgccgtgtcctttagatgagcactcccggccggagccggaggtggatccgcagagctgcctctgggcgcctgaccccgcgctgacatcacaacctgtgacaggcgcatcacgcccggtacctgctcccggccgctgcccgtcctcccagcctctttgtatgccgcagacatggccagccagcaggattcgggcttctttgagatcagtatcaaatatttactgaaatcctggagtaatacttctcccgttggcaacggttacatcaagcctccggttccacctgcttctggcacgcacagggagaaagggccgccaaccatgctacccatcaatgtggacccagacagtaaaccaggagaatatgtcctcaaaagtttatttgtcaacttcaccactcaggctgaacgcaagattcgtatcattatggcagagcccctggaaaagccattgacgaaatctctgcaacgtggagaagacccccaatttgatcaggtcatcagctcaatgagctccctttctgagtactgcctgccttccattctacgtacattatttgactggtataaaaggcaaaatggcattgaggatgaatcacatgaatacagaccaagaacaagcaataaatcaaaaagcgatgaacaacagcgagattatttaatggaaagacgggacctcgccattgattttattttttctttagtattaatagaagttttgaaacagattccacttcatcctgtaatagacagtttaatacatgatgttattaacttggctttcaagcactttaaatacaaagaagggtaccttggtcccaacactggcaatatgcatattgtggcagacctgtatgcagaagtcattggagtgttggcacaagccaaattccctgctgtaaagaagaaatttatggcggagctaaaagaattacggcacaaagagcagaacccatatgtggttcaaagcattatcagcttaataatgggcatgaaattctttcgaattaagatgtatccagtggaggattttgaggcctctcttcagtttatgcaggaatgtgcacattacttcctcgaggtcaaagacaaagatatcaagcatgccttggctgggctttttgttgaaatacttgttccagttgctgctgctgttaaaaatgaagtaaatgttccctgccttagaaattttgtggaaagcctgtatgacaccacgctggaactttcttctcgaaagaagcattccttggccttgtaccccctggtgacctgtttgctctgtgtcagtcagaagcagctgttcctgaacaggtggcacattttcctcaacaactgcttgtccaaccttaaaaacaaagatcccaagatggctcgagttgcactggaatctctctacagattactttgggtttacatgattcgaattaaatgtgaaagcaacacagctactcagagccgacttataaccatcatcacaacacttttccccaaagggtcccgcggtgtggtaccaagggacatgcctctgaacatctttgtgaaaatcatccagttcattgcccaggaacgtttagattttgcaatgaaagaaatcattttcgattttctttgtgtgggaaaaccagcaaaagcattcagtctcaacccagagagaatgaacattggtttacgggcattcttggtcatagctgatagcttgcagcagaaagatggggaacctcccatgccggttacaggagccgttcttccttcaggaaacacgttaagagtaaagaaaacatatttgagtaaaacactaactgaagaggaagccaaaatgataggcatgtccttatattactctcaagtacgaaaagctgtagacaacattttaaggcaccttgataaagaagtaggaaggtgtatgatgctgactaatgtacagatgttaaacaaagaaccggaagacatgatcacgggtgagagaaagccaaaaatagatcttttcaggacctgtgttgctgctattcctcgactgcttcctgatgggatgtcaaaacttgaacttattgacttactggctaggctctctattcatatggatgatgaattgcgacatattgcacaaaattctcttcagggtttacttgttgacttctcagattggagggaagatgtactatttggctttaccaacttcctgctccgggaagtaaatgatatgcatcacacactccttgattcgtccctgaagttgctgctgcagctgctcacccagtggaaactagtcatccagacacaaggaaaagtctatgaacaagccaacaaaatcagaaattcagagctcatcgcaaatggctccagtcacagaattcagtcggaacgaggtccccactgcagtgtactccacgctgtagaaggttttgctctggttttactctgcagtttccaggtggccacacgcaaactgtccgttttaatactcaaggaaattcgagcgttgtttattgccctggggcagcctgaggatgacgacaggccgatgattgatgtcatggatcagctaagttcttccattctagaaagttttattcatgtagcagtttcggattcagcaacattaccactcacccacaatgtggatctgcagtggttggtggaatggaacgcagtcctggtcaatagccattatgatgtgaaaagcccttcccatgtctggatatttgcacagtctgtcaaagacccctgggtcctctgcctcttcagcttcctccggcaggagaacttacccaagcactgccccacagccctcagctatgcctggccttatgccttcactcggctccagtcggtgatgcctctggtggacccaaatagcccaattaatgccaagaaaaccagcactgccggcagcggagacaactatgttactttgtggagaaattacctaattctttgttttggagttgcaaaacccagtattatgagcccaggacacttaagagcttccactccagaaataatggcgaccacacctgatggtacagtgagctacgataacaaggccataggcaccccatcggtgggagttctgttaaagcagttggtgcctttgatgagactagagagcattgagatcacagagtccttagttttaggatttggaagaacaaattcccttgttttcagagaattggtagaagaacttcatccattaatgaaagaagctctggaaagaagaccagagaacaagaaacgccgagaacggcgagacttgttaaggctacaactacttcgaatttttgaacttttggctgatgctggtgtaataagtgacagcacaaatggagccctagagcgggatactttagccctgggagctttgttcttagaatatgtggacttgacccgcatgctcctagaagctgaaaatgacaaagaagttgaaattcttaaagatatccgggcacattttagtgcaatggtggccaacttgattcagtgtgttccagttcaccaccgaagatttctcttcccccagcaaagtctgaggcaccaccttttcatcttattcagccagtgggcaggacccttcagcattatgttcactcctctggatcgttacagtgacagaaatcatcagattacaagatatcagtattgtgcattaaaagcaatgtcagcagtactgtgctgtggccctgtctttgacaatgtgggcctttccccagatggctacctatataaatggcttgacaacattctggcttgtcaagatttacgagttcatcaacttggctgcgaagttgttgtcttgctactggaacttaatcctgaccaaataaatctttttaactgggcaattgaccgatgctacacaggttcctaccaacttgcatctggctgcttcaaagccatagcaactgtgtgtggaagcaggaactatcccttcgacatagtgacattgttaaaccttgttctattcaaggcctctgacaccaacagagagatttatgaaatctccatgcagctcatgcagatccttgaagcaaagctttttgtatactcaaagaaagtcgctgagcaaagaccgggaagtattctctatggaacacacggcccgctgccacccctctacagcgtgtcactcgccctcttgtcatgtgagctggccaggatgtaccctgagctcacactccccctcttctcaggtaagccagcgattccccacaacacaccccaacgggcgccagatcatgcttacctacctgctgccctggctgcacaacatcgagctggtggacagcaggctcctcctcccgggtcgagccccagcagcccagaggacgaagtcaaggaccgggaaggtgacgtgactgcttctcacgggctgagaggaaatggctggggctctccagaagccacgtcactggtcctgaacaacctcatgtacatgacggccaagtatggagatgaagttcctgggccagaaatggaaaatgcttggaatgctttagccaacaatgagaaatggagcaacaacctgaggatcaccttgcagttcctgattagcctctgtggggtcagcagcgacacagttctcctaccctatattaaaaaagtggcaatatacttgtgccgtaacaacaccattcaaaccatggaagagcttctctttgagctgcagcagacagaacccgtgaaccccatcgtccagcattgtgacaacccgcccttctaccgcttcacggccagtagcaaggcttccgcagcagcctcaggaaccacctctagcagcaatacagtggttgctggccaggaaaatttcccagatgctgaggagaacaagatattgaaagaatctgatgaaaggtttagtaatgtcatcagagcccacactcgcctcgagtcaagatacagcaatagctctggaggatcctacgatgaagataaaaatgatccaatttctccctacacgggctggttgctgactattacagagaccaagcagccgcagcccttaccgatgccttgtactggaggatgctgggcccccctggttgactatctcccggagaccatcactccccgggggccactccacaggtgcaatattgctgtaatttttatgactgaaatggtggtggatcacagtgtacgagaagactgggcgcttcatctaccattattacttcatgctgtcttcttaggtttagaccactaccggcctgaagtctttgaacacagcaaaaaactgcttcttcacctcttgattgccctctcttgcaacagcaatttccattccattgcttccgtgctcctgcagacccgagagatgggtgaagctaagactctaaccgtgcagccagcctaccaacctgaatatctctatacaggtggctttgacttcctgagagaggaccagtcatccccggtgcctgactcagggcttagttcaagctccacctcctctagcatcagtctgggaggcagcagtggaaacctcccacagatgacccaggaggtagaagatgtggacacagctgctgaaacagatgagaaggcaaacaagctcattgagtttctcacgaccagggcatttggtccactttggtgccatgaagacatcacacctaaaaatcaaaattcaaagagtgctgaacagctcactaattttctacgtcacgttgtatctgtatttaaagattccaaatcaggcttccatctggagcaccagttgagtgaagttgcattgcagacagccctcgcaagctcttcaaggcactatgctggtcggtccttccagatattccgggccctcaagcaacctctgtcagcacatgccttatctgaccttctctcaagattggtggaggtgataggagaacatggagatgagattcagggttatgtaatggaagcgctcctaaccttggaggcggctgtggataacttgtctgactgcttgaagaacagtgacctcctaactgtattgtcccgctcttcctcaccagatttaagctccagcagtaaactaacagcaagcagaaagagcacaggacaactaaacatgaacccgggaaccaccagcggcaacaccgcaactgccgaacggagccggcatcaacgaagcttctctgtgcccaagaagtttggtgtcatcgaccgatcctctgacccacctcgaagtgccacactggacagaattcaggcttgtacccaacaaggcctctcctcaaaaaccagaagctcatcctccttgaaggacagtctcacggacccatcccacataaaccatcccaccaacctgctggccaccatattctgggtcacagtggccttgatggagtctgattttgagtttgaatacttaatggccttaaggctgttgagcagactactggcacatatgccactcgataaggctgagaaccgagaaaagcttgagaaactccaggcacagctgaagtgggccgacttctccgggctgcagcagctgctgctgaaaggattcacatccctcaccaccacagacctgaccctgcagctcttcagtctgctgacaccagtgtccaaaatatccatggtggatgcatcccacgctattgggtttccactgaatgtcttgtgtctcctgcctcagctgattcagcattttgaaaatcccaatcagttctgtaaggatatagccgaaaggattgctcaggtttgtttagaagagaagaaccccaaactttcaaatcttgcacatgtcatgactctttataaaacgcacagctacacgagggactgtgccacgtgggtcaatgtggtctgtcgataccttcatgaagcatatgctgacattaccttgaatatggttacctacctggcagagctgctggagaagggcctccctagtgtgcagcagcccctgctccaggtgatctacagtcttctcagctacatggacctttctgtcgttcctgtcaaacagttcaatgtggaagttctgaagacaattgaaaaatatgtgcaaagtgttcactggagagaagctctgaatatcttgaagctggtagtttctcggtcagccagccttgttttaccttcataccagcacagtgacctctcaaaaatagaaatacatcgagtgtggactagtgcttccaaggaattacctgggaaaaccctggacttccacttcgatatttcggagactccaatcatcgggaggcggtatgatgagctgcagaattcttctgggcgtgatgggaagcccagggccatggccgtcacccggagcacatcttccacttcctcaggctccaactccaacgtccttgttccagtgagctggaaaaggccccagtattctcagaagagaacaaaagagaagttggtacatgtcctttctctgtgtggccaagaagtaggattgagcaaaaatccatcagtgattttttcatcgtgtggggatctggatctgcttgagcaccagacaagcttggtatcttctgaggacggtgcccgagagcaggagaacatggatgacacaaacagcgagcagcagtttagagtcttcagagacttcgacttcctagatgtggagctggaggatggagagggtgagagtatggacaatttcaactggggagtgcgcagacgttctctggacagcctggataagtgtgatatgcagattctggaggagcgccaactgtcaggaagcactcctagcctgaataaaatgcaccatgaggactccgatgaatcatccgaggaggaggacctcacagccagccagatcctggagcactcagacctaatcatgactctctccccctctgaagagacgaatcccatggagctgctcaccacagcctgtgactcgacccctgcagaacctcattcctttaacaccagaatgtccagctttgatgcttccttgcctgatatgaataatctgcagatttctgagggttcaaaggctgaagctgttcgtgaggaggaggacaccaccgtgcatgaggatgatctttctagttccatcaatgaactcccagcagcttttgaatgcagcgacagctttagcctggacatgactgagggggaagaaaaaggcaatcgggcactggaccagtttaccctggcgagctttggagaaggtgacaggggagtctctccccctccctcgcccttcttctcagccatccttgccgcctttcagcccgcagcctgtgacgatgccgaggaggcctggcgcagccacatcaaccagcttatgtgtgactcagatggctcctgtgctgtgtatacatttcatgtgttctcctccttgtttaagaatattcagaaaaggttctgcttcctaacctgtgatgcagccagttaccttggagataacctccggggaatcggatccaaatttgtcagctcttcccagatgctcacctcctgctctgaatgtcctacactttttgtggatgccgagactctcctttcatgtggacttctggacaagctcaagttcagtgtgttagaactgcaagaatatttggatacctacaacaacaggaaagaggccacactctcttggcttgcaaattgtaaggcaacatttgcagggggatcaagagatggagtaattacctgtcaaccaggggactccgaagaaaagcaattggaactgtgtcagagattatataagctacacttccagctgctattgctttttcagtcctactgtaagctcatcggccaggtgcacgaagttagctccatgccagagctgctgaatatgtccagggaactgagtgacctaaagaaacacctgaaggaagccagtgcagtcattgcagctgaccctctctattcagacggcgcgtggtccgagcccaccttcacgtccactgaagcagccatccagtccatgctggagtgcctgaagaacaacgaactcggcaaagctttgcggcagatcagggagtgcagaagtctgtggcccaatgacatctttggaagcagttctgatgatgaggtccagacactactgaatatttatttccgtcaccaaactctgggacagacgggtacttatgccctggtggggtctaaccagagcctgaccgagatctgcaccaagctgatggagctgaacatggagatccgggacatgatccgcagggcccagagttaccgagtcctcactacttttcttccagactccagtgtttctggcactagtctctgacaggagcctcctgtccccactgggttccaaactgcagtgctgccatgctggggcaacgtcattcagtgtcttctcggccttcaaaaggcttggacagactgttctccctcttgttacctgtagggctttttctaaagaggatggcagaacttccaacgtgtagcaatactataagaaccaaggtagcttagaacgtcctggacagactccactcatcatgctgtgtggcacaaatgtgttacatttgaccgagcatatgcaactcgctactgaagaagtgacttccgttgcataccaaagccgactacactgaacagtaccttcctttctagaaacaattttagattggcaaaagtgcaatgttttcttcactcaaaaaattttatattctcaaacatgtatattctttccctgtcttgttccattttcttttcttttttcttttttctttttcctttctttcgtgggctgagaaaggggcaggcaaaatgaagctggccactgaaaactgtaagatggtcaaaagctgacagcctgtgtatgtgaaaagggaattgtaaatggactgcaatgtaatgtacactgtaatttgaatacaattactgtatctaaaaggagctgctatgaagtacctttcttatgttgctaggctactgtttctgaaagccctggatctctttgcaccaaaaatggtccagatagactctttttaaggatcttggctgctttttactagaaggttgcttttatgagcatatttatactgctgaaggatgagtgttaattttaattaactttgccgttttgtagagaaaactattcacaagataaattccaagtcttttcacctgtcaggcatgcatattttaatatctgtttggatagtcagaagtagaatcataaaggtaaaatatgagttgttactttgtttcttcgatgtcatattttatgtgtaatatatatgtaaagggccattcttaagttctctccttaaacttaatgctgtcaagtgttagatgtgtgcatgtgaacttgttgcactgcagaaacatattcagagtttatctatgtaacttattcactctgtaaatacatttaaagtttttgtgatgtaagcttaattgatattctgttcagaactttctttagactaaaaaaaaaaaaaaaagacaaa

SEQ ID NO: 824 - protein, 2000 aa, Homo sapien
MASQQDSGFFEISIKYLLKSWSNTSPVGNGYIKPPVPPASGTHREKGPPTMLPINVDPDSKPGEYVLKSLFVNFTTQAERKIRIIMAEPLEKPLTKSLQRGEDPQFDQVISSMSSLSEYCLPSILRTLFDWYKRQNGIEDESHEYRPRTSNKSKSDEQQRDYLMERRDLAIDFIFSLVLIEVLKQIPLHPVIDSLIHDVINLAFKHFKYKEGYLGPNTGNMHIVADLYAEVIGVLAQAKFPAVKKKFMAELKELRHKEQNPYVVQSIISLIMGMKFFRIKMYPVEDFEASLQFMQECAHYFLEVKDKDIKHALAGLFVEILVPVAAAVKNEVNVPCLRNFVESLYDTTLELSSRKKHSLALYPLVTCLLCVSQKQLFLNRWHIFLNNCLSNLKNKDPKMARVALESLYRLLWVYMIRIKCESNTATQSRLITIITTLFPKGSRGVVPRDMPLNIFVKIIQFIAQERLDFAMKEIIFDFLCVGKPAKAFSLNPERMNIGLRAFLVIADSLQQKDGEPPMPVTGAVLPSGNTLRVKKTYLSKTLTEEEAKMIGMSLYYSQVRKAVDNILRHLDKEVGRCMMLTNVQMLNKEPEDMITGERKPKIDLFRTCVAAIPRLLPDGMSKLELIDLLARLSIHMDDELRHIAQNSLQGLLVDFSDWREDVLFGFTNFLLREVNDMHHTLLDSSLKLLLQLLTQWKLVIQTQGKVYEQANKIRNSELIANGSSHRIQSERGPHCSVLHAVEGFALVLLCSFQVATRKLSVLILKEIRALFIALGQPEDDDRPMIDVMDQLSSSILESFIHVAVSDSATLPLTHNVDLQWLVEWNAVLVNSHYDVKSPSHVWIFAQSVKDPWVLCLFSFLRQENLPKHCPTALSYAWPYAFTRLQSVMPLVDPNSPINAKKTSTAGSGDNYVTLWRNYLILCFGVAKPSIMSPGHLRASTPEIMATTPDGTVSYDNKAIGTPSVGVLLKQLVPLMRLESIEITESLVLGFGRTNSLVFRELVEELHPLMKEALERRPENKKRRERRDLLRLQLLRIFELLADAGVISDSTNGALERDTLALGALFLEYVDLTRMLLEAENDKEVEILKDIRAHFSAMVANLIQCVPVHHRRFLFPQQSLRHHLFILFSQWAGPFSIMFTPLDRYSDRNHQITRYQYCALKAMSAVLCCGPVFDNVGLSPDGYLYKWLDNILACQDLRVHQLGCEVVVLLLELNPDQINLFNWAIDRCYTGSYQLASGCFKAIATVCGSRNYPFDIVTLLNLVLFKASDTNREIYEISMQLMQILEAKLFVYSKKVAEQRPGSILYGTHGPLPPLYSVSLALLSCELARMYPELTLPLFSGKPAIPHNTPQRAPDHAYLPAALAAQHRAGGQQAPPPGSSPSSPEDEVKDREGDVTASHGLRGNGWGSPEATSLVLNNLMYMTAKYGDEVPGPEMENAWNALANNEKWSNNLRITLQFLISLCGVSSDTVLLPYIKKVAIYLCRNNTIQTMEELLFELQQTEPVNPIVQHCDNPPFYRFTASSKASAAASGTTSSSNTVVAGQENFPDAEENKILKESDERFSNVIRAHTRLESRYSNSSGGSYDEDKNDPISPYTGWLLTITETKQPQPLPMPCTGGCWAPLVDYLPETITPRGPLHRCNIAVIFMTEMVVDHSVREDWALHLPLLLHAVFLGLDHYRPEVFEHSKKLLLHLLIALSCNSNFHSIASVLLQTREMGEAKTLTVQPAYQPEYLYTGGFDFLREDQSSPVPDSGLSSSSTSSSISLGGSSGNLPQMTQEVEDVDTAAETDEKANKLIEFLTTRAFGPLWCHEDITPKNQNSKSAEQLTNFLRHVVSVFKDSKSGFHLEHQLSEVALQTALASSSRHYAGRSFQIFRALKQPLSAHALSDLLSRLVEVIGEHGDEIQGYVMEALLTLEAAVDNLSDCLKNSDLLTVLSRSSSPDLSSSSKLTASRKSTGQLNMNPGTTSGNTATAERSRHQRSFSVPKKFGVIDRSSDPPRSA

SEQ ID NO: 825 - DNA, 1872 bp, Homo sapien
gacggcgagaccccgccccatccccgactgcctgaaccgcgccaggagacggaccgcaagtccagcgtacccacagacgactcaggcgggagacgagcggtgtcatggccgccgacagtgacgatggcgcagtttcagctcccgcagcttccgacggtggtgtcagcaaaagcacaacatctggggaggagctagtagtccaggttcccgtagtggatgtgcaaagcaacaacttcaaggagatgtggccatccctcctgctagccataaagacagctaatttcgtggctgtggacacggagctgagtgggcttggggacaggaagagtttgctgaaccagtgcattgaggaacgttacaaggccgtgtgtcatgctgccaggacccgttctatcctttccctgggcctcgcctgcttcaagcggcagccagacaagggtgaacattcctatctggctcaagtgttcaatctcactctgctgtgcatggaggagtatgtcatagaaccaaagtctgtgcagttcctgatacagcatggcttcaacttcaaccagcagtatgcccaaggcatcccctaccataagggcaatgacaagggtgatgagagccagagccagtcagtacggaccctattcctggagctaatccgagcccgccggcctctggtgctacacaatggccttatagacttggtgttcctgtaccagaacttctatgcacacctccctgagagtctgggaaccttcaccgctgacctgtgtgagatgttcccagcaggcatttatgacaccaaatatgctgctgagtttcgtgcccgtttcgtggcctcctacttagaatatgccttccggaaatgtgaacgggaaaatgggaagcagcgggcagctggcagcccacaccttaccctggagttctgcaactatccttccagcatgagggaccatattgattaccgctgctgcctgcccccagcaacccaccgtcctcatcccaccagcatctgtgacaacttctcggcttatggctggtgccccctgggaccacagtgtcctcagtctcacgatattgaccttatcattgacactgatgaggctgcggcagaggacaagcggcgacggcgacgacgtagggaaaaacggaagagggctttattgaacctaccggggacacagacctctggggaagctaaggatggtcctcccaagaagcaggtctgtggggatagcatcaagcctgaagaaaccgagcaggaggtggctgccgatgaaactaggaacctgcctcactccaagcaaggcaacaaaaatgacttagagatggggattaaggcagcaaggcctgaaatagctgatagagctacctcagaagtgccagggagccaagccagtcctaacccagtgcctggggatggattgcaccgggctggttttgatgcctttatgacaggttatgtgatggcctatgtggaagtgagccagggaccgcagccctgcagctctggaccctggctccctgaatgccacaataaggtatatttgagtggcaaagctgtacccctcacagtggccaagagccagttctctcgttcctccaaagcccacaatcagaagatgaagctcacttggggcagtagctgatgcaacttccaccttgctctcaggtggaacagaggtattttgggtctctctagcctgaaatgtcatcctcaactgctactgagtttaggggagggggaatgtcttgacagacatcactgcattgccctggaccgcctcctttatcccagtgtttgaggtacaagtaagaaggctgaccagcacctgtaacactgactttatttttaagtctgaaaatgtcttgggaaagttttac

SEQ ID NO: 826 - protein, 510 aa, Homo sapien
MAADSDDGAVSAPAASDGGVSKSTTSGEELVVQVPVVDVQSNNFKEMWPSLLLAIKTANFVAVDTELSGLGDRKSLLNQCIEERYKAVCHAARTRSILSLGLACFKRQPDKGEHSYLAQVFNLTLLCMEEYVIEPKSVQFLIQHGFNFNQQYAQGIPYHKGNDKGDESQSQSVRTLFLELIRARRPLVLHNGLIDLVFLYQNFYAHLPESLGTFTADLCEMFPAGIYDTKYAAEFRARFVASYLEYAFRKCERENGKQRAAGSPHLTLEFCNYPSSMRDHIDYRCCLPPATHRPHPTSICDNFSAYGWCPLGPQCPQSHDIDLIIDTDEAAAEDKRRRRRRREKRKRALLNLPGTQTSGEAKDGPPKKQVCGDSIKPEETEQEVAADETRNLPHSKQGNKNDLEMGIKAARPEIADRATSEVPGSQASPNPVPGDGLHRAGFDAFMTGYVMAYVEVSQGPQPCSSGPWLPECHNKVYLSGKAVPLTVAKSQFSRSSKAHNQKMKLTWGSS

SEQ ID NO: 827 - DNA, 4080 bp, Homo sapien
tttttttttttttttacagctgttcctgctgattgctttttaagctaggctcaagtgtggggccacggaatccttcaggtgcccttcaaatcagacattacatttcagctctcagggctagaatgcttccccctcttatcttgggcaggtctttgaagaagccagtttagccttggtaattttgaatttggccatagtatacggaggagagctaggtagctatcaaaacgcttagacaaacgtatggtaaaatgcagcccagcctgaacctccgcaaaacccccaaacctggagcagcaagtgggcaaaggagtgtgtgtttggggcagggtactgagtcccatatgtaatcaagagacctggagggcccaaggaagtcagtgacacccccacaagctacatatcctccaatggattgtggtggtcatctccggctaccgaagccaccttgcttattcccataggcttacaaacattatgatgcttcacacgagttgtgggtgaagtgaaggaattggaaagtcccggtctaaggccctgcaaaactgctgtctggtaaaaacaagtgactatggcaaggccctgaatgtactacgtatagacttaagtcagtatttgtgcctaacagcaaagcatgccacaagaggctcctcaaaagccgggtaattgatgccattgttttcttgacctagttgaagagtcaaagaagagaaggtgatgcagaaacttctttccagtgaagtgacagatccaagcaaggaacacctgcctgtgaggggagcggtaggggagggggtagattcggcagcactcgggtagtggcagggaccacatattgtcggtgttaaccactgttatcactggcccaggtcgagtgaggacgagtcatttccccactaagcacttggggagtggcagggaccacatattgtcagtgttaaccactgttatgactggcccaggtcgggtgacgacgagccatttccgcactattgtcccttcttcctcactgcacccccagccctgcaccctcagctccaaatacacattctcgttcactcaacgtttgttgacacctagcgtgggccctgtgggatggggtaaaagttcggtgttgggaggagccccggtgacagatttttggttttggtggtggcttttgggcaaggacaggtcagttcataaaagatgacgccccaggtctggatcgaattctcctgggagccagaccaaagcaccttcctggactgcaaagtgtggaagccgccgcgggccgggcgcggggaggtgtcatgcgccggaacctgcgcttggggccaagctctggagctgacgcgcaggggcaaggcgccccgcgtcccggactggcggctccgcgcatgctcctcccaccggcgtcgcaggcctcgagaggctccggaagtactgggtgcagcctgatggcgcaggaggtagacacggcacagggcgccgagatgcggcggggcgcgggcgcggctcggggacgcgcttcctggtgctgggccctggcgctgctttggctcgcggtggttccgggctggtcccgggtctcgggcatcccctcccggcgccactggccggtgccctacaagcgctttgacttccgtccaaaacctgatccttattgtcaagctaagtatactttctgtccaactggctcacctatcccagttatggagggtgatgatgacattgaagtttttcgattacaagccccagtatgggaatttaaatatggagacctcctgggacacttgaaaattatgcatgatgccattggattcagaagtacattaactggcaagaactacacaatggaatggtatgaacttttccaacttggcaactgtacatttccccatctccgacctgaaatggatgcccctttctggtgtaatcaaggcgctgcctgcttttttgagggaattgatgatgttcactggaaggaaaatgggacattagttcaagtagcaactatatcaggaaacatgttcaaccaaatggcaaagtgggtgaaacaggacaatgaaacaggaatttattatgagacatggaatgtaaaagccagcccagaaaagggggcagagacatggtttgattcctacgactgttccaaatttgtgttaaggacctttaacaagttggctgaatttggagcagagttcaagaacatagaaaccaactatacaagaatatttctttacagtggagaacctacttatctgggaaatgaaacatctgtttttgggccaacaggaaacaagactcttggtttagccataaaaagattttattaccccttcaaaccacatttgccaactaaagaatttctgttgagtctcttgcaaatttttgatgcagtgattgtgcacaaacagttctatttgttttataattttgaatattggtttttacctatgaaattcccttttattaaaataacatatgaagaaatccctttacctatcagaaacaaaacactctctggtttataaaacaccttaattctactgctcttttttctccaatcaccagcatctgtttttcagggggtgattttacttttgtgaattccttagcctttcttccttggtgcataaagttaaaatgcacatcagcagaattgctgcatattaacatctcaggactcttctcttgtaaagaagctgaaattcgtactatattggccaaagtgagcgagttaggtgatcttggtttcaatttccgagcctttgttaatatggagaattatggttcatatcagttatgtaggacctttggacccagggtcctacagatagatatggtgtgcccagattttaaaaataccttcaaaaataaaaaatacattcagtgacattttcatggtgggagctcttctttctgatatggcagttacactttttcacttaagtgctttagtttagactaactttacaacttctataacttttggaaccaagtttagtatagtctgattacattccattcacctaactttagacattcgtttagacaccataactggagtgattgtgcttctagatgtggcaaatccagtgttaacacatatttctggctgagattttggaactagctagtaactggcttgtgttctttaagcatactaacatcactaaatcttaggatttaggattgctgtaaagatgtaagttgtgtatgtttggcaggtcacattgaatggcagtgataatgattaatcaaagaacaaatgtcatccttgatcttgcctaatgtagtttatgtgccaaactttccagggttttgtagtcacctagattttaagctgatagcatagtgcttcagcggttcttctaaccggggtatgcaggaacatggctgcagacacgtttgggtaaacaggcaccttctgacttcttcattgtttcctgtagttctccctcttcccacaaagctgtcagcgcagtggaagaggttgcacttctccgagagaggacaggtttctgttaagatcaccaagtagctgtgctttaattagagccagacaagctttcaaggtcctttaagtatttgatgatcaactgaacacgtttctattcaaggagaaaacaccattcagtaagaagatggagtagatatcagataaaacaattcacgtttaatatgtaaatgtaccaattatgtgattcagtttcaactttcaagtacttcctgagaggttagtacattattattgagctctcacagaaagcttaatcatagatataattaacctgatccaaatgagtaaagtggaccttagaaaggctaagtgatctttctctggctatccagctagtagtaatgaagtcaggtcttgaaccccggttctgctgactgaattggatgcactatagtacaggcttttagcaccgaagtgtggtcctcagaccagtgcctgccaaccagatgttactggtctgtgaggaaataagtacagatactgacaggaagcttttataaacaatttattggagtgtttttgtttctgttgggtctaattaaaaaaattggagcttgtaaaaaaaaaaaaaaaaa

SEQ ID NO: 828 - protein, 407 aa, Homo sapien
MRRNLRLGPSSGADAQGQGAPRPGLAAPRMLLPPASQASRGSGSTGCSLMAQEVDTAQGAEMRRGAGAARGRASWCWALALLWLAVVPGWSRVSGIPSRRHWPVPYKRFDFRPKPDPYCQAKYTFCPTGSPIPVMEGDDDIEVFRLQAPVWEFKYGDLLGHLKIMHDAIGFRSTLTGKNYTMEWYELFQLGNCTFPHLRPEMDAPFWCNQGAACFFEGIDDVHWKENGTLVQVATISGNMFNQMAKWVKQDNETGIYYETWNVKASPEKGAETWFDSYDCSKFVLRTFNKLAEFGAEFKNIETNYTRIFLYSGEPTYLGNETSVFGPTGNKTLGLAIKRFYYPFKPHLPTKEFLLSLLQIFDAVIVHKQFYLFYNFEYWFLPMKFPFIKITYEEIPLPIRNKTLSGL

SEQ ID NO: 829 - DNA, 1389 bp, Homo sapien
gggggactgggagcgggcggcgcggccatggcgggctgctgctccgcgctggcggccttcctgttcgagtacgacacgccgcgcatcgtgctcatccgcagccgcaaagtggggctcatgaaccgcgccgtgcaactgctcatcctggcctacgtcatcgggtgggtgtttgtgtgggaaaagggctaccaggaaactgactccgtggtcagctccgttacgaccaaggtcaagggcgtggctgtgaccaacacttctaaacttggattccggatctgggatgtggcggattatgtgataccagctcaggaggaaaactccctcttcgtcatgaccaacgtgatcctcaccatgaaccagacacagggcctgtgccccgagattccagatgcgaccactgtgtgtaaatcagatgccagctgtactgccggctctgccggcacccacagcaacggagtctcaacaggcaggtgcgtagctttcaacgggtccgtcaagacgtgtgaggtggcggcctggtgcccggtggaggatgacacacacgtgccacaacctgcttttttaaaggctgcagaaaacttcactcttttggttaagaacaacatctggtatcccaaatttaatttcagcaagaggaatatccttcccaacatcaccactacttacctcaagtcgtgcatttatgatgctaaaacagatcccttctgccccatattccgtcttggcaaaatagtggagaacgcaggacacagtttccaggacatggccgtggagggaggcatcatgggcatccaggtcaactgggactgcaacctggacagagccgcctccctctgcttgcccaggtactccttccgccgcctcgatacacgggacgttgagcacaacgtatctcctggctacaatttcaggtttgccaagtactacagagacctggctggcaacgagcagcgcacgctcatcaaggcctatggcatccgcttcgacatcattgtgtttgggaaggcagggaaatttgacatcatccccactatgatcaacatcggctctggcctggcactgctaggcatggcgaccgtgctgtgtgacatcatagtcctctactgcatgaagaaaagactctactatcgggagaagaaatataaatatgtggaagattacgagcagggtcttgctagtgagctggaccagtgaggcctaccccacacctgggctctccacagccccatcaaagaacagagaggaggaggagggagaaatggccaccacatcaccccagagaaatttctggaatctgattgagtctccactccacaagcactcagggttccccagcagctcctgtgtgttgtgtgcaggatctgtttgcccactcggcccaggaggtca

SEQ ID NO: 830 - protein, 388 aa, Homo sapien
MAGCCSALAAFLFEYDTPRIVLIRSRKVGLMNRAVQLLILAYVIGWVFVWEKGYQETDSVVSSVTTKVKGVAVTNTSKLGFRIWDVADYVIPAQEENSLFVMTNVILTMNQTQGLCPEIPDATTVCKSDASCTAGSAGTHSNGVSTGRCVAFNGSVKTCEVAAWCPVEDDTHVPQPAFLKAAENFTLLVKNNIWYPKFNFSKRNILPNITTTYLKSCIYDAKTDPFCPIFRLGKIVENAGHSFQDMAVEGGIMGIQVNWDCNLDRAASLCLPRYSFRRLDTRDVEHNVSPGYNFRFAKYYRDLAGNEQRTLIKAYGIRFDIIVFGKAGKFDIIPTMINIGSGLALLGMATVLCDIIVLYCMKKRLYYREKKYKYVEDYEQGLASELDQ

SEQ ID NO: 831 - DNA, 1705 bp, Homo sapien
ccgagccgagcgccgagcagggagcgggcggccgcgctccgggccggggtcccgggggagcagatcctcagaatggcccttggtgctgcaggcgcggtgggctccgggcccaggcaccgagggggcactggatgactctccaggtgcaggaccctgccatctatgactccaggtcttcagcacccacccaccgtggtacagcgccccgggatgccgtctggagcccggatgccccaccagggggcgcccatgggccccccgggctccccgtacatgggcagccccgccgtgcgacccggcctggcccccgcgggcatggagcccgcccgcaagcgagcagcgcccccgcccgggcagagccaggcacagagccagggccagccggtgcccaccgcccccgcgcggagccgcagtgccaagaggaggaagatggctgacaaaatcctccctcaaaggattcgggagctggtccccgagtcccaggcttacatggacctcttggcatttgagaggaaactggatcaaaccatcatgcggaagcgggtggacatccaggaggctctgaagaggcccatgaagcaaaagcggaagctgcgactctatatctccaacacttttaaccctgcgaagcctgatgctgaggattccgacggcagcattgcctcctgggagctacgggtggaggggaagctcctggatgatcccagcaaacagaagcggaagttctcttctttcttcaagagtttggtcatcgagctggacaaagatctttatggccctgacaaccacctcgttgagtggcatcggacacccacgacccaggagacggacggcttccaggtgaaacggcctggggacctgagtgtgcgctgcacgctgctcctcatgctggactaccagcctccccagttcaaactggatccccgcctagcccggctgctggggctgcacacacagagccgctcagccattgtccaggccctgtggcagtatgtgaagaccaacaggctgcaggactcccatgacaaggaatacatcaatggggacaagtatttccagcagatttttgattgtccccggctgaagttttctgagattccccagcgcctcacagccctgctattgccccctgacccaattgtcatcaaccatgtcatcagcgtggacccttcagaccagaagaagacggcgtgctatgacattgacgtggaggtggaggagccattaaaggggcagatgagcagcttcctcctatccacggccaaccagcaggagatcagtgctctggacagtaagatccatgagacgattgagtccataaaccagctcaagatccagagggacttcatgctaagcttctccagagaccccaaaggctatgtccaagacctgctccgctcccagagccgggacctcaaggtgatgacagatgtagccggcaaccctgaagaggagcgccgggctgagttctaccaccagccctggtcccaggaggccgtcagtcgctacttctactgcaagatccagcagcgcaggcaggagctggagcagtcgctggttgtgcgcaacacctaggagcccaaaaataagcagcacgacggaactttcagccgtgtcccgggccccagcattttgccccgggctccagcatcactcctctgccaccttggggtgtggggctggattaaaagtcattcatctgaca

SEQ ID NO: 832 - protein, 469 aa, Homo sapien [sequence omitted]

SEQ ID NO: 833 - DNA, 1099 bp, Homo sapien
tcctgcgttgctgggaagttctggaaggaagcatgtgctccagaggttgggattcgtgtctggctctggaattgctactgctgcctctgtcactcctggtgaccagcattcaaggtcacttggtacatatgaccgtggtctccggcagcaacgtgactctgaacatctctgagagcctgcctgagaactacaaacaactaacctggttttatactttcgaccagaagattgtagaatgggattccagaaaatctaagtactttgaatccaaatttaaaggcagggtcagacttgatcctcagagtggcgcactgtacatctctaaggtccagaaagaggacaacagcacctacatcatgagggtgttgaaaaagactgggaatgagcaagaatggaagatcaagctgcaagtgcttgaccctgtacccaagcctgtcatcaaaattgagaagatagaagacatggatgacaactgttatttgaaactgtcatgtgtgatacctggcgagtctgtaaactacacctggtatggggacaaaaggcccttcccaaaggagctccagaacagtgtgcttgaaaccacccttatgccacataattactccaggtgttatacttgccaagtcagcaattctgtgagcagcaagaatggcacggtctgcctcagtccaccctgtaccctggcccggtcctttggagtagaatggattgcaagttggctagtggtcacggtgcccaccattcttggcctgttacttacctgagatgagctcttttaactcaagcgaaacttcaaggccagaagatcttgcctgttggtgatcatgctcctcaccaggacagagactgtataggctgaccagaagcatgctgctgaattatcaacgaggattttcaagttaacttttaaatactggttattatttaattttatatccctttgttgttttctagtacacagagatatagagatacacatgcttttttcccacccaaaattgtgacaacattatgtgaatgttttattattttttaaaataaacatttgatataattatcaattaactgaaaaaaaaaaaaaaaaaaaaaaaaaaaaaaa

SEQ ID NO: 834 - protein, 243 aa, Homo sapien
MCSRGWDSCLALELLLLPLSLLVTSIQGHLVHMTVVSGSNVTLNISESLPENYKQLTWFYTFDQKIVEWDSRKSKYFESKFKGRVRLDPQSGALYISKVQKEDNSTYIMRVLKKTGNEQEWKIKLQVLDPVPKPVIKIEKIEDMDDNCYLKLSCVIPGESVNYTWYGDKRPFPKELQNSVLETTLMPHNYSRCYTCQVSNSVSSKNGTVCLSPPCTLARSFGVEWIASWLVVTVPTILGLLLT

SEQ ID NO: 835 - DNA, 1860 bp, Homo sapien
cgccttccctccaatcagcaccggggccggctagccaggggccggccgcgcggggtgtgtgaggacgcgctcccagtcgctgagtgcctgagccgggaagcagttgctgtggtacctgcgctgcccgagcggagtggatggcagaggtgggctgtagagccaaagtggggtgggagcgcgaagatggcagctgctgaggaggagccgaagcccaaaaagctgaaggtggaggcgccgcaagcgctgagagaaaatattctctttggaatgggaaatcctctgcttgacatctctgctgtagtggacaaagatttccttgataagtattctctgaaaccaaatgaccaaatcttggctgaagacaaacacaaggaactgtttgatgaacttgtgaaaaaattcaaagtcgaatatcatgctggtggctctacccagaattcaattaaagtggctcagtggatgattcaacagccacacaaagcagcaacattttttggatgcattgggatagataaatttggggagatcctgaagagaaaagctgctgaagcccatgtggatgctcattactacgagcagaatgagcagccaacaggaacttgtgctgcatgcatcactggtgacaacaggtccctcatagctaatcttgctgctgccaattgttataaaaaggaaaaacatcttgatctggagaaaaactggatgttggtagaaaaagcaagagtttgttatatagcaggcttttttcttcacgtttccccagagtcagtattaaaggtggctcaccatgcttctgaaaacaacaggattttcactttgaatctatctgcaccgtttattagccagttctacaaggaatcattgatgaaagttatgccttatgttgatatactttttggaaatgagacagaagctgccacttttgctagagagcaaggctttgagactaaagacattaaagagatagccaaaaagacacaagccctgccaaagatgaactcaaagaggcagcgaatcgtgatcttcacccaagggagagatgacactataatggctacagaaagtgaagtcactgcttttgctgtcttggatcaagaccagaaagaaattattgataccaatggagctggagatgcatttgttggaggttttctgtctcaactggtctctgacaagcctctgactgaatgtatccgtgctggccactatgcagcaagcatcataattagacggactggctgcacctttcctgagaagccagacttccactgatggaagagctgaaaacacaagcccaggagtgcagacactgccctaattgcttcctgacaattcccatattaataaagaagaaaattatctgccattttttcctactataataatgctgaatcttaatttagagggtacaagggtatggtaatgcttgtagaatctttattatctcaacaatctaaaaaatgatgtttatttccatagtttgatagtgccacttaaatgccaattaaacaagaatataacatttcaatagaaatttttatttcattttcaattactttgtaaattcgtgtgtatttagtacactgatttgttttttacatttctgctttgaatgcagatgcaatttaatataatagattttttaatgaattaatcttaacatagtaatctttagctttttatacaaatatatttaatttaggagtatatgtgtgtctatacacacacatacataaatataccacatatacacctgatagtcaaataaggtacagaaattttatcttgtcaattatgccaaataatctctttaatgtgcactcaacatgtaataaactttggataattaaaaaaaaaaaa

SEQ ID NO: 836 - protein, 362 aa, Homo sapien
MAAAEEEPKPKKLKVEAPQALRENILFGMGNPLLDISAVVDKDFLDKYSLKPNDQILAEDKHKELFDELVKKFKVEYHAGGSTQNSIKVAQWMIQQPHKAATFFGCIGIDKFGEILKRKAAEAHVDAHYYEQNEQPTGTCAACITGDNRSLIANLAAANCYKKEKHLDLEKNWMLVEKARVCYIAGFFLHVSPESVLKVAHHASENNRIFTLNLSAPFISQFYKESLMKVMPYVDILFGNETEAATFAREQGFETKDIKEIAKKTQALPKMNSKRQRIVIFTQGRDDTIMATESEVTAFAVLDQDQKEIIDTNGAGDAFVGGFLSQLVSDKPLTECIRAGHYAASIIIRRTGCTFPEKPDFH

SEQ ID NO: 837 - DNA, 1437 bp, Homo sapien
ggtgtgtcccgggtgtggggaggcgacagagccctggcacttgagggttgagggggcctccccagcgcggcgaaccgtctagcctccggaggccaggccgtgagtgcgggaggtatacgccaaggcggaagaattttgccactcactacctgtgtgacctcgggtaaattagccttggaacgtcagtttcttcgtctctataattgaaataataatagtacctctctcaggattgttgtgagccgtcagtgaaacacttagagcagtttctggcacatggtagaattgggctatttgcttgaagcttcttggtggcccttgctagcccaggaagaaacttacattttgatttttttgtaccatggctttggttcacaaattgctgcatggtacttattttctcagaaaattctctaagccaacttctgccttgtatccatttttgggtatccgctttgcagagtattccagtagtcttcagaaaccagtggcttctcctggcaaagcctcctcacagaggaagactgaaggggatttgcaaggagatcaccagaaagaagttgctttggatataacttcttctgaggagaagcctgatgttagtttcgataaagcaattagagatgaagcaatataccattttaggcttttgaaggatgaaattgtggatcattggagaggaccggaaggccaccctctgcatgaggtcttgctggaacaagccaaggttgtctggcaattccgggggaaagaagatttggataagtggacagtgacttctgataagacgattggaggcagaagtgaagtgtttttgaaaatgggcaagaataaccaaagtgcactgctatatggaactctgagctctgaggcgcctcaggacggcgagtcttcccgaagtgggtactgtgcaatgatatccaggattccaaggggtgcttttaagaggaagatgtcttacgattggtcccagttcaatactctgtatctccgtgtacgtggggatggtcggccttggatggtgaatatcaaggaggacacagatttcttccagaggacgaatcagatgtatagttacttcatgttcacccgcgggggaccctactggcaggaggtcaagattcctttttccaaatttttcttctctaatcgaggaagaatccgggatgttcagcatgagcttccgcttgataagatctcttctataggattcaccttggctgataaagtggatggtccattcttcctggagatagattttattggcgtgtttactgatccagctcatacagaagaatttgcctatgaaaattctccagagcttaacccaaggctttttaaataaagatcatatggtagttttgttttactaatctaagggtactagcatctacaatgatatagacaaaataaaatatttctttaatggcatccaaa

SEQ ID NO: 838 - protein, 327 aa, Homo sapien
MALVHKLLHGTYFLRKFSKPTSALYPFLGIRFAEYSSSLQKPVASPGKASSQRKTEGDLQGDHQKEVALDITSSEEKPDVSFDKAIRDEAIYHFRLLKDEIVDHWRGPEGHPLHEVLLEQAKVVWQFRGKEDLDKWTVTSDKTIGGRSEVFLKMGKNNQSALLYGTLSSEAPQDGESSRSGYCAMISRIPRGAFKRKMSYDWSQFNTLYLRVRGDGRPWMVNIKEDTDFFQRTNQMYSYFMFTRGGPYWQEVKIPFSKFFFSNRGRIRDVQHELPLDKISSIGFTLADKVDGPFFLEIDFIGVFTDPAHTEEFAYENSPELNPRLFK

SEQ ID NO: 839 - DNA, 3309 bp, Homo sapien
ggcacgagggggaggaggaggaatgtggaaggtggcggcgcgcgagctgacaggcggttcctcgggcgggctgcggcgacggcccgagcgcttctccttcgccgaggttgcgcgccccctcctcgccgtgccccgggcccgcgcgggatcgtgcgtcgtcccgccgcgtccctgaagggaaggaagcgaggcggcggcggcggcgcccgggagccggagccttcgcggcgtccacgtccctcccccgctgcaccccgccccggcgcgagaggagagcgcgagagccccagccgcgggcgggcgggcggcgaagatggcagaggcaccggcttccccggccccgctctctccgctcgaagtggagctggacccggagttcgagccccagagccgtccgcgatcctgtacgtggcccctgcaaaggccggagctccaagcgagccctgccaagccctcgggggagacggccgccgactccatgatccccgaggaggaggacgatgaagacgacgaggacggcgggggacgggccggctcggccatggcgatcggcggcggcggcgggagcggcacgctgggctccgggctgctccttgaggactcggcccgggtgctggcacccggagggcaagaccccgggtctgggccagccaccgcggcgggcgggctgagcgggggtacacaggcgctgctgcagcctcagcaaccgctgccaccgccgcagccgggggcggctgggggctccgggcagccgaggaaatgttcgtcgcggcggaacgcctggggaaacctgtcctacgcggacctgatcacccgcgccatcgagagctccccggacaaacggctcactctgtcccagatctacgagtggatggtgcgttgcgtgccctacttcaaggataagggcgacagcaacagctctgccggctggaagaactccatccggcacaacctgtcactgcatagtcgattcatgcgggtccagaatgagggaactggcaagagctcttggtggatcatcaaccctgatggggggaagagcggaaaagccccccggcggcgggctgtctccatggacaatagcaacaagtataccaagagccgtggccgcgcagccaagaagaaggcagccctgcagacagcccccgaatcagctgacgacagtccctcccagctctccaagtggcctggcagccccacgtcacgcagcagtgatgagctggatgcgtggacggacttccgttcacgcaccaattctaacgccagcacagtcagtggccgcctgtcgcccatcatggcaagcacagagttggatgaagtccaggacgatgatgcgcctctctcgcccatgctctacagcagctcagccagcctgtcaccttcagtaagcaagccgtgcacggtggaactgccacggctgactgatatggcaggcaccatgaatctgaatgatgggctgactgaaaacctcatggacgacctgctggataacatcacgctcccgccatcccagccatcgcccactgggggactcatgcagcggagctctagcttcccgtataccaccaagggctcgggcctgggctccccaaccagctcctttaacagcacggtgttcggaccttcatctctgaactccctacgccagtctcccatgcagaccatccaagagaacaagccagctaccttctcttccatgtcacactatggtaaccagacactccaggacctgctcacttcggactcacttagccacagcgatgtcatgatgacacagtcggaccccttgatgtctcaggccagcaccgctgtgtctgcccagaattcccgccggaacgtgatgcttcgcaatgatccgatgatgtcctttgctgcccagcctaaccagggaagtttggtcaatcagaacttgctccaccaccagcaccaaacccagggcgctcttggtggcagccgtgccttgtcgaattctgtcagcaacatgggcttgagtgagtccagcagccttgggtcagccaaacaccagcagcagtctcctgtcagccagtctatgcaaaccctctcggactctctctcaggctcctccttgtactcaactagtgcaaacctgcccgtcatgggccatgagaagttccccagcgacttggacctggacatgttcaatgggagcttggaatgtgacatggagtccattatccgtagtgaactcatggatgctgatgggttggattttaactttgattccctcatctccacacagaatgttgttggtttgaacgtggggaacttcactggtgctaagcaggcctcatctcagagctgggtgccaggctgaaggatcactgaggaaggggaagtgggcaaagcagaccctcaaactgacacaagacctacagagaaaaccctttgccaaatctgctctcagcaagtggacagtgataccgtttacagcttaacacctttgtgaatcccacgccattttcctaacccagcagagactgttaatggccccttaccctgggtgaagcacttacccttggaacagaactctaaaaagtatgcaaaatcttccttgtacagggtggtgagccgcctgccagtggaggacagcacccctcagcaccacccaccctcattcagagcacaccgtgagcccccgtcggccattctgtggtgttttaatattgcgatggtttatgggacgttttaagtgttgttcttgtgtttgttttcctttgactttctgagtttttcacatgcattaacttgcggtatttttctgttaaaatgttaaccgtccttcccctagcaaatttaaaaacagaaagaaaatgttgtaccagttaccattccgggttcgagcatcacaagcttttgagcgcatggaactccataaactaacaaattacataaactaaagggggattttctttcttcttttgtttggtagaaaattatccttttctaaaaactgaacaatggcacaattgtttgctatgtgcacccgtccaggacagaaccgtgcataggcaaaaggagtggagcacagcgtccggcccagtgtgtttccggttctgagtcagggtgatctgtggacgggaccccagcaccaagtctacgggtgccagatcagtagggcctgtgatttcctgtcagtgtcctcagctaatgtgaacagtgttggtctgctggttagaaactagaatattgatattttcaggaaagaaatcagctcagctctccactcattgccaaatgtcactaaagggtttagttttaaggagaaagaaaaaaaaaaaaaaaaaaaaa

SEQ ID NO: 840 - protein, 673 aa, Homo sapien
MAEAPASPAPLSPLEVELDPEFEPQSRPRSCTWPLQRPELQASPAKPSGETAADSMIPEEEDDEDDEDGGGRAGSAMAIGGGGGSGTLGSGLLLEDSARVLAPGGQDPGSGPATAAGGLSGGTQALLQPQQPLPPPQPGAAGGSGQPRKCSSRRNAWGNLSYADLITRAIESSPDKRLTLSQIYEWMVRCVPYFKDKGDSNSSAGWKNSIRHNLSLHSRFMRVQNEGTGKSSWWIINPDGGKSGKAPRRRAVSMDNSNKYTKSRGRAAKKKAALQTAPESADDSPSQLSKWPGSPTSRSSDELDAWTDFRSRTNSNASTVSGRLSPIMASTELDEVQDDDAPLSPMLYSSSASLSPSVSKPCTVELPRLTDMAGTMNLNDGLTENLMDDLLDNITLPPSQPSPTGGLMQRSSSFPYTTKGSGLGSPTSSFNSTVFGPSSLNSLRQSPMQTIQENKPATFSSMSHYGNQTLQDLLTSDSLSHSDVMMTQSDPLMSQASTAVSAQNSRRNVMLRNDPMMSFAAQPNQGSLVNQNLLHHQHQTQGALGGSRALSNSVSNMGLSESSSLGSAKHQQQSPVSQSMQTLSDSLSGSSLYSTSANLPVMGHEKFPSDLDLDMFNGSLECDMESIIRSELMDADGLDFNFDSLISTQNVVGLNVGNFTGAKQASSQSWVPG

SEQ ID NO: 841 - DNA, 1998 bp, Homo sapien
cggcgcgatgcgcggagacccccgcgggggcggcggcggccgtgagccccgatgaggcccgagcgtccccggccgcgcggcagcgcccccggcccgatggagaccccgccgtgggacccagcccgcaacgactcgctgccgcccacgctgaccccggccgtgcccccctacgtgaagcttggcctcaccgtcgtctacaccgtgttctacgcgctgctcttcgtgttcatctacgtgcagctctggctggtgctgcgttaccgccacaagcggctcagctaccagagcgtcttcctctttctctgcctcttctgggcctccctgcggaccgtcctcttctccttctacttcaaagacttcgtggcggccaattcgctcagccccttcgtcttctggctgctctactgcttccctgtgtgcctgcagtttttcaccctcacgctgatgaacttgtacttcacgcaggtgattttcaaagccaagtcaaaatattctccagaattactcaaataccggttgcccctctacctggcctccctcttcatcagccttgttttcctgttggtgaatttaacctgtgctgtgctggtaaagacgggaaattgggagaggaaggttatcgtctctgtgcgagtggccattaatgacacgctcttcgtgctgtgtgccgtctctctctccatctgtctctacaaaatctctaagatgtccttagccaacatttacttggagtccaagggctcctccgtgtgtcaagtgactgccatcggtgtcaccgtgatactgctttacacctctcgggcctgctacaacctgttcatcctgtcattttctcagaacaagagcgtccattcctttgattatgactggtacaatgtatcagaccaggcagatttgaagaatcagctgggagatgctggatacgtattatttggagtggtgttatttgtttgggaactcttacctaccaccttagtcgtttatttcttccgagttagaaatcctacaaaggaccttaccaaccctggaatggtccccagccatggattcagtcccagatcttatttctttgacaaccctcgaagatatgacagtgatgatgaccttgcctggaacattgcccctcagggacttcagggaggttttgctccagattactatgattggggacaacaaactaacagcttcctggcacaagcaggaactttgcaagactcaactttggatcctgacaaaccaagccttgggtagcatcagttaacagttttatggacgattcctcagatgaaaagcttcagaaaagcatagtgacagctgaatttttagggcacttttccttaagaaatagaacttgatttttatttgttacaggtttccaatggccccataggaataagcaataatgtagactgataaacccttattttagtactaaagagggagccttgctatttcagtgggtataatttaaactttttaaagaaaatctgtacttttataaagatgtattttgtataacttaaataataatgctaaagtatactagggtttttttttcttgagaatgttactgcaatcatgttgtagtttgcacagacttttatgcataattcactttaaaaatatagaatatatggtctaatagttttttaaagcttttggactaaagtattccacaaatcttacctctttaggtcactgatggtcactccgattctgagtgccacattggtagactcctaaaatacagttgacaacttagccaattgcaactccagtgttgataattaaaatgaaatggtaaagcagcagactgtaaggtctttagagatttttttttaaggttcaggccgtaggttcctcaaggaatctcttaagttttgcccaaagactggtacttcctttcagtagggcgctaatgtatacacattaatgataagttgataacattaaaaatgtagctgacttatcctattaaacctcctctgctatgttcac

SEQ ID NO: 842 - protein, 399 aa, Homo sapien
MRPERPRPRGSAPGPMETPPWDPARNDSLPPTLTPAVPPYVKLGLTVVYTVFYALLFVFIYVQLWLVLRYRHKRLSYQSVFLFLCLFWASLRTVLFSFYFKDFVAANSLSPFVFWLLYCFPVCLQFFTLTLMNLYFTQVIFKAKSKYSPELLKYRLPLYLASLFISLVFLLVNLTCAVLVKTGNWERKVIVSVRVAINDTLFVLCAVSLSICLYKISKMSLANIYLESKGSSVCQVTAIGVTVILLYTSRACYNLFILSFSQNKSVHSFDYDWYNVSDQADLKNQLGDAGYVLFGVVLFVWELLPTTLVVYFFRVRNPTKDLTNPGMVPSHGFSPRSYFFDNPRRYDSDDDLAWNIAPQGLQGGFAPDYYDWGQQTNSFLAQAGTLQDSTLDPDKPSLG

SEQ ID NO: 843 - DNA, 1594 bp, Homo sapien
gcccgccggtccacgccgcgcaccgctccgagggccagcgccacccgctccgcagccggcaccatgcgcgagatcgtgcacatccaggcgggccagtgcggcaaccagatcggcgccaagttttgggaggtcatcagcgatgagcatgggatcgaccccacaggcagttaccatggagacagtgacttgcagctggagagaatcaacgtgtactacaatgaggctgctggtaacaaatatgtacctcgggccatcctggtggatctggagcctggcaccatggactctgtcaggtctggacccttcggccagatcttcagaccagacaacttcgtgttcggccagagtggagccgggaataactgggccaagggccactacacagagggagccgagctggtcgactcggtcctggatgtggtgaggaaggagtcagagagctgtgactgtctccagggcttccagctgacccactctctggggggcggcacggggtccgggatgggcaccctgctcatcagcaagatccgggaagagtacccagaccgcatcatgaacaccttcagcgtcatgccctcacccaaggtgtcagacacggtggtggagccctacaacgccaccctctcggtccaccagctggtggaaaacacagatgaaacctactccattgataacgaggccctgtatgacatctgcttccgcaccctgaagctgaccacccccacctacggggacctcaaccacctggtgtcggccaccatgagcggggtcaccacctgcctgcgcttcccgggccagctgaacgcagacctgcgcaagctggcggtgaacatggtgcccttccctcgcctgcacttcttcatgcccggcttcgcgcccctgaccagccggggcagccagcagtaccgggcgctcacggtgcccgagctcacccagcagatgttcgactccaagaacatgatggccgcctgcgacccgcgccacggccgctacctgacggtggctgccatcttccggggccgcatgtccatgaaggaggtggacgagcagatgctcaacgtgcagaacaagaacagcagctacttcgtggagtggatccccaacaacgtgaagacggccgtgtgcgacatcccgccccgcggcctgaagatgtcggccaccttcatcggcaacagcacggccatccaggagctgttcaagcgcatctccgagcagttcacggccatgttccggcgcaaggccttcctgcactggtacacgggcgagggcatggacgagatggagttcaccgaggccgagagcaacatgaacgacctggtgtccgagtaccagcagtaccaggacgccacggccgacgaacaaggggagttcgaggaggaggagggcgaggacgaggcttaaaaacttctcagatcaatcgtgcatccttagtgaacttctgttgtcctcaagcatggtctttctacttgtaaactatggtgctcagttttgcctctgttagaaattcacactgttgatgtaatgatgtggaactcctctaaaaattacagtattgtctgtgaaggtatctatactaataaaaaagcatgtgtag

SEQ ID NO: 844 - protein, 445 aa, Homo sapien
MREIVHIQAGQCGNQIGAKFWEVISDEHGIDPTGSYHGDSDLQLERINVYYNEAAGNKYVPRAILVDLEPGTMDSVRSGPFGQIFRPDNFVFGQSGAGNNWAKGHYTEGAELVDSVLDVVRKESESCDCLQGFQLTHSLGGGTGSGMGTLLISKIREEYPDRIMNTFSVMPSPKVSDTVVEPYNATLSVHQLVENTDETYSIDNEALYDICFRTLKLTTPTYGDLNHLVSATMSGVTTCLRFPGQLNADLRKLAVNMVPFPRLHFFMPGFAPLTSRGSQQYRALTVPELTQQMFDSKNMMAACDPRHGRYLTVAAIFRGRMSMKEVDEQMLNVQNKNSSYFVEWIPNNVKTAVCDIPPRGLKMSATFIGNSTAIQELFKRISEQFTAMFRRKAFLHWYTGEGMDEMEFTEAESNMNDLVSEYQQYQDATADEQGEFEEEEGEDEA

SEQ ID NO: 845 - DNA, 1613 bp, Homo sapien
gccacggcgcggacgccatgcacacggaccctgactactcggctgcctatgtcgtcatagaaactgatgcagaagatggaatcaaggggtgtggaattaccttcactctgggaaaaggcactgaagttgttgtctgtgctgtgaatgccctcgcccaccatgtgctcaacaaggacctcaaggacattgttggtgacttcagaggcttctataggcagctcacaagtgatgggcagctcagatggattggtccagaaaagggcgtggtgcacctggcgacagcggccgtcctaaacgcggtgtgggacttgtgggccaagcaggagggaaagcctgtctggaagttacttgtggacatggatcccaggatgctggtatcctgcatagatttcaggtacatcactgatgtcctgactgaggaggatgccctagaaatactgcagaaaggtcaaattggtaaaaaagaaagagagaagcaaatgctggcacaaggataccctgcttacacgacatcgtgcgcctggctggggtactcagatgacacgttgaagcagctctgtgcccaggcgctgaaggatggctggaccaggtttaaagtaaaggtgggtgctgatctccaggatgacatgcgaagatgccaaatcatccgagacatgattggaccggaaaagactttgatgatggatgccaaccagcgctgggatgtgcctgaggcggtggagtggatgtccaagctggccaagttcaagccattgtggattgaggagccaacctcccctgatgacattctggggcacgccaccatttccaaggcactggtcccattaggaattggcattgccacaggagaacagtgccacaatagagtgatatttaagcaactcctacaggcgaaggccctgcagttcctccagattgacagttgcagactgggcagtgtcaatgagaacctctcagtattgctgatggccaaaaagtttgaaattcctgtttgcccccatgctggtggagttggcctctgtgaactggtgcagcacctgattatatttgactacatatcagtttctgcaagccttgaaaatagggtgtgtgagtatgttgaccacctgcatgagcatttcaagtatcccgtgatgatccagcgggcttcctacatgcctcccaaggatcccggctactcaacagaaatgaaggaggaatctgtaaagaaacaccagtatccagatggtgaagtttggaagaaactccttcctgctcaagaaaattaagtgctcagccccaacaacttttttctttctgaagtgaaagggcttaaaatttcttggaaatagttttacaaaaatggatttaaaaaatcctaccgatcaagatgagttcagctagaagtcataccaccctcaggaatcagctaagtaattattacttgattcttttagcaaatcaatgcacgttatcctacttaatccttaaataagtttagatttaactaacccaaagtccaggaggatgttcttacaaaaatagctatatcaagggctggcacctagacattaaactgtactttgaaaataaaaaaaaaaaaaaaaaaaaaaaaaaaaaaaaaaaaaaaaaaa

SEQ ID NO: 846 - protein, 416 aa, Homo sapien
MHTDPDYSAAYVVIETDAEDGIKGCGITFTLGKGTEVVVCAVNALAHHVLNKDLKDIVGDFRGFYRQLTSDGQLRWIGPEKGVVHLATAAVLNAVWDLWAKQEGKPVWKLLVDMDPRMLVSCIDFRYITDVLTEEDALEILQKGQIGKKEREKQMLAQGYPAYTTSCAWLGYSDDTLKQLCAQALKDGWTRFKVKVGADLQDDMRRCQIIRDMIGPEKTLMMDANQRWDVPEAVEWMSKLAKFKPLWIEEPTSPDDILGHATISKALVPLGIGIATGEQCHNRVIFKQLLQAKALQFLQIDSCRLGSVNENLSVLLMAKKFEIPVCPHAGGVGLCELVQHLIIFDYISVSASLENRVCEYVDHLHEHFKYPVMIQRASYMPPKDPGYSTEMKEESVKKHQYPDGEVWKKLLPAQEN

SEQ ID NO: 847 - DNA, 1401 bp, Homo sapien
tgctccctgaacactcggaggtggcggtggatcttactccttccagccagtgaggatccagcaacctgctccgtgcctcccgcgcctgttggttggaagtgacgaccttgaagatcggccggttggaagtgacgaccttgaagatcggcgggcgcagcggggccgagggggcgggtctggcgctaggtccagcccctgcgtgccgggaaccccagaggaggtcgcagttcagcccagctgaggcctgtctgcagaatcgacaccaaccagcatcatgtccatgacactggggtactgggacatccgcgggctggcccacgccatccgcctgctcctggaatacacagactcaagctacgaggaaaagaagtatacgatgggggacgctcctgactatgacagaagccagtggctgaatgaaaaattcaagctgggcctggactttcccaatctgccctacttgattgatggggctcacaagatcacccagagcaacgccatcctgtgctacattgcccgcaagcacaacctgtgtggggagacagaagaggagaagattcgtgtggacattttggagaaccaggctatggacgtctccaatcagctggccagagtctgctacagccctgactttgagaaactgaagccagaatacttggaggaacttcctacaatgatgcagcacttctcacagttcctggggaagaggccatggtttgttggagacaagatcacctttgtagatttcctcgcctatgatgtccttgacctccaccgtatatttgagcccaactgcttggacgccttcccaaatctgaaggacttcatctcccgctttgagggcttggagaagatctctgcctacatgaagtccagccgcttcctcccaaaacctctgtacacaagggtggctgtctggggcaacaagtaatgccttgaaggccaggaggtgggagtgaggagcccatactcagcctgctgcccaggctgtgcagcgcagctggactctgcatcccagcacctgcctcctcgttcctttctcctgtttattcccatctttacccccaagactttattgggcctcttcacttcccctaaacccctgtcccatgcaggccctttgaagcctcagctacctactttccttcatgaacatccccctcccaacactacccttccctgcactaaagccagcctgaccttccttcctgttagtggttgtatctgctttgaagggcctacctggcccctcgcctgtggagctcagccctgagctgtccccgtgttgcatgacagcattgactggtttacaggccctgctcctgcagcatggcccctgccttaggcctacctgatcaaaataaagcctcagccacaaaaaaaaaaaaaaaaaaaaaaaaa

SEQ ID NO: 848 - protein, 218 aa, Homo sapien
MSMTLGYWDIRGLAHAIRLLLEYTDSSYEEKKYTMGDAPDYDRSQWLNEKFKLGLDFPNLPYLIDGAHKITQSNAILCYIARKHNLCGETEEEKIRVDILENQAMDVSNQLARVCYSPDFEKLKPEYLEELPTMMQHFSQFLGKRPWFVGDKITFVDFLAYDVLDLHRIFEPNCLDAFPNLKDFISRFEGLEKISAYMKSSRFLPKPLYTRVAVWGNK

SEQ ID NO: 849 - DNA, 3958 bp, Homo sapien
cggggctgccggggccgggactgggggagccgggcccgcgggccgcctgctgcctccgcccgcgccggggtccccagccgcccccgctgccgtgtcccctgcggccggccagccgcgtcccccagccccggcctcccgcggacccatgcccgcccgtatcggctactacgagatcgaccgcaccatcggcaagggcaacttcgcggtggtcaagcgggccacgcacctcgtcaccaaggccaaggttgctatcaagatcatagataagacccagctggatgaagaaaacttgaagaagattttccgggaagttcaaattatgaagatgctttgccacccccatatcatcaggctctaccaggttatggagacagaacggatgatttatctggtgacagaatatgctagtggaggggaaatatttgaccacctggtggcccatggtagaatggcagaaaaggaggcacgtcggaagttcaaacagatcgtcacagctgtctatttttgtcactgtcggaacattgttcatcgtgatttaaaagctgaaaatttacttctggatgccaatctgaatatcaaaatagcagattttggtttcagtaacctcttcactcctgggcagctgctgaagacctggtgtggcagccctccctatgctgcacctgaactctttgaaggaaaagaatatgatgggcccaaagtggacatctggagccttggagttgtcctctacgtgcttgtgtgcggtgccctgccatttgatggaagcacactgcagaatctgcgggcccgcgtgctgagtggaaagttccgcatcccattttttatgtccacagaatgtgagcatttgatccgccatatgttggtgttagatcccaataagcgcctctccatggagcagatctgcaagcacaagtggatgaagctaggggacgccgatcccaactttgacaggttaatagctgaatgccaacaactaaaggaagaaagacaggtggaccccctgaatgaggatgtcctcttggccatggaggacatgggactggacaaagaacagacactgcaggcggagcaggcaggtactgctatgaacatcagcgttccccaggtgcagctgatcaacccagagaaccaaattgtggagccggatgggacactgaatttggacagtgatgagggtgaagagccttcccctgaagcattggtgcgctatttgtcaatgaggaggcacacagtgggtgtggctgacccacgcacggaagttatggaagatctgcagaagctcctacctggctttcctggagtcaacccccaggctccattcctgcaggtggcccctaatgtgaacttcatgcacaacctgttgcctatgcaaaacttgcaaccaaccgggcaacttgagtacaaggagcagtctctcctacagccgcccacgctacagctgttgaatggaatgggcccccttggccggagggcatcagatggaggagccaacatccaactgcatgcccagcagctgctgaagcgcccacggggaccctctccgcttgtcaccatgacaccagcagtgccagcagttacccctgtggacgaggagagctcagacggggagccagaccaggaagctgtgcagagctctacctacaaggactccaacactctgcacctccctacggagcgtttctcccctgtgcgccggttctcagatggggctgcgagcatccaggccttcaaagctcacctggaaaaaatgggcaacaacagcagcatcaaacagctgcagcaggagtgtgagcagctgcagaagatgtacggggggcagattgatgaaagaaccctggagaagacccagcagcagcatatgttataccagcaggagcagcaccatcaaattctccagcaacaaattcaagactctatctgtcctcctcagccatctccacctcttcaggctgcatgtgaaaatcagccagccctccttacccatcagctccagaggttaaggattcagccttcaagcccaccccccaaccaccccaacaaccatctcttcaggcagcccagtaatagtcctccccccatgagcagtgccatgatccagcctcacggggctgcatcttcttcccagtttcaaggcttaccttcccgcagtgcaatctttcagcagcaacctgagaactgttcctctcctcccaacgtggcactaacctgcttgggtatgcagcagcctgctcagtcacagcaggtcaccatccaagtccaagagcctgttgacatgctcagcaacatgccaggcacagctgcaggctccagtgggcgcggcatctccatcagccccagtgctggtcagatgcagatgcagcaccgtaccaacctgatggccaccctcagctatgggcaccgtcccttgtccaagcagctgagtgctgacagtgcagaggctcacagcttgaacgtgaatcggttctcccctgctaactacgaccaggcgcatttacacccccatctgttttcggaccagtcccggggttcccccagcagctacagcccttcaacaggagtggggttctctccaacccaagccctgaaagtccctccacttgaccaattccccaccttccctcccagtgcacatcagcagccgccacactataccacgtcggcactacagcaggccctgctgtctcccacgccgccagactatacaagacaccagcaggtaccccacatccttcaaggactgctttctccccggcattcgctcaccggccactcggacatccggctgcccccaacagagtttgcacagctcattaaaaggcagcagcaacaacggcagcagcagcagcaacagcagcaacagcaagaataccaggaactgttcaggcacatgaaccaaggggatgcggggagtctggctcccagccttgggggacagagcatgacagagcgccaggctttatcttatcaaaatgctgactcttatcaccacacgatccagaacagcgacgatgcttatgtacagctggataacttgccaggaatgagtctcgtggctgggaaagcacttagctctgcccggatgtcggatgcagttctcagtcagtcttcgctcatgggcagccagcagtttcaggatggggaaaatgaggaatgtggggcaagcctgggaggtcatgagcacccagacctgagtgatggcagccagcatttaaactcctcttgctatccatctacgtgtattacagacattctgctcagctacaagcaccccgaagtctccttcagcatggagcaggcaggcgtgtaacaagaaacagagagagagcaagaggtcccgagtcccctcctagtctttcatcctgaatttgcacagaggaaagcgggtgcccggcatggccatcctgatgttgctggcgggatccccatgcaccttgtccttctccactgatactggcagctcggctcctggacccaagatcccttgagtggaattctgcagtgcaagagcccttcgtgggagctgtcccatgtttccatggtccccagtctcccctccacttggtggggtcaccaactactcaccagaagggggcttaccaagaaagccctaaaaagctgttgacttatctgcgcttgttccaactcttatgcccccaacctgccctaccaccaccacgcgctcagcctgatgtgtttacatggtactgtatgtatgggagagcagactgcaccctccagcaacaacagatgaaagccagtgagcctactaaccgtgccatcttgcaaactacactttaaaaaaaactcattgctttgtattgtagtaaccaatatgtgcagtatacgttgaatgtatatgaacatactttcctatttctgttctttgaaaatgtcagaaatatttttttctttctcattttatgttgaactaaaaaggattaaaaaaaaaatctcc

SEQ ID NO: 850 - protein, 1102 aa, Homo sapien
GAAGAGTGGAGPAGRLLPPPAPGSPAAPAAVSPAAGQPRPPAPASRGPMPARIGYYEIDRTIGKGNFAVVKRATHLVTKAKVAIKIIDKTQLDEENLKKIFREVQIMKMLCHPHIIRLYQVMETERMIYLVTEYASGGEIFDHLVAHGRMAEKEARRKFKQIVTAVYFCHCRNIVHRDLKAENLLLDANLNIKIADFGFSNLFTPGQLLKTWCGSPPYAAPELFEGKEYDGPKVDIWSLGVVLYVLVCGALPFDGSTLQNLRARVLSGKFRIPFFMSTECEHLIRHMLVLDPNKRLSMEQICKHKWMKLGDADPNFDRLIAECQQLKEERQVDPLNEDVLLAMEDMGLDKEQTLQAEQAGTAMNISVPQVQLINPENQIVEPDGTLNLDSDEGEEPSPEALVRYLSMRRHTVGVADPRTEVMEDLQKLLPGFPGVNPQAPFLQVAPNVNFMHNLLPMQNLQPTGQLEYKEQSLLQPPTLQLLNGMGPLGRRASDGGANIQLHAQQLLKRPRGPSPLVTMTPAVPAVTPVDEESSDGEPDQEAVQSSTYKDSNTLHLPTERFSPVRRFSDGAASIQAFKAHLEKMGNNSSIKQLQQECEQLQKMYGGQIDERTLEKTQQQHMLYQQEQHHQILQQQIQDSICPPQPSPPLQAACENQPALLTHQLQRLRIQPSSPPPNHPNNHLFRQPSNSPPPMSSAMIQPHGAASSSQFQGLPSRSAIFQQQPENCSSPPNVALTCLGMQQPAQSQQVTIQVQEPVDMLSNMPGTAAGSSGRGISISPSAGQMQMQHRTNLMATLSYGHRPLSKQLSADSAEAHSLNVNRFSPANYDQAHLHPHLFSDQSRGSPSSYSPSTGVGFSPTQALKVPPLDQFPTFPPSAHQQPPHYTTSALQQALLSPTPPDYTRHQQVPHILQGLLSPRHSLTGHSDIRLPPTEFAQLIKRQQQQRQQQQQQQQQQEYQELFRHMNQGDAGSLAPSLGGQSMTERQALSYQNADSYHHTIQNSDDAYVQLDNLPGMSLVAGKALSSARMSDAVLSQSSLMGSQQFQDGENEECGASLGGHEHPDLSDGSQHLNSSCYPSTCITDILLSYKHPEVSFSMEQAGV

SEQ ID NO: 851 - DNA, 4312 bp, Homo sapien
cgaccgcggcggctggaaccctgattgctgtccttcaacgtgttcattatgaagttattagtaatacttttgttttctggacttataactggttttagaagtgactcttcctctagtttgccacctaagttactactagtatcctttgatggcttcagagctgattatctgaagaactatgaatttcctcatctccagaattttatcaaagaaggtgttttggtagagcatgttaaaaatgtttttatcacaaaaacatttccaaaccactacagtattgtgacaggcttgtatgaagaaagccatggcattgtggctaattccatgtatgatgcagtcacaaagaaacacttttctgactctaatgacaaggatcctttttggtggaatgaggcagtacctatttgggtgaccaatcagcttcaggaaaacagatcaagtgctgctgctatgtggcctggtactgatgtacccattcacgataccatctcttcctattttatgaattacaactcctcagtgtcatttgaggaaagactaaataatattactatgtggctaaacaattcgaacccaccagtcacctttgcaacactatattgggaagaaccagatgcaagtggccacaaatacggacctgaagataaagaaaacatgagcagagtgttgaaaaaaatagatgatcttatcggtgacttagtccaaagactcaagatgttagggctatgggaaaatcttaatgtgatcattacaagtgatcatgggatgacccagtgttctcaggacagactgataaacctggattcctgcatcgatcattcatactacactcttatagatttgagcccagttgctgcaatacttcccaaaataaatagaacagaggtttataacaaactgaaaaactgtagccctcatatgaatgtttatctcaaagaagacattcctaacagattttattaccaacataatgatcgaattcagcccattattttggttgccgatgaaggctggacaattgtgctaaatgaatcatcacaaaaattaggtgaccatggttatgataattctttgcctagtatgcatccatttctagctgcccacggacctgcatttcacaaaggctacaagcatagcacaattaacattgtggatatttatccaatgatgtgccacatcctgggattaaaaccacatcccaataatgggacctttggtcatactaagtgcttgttagttgaccagtggtgcattaatctcccagaagccatcgcgattgttatcggttcactcttggtgttaaccatgctaacatgcctcataataatcatgcagaatagactttctgtacctcgtccattttctcgacttcagctacaagaagatgatgatgatcctttaattgggtgacatgtgctagggcttatacaaagtgtctttgattaatcacaaaactaagaatacatccaaagaatagtgttgtaactatgaaaaagaatactttgaaagacaaagaacttagactaagcatgttaaaattattactttgttttccttgtgttttgtttcggtgcatttgctaataagataacgctgaccatagtaaaattgttagtaaatcattaggtaacatcttgtggtaggaaatcattaggtaacatcaatcctaactagaaatactaaaaatggcttttgagaaaaatacttcctctgcttgtattttgcgatgaagatgtgatacatctttaaatgaaaatataccaaaatttagtaggcatgtttttctaataaatttatatatttgtaaagaaaacaacagaaatctttatgcaatttgtgaattttgtatattagggaggaaaagcttcctatatttttatatttacctttaattagtttgtatctcaagtaccctcttgaggtaggaaatgctctgtgatggtaaataaaattggagcagacagaaaagatatagcaaatgaagaaatattttaaggaaacctatttgaaaaaaaaagcaaagaccatttgataaaagcctgagttgtcaccattatgtcttaagctgttagtcttaaagattattgttaaaaaattcagaagaaaagagagacaagtgctcttctctctatctatgcttaatgcctttatgtaagttacttagttgtttgcgtgtgcctgtgcaagtgtgtttgtgtgtggttgtgtggacattatgtgatttactatataaggaggtcagagatggactgtggccaggcttccacattcctgaagcacacagatctcaggaaaggttatttttgcacttcatatttgtttactttctcctaactcacaagttaaaatcataacttaatttcattaacttttatcatttaactctctcatgtttgttgtaacctgaggtatccaaatgctacagaaaaatttatgacccaaatacaaatctcaatttgactgggacagaatgaggaatggagatttttgtatttatctttgggactttatgccttactttttaggctatagaatagttaagaaattttaaacaaaatttagtatcttttggtctttcacaccattcatatgttaagtggcagaatagccttagtgctacctccactttttttctccagtatttgcatcacagaaataatccctctgtttaacatgtttgttcagagccaagggtttattgtgaagaactgtcatcctgcctttgctagctggtaccttctagtaatcaaaattaatatgaagaaactaggttgtgacagactagattatatttagtaggggaaaaattgggctcaagaaccattcatcagtacgtgagacaagcagttaatagtatgatctttaaagttttgacaatataaaataaacttggtaactgttttacaaatataaaagtataataaatatgcagcccagttaaatattgattatctgtgatggtaaagaacaacagtggtgccagtcatcaaacatacagtgcgtcctattgagtcactgctaatttcttgagcctggtatttgctgcctattgtatttgtggttgttgagaggcattttcaaaccctgtataaataatccatgctgttggtcataagttaactgtattaagaacagtaaaataaataaaaaccaatagtactaattttgctttaaaaaaatttctaatttttttcacataaaacaattatcctaaaggttaatagttgatcgaaacagaataatagaaaaattctactttaatttccattaaaaagcaaatagcattgacacatttaaagcttttcatttaaagtagtggatgtttttgaagtatctaaaatagtagcagaatattttatacttggtccttgcaatggtgtgagttttaatgattgcattatcgtgattggtggttatgagtttcagaaatctatacttggcatccaactcatgagtggattttatataggatggaacaggaaggtatgtcctgtcagtatcttaaccctttcaacaagacatttacctatttgtctttccttacgttctcaaaatattaactcgaattgtaaattaagcaaaaatttaaaaagtatatgttgatgggacaagaagaatagtatttatttaataaaacatatattatattgaactatgtgttaattcatttgtatcttttaaaaaattatcactgttaaagccattgactcctttagtacactgagaaaaatcttatagtaaaactagcctttcacattaaggttttggtgtgtattttgttaaataactaacatgctgctctattttctgggtgtagaaagtatttggctctaggaaacatttacttgtttgtgaaaacaataccccaaggtaataggaaaagtttgagttaagtgtttttaattcagtcagtgaattcagaataagtacattcatgtataacatagggacagttctgctgctgttatttatatgcaattcttctggtaaatagcaatagaataaaacatatttcaatgtttgtgtataggttttatattattattccactaggaatggcataagaatttatagataaattcttgtaacattaaaggattaaaatgtttttacattgtttttgggtgtctccttcttgtgcccatatctgataagctttatggattattgcatttaattccttttatttggagggttttacttccttgttaacatataaagttataaatgaaggacaaggaggagatggaaaatgtgtatttattgttaattcttaaaatagtgtgtaaataaaataacatcagtgtgcttt

SEQ ID NO: 852 - protein, 453 aa, Homo sapien
MKLLVILLFSGLITGFRSDSSSSLPPKLLLVSFDGFRADYLKNYEFPHLQNFIKEGVLVEHVKNVFITKTFPNHYSIVTGLYEESHGIVANSMYDAVTKKHFSDSNDKDPFWWNEAVPIWVTNQLQENRSSAAAMWPGTDVPIHDTISSYFMNYNSSVSFEERLNNITMWLNNSNPPVTFATLYWEEPDASGHKYGPEDKENMSRVLKKIDDLIGDLVQRLKMLGLWENLNVIITSDHGMTQCSQDRLINLDSCIDHSYYTLIDLSPVAAILPKINRTEVYNKLKNCSPHMNVYLKEDIPNRFYYQHNDRIQPIILVADEGWTIVLNESSQKLGDHGYDNSLPSMHPFLAAHGPAFHKGYKHSTINIVDIYPMMCHILGLKPHPNNGTFGHTKCLLVDQWCINLPEAIAIVIGSLLVLTMLTCLIIIMQNRLSVPRPFSRLQLQEDDDDPLIG

SEQ ID NO: 853 - DNA, 778 bp, Homo sapien
gagatgggtgcccccatccgcacactgtcctttggccaccggacatcatgcctcccaagaaggatgttcccgtgaagaaaccagcagggccctccatctccaaacctgctgctaagccagcagcagcaggggctcctccagccaagaccaaagctgagccagctgtcccccaggcccctcagaaaacccaggagcctccagtcgatctctccaaagtggtgatcgagtttaacaaggaccagctggaggagttcaaggaggccttcgagctgtttgaccgagtgggggatggcaagatcctgtacagccagtgtggggacgtgatgagggccctgggccagaaccccaccaacgccgaggtgctcaaggtcctggggaaccccaagagtgatgagctgaagtcgcggcgtgtggactttgagactttcctgcccatgctccaggcagtggccaagaaccgaggccaaggcacatatgaggactacttggaggggtttcgtgtgtttgacaaggaggggaacggcaaagtcatgggagcagagctcagacatgttctcaccacccttggagagaagatgactgaggaggaggtggagaccgttctggcaggacacgaggacagcaacggctgcatcaactacgaggccttcttgaaacacatcctaagcgtctgagtgctgcagatccagtggggtccggacactgggccccgcaggcgaaagcacgttccagccaccaggaggccacctattgtttcaaaataaagactgggttcctc

SEQ ID NO: 854 - protein, 208 aa, Homo sapien
MPPKKDVPVKKPAGPSISKPAAKPAAAGAPPAKTKAEPAVPQAPQKTQEPPVDLSKVVIEFNKDQLEEFKEAFELFDRVGDGKILYSQCGDVMRALGQNPTNAEVLKVLGNPKSDELKSRRVDFETFLPMLQAVAKNRGQGTYEDYLEGFRVFDKEGNGKVMGAELRHVLTTLGEKMTEEEVETVLAGHEDSNGCINYEAFLKHILSV

SEQ ID NO: 855 - DNA, 873 bp, Homo sapien
acttccccttcctgtacagggcaggttgtgcagctggaggcagagcagtcctctctggggagcctgaagcaaacatggatcaagaaactgtaggcaatgttgtcctgttggccatcgtcaccctcatcagcgtggtccagaatggattctttgcccataaagtggagcacgaaagcaggacccagaatgggaggagcttccagaggaccggaacacttgcctttgagcgggtctacactgccaaccagaactgtgtagatgcgtaccccactttcctcgctgtgctctggtctgcggggctactttgcagccaagttcctgctgcgtttgctggactgatgtacttgtttgtgaggcaaaagtactttgtcggttacctaggagagagaacgcagagcacccctggctacatatttgggaaacgcatcatactcttcctgttcctcatgtccgttgctggcatattcaactattacctcatcttctttttcggaagtgactttgaaaactacataaagacgatctccaccaccatctcccctctacttctcattccctaactctctgctgaatatggggttggtgttctcatctaatcaatacctacaagtcatcataattcagctcttgagagcattctgctcttctttagatggctgtaaatctattggccatctgggcttcacagcttgagttaaccttgcttttccgggaacaaaatgatgtcatgtcagctccgccccttgaacatgaccgtggccccaaatttgctattcccatgcattttgtttgtttcttcacttatcctgttctctgaagatgttttgtgaccaggtttgtgttttcttaaaataaaatgcagagacatgtttt

SEQ ID NO: 856 - protein, 161 aa, Homo sapien
MDQETVGNVVLLAIVTLISVVQNGFFAHKVEHESRTQNGRSFQRTGTLAFERVYTANQNCVDAYPTFLAVLWSAGLLCSQVPAAFAGLMYLFVRQKYFVGYLGERTQSTPGYIFGKRIILFLFLMSVAGIFNYYLIFFFGSDFENYIKTISTTISPLLLIP

SEQ ID NO: 857 - DNA, 1125 bp, Homo sapien
gtctcccccactgtcagcacctcttctgtgtggtgagtggaccgcttaccccactaggtgaagatgtcagcccaggagagctgcctcagcctcatcaagtacttcctcttcgttttcaacctcttcttcttcgtcctcggcagcctgatcttctgcttcggcatctggatcctcatcgacaagaccagcttcgtgtcctttgtgggcttggccttcgtgcctctgcagatctggtccaaagtcctggccatctcaggaatcttcaccatgggcatcgccctcctgggttgtgtgggggccctcaaggagctccgctgcctcctgggcctgtattttgggatgctgctgctcctgtttgccacacagatcaccctgggaatcctcatctccactcagcgggcccagctggagcgaagcttgcgggacgtcgtagagaaaaccatccaaaagtacggcaccaaccccgaggagaccgcggccgaggagagctgggactatgtgcagttccagctgcgctgctgcggctggcactacccgcaggactggttccaagtcctcatcctgagaggtaacgggtcggaggcgcaccgcgtgccctgctcctgctacaacttgtcggcgaccaacgactccacaatcctagataaggtgatcttgccccagctcagcaggcttggacacctggcgcggtccagacacagtgcagacatctgcgctgtccctgcagagagccacatctaccgcgagggctgcgcgcagggcctccagaagtggctgcacaacaaccttatttccatagtgggcatttgcctgggcgtcggcctactcgagctcgggttcatgacgctctcgatattcctgtgcagaaacctggaccacgtctacaaccggctcgctcgataccgttaggccccgccctccccaaagtcccgccccgcccccgtcacgtgcgctgggcacttccctgctgcctgtaaatatttgtttaatccccagttcgcctggagccctccgccttcacattcccctggggacccacgtggctgcgtgcccctgctgctgtcacctctcccacgggacctggggctttcgtccacagcttcctgtccccatctgtcggcctac

SEQ ID NO: 858 - protein, 281 aa, Homo sapien
MSAQESCLSLIKYFLFVFNLFFFVLGSLIFCFGIWILIDKTSFVSFVGLAFVPLQIWSKVLAISGIFTMGIALLGCVGALKELRCLLGLYFGMLLLLFATQITLGILISTQRAQLERSLRDVVEKTIQKYGTNPEETAAEESWDYVQFQLRCCGWHYPQDWFQVLILRGNGSEAHRVPCSCYNLSATNDSTILDKVILPQLSRLGHLARSRHSADICAVPAESHIYREGCAQGLQKWLHNNLISIVGICLGVGLLELGFMTLSIFLCRNLDHVYNRLARYR

SEQ ID NO: 859 - DNA, 1540 bp, Homo sapien
agccgaatagagccggagagacccgagtatgaccggagaagcccaggccggccggaagaggagccgagcgcggccggaaggaaccgagcccgtccgaagggagcggagcgcagcctggcctggggcccggtcgagcccgcgccatggcggccgaggcgacagctgtggccggaagcggggctgttggcggctgcctggccaaagacggcttgcagcagtctaagtgcccggacactaccccaaaacggcggcgcgcctcgtcgctgtcgcgtgacgccgagcgccgagcctaccaatggtgccgggagtacttgggcggggcctggcgccgagtgcagcccgaggagctgagggtttaccccgtgagcggaggcctcagcaacctgctcttccgctgctcgctcccggaccacctgcccagcgttggcgaggagccccgggaggtgcttctgcggctgtacggagccatcttgcagggcgtggactccctggtgctagaaagcgtgatgttcgccatacttgcggagcggtcgctggggccccagctgtacggagtcttcccagagggccggctggaacagtacatcccaagtcggccattgaaaactcaagagcttcgagagccagtgttgtcagcagccattgccacgaagatggcgcaatttcatggcatggagatgcctttcaccaaggagccccactggctgtttgggaccatggagcggtacctaaaacagatccaggacctgcccccaactggcctccctgagatgaacctgctggagatgtacagcctgaaggatgagatgggcaacctcaggaagttactagagtctaccccatcgccagtcgtcttctgccacaatgacatccaggaagggaacatcttgctgctctcagagccagaaaatgctgacagcctcatgctggtggacttcgagtacagcagttataactataggggctttgacattgggaaccatttttgtgagtgggtttatgattatactcacgaggaatggcctttctacaaagcaaggcccacagactaccccactcaagaacagcagttgcattttattcgtcattacctggcagaggcaaagaaaggtgagaccctctcccaagaggagcagagaaaactggaagaagatttgctggtagaagtcagtcggtatgctctggcatcccatttcttctggggtctgtggtccatcctccaggcatccatgtccaccatagaatttggttacttggactatgcccagtctcggttccagttctacttccagcagaaggggcagctgaccagtgtccactcctcatcctgactccaccctcccactccttggatttctcctggagcctccagggcaggaccttggagggaggaacaacgagcagaaggccctggcgactgggctgagcccccaagtgaaactgaggttcaggagaccggcctgttcctgagtttgagtaggtccccatggctggcaggccagagccccgtgctgtgtatgtaacacaataaacaagcttc

SEQ ID NO: 860 - protein, 395 aa, Homo sapien
MAAEATAVAGSGAVGGCLAKDGLQQSKCPDTTPKRRRASSLSRDAERRAYQWCREYLGGAWRRVQPEELRVYPVSGGLSNLLFRCSLPDHLPSVGEEPREVLLRLYGAILQGVDSLVLESVMFAILAERSLGPQLYGVFPEGRLEQYIPSRPLKTQELREPVLSAAIATKMAQFHGMEMPFTKEPHWLFGTMERYLKQIQDLPPTGLPEMNLLEMYSLKDEMGNLRKLLESTPSPVVFCHNDIQEGNILLLSEPENADSLMLVDFEYSSYNYRGFDIGNHFCEWVYDYTHEEWPFYKARPTDYPTQEQQLHFIRHYLAEAKKGETLSQEEQRKLEEDLLVEVSRYALASHFFWGLWSILQASMSTIEFGYLDYAQSRFQFYFQQKGQLTSVHSSS

SEQ ID NO: 861 - DNA, 2921 bp, Homo sapien
ccggctcggagtgtgatctaagcaggtcgcgtaccttcctcaggtgactccggccacagcccattgtccgcggccaccggcggagtttagccgcagacctcgaagcgccccggggtccttcccgaacggcagcggctgcggcgggtccatggagaagggccctgtgcgggcaccggcggagaagccgcggggcgccaggtgcagcaatgggttccccgagcgggatccgccgcggcccgggcccagcaggccggcggagaagcccccgcggcccgaggccaagagcgcgcagcccgcggacggctggaagggcgagcggccccgcagcgaggaggataacgagctgaacctccctaacctggcagccgcctactcgtccatcctgagctcgctgggcgagaacccccagcggcaagggctgctcaagacgccctggagggcggcctcggccatgcagttcttcaccaagggctaccaggagaccatctcagatgtcctaaacgatgctatatttgatgaagatcatgatgagatggtgattgtgaaggacatagacatgttttccatgtgtgagcatcacttggttccatttgttggaaaggtccatattggttatcttcctaacaagcaagtccttggcctcagcaaacttgcgaggattgtagaaatctatagtagaagactacaagttcaggagcgccttacaaaacaaattgctgtagcaatcacggaagccttgcggcctgctggagtcggggtagtggttgaagcaacacacatgtgtatggtaatgcgaggtgtacagaaaatgaacagcaaaactgtgaccagcacaatgttgggtgtgttccgggaggatccaaagactcgggaagagttcctgactctcattaggagctgagcttcattcagtgtgtgtgcgttggttgccgatcgtactgccagtagcattgtctgtctgtccggtcttgtttgtacattccattttcaattgttacagatgtgaactttattccttgtcactaattatatttaaaattatttctaggaagtcaaataaatataataaagggttgagcctctactttcttcttgccacctttttgtggcaatattaaagtgaactgctaatagtgtaagtatgtgcacaaaaccactgccagataaccagaggggcctgggaagggagaagaattagtgtatttttttcaaatagtacagtaatttgcctcataagcataggagcattgggaatgagagggaactgtgcccagtatactgttttttttcttcctccaataaaagtggtgtagtgccgaaagtgctaaaatatttagtgcggtattgctctgtgaattcaagttcaacagacttcactttggtcatgtttattaaaccaccagtgacatttaaaaatatatttttagcagtcgtaatgttagtcaccaagggaaggtggtggaatgtctatgtttttgattttactgtgagttaaaaaggcacatttctaccttctattgtttttaaattcaagaatagggaattagttcctggtgttgtttacgagtgtattctcgtgtcaacatacagggatttagacatttaactctctgtgccttgataagaatatcatttagagtgtagatacttttgcctttttaaaaaagccattattttatgagacttagtactcacactgcaaataactagtcagctcagttttaactttataggtttattgagtttcctttgtgtgatccatgtagatgcctcaaaatgtttcttcttcttcttttttttaatcttataagatatttttctaagtatttccagaaacatttgagagtgcccatcattttcaggtctgcagaaccatagcttccacgcacctgaacgagcacagaatgaactgacggtggaagacattatgagctgtgtccaacgttttaaccaaagcgtatcgtaccaacgatctgtgaaaatgcactggaagcttctggtcccggtttcctttgtggtctatgtgggtcttgtcctcattgtaactccgtatagatggtataggtattttaatcctggaagctgttgccttattaatgattatcttaaaatttcctccattggggcagcgtgggccaaattaaaacaaacaaaaccgcaactcctccacagaaacacaaacacagttattccatgaagtttagtatttggttgacatagtgctcttcaaattcatcccattaccctaaaagtaataactttgatgcttgctttaactttagtcccatctctgccactttgatgctatttgggttatgatggggcaagatggcagaggtattgggtttttttgtttttttccattcctctctacttctgtttcctagctttttctttctggagtttaagtacagtgatggttggcttgagtacctttttaaatctagcccagtataaacattagcctgcttaatatttagacatttataggtagaattctgagcactcaactcatgtttggcattttaaagtaaaaacaagtgtgacttcgaggaccaaagaaattgtcagctatacatttatctttatgaactcatttatattcctttttaatgactcgttgttctaacatttcctagaagtgttcttataaaggtctaatgtatccacaggctgttgtcttattagtaaatgcaaagtaatgactttgtctgttttactctagtctttagtacttcaaaattaccttttcatatccatgatcttgagtccatttgggggatttttaagaatttgatgtatttcaatacactgttcaaaattaaattgtttaattttatgtatgagtatgtatgttcctgaagttggtcctatttaaattattaaactattgtaactttaaaaaaaaaaaaaaaaaaaaa

SEQ ID NO: 862 - protein, 250 aa, Homo sapien
MEKGPVRAPAEKPRGARCSNGFPERDPPRPGPSRPAEKPPRPEAKSAQPADGWKGERPRSEEDNELNLPNLAAAYSSILSSLGENPQRQGLLKTPWRAASAMQFFTKGYQETISDVLNDAIFDEDHDEMVIVKDIDMFSMCEHHLVPFVGKVHIGYLPNKQVLGLSKLARIVEIYSRRLQVQERLTKQIAVAITEALRPAGVGVVVEATHMCMVMRGVQKMNSKTVTSTMLGVFREDPKTREEFLTLIRS

SEQ ID NO: 863 - DNA, 644 bp, Homo sapien
gcgcgggcggctggggaatggctgctgccatggtgccggggcgcagcgagagctgggagcgcggggagcctggccgcccggccctgtacttctgcgggagcattcgcggcggacgcgaggacaggacgctgtacgagcggatcgtgtctcggctgcggcgattcgggacagtgctcaccgagcacgtggcggccgccgagctgggcgcgcgcggggaagaggctgctgggggtgacaggctcatccatgagcaggacctggagtggctgcagcaggcggacgtggtcgtggcagaagtgacacagccatccttgggtgtaggctatgagctgggccgggccgtggcctttaacaagcggatcctgtgcctgttccgcccgcagtctggccgcgtgctttcggccatgatccggggagcagcagatggctctcggttccaggtgtgggactatgaggagggagaggtggaggccctgctggatcgatacttcgaggctgatcctccagggcaggtggctgcctcccctgacccaaccacttgacttaatctcactttcttaaattcttctattctcagacactgctctagtaccattccttcctcttagccccaggagcaaattaaaaggtacagttaaaatcct

SEQ ID NO: 864 - protein, 174 aa, Homo sapien
MAAAMVPGRSESWERGEPGRPALYFCGSIRGGREDRTLYERIVSRLRRFGTVLTEHVAAAELGARGEEAAGGDRLIHEQDLEWLQQADVVVAEVTQPSLGVGYELGRAVAFNKRILCLFRPQSGRVLSAMIRGAADGSRFQVWDYEEGEVEALLDRYFEADPPGQVAASPDPTT

SEQ ID NO: 865 - DNA, 983 bp, Homo sapien
cgcaggggtcccccggccgccgcgatgcagaaatacgagaaactggaaaagattggggaaggcacctacggaactgtgttcaaggccaaaaaccgggagactcatgagatcgtggctctgaaacgggtgaggctggatgacgatgatgagggtgtgccgagttccgccctccgggagatctgcctactcaaggagctgaagcacaagaacatcgtcaggcttcatgacgtcctgcacagcgacaagaagctgactttggtttttgaattctgtgaccaggacctgaagaagtattttgacagttgcaatggtgacctcgatcctgagattgtaaagtcattcctcttccagctactaaaagggctgggattctgtcatagccgcaatgtgctacacagggacctgaagccccagaacctgctaataaacaggaatggggagctgaaattggctgattttggcctggctcgagcctttgggattcccgtccgctgttactcagctgaggtggtcacactgtggtaccgcccaccggatgtcctctttggggccaagctgtactccacgtccatcgacatgtggtcagccggctgcatctttgcagagctggccaatgctgggcggcctctttttcccggcaatgatgtcgatgaccagttgaagaggatcttccgactgctggggacgcccaccgaggagcagtggccctctatgaccaagctgccagactataagccctatccgatgtacccggccacaacatccctggtgaacgtcgtgcccaaactcaatgccacagggagggatctgctgcagaaccttctgaagtgtaaccctgtccagcgtatctcagcagaagaggccctgcagcacccctacttctccgacttctgtccgccctaggccccgggacccccgcctccaggctgggcctggcctatttaagccccctcttgagagggtgagacagtgggggtgcctgg

SEQ ID NO: 866 - protein, 292 aa, Homo sapien
MQKYEKLEKIGEGTYGTVFKAKNRETHEIVALKRVRLDDDDEGVPSSALREICLLKELKHKNIVRLHDVLHSDKKLTLVFEFCDQDLKKYFDSCNGDLDPEIVKSFLFQLLKGLGFCHSRNVLHRDLKPQNLLINRNGELKLADFGLARAFGIPVRCYSAEVVTLWYRPPDVLFGAKLYSTSIDMWSAGCIFAELANAGRPLFPGNDVDDQLKRIFRLLGTPTEEQWPSMTKLPDYKPYPMYPATTSLVNVVPKLNATGRDLLQNLLKCNPVQRISAEEALQHPYFSDFCPP

SEQ ID NO: 867 - DNA, 5947 bp, Homo sapien
tctttagagcaaaaggtgaatcaaaggagagtcccagaaaacctgtgactgttgaagaaaattcatctgtgaatttttatattcaaggagtcagtatttatattcatcttttaaactgggaagatttatattttactttaaaacttcttgataataatttacaatgaatggacacagtgatgaagaaagtgttagaaacagtagtggagaatcaagccagtcggatgatgattctgggtcagcttcaggctctggatctggttcgagttctggaagcagtagtgatggaagcagtagccagtcaggtagcagtgactctgactccggatctgaatcaggcagtcagtcagagtctgagtcagacacttcccgagaaaacaaagttcaagcaaaaccaccgaaagttgatggagctgagttttggaaatctagtcctagtattctggccgttcagagatctgcaatcctcaagaagcagcaacagcagcagcagcaacaacaacatcaagcctcatctaatagcggatcagaagaggattcctctagcagtgaagattccgatgactcatcaagtgaggtcaaaaggaaaaagcataaagatgaagattggcaaatgtctgggtcaggatctccatctcagtctggttcagattcagaatctgaagaagagagagagaaaagcagttgtgatgaaacagaatctgattatgagccaaaaaacaaagtcaaaagcagaaaacctcaaaatagatctaagtcaaaaaatggaaagaagattcttggacaaaaaaagagacagattgattcatctgaggaggatgatgatgaagaagattatgataatgataaaagaagttctcgtcgccaagcaactgttaatgttagctataaggaggatgaagaaatgaaaacagattctgatgacctactggaagtctgtggagaggatgttcctcaacctgaggaagaggaatttgaaaccatagaaagatttatggattgtcggattgggagaaaaggagctactggtgctactacaaccatctatgcagttgaagcagatggtgacccaaatgcaggctttgaaaaaaacaaagaaccaggagagattcagtatttaattaaatggaaaggatggtcccatatccacaacacttgggagacagaagaaaccctcaagcagcagaatgttagaggaatgaaaaaattggataattataagaaaaaagatcaggaaacaaaaagatggttgaaaaatgcctctccagaagatgtggaatattataattgccagcaagaacttacagatgatctacataaacagtatcaaatagtgggacgtataattgctcattccaatcaaaagtcagcagctggttatcctgattattactgcaaatggcagggccttccatactcagagtgcagctgggaagatggagctctcatttccaaaaagtttcaagcatgcattgatgagtattttagcaggaaccaatcaaaaaccactccttttaaagattgcaaagtattaaaacaaaggccaaggtttgtagccctgaagaagcagccatcctatattggaggacatgagggcttagaattaagagattatcaactgaatggtttaaattggcttgctcattcttggtgcaaaggaaatagttgcatactcgctgatgaaatgggccttggaaaaacaatacagacgatctcatttctgaattatttgtttcatgaacatcaattatatggaccttttttattggtagtaccgctctccactcttacttcctggcaaagggaaattcagacttgggcttctcaaatgaatgctgtggtttatttaggtgacattaacagcagaaacatgataagaactcatgaatggacgcatcatcagaccaaacggttaaaatttaatatattgttaacaacttatgaaattttattaaaagataaggcattccttggaggtctaaattgggcatttataggtgttgatgaagcacaccgattaaagaatgatgactcccttctgtataaaactttaatagattttaaatccaatcatcgtctccttatcactggaactcctctacagaattccctcaaagagctctggtctttgctacatttcattatgccagaaaagttttcttcctgggaagattttgaagaagaacatggcaaagggagagaatatggttatgcaagccttcacaaggagcttgagccatttctgttacgccgagttaagaaagatgtggaaaaatctcttcctgccaaggttgagcagattttaagaatggaaatgagtgctttacagaaacaatattacaaatggattttaactaggaattacaaagccctcagcaaaggttccaagggcagtacctcaggctttttgaacattatgatggagctaaagaaatgttgtaaccattgctacctcattaaaccaccagataataatgaattctataataaacaggaggccttacaacacttaattcgtagtagcggaaaattgattcttcttgacaagctattaattcgcctaagagaacgaggcaatcgagttcttattttttcacaaatggtgcggatgttagatatacttgcagaatatttgaaatatcgtcaattcccctttcaaagattagatggatcaataaaaggagaactgaggaaacaagctctagatcattttaatgctgagggatcagaggatttttgctttttgctgtccacaagagctggaggtctagggattaatttagcctctgctgacactgttgttatatttgattccgattggaatccacagaatgatcttcaggcacaggctagagcccatcgaattggccaaaagaaacaggtgaatatttatcgtctagttacaaagggatcagttgaagaagatattcttgaaagggcgaaaaagaagatggttttagatcatcttgtaattcaaagaatggacacaactgggaagacagtactacatacaggttctgccccatcaagttctactcctttcaataaagaagagttatcagccattttaaagtttggtgctgaagaactttttaaggaacctgaaggagaagaacaagagccccaggaaatggatatagatgaaatcttgaagagagctgaaactcatgaaaatgaaccaggtcctttaactgtaggagatgaattgctttcccagttcaaggttgccaacttctcaaatatggatgaggatgacattgagttggaacctgaaagaaattcaaagaattgggaggaaattattccagaagatcaaagaagacgattagaagaagaagaaagacaaaaggaacttgaagaaatttatatgctcccaagaatgagaaattgtgcaaaacagattagtttcaatggaagtgaagggaggcgcagtagaagtaggagatactctggatctgatagtgattccatctcagaagggaaaaggccaaagaaacgtggaagaccacggactattcctcgggagaatattaaaggatttagtgatgcagaaattaggcggtttatcaagagctataagaaatttggtggtcctctggaaagattagatgcaattgctcgagatgctgagttagttgataagtcagaaacagaccttagacgactgggagaattggtacataatggttgcattaaagcattaaaggatagttcttcaggaacagaacgaacaggtggtagactcggaaaagtgaagggtccaacattccgaatatcaggagtacaggtgaatgccaaactagtcatctcccatgaagaagaattaatacctttgcacaaatccattccttctgatccagaagaaagaaagcagtatactatcccatgccacacaaaggcagctcattttgatatagactggggcaaagaagatgattccaatttgttaattggcatctatgaatatggatatggaagctgggaaatgattaaaatggatcctgacctcagtctaacacacaagattcttccagatgatcccgataaaaaaccacaagcaaaacagttgcagacccgtgcagactacctcatcaaattacttagtagagatcttgcaaaaaaagaagctctttctggtgcgggaagttcaaagaggagaaaagcaagagctaagaagaataaagcaatgaagtctataaaagtgaaagaggaaataaagagtgattcttctcctctgccttcagagaagtctgatgaagatgatgataaattgagtgaatccaagtctgatggtagggaaagatccaagaaatcttcagtgtcagatgctccagttcatatcacggcaagtggtgaaccagttcccatttctgaagaatctgaagagctggatcagaagacattcagcatttgtaaagaaagaatgaggcctgttaaagcagctttgaaacaacttgataggcctgagaaaggcctttcagaaagagaacaactagaacatactagacaatgtttaataaaaattggagaccatatcacagaatgtctaaaagagtatacaaatcctgaacaaattaagcaatggagaaaaaacctgtggatttttgtatctaagtttactgaatttgatgcaagaaaattacataaattatataagcatgctattaaaaaacggcaggagtctcagcaaaacagtgatcaaaacagcaacttgaatcctcacgtgattagaaatccagatgtggaaagattaaaagagaatacaaatcacgatgatagcagcagggacagttattcctctgatagacacttaactcagtaccatgatcatcataaagaccgacatcagggagattcttacaaaaaaagtgattccaggaaaagaccctattcttcttttagtaatggtaaagaccatcgtgattgggatcactacaagcaagacagcagatattacagtgacagagagaaacacagaaaactggatgatcacaggagtagagatcacaggtcaaatttggaaggaagtttaaaagatagatctcattctgatcatcgttctcactcagatcatcggttacattcagaccaccggtcaagttctgaatatacgcaccataaatcttccagggattataggtatcactcagactggcaaatggaccacagagcttccagcagtggccctaggtcaccactagatcagagatcttatggctccagatctccatttgaacattcagttgaacacaaaagtacaccggagcatacctggagtagtcggaaaacataacaaaaactgatacttcgtctttctggacttttcttttagccatatatcataaaccaacacagtaattgccttacatgacttgaaagatataaacagatcttctatcagtagcagtattgttacttctttccaggatgcaaggtctattatcccaacagaagagaaaatatttttatatttaaggattatgctgcactgtactacaaaattgtagtacttttttttgttttcttttttaaagaaatggaaaatgtttactattacagggacctcaacactgccctcccatacaggctggataaaactgtttttaagtcagtgattttagactgacctccatttaaattatgtttatatatgaactttactctgacctgtgatcatgtttcaggaaggaatgaaagagagttctttcttaataaagaaaaacactcaaggactttgttcatttccaaagctacttgtttacattgtacactgcgaccaccttgccgcttttcatcacaagcttgaatatttaaattctgtacttatatctgtaaaatagccaggaatttcctgtttgtgatctattatgcctttttacaaaaaaaatggctgtaaattattgtaaatattaaaggaactttccttacaaaaaaaaaaaaaaaaaaa

SEQ ID NO: 868 - protein, 1709 aa, Homo sapien
MNGHSDEESVRNSSGESSQSDDDSGSASGSGSGSSSGSSSDGSSSQSGSSDSDSGSESGSQSESESDTSRENKVQAKPPKVDGAEFWKSSPSILAVQRSAILKKQQQQQQQQQHQASSNSGSEEDSSSSEDSDDSSSEVKRKKHKDEDWQMSGSGSPSQSGSDSESEEEREKSSCDETESDYEPKNKVKSRKPQNRSKSKNGKKILGQKKRQIDSSEEDDDEEDYDNDKRSSRRQATVNVSYKEDEEMKTDSDDLLEVCGEDVPQPEEEEFETIERFMDCRIGRKGATGATTTIYAVEADGDPNAGFEKNKEPGEIQYLIKWKGWSHIHNTWETEETLKQQNVRGMKKLDNYKKKDQETKRWLKNASPEDVEYYNCQQELTDDLHKQYQIVGRIIAHSNQKSAAGYPDYYCKWQGLPYSECSWEDGALISKKFQACIDEYFSRNQSKTTPFKDCKVLKQRPRFVALKKQPSYIGGHEGLELRDYQLNGLNWLAHSWCKGNSCILADEMGLGKTIQTISFLNYLFHEHQLYGPFLLVVPLSTLTSWQREIQTWASQMNAVVYLGDINSRNMIRTHEWTHHQTKRLKFNILLTTYEILLKDKAFLGGLNWAFIGVDEAHRLKNDDSLLYKTLIDFKSNHRLLITGTPLQNSLKELWSLLHFIMPEKFSSWEDFEEEHGKGREYGYASLHKELEPFLLRRVKKDVEKSLPAKVEQILRMEMSALQKQYYKWILTRNYKALSKGSKGSTSGFLNIMMELKKCCNHCYLIKPPDNNEFYNKQEALQHLIRSSGKLILLDKLLIRLRERGNRVLIFSQMVRMLDILAEYLKYRQFPFQRLDGSIKGELRKQALDHFNAEGSEDFCFLLSTRAGGLGINLASADTVVIFDSDWNPQNDLQAQARAHRIGQKKQVNIYRLVTKGSVEEDILERAKKKMVLDHLVIQRMDTTGKTVLHTGSAPSSSTPFNKEELSAILKFGAEELFKEPEGEEQEPQEMDIDEILKRAETHENEPGPLTVGDELLSQFKVANFSNMDEDDIELEPERNSKNWEEIIPEDQRRRLEEEERQKELEEIYMLPRMRNCAKQISFNGSEGRRSRSRRYSGSDSDSISEGKRPKKRGRPRTIPRENIKGFSDAEIRRFIKSYKKFGGPLERLDAIARDAELVDKSETDLRRLGELVHNGCIKALKDSSSGTERTGGRLGKVKGPTFRISGVQVNAKLVISHEEELIPLHKSIPSDPEERKQYTIPCHTKAAHFDIDWGKEDDSNLLIGIYEYGYGSWEMIKMDPDLSLTHKILPDDPDKKPQAKQLQTRADYLIKLLSRDLAKKEALSGAGSSKRRKARAKKNKAMKSIKVKEEIKSDSSPLPSEKSDEDDDKLSESKSDGRERSKKSSVSDAPVHITASGEPVPISEESEELDQKTFSICKERMRPVKAALKQLDRPEKGLSEREQLEHTRQCLIKIGDHITECLKEYTNPEQIKQWRKNLWIFVSKFTEFDARKLHKLYKHAIKKRQESQQNSDQNSNLNPHVIRNPDVERLKENTNHDDSSRDSYSSDRHLTQYHDHHKDRHQGDSYKKSDSRKRPYSSFSNGKDHRDWDHYKQDSRYYSDREKHRKLDDHRSRDHRSNLEGSLKDRSHSDHRSHSDHRLHSDHRSSSEYTHHKSSRDYRYHSDWQMDHRASSSGPRSPLDQRSYGSRSPFEHSVEHKSTPEHTWSSRKT

SEQ ID NO: 869 - DNA, 1472 bp, Homo sapien
ccggagcggggatcaccttaacttgactgtggtcccccagccctccaagaaatgcccataaaccaaggaggagagggtaaaaaatagaagaatacatggaattggggagaagaatgggaaaaaagatgggagtgactgcataatgtcagcattttgtgcttttggctcagcatttggattggatggaggattttcatcctgaaaccagccctccgtcgccaccgaccatggaataattgtcttccacgaaactcttccctggtgccaaaaagggttttatgtatatatttgagagctccacatccctggatctgaatcctccacttcccactggaaccatgcccctcccagtcccgtttctcccctctaggggatggaggctgagagaccccaggaagaagaggatggtgagcagggcccccctcaggatgaggaaggctggccccctccaaactccaccactcggccttggcgatctgctcctccatcccctcctcctccagggacccgccacacagccctgggaccccgctcggcctccctgctctccctgcagactgaactccttctggacctggtggctgaagcccagtcccgccgcctggaggagcagagggccaccttctacaccccccaaaacccctcaagcctagcccctgccccactccgtcctctcgaggacagagaacagctttacagcactatcctcagtcaccagtgccagcggatggaagcccagcggtcagagcctcccctccctccaggggggcaagagctcctggagttgctgctgagagttcagggtgggggtcgaatggaggagcaaaggtcccggccccccacacacacctgctgagacttgagccccaaccagcccttccttgccactggtctcaaagctgggcagcccattgcatgccctcaactcttgcttggcaggggtaccagagactgaaagacacggcacaaatctcaatattcatctcccacatcaccttccctgggaactggacagggtgaaagtcctcaaactctgggaacaggcgagatggaacagggatttaactccccgcccacaggtccatgggagcttgaggcagtaagggggatcccaggcacccatctcaaggagtggctgggagtcttttccctaacttgtggggacaccaccagttgtcaagctactaggcagtagggtctgagggctcaggcctccacctgagaggttataacctgagagacagctctacccttcctcccagtaagaagggaaggtgggtgggcacctgagagattaagactattctcccagtcccactaccagcacccccgatccctgagactgaggggtttacgggctgtgaatggaccttcagccctgcccaccctccctccccactgctgctgagtctgtctgatgttttggttgtgtgaataaatataattcccctctggaaaaaaaaaaaaaaaaa

SEQ ID NO: 870 - protein, 160 aa, Homo sapien
MEAERPQEEEDGEQGPPQDEEGWPPPNSTTRPWRSAPPSPPPPGTRHTALGPRSASLLSLQTELLLDLVAEAQSRRLEEQRATFYTPQNPSSLAPAPLRPLEDREQLYSTILSHQCQRMEAQRSEPPLPPGGQELLELLLRVQGGGRMEEQRSRPPTHTC

SEQ ID NO: 871 - DNA, 1885 bp, Homo sapien
cgggcactcaccgtgtgtagttggcatctccgcgcgtccggacacccgatcccagcatccctgcctgcaggactgttcgtgttcagctcgcgtcctgcagctgtccgaggtgctccagttggaggctgaggttcccgggctctgtcgctgagtgggcggcggcaccggcggagatgcctgggaagaaggcgcgcaagaacgctcaaccgagccccgcgcgggctccagcagagctggaagtcgagtgtgctactcaactcaggagatttggagacaaactgaacttccggcagaaacttctgaatctgatatccaaactcttctgctcaggaacctgactgcatcaaaaacttgcatgaggggactccttcaaaagagttttctcaggaggtgcacgtttcatcaatttgaagaaagactgcattgtaattgagaggaatgtgaaggtgcattcatgggtgcccttggaaacggaagatggaatacatcaaagtgaatttctgttcaagttttcccagattatcattctttgggatgagagaacattataaaaccactttgtttattttaaagcaagaatggaagacccttgaaaataaagaagtaattattgacacatttcttttttacttagagaatcgttctagtgtttttgccgaagattaccgctggcctactgtgaaggtagatgacctgtgattagactgggcggctggggagaaacagttcagtgcattgttgttgttgctgtttttggtgttttgcttttcagtgccaactcagcacattgtatatgattcggtttatacatattaccttgttataatgaaaaaactcattctgagaacactgaaatgttatactcagtgttgatttcttcggtcactacacaacgtaaaatcatttgtttcttttgactcaaattgtattgcttctgttcagatgatctttcattcaatgtgttcctgttgggcgttactagaaactatggaaaactggaaaataactttgaaaaaattggataaagtataggagggttacttggggccagtaaatcagtagactgaacattcaatataataaaagaacatggggattttgtataaccagggataataaaaagaaaaagaagttaatttttaattgatgtttttgaaacttagtagaacaaatattcagaagtaacttgataagatatgaatgtttctaaagagtttctaaaggttcgaaatgctccttgtcacattagtgtgcatcctacaaaaagtgatctcttaatgtaaattaagaatattttcataattggaatatacttttcttaaaaaaaaggaacagttagttctcatctagaatgaaagttccatatatgcattggtgaatatatatgtatacacatacttacatacttatatgggtatctgtatagataatttgtattagagtattatatagcttcttagtagggtctcaagtaagttcattttttttatctgggctatatacagtcctcaaataaataatgtcttgattttatttcagcaggaataattttatttattttgcctatttataattaaagtatttttctttagtttgaaatgtgtattaaagttacatttttgagttacaagagtcttataactacttgaatttttagttaaaatgtcttaatgtaggttgtagtcactttagatggaaaattacctcacatctgttttcttcagtattacttaagattgtttatttagtggtagagagattttttttttcagcctagaggcagctattttaccatctggtatttatggtctaatttgtatttaaacatatgcacacatataaaagttgatactgtggcagtaaactattaaaagttttcactgtt

SEQ ID NO: 872 - protein, 54 aa, Homo sapien
MPGKKARKNAQPSPARAPAELEVECATQLRRFGDKLNFRQKLLNLISKLFCSGT

SEQ ID NO: 873 - DNA, 1804 bp, Homo sapien
gctcctcacaggcgcgggttgcttcacccacaccgtcatgtactacggccactacagtaacgccacgctgaaccagccgtgtggcagccccctggatggcagccagtgcacacccagggtgggtggcctgccctacaacatgcccctggcctacctctccactgtgggcgtgagcttctttatcacctgcatcaccctggtgtacagcatggctcactctttcggggagagctaccgggtgggcagcacctctggcatccacgccatcaccgtcttctgctcctgggactacaaggtgacgcagaagcgggcctcccgcctccagcaggacaatattcgcacccggctgaaggagctgctggccgagtggcagctgcggcacagccccaggagcgtgtgcgggaggctgcggcaggcggctgtgctggggcttgtgtggctgctgtgtctggggaccgcgctgggctgcgccgtggccgtccacgtcttctcggagttcatgatccagagtccagaggctgctggccaggaggctgtgctgctggtcctgcccctggtggttggcctcctcaacctgggggccccctacctgtgccgtgtcctggccgccctggagccgcatgactccccggtactggaggtgtacgtggccatctgcaggaacctcatcctcaagctggccatcctggggacactgtgctaccactggctgggccgcagggtgggcgtcctgcagggccagtgctgggaggattttgtgggccaggagctgtaccggttcctggtgatggacttcgtcctcatgttgctggacacgctttttggggaactggtgtggaggattatctccgagaagaagctgaagaggaggcggaagccggagtttgacattgcccggaatgtcctggagctgatttatgggcagactctgacctggctgggggtgctcttctcgcccctcctccccgccgtgcagatcatcaagctgctgctcgtcttctatgtcaagaagaccagccttctggccaactgccaggcgccgcgccggccctggctggcctcacacatgagcaccgtcttcctcacgctgctctgcttccccgccttcctgggcgccgctgtcttcctctgctacgccgtctggcaggtgaagccctcgagcacctgcggccccttccggaccctggacaccatgtacgaggccggcagggtgtgggtgcgccacctggaggcggcaggccccagggtctcctggctgccctgggtgcaccggtacctgatggaaaacaccttctttgtcttcctggtgtcagccctgctgctggccgtgatctacctcaacatccaggtggtgcggggccagcgcaaggtcatctgcctgctcaaggagcagatcagcaatgagggtgaggacaaaatcttcttaatcaacaagcttcactccatctacgagaggaaggagagggaggagaggagcagggttgggacaaccgaggaggctgcggcaccccctgccctgctcacagatgaacaggatgcctagggggacggcgatgggcctcacgggcccgcccagcaccctgagaccacactgttgcctcccagtgaccctgctgggacaccaggacaaggaagacagtttcgcctctcgaaagccgcagctgcgcctaggctggagctggaagggtgggtgaatccggcttgggcatccccaatgaactctgccctgcctgggactctatttattctgattaaaggggttttgcaaaaaaaaaaaaaaaaaaaaaaaaaaaaaaaaaaaaaa

SEQ ID NO: 874 - protein, 444 aa, Homo sapien
MAHSFGESYRVGSTSGIHAITVFCSWDYKVTQKRASRLQQDNIRTRLKELLAEWQLRHSPRSVCGRLRQAAVLGLVWLLCLGTALGCAVAVHVFSEFMIQSPEAAGQEAVLLVLPLVVGLLNLGAPYLCRVLAALEPHDSPVLEVYVAICRNLILKLAILGTLCYHWLGRRVGVLQGQCWEDFVGQELYRFLVMDFVLMLLDTLFGELVWRIISEKKLKRRRKPEFDIARNVLELIYGQTLTWLGVLFSPLLPAVQIIKLLLVFYVKKTSLLANCQAPRRPWLASHMSTVFLTLLCFPAFLGAAVFLCYAVWQVKPSSTCGPFRTLDTMYEAGRVWVRHLEAAGPRVSWLPWVHRYLMENTFFVFLVSALLLAVIYLNIQVVRGQRKVICLLKEQISNEGEDKIFLINKLHSIYERKEREERSRVGTTEEAAAPPALLTDEQDA

SEQ ID NO: 875 - DNA, 1707 bp, Homo sapien
cggcgctgggctgaggggaggggttgtcttaaaagtctctccttccccctgtaggggcggccggcgagtcccagtgagagcggagggtgccagaggtagggggccgagaaacaaagttcccggggcttcctccggggccgcggtcggggctgcgcgtttgaccgcccccctcctcgcgaagcaatggcttccaaactcctgcgcgcggtcatcctcgggccgcccggctcgggcaagggcaccgtgtgccagaggatcgcccagaactttggtctccagcatctctccagcggccacttcttgcgggagaacatcaaggccagcaccgaagttggtgagatggcaaagcagtatatagagaaaagtcttttggttccagaccatgtgatcacacgcctaatgatgtccgagttggagaacaggcgtggacagcactggctccttgatggttttcctaggacattaggacaagccgaagccctggacaaaatctgtgaagtggatctagtgatcagtttgaatattccatttgaaacacttaaagatcgtctcagccgccgttggattcaccctcctagcggaagggtatataacctggacttcaatccacctcatgtacatggtattgatgacgtcactggtgaaccgttagtccagcaggaggatgataaacccgaagcagttgctgccaggctaagacagtacaaagacgtggcaaagccagtcattgaattatacaagagccgaggagtgctccaccaattttccggaacggagacgaacaaaatctggccctacgtttacacacttttctcaaacaagatcacacctattcagtccaaagaagcatattgaccctgcccaatggaagaaccaggaagatgtggtcattcattcaatagtgtgtgtagtattggtgctgtgtccaaattagaagctagctgaggtagcttgcagcatcttttctagttgaaatggtgaactgataggaaaacaaatgagtagaaagagttcatgaagaggccctcctctgcctttcaaaaggctggtcacctacacatgtttaaggtgtctctgcacatgtctcaagcccatcacaagaaagcaagtacagtgtggatttcaaatggtgtgtaacttcagctccagctggtttttgacagctgttgctgtggtaatatttttgacatgtgatggtgatagtctctggttctccccatccccacaaaggctgttgaaccacagcaccaggaagcctgagaatgaatcctgagggctctagcccaggctttgtcccaggctttctggtgtgtgccctcctggtaacagtgaaattgaagctacttactcatagtggttgtttctctggtcttgagtgactgtgtccacagttcatttttttccggtaggaataactccttttctacatccacgctccatagagtctctccttttcagacatcctgggatgaaagaatttggcttttttttttcttttttttttggacatctgttttcactcttaggcttttaaacaatagttattgcttttatccctctcagattctaataactgagagcgatggggctatattgaatctctgtatgcactgagaactgagctatgaagagaatcttattaaactgctggtctgactttatggattgacactgttcctttcttttattgtgaaaaaaaaaaaaaaa

SEQ ID NO: 876 - protein, 223 aa, Homo sapien
MASKLLRAVILGPPGSGKGTVCQRIAQNFGLQHLSSGHFLRENIKASTEVGEMAKQYIEKSLLVPDHVITRLMMSELENRRGQHWLLDGFPRTLGQAEALDKICEVDLVISLNIPFETLKDRLSRRWIHPPSGRVYNLDFNPPHVHGIDDVTGEPLVQQEDDKPEAVAARLRQYKDVAKPVIELYKSRGVLHQFSGTETNKIWPYVYTLFSNKITPIQSKEAY

SEQ ID NO: 877 - DNA, 3271 bp, Homo sapien
gcgccgagccggtttccccgccggtgtccgagaggcgcccccggcccggcccggcccggcccgcgccctccgcccccgcctccccgggccggcggcggtgggcgagctcgcgggcccggccgcccccagccccagccccgccgggccccgccccccgtcgagtgcatgaggttgacgctactttgttgcacctggagggaagaacgtatgggagaggaaggaagcgagttgcccgtgtgtgcaagctgcggccagaggatctatgatggccagtacctccaggccctgaacgcggactggcacgcagactgcttcaggtgttgtgactgcagtgcctccctgtcgcaccagtactatgagaaggatgggcagctcttctgcaagaaggactactgggcccgctatggcgagtcctgccatgggtgctctgagcaaatcaccaagggactggttatggtggctggggagctgaagtaccaccccgagtgtttcatctgcctcacgtgtgggacctttatcggtgacggggacacctacacgctggtggagcactccaagctgtactgcgggcactgctactaccagactgtggtgacccccgtcatcgagcagatcctgcctgactcccctggctcccacctgccccacaccgtcaccctggtgtccatcccagcctcatctcatggcaagcgtggactttcagtctccattgaccccccgcacggcccaccgggctgtggcaccgagcactcacacaccgtccgcgtccagggagtggatccgggctgcatgagcccagatgtgaagaattccatccacgtcggagaccggatcttggaaatcaatggcacgcccatccgaaatgtgcccctggacgagattgacctgctgattcaggaaaccagccgcctgctccagctgaccctcgagcatgaccctcacgatacactgggccacgggctggggcctgagaccagccccctgagctctccggcttatactcccagcggggaggcgggcagctctgcccggcagaaacctgtcttcgcaaggacctgggtcgctctgagtccctccgcgtagtctgccggccacaccgcatcttccggccgtcggacctcatccacggggaggtgctgggcaagggctgcttcggccaggctatcaaggtgacacaccgtgagacaggtgaggtgatggtgatgaaggagctgatccggttcgacgaggagacccagaggacgttcctcaaggaggtgaaggtcatgcgatgcctggaacaccccaacgtgctcaagttcatcggggtgctctacaaggacaagaggctcaacttcatcactgagtacatcaagggcggcacgctccggggcatcatcaagagcatggacagccagtacccatggagccagagagtgagctttgccaaggacatcgcatcagggatggcctacctccactccatgaacatcatccaccgagacctcaactcccacaactgcctggtccgcgagaacaagaatgtggtggtggctgacttcgggctggcgcgtctcatggtggacgagaagactcagcctgagggcctgcggagcctcaagaagccagaccgcaagaagcgctacaccgtggtgggcaacccctactggatggcacctgagatgatcaacggccgcagctatgatgagaaggtggatgtgttctcctttgggatcgtcctgtgcgagatcatcgggcgggtgaacgcagaccctgactacctgccccgcaccatggactttggcctcaacgtgcgaggattcctggaccgctactgccccccaaactgccccccgagcttcttccccatcaccgtgcgctgttgcgatctggaccccgagaagaggccatcctttgtgaagctggaacactggctggagaccctccgcatgcacctggccggccacctgccactgggcccacagctggagcagctggacagaggtttctgggagacctaccggcgcggcgagagcggactgcctgcccaccctgaggtccccgactgagccagggccactcagctgcccctgtccccacctctggagaatccacccccaccagattcctccgcgggaggtggccctcagctgggacagtggggacccaggcttctcctcagagccaggccctgacttgccttctcccaccccgtggaccgcttcccctgccttctctctgccgtggcccagagccggcccagctgcacacacacaccatgctctcgccctgctgtaacctctgtcttggcagggctgtcccctcttgcttctccttgcatgagctggagggcctgtgtgagttacgcccctttccacacgccgctgccccagcaaccctgttcacgctccacctgtctggtccatagctccctggaggctgggccaggaggcagcctccgaaccatgccccatataacgcttgggtgcgtgggagggcgcacatcagggcagaggccaagttccaggtgtctgtgttcccaggaaccaaatggggagtctggggcccgttttccccccagggggtgtctaggtagcaacaggtatcgaggactctccaaacccccaaagcagagagagggctgatcccatggggcggaggtccccagtggctgagcaaacagccccttctctcgctttgggtcttttttttgtttctttcttaaagccactttagtgagaagcaggtaccaagcctcagggtgaagggggtcccttgagggagcgtggagctgcggtgccctggccggcgatggggaggagccggctccggcagtgagaggataggcacagtggaccgggcaggtgtccaccagcagctcagcccctgcagtcatctcagagccccttcccgggcctctcccccaaggctccctgcccctcctcatgcccctctgtcctctgcgttttttctgtgtaatctattttttaagaagagtttgtattattttttcatacggctgcagcagcagctgccaggggcttgggattttatttttgtggcgggcgggggtgggagggccattttgtcactttgcctcagttgagcatctaggaagtattaaaactgtgaagctttctcagtgcactttgaacctggaaaacaatcccaacaggcccgtgggaccatgacttagggaggtgggacccacccacccccatccaggaaccgtgacgtccaaggaaccaaacccagacgcagaacaataaaataaattccgtactccccaccc

SEQ ID NO: 878 - protein, 1257 aa, Homo sapien
MHHQQRLRANGGRGGTGLGAGSGPVSGGHSPLCAHCRGQLLPHPEEPIVMALGQQWHCDCFRCSVCEGHLHNWYFEREGLLYCREDYYGRFGDACQQCMAVITGPVMVAGEHKFHPECFCCTACGSFIGEGESYALVERSKLYCGQCYGKRSCQPADAKARITTAGKPMHSIRLVEIPKDATPGLRVDGVALDDGCPTVRITDLFCNFFLWLTSMAEQCCGAPYRIDVNLTNLHIGDRILEVNGTPVSDSSVEQIDKLIRSNEKMLQLTVEHDPVQVCRSCSQADIQRAMSASTLILPLSTSASSVEVGRERLYKTPGEQGTKARKLRQATNASTTIPPAAGATAMTQLKEKERCSSLSKLLDEQHQAQQHSAHPQLYDLSRTQSCRVVQKPQRIFRATDLVIGEKLGEGFFGKVFKVTHRQSGEVMVLKELHRADEEAQRNFIKEVAVLRLLDHRHVLKFIGVLYKDKKLHMVTEYVAGGCLKELIHDPAQVLPWPQRVRLARDIACGMSYLHSMNIIHRDLNSMNCLVREDRSVIVADFGLARSVDAPRLPSGNMTPGGYGSGANSDAPMSPSGTLRRSKSRQRRQRYTVVGNPYWMAPEMMKGLKYDEKLDVFSFGIMLCEIIGRVEADPDFMPRNSDFSLNQQEFREKFCAQCPEPFVKVAFVCCDLNPDMRPCFETLHVWLQRLADDLAADRVPPERLLHEIETFQEWYASSEDALSPTSQRSLNNLDELVKSAVDSEISPVEKEKENMVIKPQDIPKSPHLGKDFSPSGERLRDSMRARRRQRFLGAQEERRNLTPDTESKERALKKALKKCRPFGERGYLVDLRAGAELQLEDVRDLNTYSDVDSSCDTSLNYHDVNNLPAAQEDENTVKPGKEELLEESTNKPSNQESQHHRLAIDDMRTRLNQCRSKFEHLEEASRRNFNQSQHSMKNFFKTPPVALKMFQRLEHEAAALNGGNNCPPPPPRTQRINQTPIFGRKNPPVAIVGQKLQHAESLEDLASSGVAKQLATPAPKRSKATATTKGGQSSNPPLFLPPSLNISVALNSNGNVTTTTNTNSSCPPSASDWLPKKHKLTLPLPSAQQQRTSSNHRLPMCNNKGKTLKPLPSRTGSQGIPASNCVSPTRSSRPGSPTKHLAQRHTAATAQRLTNAAATHQQQHQQQSSKTTRLNILSPEKVHRLGARLTDQKQKMREEAAATASSVGGAGCAAGTAAGSLNGHRTIGSSGTPNSAVGERRRRAAPSPPVRTHFNTRC

SEQ ID NO: 879 - DNA, 2775 bp, Homo sapien
aagtagctatggcagtgcctgatacaaaataaactccaaatgtgtatttattagatggttggatggaagttatttgcgtgtgaaagcgcgttttacccgaaggcgctctgtgagggccagcgggtccccttcggccctggagccggggtcacacgctccccaccgcgtgcggtcacgagacgcccccaagggagtatcctggtacccggaagccgcgactcctggccctgagcccgggcttagccttcgggtccacgtggccggaggcggcagctgattggacgcgggccgccccaccccctggccgtcgcgggacccgcaggactgagaccatggaggcggtggcggtggccgcggcggtgggggtccttctcctggccggggccgggggcgcggcaggcgacgaggcccgggaggcggcggccgtgcgggcgctcgtggcccggctgctggggccaggccccgcggccgacttctccgtgtcggtggagcgcgctctggctgccaagccgggcttggacacctacagcctgggcggcggcggcgcggcgcgcgtgcgggtgcgcggctccacgggcgtggcggccgccgcggggctgcaccgctacctgcgcgacttctgtggctgccacgtggcctggtccggctctcagctgcgcctgccgcggccactgccagccgtgccgggggagctgaccgaggccacgcccaacaggtaccgctattaccagaatgtgtgcacgcaaagctactccttcgtgtggtgggactgggcccgctgggagcgagagatagactggatggcgctgaatggcatcaacctggcactggcctggagcggccaggaggccatctggcagcgggtgtacctggccttgggcctgacccaggcagagatcaatgagttctttactggtcctgccttcctggcctgggggcgaatgggcaacctgcacacctgggatggccccctgcccccctcctggcacatcaagcagctttacctgcagcaccgggtcctggaccagatgcgctccttcggcatgaccccagtgctgcctgcattcgcggggcatgttcccgaggctgtcaccagggtgttccctcaggtcaatgtcacgaagatgggcagttggggccactttaactgttcctactcctgctccttccttctggctccggaagaccccatattccccatcatcgggagcctcttcctgcgagagctgatcaaagagtttggcacagaccacatctatggggccgacactttcaatgagatgcagccaccttcctcagagccctcctaccttgccgcagccaccactgccgtctatgaggccatgactgcagtggatactgaggctgtgtggctgctccaaggctggctcttccagcaccagccgcagttctgggggcccgcccagatcagggctgtgctgggagctgtgccccgtggccgcctcctggttctggacctgtttgctgagagccagcctgtgtatacccgcactgcctccttccagggccagcccttcatctggtgcatgctgcacaactttgggggaaaccatggtctttttggagccctagaggctgtgaacggaggcccagaagctgcccgcctcttccccaactccaccatggtaggcacgggcatggcccccgagggcatcagccagaacgaagtggtctattccctcatggctgagctgggctggcgaaaggacccagtgccagatttggcagcctgggtgaccagctttgccgcccggcggtatggggtctcccacccggacgcaggggcagcgtggaggctactgctccggagtgtgtacaactgctccggggaggcctgcaggggccacaatcgtagcccgctggtcaggcggccgtccctacagatgaataccagcatctggtacaaccgatctgatgtgtttgaggcctggcggctgctgctcacatctgctccctccctggccaccagccccgccttccgctacgacctgctggacctcactcggcaggcagtgcaggagctggtcagcttgtactatgaggaggcaagaagcgcctacctgagcaaggagctggcctccctgttgagggctggaggcgtcctggcctatgagctgctgccggcactggacgaggtgctggctagtgacagccgcttcttgctgggcagctggctagagcaggcccgagcagcggcagtcagtgaggccgaggccgatttctacgagcagaacagccgctaccagctgaccttgtgggggccagaaggcaacatcctggactatgccaacaagcagctggcggggttggtggccaactactacacccctcgctggcggcttttcctggaggcgctggttgacagtgtggcccagggcatccctttccaacagcaccagtttgacaaaaatgtcttccaactggagcaggccttcgttctcagcaagcagaggtaccccagccagccgcgaggagacactgtggacctggccaagaagatcttcctcaaatattaccccggctgggtggccggctcttggtgatagattcgccaccactgggccttgttttccgctaattccagggcagattccagggcccagagctggacagacatcacaggataacccaggcctgggaggaggccccacggcctgctggtggggtctgacctggggggattggagggaaatgacctgccctccaccaccacccaaagtgtgggattaaagtactgttttctttccacttaaa

SEQ ID NO: 880 - protein, 743 aa, Homo sapien
MEAVAVAAAVGVLLLAGAGGAAGDEAREAAAVRALVARLLGPGPAADFSVSVERALAAKPGLDTYSLGGGGAARVRVRGSTGVAAAAGLHRYLRDFCGCHVAWSGSQLRLPRPLPAVPGELTEATPNRYRYYQNVCTQSYSFVWWDWARWEREIDWMALNGINLALAWSGQEAIWQRVYLALGLTQAEINEFFTGPAFLAWGRMGNLHTWDGPLPPSWHIKQLYLQHRVLDQMRSFGMTPVLPAFAGHVPEAVTRVFPQVNVTKMGSWGHFNCSYSCSFLLAPEDPIFPIIGSLFLRELIKEFGTDHIYGADTFNEMQPPSSEPSYLAAATTAVYEAMTAVDTEAVWLLQGWLFQHQPQFWGPAQIRAVLGAVPRGRLLVLDLFAESQPVYTRTASFQGQPFIWCMLHNFGGNHGLFGALEAVNGGPEAARLFPNSTMVGTGMAPEGISQNEVVYSLMAELGWRKDPVPDLAAWVTSFAARRYGVSHPDAGAAWRLLLRSVYNCSGEACRGHNRSPLVRRPSLQMNTSIWYNRSDVFEAWRLLLTSAPSLATSPAFRYDLLDLTRQAVQELVSLYYEEARSAYLSKELASLLRAGGVLAYELLPALDEVLASDSRFLLGSWLEQARAAAVSEAEADFYEQNSRYQLTLWGPEGNILDYANKQLAGLVANYYTPRWRLFLEALVDSVAQGIPFQQHQFDKNVFQLEQAFVLSKQRYPSQPRGDTVDLAKKIFLKYYPGWVAGSW

SEQ ID NO: 881 - DNA, 1501 bp, Homo sapien
ggagagagccgccgagccgagccgagccccagctccagcaagagcgcgggcgggtggcccaggcacgcagcggtgaggaccgcggccacagctcggcgccaaccaccgcgggcctcccagccagccccgcggcggggcagccgcaggagccctggctgtggtcggggggcagtgggccatgctgggggcagtggaaggccccaggtggaagcaggcggaggacattagagacatctacgacttccgagatgttctgggcacgggggccttctcggaggtgatcctggcagaagataagaggacgcagaagctggtggccatcaaatgcattgccaaggaggccctggagggcaaggaaggcagcatggagaatgagattgctgtcctgcacaagatcaagcaccccaacattgtagccctggatgacatctatgagagtgggggccacctctacctcatcatgcagctggtgtcgggtggggagctctttgaccgtattgtggaaaaaggcttctacacggagcgggacgccagccgcctcatcttccaggtgctggatgctgtgaaatacctgcatgacctgggcattgtacaccgggatctcaagccagagaatctgctgtactacagcctggatgaagactccaaaatcatgatctccgactttggcctctccaagatggaggacccgggcagtgtgctctccaccgcctgtggaactccgggatacgtggcccctgaagtcctggcccagaagccctacagcaaggctgtggattgctggtccataggtgtcatcgcctacatcttgctctgcggttaccctcccttctatgacgagaatgatgccaaactctttgaacagattttgaaggccgagtacgagtttgactctccttactgggacgacatctctgactctgccaaagatttcatccggcacttgatggagaaggacccagagaaaagattcacctgtgagcaggccttgcagcacccatggattgcaggagatacagctctagataagaatatccaccagtcggtgagtgagcagatcaagaagaactttgccaagagcaagtggaagcaagccttcaatgccacggctgtggtgcggcacatgaggaaactgcagctgggcaccagccaggaggggcaggggcagacggcgagccatggggagctgctgacaccagtggctggggggccggcagctggctgttgctgtcgagactgctgcgtggagccgggcacagaactgtcccccacactgccccaccagctctagggccctggacctcgggtcatgatcctctgcgtgggagggcttgggggcagcctgctccccttccctccctgaaccgggagtttctctgccctgtcccctcctcacctgcttccctaccactcctcactgcattttccatacaaatgtttctattttattgttccttcttgtaataaagggaagataaaaccaaaaaaaaaaaaaaaaaaa

SEQ ID NO: 882 - protein, 370 aa, Homo sapien
MLGAVEGPRWKQAEDIRDIYDFRDVLGTGAFSEVILAEDKRTQKLVAIKCIAKEALEGKEGSMENEIAVLHKIKHPNIVALDDIYESGGHLYLIMQLVSGGELFDRIVEKGFYTERDASRLIFQVLDAVKYLHDLGIVHRDLKPENLLYYSLDEDSKIMISDFGLSKMEDPGSVLSTACGTPGYVAPEVLAQKPYSKAVDCWSIGVIAYILLCGYPPFYDENDAKLFEQILKAEYEFDSPYWDDISDSAKDFIRHLMEKDPEKRFTCEQALQHPWIAGDTALDKNIHQSVSEQIKKNFAKSKWKQAFNATAVVRHMRKLQLGTSQEGQGQTASHGELLTPVAGGPAAGCCCRDCCVEPGTELSPTLPHQL

SEQ ID NO: 883 - DNA, 2557 bp, Homo sapien
cagagggaggaagaagcggcggcgcggcggcggcggctcctctttgcagagggggaaactcttgggctgagagcaggaacaacgcggtaggcaaggcgggctgctggctcccccggctccggcagcagcggcggcagcccgagcagcggcagcagcagcggcagcaccccaggcgctgacagccccgccggccggctccgttgctgaccgccgactgtcaatggagctggaaaacatcgtggccaacacggtcttgctgaaagccagggaagggggcggaggaaagcgcaaagggaaaagcaagaagtggaaagaaatcctgaagttccctcacattagccagtgtgaagacctccgaaggaccatagacagagattactgcagtttatgtgacaagcagccaatcgggaggctgcttttccggcagttttgtgaaaccaggcctgggctggagtgttacattcagttcctggactccgtggcagaatatgaagttactccagatgaaaaactgggagagaaagggaaggaaattatgaccaagtacctcaccccaaagtcccctgttttcatagcccaagttggccaagacctggtctcccagacggaggagaagctcctacagaagccgtgcaaagaactcttttctgcctgtgcacagtctgtccacgagtacctgaggggagaaccattccacgaatatctggacagcatgttttttgaccgctttctccagtggaagtggttggaaaggcaaccggtgaccaaaaacactttcaggcagtatcgagtgctaggaaaagggggcttcggggaggtctgtgcctgccaggttcgggccacgggtaaaatgtatgcctgcaagcgcttggagaagaagaggatcaaaaagaggaaaggggagtccatggccctcaatgagaagcagatcctcgagaaggtcaacagtcagtttgtggtcaacctggcctatgcctacgagaccaaggatgcactgtgcttggtcctgaccatcatgaatgggggtgacctgaagttccacatctacaacatgggcaaccctggcttcgaggaggagcgggccttgttttatgcggcagagatcctctgcggcttagaagacctccaccgtgagaacaccgtctaccgagatctgaaacctgaaaacatcctgttagatgattatggccacattaggatctcagacctgggcttggctgtgaagatccccgagggagacctgatccgcggccgggtgggcactgttggctacatggcccccgaagtcctgaacaaccagaggtacggcctgagccccgactactggggccttggctgcctcatctatgagatgatcgagggccagtcgccgttccgcggccgtaaggagaaggtgaagcgggaggaggtggaccgccgggtcctggagacggaggaggtgtactcccacaagttctccgaggaggccaagtccatctgcaagatgctgctcacgaaagatgcgaagcagaggctgggctgccaggaggagggggctgcagaggtcaagagacaccccttcttcaggaacatgaacttcaagcgcttagaagccgggatgttggaccctcccttcgttccagacccccgcgctgtgtactgtaaggacgtgctggacatcgagcagttctccactgtgaagggcgtcaatctggaccacacagacgacgacttctactccaagttctccacgggctctgtgtccatcccatggcaaaacgagatgatagaaacagaatgctttaaggagctgaacgtgtttggacctaatggtaccctcccgccagatctgaacagaaaccaccctccggaaccgcccaagaaagggctgctccagagactcttcaagcggcagcatcagaacaattccaagagttcgcccagctccaagaccagttttaaccaccacataaactcaaaccatgtcagctcgaactccaccggaagcagctagtttcggctctggcctccaagtccacagtggaaccagcccagacccttctccttagaagtggaagtagtggagcccctgctctggtggggctgccaggggagaccccgggagccggaaggaggccgtccatcccgtcgacgtagaacctcgaggtttctcaaagaaatttccactcaggtctgttttccgaggcggccccgggcgggtggattggatttgtctttggtgaacattgcaatagaaatccaattggatacgacaacttgcacgtattttaatagcgtcataactagaactgaattttgtctttatgatttttaaagaaaagttttgtaaatttctctactgtctcagtttacattttcggtatatttgtatttaaatgaagtgagactttgagggtgtatattttctgtgcagccactgttaagccatgtgttccaaggcattttagcggggagggggttatcaaaaaaaaaaaaaatgtgactcaagacttccagagcctcaaatgagaaaatgtctttattaaatgtagaaagtgatccatacttcaaaaaaaaa

SEQ ID NO: 884 - protein, 590 aa, Homo sapien
MELENIVANTVLLKAREGGGGKRKGKSKKWKEILKFPHISQCEDLRRTIDRDYCSLCDKQPIGRLLFRQFCETRPGLECYIQFLDSVAEYEVTPDEKLGEKGKEIMTKYLTPKSPVFIAQVGQDLVSQTEEKLLQKPCKELFSACAQSVHEYLRGEPFHEYLDSMFFDRFLQWKWLERQPVTKNTFRQYRVLGKGGFGEVCACQVRATGKMYACKRLEKKRIKKRKGESMALNEKQILEKVNSQFVVNLAYAYETKDALCLVLTIMNGGDLKFHIYNMGNPGFEEERALFYAAEILCGLEDLHRENTVYRDLKPENILLDDYGHIRISDLGLAVKIPEGDLIRGRVGTVGYMAPEVLNNQRYGLSPDYWGLGCLIYEMIEGQSPFRGRKEKVKREEVDRRVLETEEVYSHKFSEEAKSICKMLLTKDAKQRLGCQEEGAAEVKRHPFFRNMNFKRLEAGMLDPPFVPDPRAVYCKDVLDIEQFSTVKGVNLDHTDDDFYSKFSTGSVSIPWQNEMIETECFKELNVFGPNGTLPPDLNRNHPPEPPKKGLLQRLFKRQHQNNSKSSPSSKTSFNHHINSNHVSSNSTGSS

SEQ ID NO: 885 - DNA, 2238 bp, Homo sapien
gtccttcggtgtctgggtgtggtgagtagaggtgtgtgtcacaaagtacagaccattgtgtgtgacaaagcccatcgtgtgtctgtgtgtgtctttatccacgtggatggacgtctctttcttgctctgccccaagacacaccctagcccctccttattctcaaaagggggagctggggagcctccccctaccctggggcctcccctgcccctccccgccctgcctggccgtcaccactccccagagggcacagggctctgctgtgcctcagagcaaaagtcccagagccagcagagcaggctgacgacctgcaagccacagtggctgccctgtgcgtgctgcgaggtgggggaccctgggcaggaagctggctgagccccaagaccccgggggccatgggcggggatctggtgcttggcctgggggccttgagacgccgaaagcgcttgctggagcaggagaagtctctggccggctgggcactggtgctggcaggaactggcattggactcatggtgctgcatgcagagatgctgtggttcggggggtgctcgtgggcgctctacctgttcctggttaaatgcacgatcagcatttccaccttcttactcctctgcctcatcgtggcctttcatgccaaagaggtccagctgttcatgaccgacaacgggctgcgggactggcgcgtggcgctgaccgggcggcaggcggcgcagatcgtgctggagctggtggtgtgtgggctgcacccggcgcccgtgcggggcccgccgtgcgtgcaggatttaggggcgccgctgacctccccgcagccctggccgggattcctgggccaaggggaagcgctgctgtccctggccatgctgctgcgtctctacctggtgccccgcgccgtgctcctgcgcagcggcgtcctgctcaacgcttcctaccgcagcatcggcgctctcaatcaagtccgcttccgccactggttcgtggccaagctttacatgaacacgcaccctggccgcctgctgctcggcctcacgcttggcctctggctgaccaccgcctgggtgctgtccgtggccgagaggcaggctgttaatgccactgggcacctttcagacacactttggctgatccccatcacattcctgaccatcggctatggtgacgtggtgccgggcaccatgtggggcaagatcgtctgcctgtgcactggagtcatgggtgtctgctgcacagccctgctggtggccgtggtggcccggaagctggagtttaacaaggcagagaagcacgtgcacaacttcatgatggatatccagtataccaaagagatgaaggagtccgctgcccgagtgctacaagaagcctggatgttctacaaacatactcgcaggaaggagtctcatgctgcccgcaggcatcagcgcaagctgctggccgccatcaacgcgttccgccaggtgcggctgaaacaccggaagctccgggaacaagtgaactccatggtggacatctccaagatgcacatgatcctgtatgacctgcagcagaatctgagcagctcacaccgggccctggagaaacagattgacacgctggcggggaagctggatgccctgactgagctgcttagcactgccctggggccgaggcagcttccagaacccagccagcagtccaagtagctggacccacgaggaggaaccaggctactttccccagtactgaggtggtggacatcgtctctgccactcctgacccagccctgaacaaagcacctcaagtgcaaggaccaaagggggccctggcttggagtgggttggcttgctgatggctgctggaggggacgctggctaaagtgggtaggccttggcccacctgaggccccaggtgggaacatggtcacccccactctgcataccctcatcaaaaacactctcactatgctgctatggacgacctccagctctcagttacaagtgcaggcgactggaggcaggactcctgggtccctgggaaagagggtactaggggcccggatccaggattctgggaggcttcagttaccgctggccgagctgaagaactgggtatgaggctggggcggggctggaggtggcgccccctggtgggacaacaaagaggacaccatttttccagagctgcagagagcacctggtggggaggaagaagtgtaactcaccagcctctgctcttatctttgtaataaatgttaaagccag

SEQ ID NO: 886 - protein, 427 aa, Homo sapien
MGGDLVLGLGALRRRKRLLEQEKSLAGWALVLAGTGIGLMVLHAEMLWFGGCSWALYLFLVKCTISISTFLLLCLIVAFHAKEVQLFMTDNGLRDWRVALTGRQAAQIVLELVVCGLHPAPVRGPPCVQDLGAPLTSPQPWPGFLGQGEALLSLAMLLRLYLVPRAVLLRSGVLLNASYRSIGALNQVRFRHWFVAKLYMNTHPGRLLLGLTLGLWLTTAWVLSVAERQAVNATGHLSDTLWLIPITFLTIGYGDVVPGTMWGKIVCLCTGVMGVCCTALLVAVVARKLEFNKAEKHVHNFMMDIQYTKEMKESAARVLQEAWMFYKHTRRKESHAARRHQRKLLAAINAFRQVRLKHRKLREQVNSMVDISKMHMILYDLQQNLSSSHRALEKQIDTLAGKLDALTELLSTALGPRQLPEPSQQSK

SEQ ID NO: 887 - DNA, 417 bp, Homo sapien
acctcccaaccaagccctccagcaaggattcaggagtgcccctcgggcctcgccatgaggctcttcctgtcgctcccggtcctggtggtggttctgtcgatcgtcttggaaggcccagccccagcccaggggaccccagacgtctccagtgccttggataagctgaaggagtttggaaacacactggaggacaaggctcgggaactcatcagccgcatcaaacagagtgaactttctgccaagatgcgggagtggttttcagagacatttcagaaagtgaaggagaaactcaagattgactcatgaggacctgaagggtgacatccaggaggggcctctgaaatttcccacaccccagcgcctgtgctgaggactcccgccatgtggccccaggtgccaccaataaaaatcctaccg

SEQ ID NO: 888 - protein, 83 aa, Homo sapien
MRLFLSLPVLVVVLSIVLEGPAPAQGTPDVSSALDKLKEFGNTLEDKARELISRIKQSELSAKMREWFSETFQKVKEKLKIDS

SEQ ID NO: 889 - DNA, 3235 bp, Homo sapien
cgtgggagcagtggggttcgacggcgcggccgcgaggccgccatggccgctcacgggaagctgcggcgggagcgggggctgcaggctgagtatgagacgcaagtcaaagagatgcgctggcagctgagcgagcagctgcgctgcctggagctgcagggcgagctgcggcgggagttgctgcaggagctggcagagttcatgcggcgccgcgctgaggtggagctggaatactcccggggcctggaaaagctggccgagcgcttctccagccgtggaggccgcctggggagcagccgggagcaccaaagcttccggaaggagccgtccctcctgtcgcccttgcactgctgggcggtgctgctgcagcacacgcggcagcagagccgggagagcgcggccctgagtgaggtgctggccgggcccctggcccagcgcctgagtcacattgcagaggacgtggggcgcctggtcaagaagagcagggatctggagcagcagctgcaggatgagctcctggaggtggtctcagagctccagacggccaagaagacgtaccaggcatatcacatggagagcgtgaatgccgaggccaagctccgggaggccgagcggcaggaggagaagcgggcaggccggagtgtccccaccaccaccgctggtgccactgaggcagggcccctccgcaagagctccctcaagaagggagggaggctggtggagaagcggcaggccaagttcatggagcacaaactcaagtgcacaaaggcgcgcaacgagtacctgcttagcctggctagtgtcaacgctgctgtcagtaactactacctgcatgacgtcttggacctcatggactgctgtgacacagggttccacctggccctggggcaggtgctccggagctacacggccgctgagagccgcacccaagcctcccaagtgcagggcctgggcagcctggaagaagctgtggaggccctggatcctccaggggacaaagccaaggttctcgaggtgcatgctaccgtcttctgtcccccgctgcgctttgactaccacccccatgatggggatgaggtggctgagatctgcgttgaaatggagctgcgggacgagattctgcccagagcccagaacatccagagccgcctggaccgacagaccattgagacagaggaggtgaacaagactctgaaggcgacactgcaggccctgctggaggtggtggcctcggatgacggggatgtgcttgattccttccagaccagcccctccaccgagtccctcaagtccaccagctcagacccaggcagccggcaggcgggccggaggcgcggccagcagcaggagaccgaaaccttctacctcacgaagctccaggagtatctgagtggacggagcatcctcgccaagctgcaggccaagcacgagaagctgcaggaggcccttcagcgaggtgacaaggaggagcaggaggtgtcttggacccagtacacacagagaaaattccagaagagccgccagccccgccccagctcccagtataaccagagactctttgggggagacatggagaagtttatccagagctcaggccagcctgtgcccctggtggtggagagctgcattcgcttcatcaacctcaatggcctgcagcatgaaggcatcttccgggtatcgggtgcccagctccgggtctcagagatccgtgatgccttcgagagaggggaggacccactggtggagggctgcactgcccatgacctggactcggtggccggggtgctgaagctctacttccggagcctggagcccccactcttccccccagacctgttcggcgagctgctggcttcttcggagctggaggccacagcggagagggtggagcacgtgagccgcctgctgtggcggctgcccgcgccggtgctggtggttctgcgctacctcttcaccttcctcaaccacctggcccagtacagcgatgagaacatgatggacccctacaacctggccgtgtgcttcgggcccacgctgctaccggtgcccgctgggcaggacccggtggcgctgcagggccgggtgaaccagctggtgcagacgctcatagtgcagcccgatcgggtcttcccgcccctgacctcgctgcctggccccgtctacgagaagtgcatggcaccgccttccgccagctgcctgggggacgcccagctggagagcctgggggcggacaatgagccggagctggaagccgagatgcccgcacaggaggatgacctggagggggtcgtggaggctgtggcctgctttgcctacacgggccgcacagcccaggagctgagcttccggcggggggacgtactgcggctgcacgagagggcctcgagcgactggtggcggggggagcacaacggcatgcggggcctcatcccccacaagtatatcacgctgcccgccgggacggagaagcaggtggtgggcgcagggctgcagactgcaggggagtctgggagcagtcccgagggcctcctggcatcggagctggtccaccggccagagccatgcacctcacctgaggccatgggaccctctggacacagacgacgctgcttggtcccagcctccccagagcaacacgtggaggtggataaggctgtggcacagaacatggactctgtgtttaaggagctcttgggaaagacctctgtccgccagggccttgggccagcatctaccacctctcccagtcctgggccccgaagcccaaaggccccgcccagcagccgcctgggcaggaacaaaggcttctcccggggccctggggccccagcctcaccctcagcttcccacccccagggcctagacacgacccccaagccacactgaggtgccgctgctggagatgcgtgcccccggcggctacccgctggaccggccactctccccagcccccttgcttctctccagccctgtccagcaagtgcagggtgcctgcacttcaccctgtgcagagaggtgggatggggccgtgcacacagggatgcccgctccacatcctgcctgcccctcagccctggcccaggccccttttggaggcagctgaggaaggatgctggggaaagccctcttctgcagctttgtggaaggctgatcagtggctgctgggtggcgggtacccttgctcagatgcctggcagggctgggtggcgattcataaagacctcgtgttgattccccg

SEQ ID NO: 890 - protein, 946 aa, Homo sapien
MAAHGKLRRERGLQAEYETQVKEMRWQLSEQLRCLELQGELRRELLQELAEFMRRRAEVELEYSRGLEKLAERFSSRGGRLGSSREHQSFRKEPSLLSPLHCWAVLLQHTRQQSRESAALSEVLAGPLAQRLSHIAEDVGRLVKKSRDLEQQLQDELLEVVSELQTAKKTYQAYHMESVNAEAKLREAERQEEKRAGRSVPTTTAGATEAGPLRKSSLKKGGRLVEKRQAKFMEHKLKCTKARNEYLLSLASVNAAVSNYYLHDVLDLMDCCDTGFHLALGQVLRSYTAAESRTQASQVQGLGSLEEAVEALDPPGDKAKVLEVHATVFCPPLRFDYHPHDGDEVAEICVEMELRDEILPRAQNIQSRLDRQTIETEEVNKTLKATLQALLEVVASDDGDVLDSFQTSPSTESLKSTSSDPGSRQAGRRRGQQQETETFYLTKLQEYLSGRSILAKLQAKHEKLQEALQRGDKEEQEVSWTQYTQRKFQKSRQPRPSSQYNQRLFGGDMEKFIQSSGQPVPLVVESCIRFINLNGLQHEGIFRVSGAQLRVSEIRDAFERGEDPLVEGCTAHDLDSVAGVLKLYFRSLEPPLFPPDLFGELLASSELEATAERVEHVSRLLWRLPAPVLVVLRYLFTFLNHLAQYSDENMMDPYNLAVCFGPTLLPVPAGQDPVALQGRVNQLVQTLIVQPDRVFPPLTSLPGPVYEKCMAPPSASCLGDAQLESLGADNEPELEAEMPAQEDDLEGVVEAVACFAYTGRTAQELSFRRGDVLRLHERASSDWWRGEHNGMRGLIPHKYITLPAGTEKQVVGAGLQTAGESGSSPEGLLASELVHRPEPCTSPEAMGPSGHRRRCLVPASPEQHVEVDKAVAQNMDSVFKELLGKTSVRQGLGPASTTSPSPGPRSPKAPPSSRLGRNKGFSRGPGAPASPSASHPQGLDTTPKPH

SEQ ID NO: 891 - DNA, 5185 bp, Homo sapien
gggaacttggattaggtggagaggcagttggggggcctcgttgttttgcgtcttagttccgccctcctgtccatcaggagaaggaaaggataaaccctgggccatgaggctacccctgctcctggtttttgcctctgtcattccgggtgctgttctcctactggacaccaggcaatttttaatctataatgaagatcacaagcgctgcgtggatgcagtgagtcccagtgccgtccaaaccgcagcttgcaaccaggatgccgaatcacagaaattccgatgggtgtccgaatctcagattatgagtgttgcatttaaattatgcctgggagtgccatcaaaaacagactgggttgctatcactctctatgcctgtgactcaaaaagtgaatttcagaaatgggagtgcaaaaatgacacacttttggggatcaaaggagaagatttattttttaactacggcaacagacaagaaaagaatattatgctctacaagggatcgggtttatggagcaggtggaagatctatggaaccacagacaatctgtgctccagaggttatgaagccatgtatacgctactaggcaatgccaatggagcaacctgtgcattcccgttcaagtttgaaaacaagtggtacgcagattgcacgagtgctgggcggtcggatggatggctctggtgcggaaccactactgactatgacacagacaagctatttggatattgtccattgaaatttgagggcagtgaaagcttatggaataaagacccgctgaccagcgtttcctaccagataaactccaaatccgctttaacgtggcaccaagcgaggaaaagctgccaacaacagaacgctgagctcctgagcatcacagagatacatgagcaaacatacctgacaggattaaccagttccttgacctcaggactctggattggacttaacagtctgagcttcaacagcggttggcagtggagtgaccgcagtcctttccgatatttgaactggttaccaggaagtccatcagctgaacctggaaaaagctgtgtgtcactaaatcctggaaaaaatgctaaatgggaaaatctggaatgtgttcagaaactgggctatatttgcaaaaagggcaacaccactttaaattcttttgttattccctcagaaagtgatgtgcctactcactgtcctagtcagtggtggccgtatgccggtcactgttacaagattcacagagatgagaaaaaaatccagagggatgctctgaccacctgcaggaaggaaggcggtgacctcacaagtatccacaccatcgaggaattggactttattatctcccagctaggatatgagccaaatgacgaattgtggatcggcttaaatgacattaagattcaaatgtactttgagtggagtgatgggacccctgtaacgtttaccaaatggcttcgtggagaaccaagccatgaaaacaacagacaggaggattgtgtggtgatgaaaggcaaggatgggtactgggcagatcggggctgtgagtggcctcttggctacatctgcaagatgaaatcacgaagccaaggtccagaaatagtggaagtcgaaaaaggctgcaggaaaggctggaaaaaacatcacttttactgctatatgattggacatacgctttcaacatttgcagaagcaaaccaaacctgtaataatgagaatgcttatttaacaactattgaagacagatatgaacaagccttcctgactagtttcgttggcttaaggcctgaaaaatatttctggacaggactttcagatatacaaaccaaagggacttttcagtggaccatcgaggaagaggttcggttcacccactggaattcagatatgccagggcgaaagccagggtgtgttgccatgagaaccgggattgcagggggcttatgggatgttttgaaatgtgatgaaaaggcaaaatttgtgtgcaagcactgggcagaaggagtaacccacccaccgaagcccacgacgactcccgaacccaaatgtccggaggattggggcgccagcagtagaacaagcttgtgtttcaagctgtatgcaaaaggaaaacatgagaagaaaacgtggtttgaatctcgagatttttgtcgagctctgggtggagacttagctagcatcaataacaaagaggaacagcaaacaatatggcgattaataacagctagtggaagctaccacaaactgttttggttgggattgacatatggaagcccttcagaaggttttacttggagtgatggttctcctgtttcatatgaaaactgggcttatggagaacctaataattatcaaaatgttgaatactgtggtgagctgaaaggtgaccctactatgtcttggaatgatattaattgtgaacaccttaacaactggatttgccagatacaaaaaggacaaacaccaaaacctgagccaacaccagctcctcaagacaatccaccagttactgaagatgggtgggttatttacaaagactaccagtattatttcagcaaagagaaggaaaccatggacaatgcgcgagcgttttgcaagaggaattttggtgatcttgtttctattcaaagtgaaagtgaaaagaagtttctatggaaatatgtaaacagaaatgatgcacagtctgcatattttattggtttattgatcagcttggataaaaagtttgcttggatggatggaagcaaagtggattacgtgtcttgggccacaggtgaacccaattttgcaaatgaagatgaaaactgtgtgaccatgtattcaaattcagggttttggaatgacattaactgtggctatccaaacgccttcatttgccagcgacataacagtagtatcaatgctaccacagttatgcctaccatgccctcggtcccatcagggtgcaaggaaggttggaatttctacagcaacaagtgtttcaaaatctttggatttatggaagaagaaagaaaaaattggcaagaggcacgaaaagcttgtataggctttggagggaatctggtctccatacaaaatgaaaaagagcaagcatttcttacctatcacatgaaggactccactttcagtgcctggactgggctgaatgatgtcaattcagaacacacgttcctttggacggatggacgaggagtccattacacaaactgggggaaaggttaccctggtggaagaagaagcagtctttcttatgaagatgctgactgtgttgttattattggaggtgcatcaaatgaagcaggaaaatggatggatgatacctgcgacagtaaacgaggctacatatgccagacacgatccgacccttccttgactaatcctccagcaacgattcaaacagatggctttgttaaatatggcaaaagcagctattcactcatgagacaaaaatttcaatggcatgaagcggagacatactgcaagcttcacaattcccttatagccagcattctggatccctacagtaatgcatttgcgtggctgcagatggaaacatctaatgaacgtgtgtggatcgccctgaacagtaacttgactgataatcaatacacttggactgataagtggagggtgaggtacactaactgggctgctgatgagcccaaattgaaatcagcatgtgtttatctggatcttgatggctactggaagacagcacattgcaatgaaagtttttactttctctgtaaaagatcagatgaaatccctgctactgaacccccacaactgcctggcagatgcccggagtcagatcacacagcatggattcctttccatggtcactgttactatattgagtcctcatatacaagaaactggggccaagcttctctggaatgtcttcgaatgggttcctctctggtttccattgaaagtgctgcagaatccagttttctgtcatatcgggttgagccacttaaaagtaaaaccaatttttggataggattgttcagaaatgttgaagggacgtggctgtggataaataacagtccggtctcctttgtcaactggaacacaggagatccctctggtgaacggaatgattgtgtagctttacatgcgtcttctgggttttggagtaatattcactgttcttcctacaaaggatatatttgtaaaagaccaaaaattattgatgctaaacctactcatgaattacttacaacaaaagctgacacaaggaagatggacccttctaaaccgtcttccaacgtggccggagtagtcatcattgtgatcctcctgattttaacgggtgctggccttgccgcctatttcttttataagaaaagacgtgtgcacctacctcaagagggcgcctttgaaaacactctgtattttaacagtcagtcaagcccaggaactagtgatatgaaagatctcgtgggcaatattgaacagaatgaacactcggtcatctagtacctcaatgcgattctgagatatttgaatttcataaaattgtaactgaaatttaaaatttttagttcaatgtgattgttttctttaaaatgagtactgaattgtactggtctgtccttttttcctttgcctaattgaagaaataattgcttgttttctagcctggcaagatattttcataaaagagggataacaatgctgattactaccttttaaaatattttagataaatgcacagcaccacagcaccacatctaagcattagtgatgggtagctgatgtcagcttcatgtggattttaagcactctagaaacaatgaagcttcttggcatattttaaggagctcccaaaatgtgttacctattaaattgtaactcagcaagtagaagaccatttgaaaagtcaggtacaaatttcctcaagtggcataaaaatgtagtcagttttctcttttaccagtttttatttccactccaattatttagaactttatttgtacatgtgcagaagaataaggcagctgagaatcttgtttcccccaagagagttttacaggctgagtgttgcaaatgtgttctttgtcctgttatatgtatatcaggaatacaaggatgtgaaataaaactgtaaatttgcataactggatgtacttagataatgtgaaataaacattaaagacaaggtctatttttaataaaaaaaaaaaaaaa

SEQ ID NO: 892 - protein, 1456 aa, Homo sapien [sequence omitted]

SEQ ID NO: 893 - DNA, 2156 bp, Homo sapien
agcgcagcactccccgctcgttggcccgggtatcccagcgcggacccacgcgatacgctgacgccccgacgccgatccggccgagccaagtaagggggacggcccgagacggagaagggagagagtgggagtttcccagcccgcagaactttcgaagttgagaagagaacccctggaacgtgcgctcagcactgggattttctggactcaacgatgactctgaataatgtcaccatgcgccagggcactgtgggcatgcagccacagcagcagcgctggagcatcccagctgatggcaggcatctgatggtccagaaagagccccaccagtacagccaccgcaaccgccattctgctacccctgaggaccactgccgccgaagctggtcctctgactccacagactcagtcatctcctctgagtcagggaacacctactaccgagtggtgctcataggggagcagggggtgggcaagtccactctggccaacatctttgcaggtgtgcatgacagcatggacagcgactgcgaggtgctgggagaagatacatatgaacgaaccctgatggttgatggggaaagtgcaacgattatactcctggatatgtgggaaaataagggggaaaatgaatggctccatgaccactgcatgcaggtcggggacgcatacctgattgtctactcaatcacagaccgagcgagcttcgagaaggcatctgagctgcgaatccagctccgcagggcccggcagacagaggacattcccataattttggttggcaacaaaagtgacttagtgcggtgccgagaagtgtctgtatcagaagggagagcctgtgcagtggtgtttgactgcaagttcatcgagacctctgcagctgtccagcacaacgtgaaggagctgtttgagggcattgtgcgacaggtgcgccttcggcgggacagcaaggagaagaatgaacggcggctggcctaccagaaaaggaaggagagcatgcccaggaaagccaggcgcttctggggcaagatcgtggccaaaaacaacaagaatatggccttcaagctcaagtccaaatcctgccatgacctctctgtactctaggaacccagggtcacccagatgtccctttgatggcccttgttgaaggccattgggaccaataatctatattagattgaatacttaagttagatgtggtttcccccattgtagcagggagctagcgtattagccttgtgggcaacatgatgcatgggaaatgaaagatttttgtaaaaagtcagtatttatttccaggaaaagcctgaccttgctatttgaacacccaagactctttagaggatgtgtttggtgttcacatgtgtttcttctattttggatagtagggaagtaaagcttacaaagaatgcctagaacaagaacttttcatcattaaaaatttttcccagtgttctgatatgtgactttgaggccaatgagtcataaacaaatataagaaagctgtcaatgagtttcttcaaaggagggaaaactttctacgaatctaagatccatggagctagaattgtagaactaggctcatcagaatcgtgactattattgctccatcaaactgtgaaaagaaatgatgtggaccttgctggaaacaaaggcttagcaaacaatttttgttcaatgcccaccgagacatatagaattgggaactgatacatgtgtcccttataggctcaaaaattatatcttacaatttcttatttagggggaaattatttgaatcagattctatttagtcaaaccaccttttatgttttattatttttgaattcatggagccatcataaaaatatttttaaaatcagaattattgataccctgtagtgcaaaatgtcaatttttaatgtataatcagaagtctgaattttcataaaacatatagcataaaaacctccagtactttggttgacccttgtatgtcacagctctgctctatttattattattttgcaaaataaccattttaacatttgataaagcatatttatgaacatatttcttaataagaaaaatatccattttattaccattttctatctttttcaaaatatgcaagtttttacctatatgtcttataataaaagaaataaaatatttga

SEQ ID NO: 894 - protein, 296 aa, Homo sapien
MTLNNVTMRQGTVGMQPQQQRWSIPADGRHLMVQKEPHQYSHRNRHSATPEDHCRRSWSSDSTDSVISSESGNTYYRVVLIGEQGVGKSTLANIFAGVHDSMDSDCEVLGEDTYERTLMVDGESATIILLDMWENKGENEWLHDHCMQVGDAYLIVYSITDRASFEKASELRIQLRRARQTEDIPIILVGNKSDLVRCREVSVSEGRACAVVFDCKFIETSAAVQHNVKELFEGIVRQVRLRRDSKEKNERRLAYQKRKESMPRKARRFWGKIVAKNNKNMAFKLKSKSCHDLSVL

SEQ ID NO: 895 - DNA, 1105 bp, Homo sapien
gggcgggtagtcgaccgtgtccgcgcgcctgggagacgctgcctcggcccggacgcgcccgcgcccccgcggctggagggtggtcgccactgggacactgtgaaccaggagtgagtcggagctgccgcgctgcccaggccatggactgtgaggtcaacaacggttccagcctcagggatgagtgcatcacaaacctactggtgtttggcttcctccaaagctgttctgacaacagcttccgcagagagctggacgcactgggccacgagctgccagtgctggctccccagtgggagggctacgatgagctgcagactgatggcaaccgcagcagccactcccgcttgggaagaatagaggcagattctgaaagtcaagaagacatcatccggaatattgccaggcacctcgcccaggtcggggacagcatggaccgtagcatccctccgggcctggtgaacggcctggccctgcagctcaggaacaccagccggtcggaggaggaccggaacagggacctggccactgccctggagcagctgctgcaggcctaccctagagacatggagaaggagaagaccatgctggtgctggccctgctgctggccaagaaggtggccagtcacacgccgtccttgctccgtgatgtctttcacacaacagtgaattttattaaccagaacctacgcacctacgtgaggagcttagccagaaatgggatggactgaacggacagttccagaagtgtgactggctaaagcttgatgtggtcacagctgtatagctgcttccagtgtagacggagccctggcatgtcaacagcgttcctagagaagacaggctggaagatagctgtgacttctattttaaagacaatgttaaacttataacccactttaaaatatctacattaatatacttgaatgaaaatgtccatttacacgtatttgaatggccttcatatcatccacacatgaatctgcacatctgtaaatctacacacggtgcctttatttccactgtgcaggttcccacttaaaaattaaattggaaagcaggtttcaaggaagtagaaacaaaatacaatttttttggtaaaaaaaaa

SEQ ID NO: 896 - protein, 195 aa, Homo sapien
MDCEVNNGSSLRDECITNLLVFGFLQSCSDNSFRRELDALGHELPVLAPQWEGYDELQTDGNRSSHSRLGRIEADSESQEDIIRNIARHLAQVGDSMDRSIPPGLVNGLALQLRNTSRSEEDRNRDLATALEQLLQAYPRDMEKEKTMLVLALLLAKKVASHTPSLLRDVFHTTVNFINQNLRTYVRSLARNGMD

SEQ ID NO: 897 - DNA, 2642 bp, Homo sapien
ggcacgagggacaaaggctgcagggggaccctgcctgcccaggagggcccctcagggagtaaacccctaaggggctcacttaaggaggaggtagccctggatttgagtgtgaggaagcccacagcagaggcctcccctgtcaaggcttcccgttctgtggagcatgccaagcctactgcagccatggatgtgccagatgtgggcaacatggtgtcagatctgccaggcctgaaaaagatagacacagaagcaccaggcttgcctggggtgccagtgaccacagatgccatgccaaggaccaacttccacagctctgtggccttcatgttccgaaagttcaagatcctccgtccggcacctttgcctgcagccgtggtcccgtccacgcccacctcagctcctgctcccacacagcctgcacccacccccacatctgggcccattggactgcggattctcgctcaacagcccttgtctgtgacctgcttcagcctggcactgcccagccctccagccgtagctgtggcctcccctgcccctgctccagctccatcccctgctccggctcgagctcaggctccagcttcagcccgggatccagctccagctccagctccagttgcaggccctgctccagcatctacttcagccccaggggactccctggagcagcattttacaggactacatgcgtccctgtgtgatgctatttctggctccgtcgcccactctcctccagagaagcttcgcgagtggctagagacggctgggccctggggccaggctgcgtggcaggactgccagggtgtgcaggggctgctggccaagctgctgtctcagctgcagcgcttcgatcgcacccaccggtgccccttcccccatgtggtgcgagctggcgccatcttcgtgcccattcacctggtgaaggagcggctcttccctcggctgccacccgcttctgtggaccatgtgctgcaggagcatcgtgtggagctgcggcccaccacgctgtcggaggagcgggcactgcgggagctcgccctgccaggctgcacctcacgcatgctgaagttactggcgctgcgccagctgccggacatttaccccgaccttctcggcctgcagtggcgcgactgtgtacgccgccagctgggtgagcatggggcagccccagtggccaccggagctgtgtgagcaagtgacaggtgactttgacactgaggctggagctgtgtcctcctcagagcccactgtggccagagatgagccagagagcctagccctggctcagaagtcaccggcccccaaggtcaggaagccaggcaggaagccaccaacccctggcccggagaaagcagaggcagctgctggggaagagtcctgtggtgcctcccctacccctgctaccagtgccagcccacctggccccacactgaaggcccgcttccgcagtctgctggagaccgcctggctcaatggcctggctctgcccacctggggccacaagtcctcaagaccagaccagccctcaccctgcccacagctgctggacagccagagccatcacctgtagcactggttgccagtgctgtgtgtatagcagtcactctccacccttcccttctgcctgcccagctgccccggggccacgagtggatgctggggctgtggctgctcccctggaggggttccatctctgaccctgtggcccattcagggtgggctgaagagcccctgagcttttaacgtgagggtctttattggataggactactccctatttcttgcctagagaacacacatgggctttggagcccgacagacctgggcttgaatcccggctcgtgttcttgctgcaggacctgggcaagaaacttcacctctgctgagccctcattccccatgtgtaaaatgggacaacgcaacctacctcacagggttgttgtggggatgctgcctgatacataccctgtcaccatttggtctctgcttcctctctgggacagggcctagaattggaggcagagaaccttcctatagaaagtcttcgtgtgtcctaggacttggctatcgtagagtggtaccttaggcagtggatgtgactcacactctcaggagtcaccccccagcatttggggttgggttggccctactccagcctggagctccctgagggagcctgcactccctgctcccaatccccgctactggtgcagggatgcagcctggagctggcgtccttgttctgggcctgctgctgccgccaccccaggaggccccaggcctgtcctgaattgacatcagtgcttccctgaactgcctcccccacccctggcattatcccaggaaacttatgttttctagaagctaagcagctgctgggactcagggactggtgcaggtaggctgagtggcagctcagtcctagaaggtctctgaagatctggactgaggaccctgctactccccaagccagagcccatcagccaggcctgctgtgagccacctgcctgtggagtgctgagctcaaccaaaggctggcaagctctgggcctcatttaagggattctgatgagccgatgggccctggaggcagcccattaaagcatctggctcgtttttggaaaaaaaaaaaaaaaaaa

SEQ ID NO: 898 - protein, 137 aa, Homo sapien
MGQPQWPPELCEQVTGDFDTEAGAVSSSEPTVARDEPESLALAQKSPAPKVRKPGRKPPTPGPEKAEAAAGEESCGASPTPATSASPPGPTLKARFRSLLETAWLNGLALPTWGHKSSRPDQPSPCPQLLDSQSHHL

SEQ ID NO: 899 - DNA, 1015 bp, Homo sapien
ggcacgaggcccgtcagctgtcccagagcctgtgtcgcgcccgtgccggtagcgcccgtgccggtagcgccgctgccaccgctcaccatgggcccgggtcctcggctgctgctacctctcgtgctttgcgtggggctcggcgcacttgtgttttcttcgggggccgagggcttccgcaagcgaggcccctcggtgacggccaaggtcttctttgatgtgaggattggagacaaagatgttggcagaattgtgattggcctctttggaaaagttgtgcccaagacagtggaaaattttgttgctctagcaacaggagagaaaggatatggatataaaggaagcaagtttcatcgtgtcatcaaggatttcatgattcaaggaggtgacatcaccactggagatggcactgggggtgtgagcatctatggtgagacatttccagatgagaacttcaagctgaagcactatggcattgggtgggtcagcatggccaacgctgggcctgacaccaatggctctcagttctttatcaccttgaccaagcccacctggttggacggcaaacatgtggtgtttggaaaagtcattgatgggatgacagtggtgcactccatagagctccaagcaactgatgggcatgaccgtccactcaccaactgctcgatcatcaacagtggcaagatagacgtgaaaacgccttttgtggttgagatcgctgattggtgacacaactggcagaaaacaaggatatgctttggcaggggtgtgtgtgtgtgtgtgtgtgtgtgtgtgttgtgttgtctttcaattatttgctttttttttttactttctttttgtattctatcccagatcacaggaaagttataaaaatcaaaccgtcaccctttagtttgcttgaactttagtaaaccacctgcttagggactttgaacttaaatatatccccttcctcaagtggtgctattttaaaactaaaaaaaactttgaattggcaaaaaaaaaaaaaaaaaaa

SEQ ID NO: 900 - protein, 212 aa, Homo sapien
MGPGPRLLLPLVLCVGLGALVFSSGAEGFRKRGPSVTAKVFFDVRIGDKDVGRIVIGLFGKVVPKTVENFVALATGEKGYGYKGSKFHRVIKDFMIQGGDITTGDGTGGVSIYGETFPDENFKLKHYGIGWVSMANAGPDTNGSQFFITLTKPTWLDGKHVVFGKVIDGMTVVHSIELQATDGHDRPLTNCSIINSGKIDVKTPFVVEIADW

SEQ ID NO: 901 - DNA, 1015 bp, Homo sapien; identical to SEQ ID NO: 899

SEQ ID NO: 902 - protein, 212 aa, Homo sapien; identical to SEQ ID NO: 900

SEQ ID NO: 903 - DNA, 4615 bp, Homo sapien
ccacgcgtccgcccggcgctaagccgggagacaagatccgatctactgagagctgcgaggtactgccctggatgtggtggagctgggctgggacctccgggctgctggtctgtgagcctggctttgaaaattggttactgggtctcctctcaagaaatctcaagatattaaagttactgctgttaaaaagtgcacgagcatagctgtgtctcggaaatggttggctttgggcagttcaggaggaggactccatctcattcagaaagaaggctggaagcacaggctttttctttcacacagggaaggtgcaatttctcaagtcgcctgttgtttacatgatgatgattatgttgctgtagctaccagtcaaggtcttgtggttgtttgggaattaaatcaagagcgtcgtgggaaaccggaacaaatgtatgtgtcttcagaacacaaaggccgaagagtcacagctctctgctgggatacagctattcttagagtttttgtaggtgatcatgctgggaaggtttctgctatcaaactcaatacttctaaacaagcaaaggcagctgctgcttttgtgatgtttcctgttcagacaatcacaactgttgactcctgtgttgtacagttagattatttggatggaaggctacttatatcttcacttactcgatccttcttgtgtgacactgagagagaaaagttttggaaaattggaaacaaggaaagagatggagaatatggagcttgtttctttcctggaagatgttctgggggccagcaacctctgatatattgtgctcgcccaggctctaggatgtgggaagtgaactttgatggagaagttataagtacacatcagttcaagaaactcctctcgttgccacctctccctgtgattactctaagatcagaacctcagtatgatcatacagctggatcctcccagtctttgtctttccccaaactcttacatcttagtgagcattgtgtgctgacttggacagaaagaggaatttatattttcattcctcagaatgttcaagttcttctttggagtgaagtcaaagatattcaggatgtggctgtctgtaggaatgaattgttctgtttgcacctaaatgggaaagtctcacatctctccctgatatctgtggagcgctgtgtggaacgcctgctaagaagaggcctatggaacttggctgctcgtacatgctgtcttttccaaaattctgtcattgccagcagagcaagaaaaactttgactgcagataaattggagcatttgaaatctcagctggaccatggcacctacaatgatctaatttctcaactggaagaattgatcttaaaatttgaacctttggattcagcttgtagcagtagaagaagctccatttcatcacatgaaagtttcagcatcttggactctggtatttatcgtatcattagtagtagaagaggcagtcagtcagatgaagactcttgctcccttcacagccaaaccctctcagaagatgagagatttaaagaattcacctcacagcaggaagaggacctgccagatcagtgttgtggctcacacggaaatgaagacaatgtttctcatgctccagtgatgtttgagacagataagaatgaaacttttctcccgttcggcattccattaccatttcgttctccatctcctcttgtgtctcttcaggctgtcaaagaaagtgtttctagctttgtgcgtaaaactactgagaagattggcacccttcacacgagccctgatctgaaagtgagaccagagctcaggggtgatgagcaatcatgtgaagaggatgtgagttcagatacctgcccaaaggaggaagacactgaggaggaaaaagaggtaactagtccacctccagaagaagacaggttccaggagcttaaagtagcaacagcagaagcaatgaccaagctacaggaccctctggttttatttgaatccgagtctctgagaatggttttacaggagtggctttcacatttagaaaaaacatttgccatgaaggacttttcaggtgtttcagatactgacaactcatccatgaaattgaaccaggatgtgctattagttaatgaatcaaaaaagggaatattagatgaagataatgaaaaagaaaaaagggactctttaggcaatgaagaatctgttgataaaacagcatgtgaatgtgtaaggagtccaagggagtctttggatgacctgtttcaaatatgttctccatgcgccattgcaagtggtcttcggaacgacctggctgaattgacaacattatgtttggagttgaatgtattgaattctaagatcaaaagcaccagtggacatgtggaccacactttgcaacagtactctcctgaaattctggcttgccagttcctgaagaagtacttttttctcctgaacttgaaaagagcgaaggagagtatcaagcttagttacagtaatagcccttctgtttgggatacttttattgaaggattgaaagaaatggcaagttccaatcctgtgtatatggagatggaaaaaggagatctaccaacaaggttaaagttactagatgacgaggttccttttgatagtccgttgttggttgtttatgctacccggttgtatgaaaagtttggggagtctgctcttcgatccttaatcaagttctttccatccattttgccatcggatatcatacaactttgtcatcatcatcctgctgagtttttggcctatttagacagtctggtgaaatcaaggcctgaagatcagcggtcatcttttcttgagtcccttctgcaaccagagtctttaaggttggattggctgcttttggcagtgtcccttgatgctccaccaagcaccagcacaatggatgatgaaggttatcccaggcctcattcacacttgctttcctggggttacagtcagctgatccttcatctaattaaacttcctgcagattttataaccaaagagaaaatgacagacatctgcaggtcttgtggtttctggcctggatatctaattctctgtttggagctggagagaagaagagaggccttcaccaatattgtgtatctgaatgatatgagcctgatgaaaggggacaatggttggatcccagagaccgtggaggaatggaagcttctccttcatctcatacagagcaagagcacgaggccagccccccaggagtcactaaatgggagcctcagtgatgggccttcccccatcaatgtggagaatgtggcacttctgttagctaaggccatgggcccagatcgggcttggtcactgctacaggaatgtggtctggcccttgagttgtcagagaagtttaccagaacctgcgatatcctgaggattgctgagaaaaggcagagggccttgatacaaagcatgcttgaaaaatgcgatcggtttctctggtcccagcaggcctagtgggagaagattcagcaggatgtcatgacattttgagaaaaactaaatcatgctcctgaaccttctgaacgcatttgttattgaaggaaagacaccacccccaaatcctgccatcttattggggctacttttgtcagtgtctgtacccttggcatcggcatctgtgactctttatccatgacctcagtgtttcttaaccaaagttgtactcagcatttcttaaccaaagttgaattttgaaaagagtcagtccttgtttgctggaattagaatgttaatgtcctagtattattccgaactacagtattaactgcttgttgctagtggattagacagattcttttcttactgtggcttccatgttgggagcagaagcttttcatcctggtcacatgaagacagatggtattattgactggagttgaattatttttatatcttgtctggcacaatatggaaattaatgaaataagacggtgtataatggaattaacacccaaaataagtagaacactgaagatttgaatttgatatttaagtaaaatgggactgggtgcagtggctcaggcctgtaatcccaaccctttggaaggtaaagacgggaggatcacttgaggccaggagttcaagaccagcctgggcaacatagtgagaatgcatctctacaaaaaataaaaaaaattagctaggcatagtacctgaggccaggaggtccaggccgcaatgagatgtgtttgtgccattgcacaccagtctgggtgacagagaaagaccctgtctcaaaaacaaattaaataaaatatcttcatatataaattaagctaattaaaaatatttttccctgtatttatttaatattttctaatctgaacccatatacagctgactaattcattcttagaaatgtgttatctgtaatctttcctaaacagagtagcccacaagaatcatgcactttttaaaattatttctaagaagccataacaaagctgtgtactaataaagactgcagcaagcacttgtgttatttaaattatgtaagtagattgtcatttgtcaggctcctgtacatttacatagcatgttatattaataataaatgtaaaatatgactaaagttttcattggaaaaaaaaaaaaaaa

SEQ ID NO: 904 - protein, 1015 aa, Homo sapien
MYVSSEHKGRRVTALCWDTAILRVFVGDHAGKVSAIKLNTSKQAKAAAAFVMFPVQTITTVDSCVVQLDYLDGRLLISSLTRSFLCDTEREKFWKIGNKERDGEYGACFFPGRCSGGQQPLIYCARPGSRMWEVNFDGEVISTHQFKKLLSLPPLPVITLRSEPQYDHTAGSSQSLSFPKLLHLSEHCVLTWTERGIYIFIPQNVQVLLWSEVKDIQDVAVCRNELFCLHLNGKVSHLSLISVERCVERLLRRGLWNLAARTCCLFQNSVIASRARKTLTADKLEHLKSQLDHGTYNDLISQMEELILKFEPLDSACSSRRSSISSHESFSILDSGIYRIISSRRGSQSDEDSCSLHSQTLSEDERFKEFTSQQEEDLPDQCCGSHGNEDNVSHAPVMFETDKNETFLPFGIPLPFRSPSPLVSLQAVKESVSSFVRKTTEKIGTLHTSPDLKVRPELRGDEQSCEEDVSSDTCPKEEDTEEEKEVTSPPPEEDRFQELKVATAEAMTKLQDPLVLFESESLRMVLQEWLSHLEKTFAMKDFSGVSDTDNSSMKLNQDVLLVNESKKGILDEDNEKEKRDSLGNEESVDKTACECVRSPRESLDDLFQICSPCAIASGLRNDLAELTTLCLELNVLNSKIKSTSGHVDHTLQQYSPEILACQFLKKYFFLLNLKRAKESIKLSYSNSPSVWDTFIEGLKEMASSNPVYMEMEKGDLPTRLKLLDDEVPFDSPLLVVYATRLYEKFGESALRSLIKFFPSILPSDIIQLCHHHPAEFLAYLDSLVKSRPEDQRSSFLESLLQPESLRLDWLLLAVSLDAPPSTSTMDDEGYPRPHSHLLSWGYSQLILHLIKLPADFITKEKMTDICRSCGFWPGYLILCLELERRREAFTNIVYLNDMSLMEGDNGWIPETVEEWKLLLHLIQSKSTRPAPQESLNGSLSDGPSPINVENVALLLAKAMGPDRAWSLLQECGLALELSEKFTRTCDILRIAEKRQRALIQSMLEKCDRFLWSQQA

SEQ ID NO: 905 - DNA, 2324 bp, Homo sapien
ctccctttgggcaaggacctgagacccttgtgctaagtcaagaggctcaatgggctgcagaagaactagagaaggaccaagcaaagccatgatatttccatggaaatgtcagagcacccagagggacttatggaacatcttcaagttgtgggggtggacaatgctctgttgtgatttcctggcacatcatggaaccgactgctggacttaccattattctgaaaaacccatgaactggcaaagggctagaagattctgccgagacaattacacagatttagttgccatacaaaacaaggcggaaattgagtatctggagaagactctgcctttcagtcgttcttactactggataggaatccggaagataggaggaatatggacgtgggtgggaaccaacaaatctcttactgaagaagcagagaactggggagatggtgagcccaacaacaagaagaacaaggaggactgcgtggagatctatatcaagagaaacaaagatgcaggcaaatggaacgatgacgcctgccacaaactaaaggcagccctctgttacacagcttcttgccagccctggtcatgcagtggccatggagaatgtgtagaaatcatcaataattacacctgcaactgtgatgtggggtactatgggccccagtgtcagtttgtgattcagtgtgagcctttggaggccccagagctgggtaccatggactgtactcaccctttgggaaacttcagcttcagctcacagtgtgccttcagctgctctgaaggaacaaacttaactgggattgaagaaaccacctgtggaccatttggaaactggtcatctccagaaccaacctgtcaagtgattcagtgtgagcctctatcagcaccagatttggggatcatgaactgtagccatcccctggccagcttcagctttacctctgcatgtaccttcatctgctcagaaggaactgagttaattgggaagaagaaaaccatttgtgaatcatctggaatctggtcaaatcctagtccaatatgtcaaaaattggacaaaagtttctcaatgattaaggagggtgattataaccccctcttcattccagtggcagtcatggttactgcattctctgggttggcatttatcatttggctggcaaggagattaaaaaaaggcaagaaatccaagagaagtatgaatgacccatattaaatcgcccttggtgaaagaaaattcttggaatactaaaaatcatgagatcctttaaatccttccatgaaacgttttgtgtggtggcacctcctacgtcaaacatgaagtgtgtttccttcagtgcatctgggaagatttctacctgaccaacagttccttcagcttccatttcgcccctcatttatccctcaacccccagcccacaggtgtttatacagctcagctttttgtcttttctgaggagaaacaaataagaccataaagggaaaggattcatgtggaatataaagatggctgactttgctctttcttgactcttgttttcagtttcaattcagtgctgtacttgatgacagacacttctaaatgaagtgcaaatttgatacatatgtgaatatggactcagttttcttgcagatcaaatttcacgtcgtcttctgtatactgtggaggtacactcttatagaaagttcaaaaagtctacgctctcctttctttctaactccagtgaagtaatggggtcctgctcaagttgaaagagtcctatttgcactgtagcctcgccgtctgtgaattggaccatcctatttaactggcttcagcctccccaccttcttcagccacctctctttttcagttggctgacttccacacctagcatctcatgagtgccaagcaaaaggagagaagagagaaatagcctgcgctgttttttagtttgggggttttgctgtttccttttatgagacccattcctatttcttatagtcaatgtttcttttatcacgatattattagtaagaaaacatcactgaaatgctagctgcaagtgacatctctttgatgtcatatggaagagttaaaacaggtggagaaattccttgattcacaatgaaatgctctcctttcccctgcccccagaccttttatccacttacctagattctacatattctttaaatttcatctcaggcctccctcaaccccaccacttcttttataactagtcctttactaatccaacccatgatgagctcctcttcctggcttcttactgaaaggttaccctgtaacatgcaattttgcatttgaataaagcctgctttttaagtgttaa

SEQ ID NO: 906 - protein, 372 aa, Homo sapien [sequence omitted]

SEQ ID NO: 907 - DNA, 734 bp, Homo sapien
gaaagtcagtgagcaaatcgcggaccaccggggctgccagctcgcctgactcccggcctcttgcgctcctaggggcggagaagggtgcgggctcttcgccctttgtgtcctccttctttcactaacttctggactttccagctcttccgaagttcgttcttgcgcaaagcccaaaggctggaaaaccgtccacgatgaccagcatgactcagtctctgcgggaggtgataaaggccatgaccaaggctcgcaattttgagagagttttgggaaagattactcttgtctctgctgctcctgggaaagtgatttgtgaaatgaaagtagaagaagagcataccaatgcaataggcactctccacggcggtttgacagccacgttagtagataacatatcaacaatggctctgctatgcacggaaaggggagcacccggagtcagtgtcgatatgaacataacgtacatgtcacctgcaaaattaggagaagatatagtgattacagcacatgttctgaagcaaggaaaaacacttgcatttacctctgtggatctgaccaacaaggccacaggaaaattaatagcacaaggaagacacacaaaacacctgggaaactgagagaacagcagaatgacctaaagaaacccaacaatgaatatcaagtatagatttgactcaaacaattgtaatttttgaaataaactagcaaaaccagaaaaaaaaaaaaaaaaaaaa

SEQ ID NO: 908 - protein, 140 aa, Homo sapien
MTSMTQSLREVIKAMTKARNFERVLGKITLVSAAPGKVICEMKVEEEHTNAIGTLHGGLTATLVDNISTMALLCTERGAPGVSVDMNITYMSPAKLGEDIVITAHVLKQGKTLAFTSVDLTNKATGKLIAQGRHTKHLGN

SEQ ID NO: 909 - DNA, 2930 bp, Homo sapien
gaattccggtttcttcctaaaaaatgtctgatggccgctttctcggtcggcaccgccatgaatgccagcagttactctgcagagatgacggagcccaagtcggtgtgtgtctcggtggatgaggtggtgtccagcaacatggaggccactgagacggacctgctgaatggacatctgaaaaaagtagataataacctcacggaagcccagcgcttctcctccttgcctcggagggcagctgtgaacattgaattcagggacctttcctattcggttcctgaaggaccctggtggaggaagaaaggatacaagaccctcctgaaaggaatttccgggaagttcaatagtggtgagttggtggccattatgggtccttccggggccgggaagtccacgctgatgaacatcctggctggatacagggagacgggcatgaagggggccgtcctcatcaacggcctgccccgggacctgcgctgcttccggaaggtgtcctgctacatcatgcaggatgacatgctgctgccgcatctcactgtgcaggaggccatgatggtgtcggcacatctgaagcttcaggagaaggatgaaggcagaagggaaatggtcaaggagatactgacagcgctgggcttgctgtcttgcgccaacacgcggaccgggagcctgtcaggtggtcagcgcaagcgcctggccatcgcgctggagctggtgaacaaccctccagtcatgttcttcgatgagcccaccagcggcctggacagcgcctcctgcttccaggtggtctcgctgatgaaagggctcgctcaagggggtcgctccatcatttgcaccatccaccagcccagcgccaaactcttcgagctgttcgaccagctttacgtcctgagtcaaggacaatgtgtgtaccggggaaaagtctgcaatcttgtgccatatttgagggatttgggtctgaactgcccaacctaccacaacccagcagattttgtcatggaggttgcatccggcgagtacggtgatcagaacagtcggctggtgagagcggttcgggagggcatgtgtgactcagaccacaagagagacctcgggggtgatgccgaggtgaacccttttctttggcaccgcccctctgaagaggtaaagcagacaaaacgattaaaggggttgagaaaggactcctcgtccatggaaggctgccacagcttctctgccagctgcctcacgcagttctgcatcctcttcaagaggaccttcctcagcatcatgagggactcggtcctgacacacctgcgcatcacctcgcacattgggatcggcctcctcattggcctgctgtacttggggatcgggaacgaaaccaagaaggtcttgagcaactccggcttcctcttcttctccatgctgttcctcatgttcgcggccctcatgcctactgttctgacatttcccctggagatgggagtctttcttcgggaacacctgaactactggtacagcctgaaggcctactacctggccaagaccatggcagacgtgccctttcagatcatgttcccagtggcctactgcagcatcgtgtactggatgacgtcgcagccgtccgacgccgtgcgctttgtgctgtttgccgcgctgggcaccatgacctccctggtggcacagtccctgggcctgctgatcggagccgcctccacgtccctgcaggtggccactttcgtgggcccagtgacagccatcccggtgctcctgttctcggggttcttcgtcagcttcgacaccatccccacgtacctacagtggatgtcctacatctcctatgtcaggtatgggttcgaaggggtcatcctctccatctatggcttagaccgggaagatctgcactgtgacatcgacgagacgtgccacttccagaagtcggaggccatcctgcgggagctggacgtggaaaatgccaagctgtacctggacttcatcgtactcgggattttcttcatctccctccgcctcattgcctatttggtcctcaggtacaaaatccgggcagagaggtaaaacacctgaatgccaggaaacaggaagattagacactgtggccgagggcacgtctagaatcgaggaggcaagcctgtgcccgaccgacgacacagagactcttctgatccaacccctagaaccgcgttgggtttgtgggtgtctcgtgctcagccactctgcccagctgggttggatcttctctccattcccctttctagctttaactaggaagatgtaggcagattggtggttttttttttttttttaacatacagaattttaaataccacaactggggcagaatttaaagctgcaacacagctggtgatgagaggcttcctcagtccagtcgctccttagcaccaggcaccgtgggtcctggatggggaactgcaagcagcctctcagctgatggctgcacagtcagatgtctggtggcagagagtccgagcatggagcgattccattttatgactgttgtttttcacattttcatctttctaaggtgtgtctcttttccaatgagaagtcatttttgcaagccaaaagtcgatcaatcgcattcattttaagaaattatacctttttagtacttgctgaagaatgattcagggtaaatcacatactttgtttagagaggcgaggggtttaacccgagtcacccagctggtctcatacatagacagcacttgtgaaggattgaatgcaggttccaggtggagggaagacgtggacaccatctccactgagccatgcagacatttttaaaagctatacacaaaattgtgagaagacattggccaactctttcaaagtctttctttttccacgtgcttcttattttaagcgaaatatattgtttgtttcttcctaaaaaaaaaaaaaaaaaaaaa

SEQ ID NO: 910 - protein, 674 aa, Homo sapien
MAAFSVGTAMNASSYSAEMTEPKSVCVSVDEVVSSNMEATETDLLNGHLKKVDNNLTEAQRFSSLPRRAAVNIEFRDLSYSVPEGPWWRKKGYKTLLKGISGKFNSGELVAIMGPSGAGKSTLMNILAGYRETGMKGAVLINGLPRDLRCFRKVSCYIMQDDMLLPHLTVQEAMMVSAHLKLQEKDEGRREMVKEILTALGLLSCANTRTGSLSGGQRKRLAIALELVNNPPVMFFDEPTSGLDSASCFQVVSLMKGLAQGGRSIICTIHQPSAKLFELFDQLYVLSQGQCVYRGKVCNLVPYLRDLGLNCPTYHNPADFVMEVASGEYGDQNSRLVRAVREGMCDSDHKRDLGGDAEVNPFLWHRPSEEVKQTKRLKGLRKDSSSMEGCHSFSASCLTQFCILFKRTFLSIMRDSVLTHLRITSHIGIGLLIGLLYLGIGNETKKVLSNSGFLFFSMLFLMFAALMPTVLTFPLEMGVFLREHLNYWYSLKAYYLAKTMADVPFQIMFPVAYCSIVYWMTSQPSDAVRFVLFAALGTMTSLVAQSLGLLIGAASTSLQVATFVGPVTAIPVLLFSGFFVSFDTIPTYLQWMSYISYVRYGFEGVILSIYGLDREDLHCDIDETCHFQKSEAILRELDVENAKLYLDFIVLGIFFISLRLIAYLVLRYKIRAER

SEQ ID NO: 911 - DNA, 1807 bp, Homo sapien
tctgtggccggaggctgatcagtgttctagaacagatcagacattttgtaatgatgcctgaaataaacactaaccacctcgacaagcaacaggttcaactcctggcagagatgtgtatccttattgatgaaaatgacaataaaattggagctgagaccaagaagaattgtcacctgaacgagaacattgagaaaggattattgcatcgagcttttagtgtcttcttattcaacaccgaaaataagcttctgctacagcaaagatcagatgctaagattacctttccaggttgttttacgaatacgtgttgtagtcatccattaagcaatccagccgagcttgaggaaagtgacgcccttggagtgaggcgagcagcacagagacggctgaaagctgagctaggaattcccttggaagaggttcctccagaagaaattaattatttaacacgaattcactacaaagctcagtctgatggtatctggggtgaacatgaaattgattacattttgttggtgaggaagaatgtaactttgaatccagatcccaatgagattaaaagctattgttatgtgtcaaaggaagaactaaaagaacttctgaaaaaagcagccagtggtgaaattaagataacgccatggtttaaaattattgcagcgacttttctctttaaatggtgggataacttaaatcatttgaatcagtttgttgaccatgagaaaatatacagaatgtgaatatgtaggtaaatgattacagaaaaatttatgtgcttaacaaacttagaatgactttttccttttaaatttagttctatcattaatttatcattaaatttagttctatcatttggtactatcattaatgtattataaaacttgtgtggaaaaaactaacttataattttgtatcacacaccctggatatgtgttctgtttctaagcgacatttgtgagagattattgtaaaatgagagcgagaaataaaacttaatttaatctttgcagatacatacttatgggaaatttgaacaaatgagtgaaactctgtttttagtaggccgtgataaacatttccggagcacttgcagaggacttgctatttgccaggtgctttatgtatcattaaatttttctcatagttcagaaaaatgtgcaaaggaaactattgtctcgctccttcaaaacagtcttaattaactttcatattagcagattaaactagcagagcaaggttcaaattaaatgatatgaccctaatttgtatcattctgagttgattgtgtggtttattcattctgaaacatgttgatacttacagtcaccgactgcttttgataagtgatattgattaggttgaatcttcttgtaaatagtatttaccagttagcaaagtctgtgttttcagaattacagtgagcacagaggtgttcataaaatgggaattgagtcccactcggtaagagttgcttaaacttgacactgttgacatttgggctggataaaacccctgtggtggggtctgtgctgtgcattgcaggatggtgagcagcgtccctctcatgtgacacccacagttatgccggatgttgccagatgcccctagggacagagtcaacccccaactgaggaccactgtctacagagtcaggaaatattgtagggagaaaaaaataacaacaacaaaggcctatattaatgttaaatagaggagattatggaatgtgtatattaatgttaaaaattattccttattcaatgtatttttatcaaatcgatagatatctcagatttgaaactcaagacag

SEQ ID NO: 912 - protein, 228 aa, Homo sapien
MMPEINTNHLDKQQVQLLAEMCILIDENDNKIGAETKKNCHLNENIEKGLLHRAFSVFLFNTENKLLLQQRSDAKITFPGCFTNTCCSHPLSNPAELEESDALGVRRAAQRRLKAELGIPLEEVPPEEINYLTRIHYKAQSDGIWGEHEIDYILLVRKNVTLNPDPNEIKSYCYVSKEELKELLKKAASGEIKITPWFKIIAATFLFKWWDNLNHLNQFVDHEKIYRM

SEQ ID NO: 913 - DNA, 763 bp, Homo sapien
taatataggtactttgtccctgattaaataatgtgacggatagaatgcatcaagtgtttattatgaaaagagtggaaaagtatatagcttttagcaaaaggtgtttgcccattctaagaaatgagcgaatatatagaaatagtgtgggcatttcttcctgttaggtggagtgtatgtgttgacatttctccccatctcttcccactctgttttctccccattatttgaataaagtgactgctgaagatgactttgaatccttatccacttaatttaatgtttaaagaaaaacctgtaatggaaagtgagactccttccctaatttcagtttagagcaacttgaagaagagtagacaaaaaataaaatgcacatagaaaaagagaaaaagggcacaaagggattggcccaatattgattcttttttataaaacctcctttggcttagaaggaatgactctagctacaataatacacagtatgtttaagcaggttcccttggttgttgcattaaatgtaatccacctttaggtattttagagcacagaacaacactgtgttgatctagtaggtttctatttttcctttctctttacaatgcacataatactttcctgtatttatatcataacgtgtatagtgtaaaatgtgaatgactttttttgtgaatgaaaatctaaaatctttgtaactttttatatctgcttttgtttcaccaaagaaacctaaaatccttcttttactacaaaaaaaaaaaaaaagggc

SEQ ID NO: 914 - protein, 9 aa, Homo sapien
NIGTLSLIK

SEQ ID NO: 915 - DNA, 11185 bp, Homo sapien
gctgccccgagcctttctggggaagaactccaggcgtgcggacgcaacagccgagaacattaggtgttgtggacaggagctgggaccaagatcttcggccagccccgcatcctcccgcatcttccagcaccgtcccgcaccctccgcatccttccccgggccaccacgcttcctatgtgacccgcctgggcaacgccgaacccagtcgcgcagcgctgcagtgaattttccccccaaactgcaataagccgccttccaaggccaagatgttcataaatataaagagcatcttatggatgtgttcaaccttaatagtaacccatgcgctacataaagtcaaagtgggaaaaagcccaccggtgaggggctccctctctggaaaagtcagcctaccttgtcatttttcaacgatgcctactttgccacccagttacaacaccagtgaatttctccgcatcaaatggtctaagattgaagtggacaaaaatggaaaagatttgaaagagactactgtccttgtggcccaaaatggaaatatcaagattggtcaggactacaaagggagagtgtctgtgcccacacatcccgaggctgtgggcgatgcctccctcactgtggtcaagctgctggcaagtgatgcgggtctttaccgctgtgacgtcatgtacgggattgaagacacacaagacacggtgtcactgactgtggatggggttgtgtttcactacagggcggcaaccagcaggtacacactgaattttgaggctgctcagaaggcttgtttggacgttggggcagtcatagcaactccagagcagctctttgctgcctatgaagatggatttgagcagtgtgacgcaggctggctggctgatcagactgtcagatatcccatccgggctcccagagtaggctgttatggagataagatgggaaaggcaggagtcaggacttatggattccgttctccccaggaaacttacgatgtgtattgttatgtggatcatctggatggtgatgtgttccacctcactgtccccagtaaattcaccttcgaggaggctgcaaaagagtgtgaaaaccaggatgccaggctggcaacagtgggggaactccaggcggcatggaggaacggctttgaccagtgcgattacgggtggctgtcggatgccagcgtgcgccaccctgtgactgtggccagggcccagtgtggaggtggtctacttggggtgagaaccctgtatcgttttgagaaccagacaggcttccctccccctgatagcagatttgatgcctactgctttaaacctaaagaggctacaaccatcgatttgagtatcctcgcagaaactgcatcacccagtttatccaaagaaccacaaatggtttctgatagaactacaccaatcatccctttagttgatgaattacctgtcattccaacagagttccctcccgtgggaaatattgtcagttttgaacagaaagccacagtccaacctcaggctatcacagatagtttagccaccaaattacccacacctactggcagtaccaagaagccctgggatatggatgactactcaccttctgcttcaggacctcttggaaagctagacatatcagaaattaaggaagaagtgctccagagtacaactggcgtctctcattatgctacggattcatgggatggtgtcgtggaagataaacaaacacaagaatcggttacacagattgaacaaatagaagtgggtcctttggtaacatctatggaaatcttaaagcacattccttccaaggaattccctgtaactgaaacaccattggtaactgcaagaatgatcctggaatccaaaactgaaaagaaaatggtaagcactgtttctgaattggtaaccacaggtcactatggattcaccttgggagaagaggatgatgaagacagaacacttacagttggatctgatgagagcaccttgatctttgaccaaattcctgaagtcattacggtgtcaaagacttcagaagacaccatccacactcatttagaagacttggagtcagtctcagcatccacaactgtttcccctttaattatgcctgataataatggatcatccatggatgactgggaagagagacaaactagtggtaggataacggaagagtttcttggcaaatatctgtctactacaccttttccatcacagcatcgtacagaaatagaattgtttccttattctggtgataaaatattagtagagggaatttccacagttatttatccttctctacaaacagaaatgacacatagaagagaaagaacagaaacactaataccagagatgagaacagatacttatacagatgaaatacaagaagagatcactaaaagtccatttatgggaaaaacagaagaagaagtcttctctgggatgaaactctctacatctctctcagagccaattcatgttacagagtcttctgtggaaatgaccaagtcttttgatttcccaacattgataacaaagttaagtgcagagccaacagaagtaagagatatggaggaagactttacagcaactccaggtactacaaaatatgatgaaaatattacaacagtgcttttggcccatggtactttaagtgttgaagcagccactgtatcaaaatggtcatgggatgaagataatacaacatccaagcctttagagtctacagaaccttcagcctcttcaaaattgccccctgccttactcacaactgtggggatgaatggaaaggataaagacatcccaagtttcactgaagatggagcagatgaatttactcttattccagatagtactcaaaagcagttagaggaggttactgatgaagacatagcagcccatggaaaattcacaattagatttcagccaactacatcaactggtattgcagaaaagtcaactttgagagattctacaactgaagaaaaagttccacctatcacaagcactgaaggccaagtttatgcaaccatggaaggaagtgctttgggtgaagtagaagatgtggacctctctaagccagtatctactgttccccaatttgcacacacttcagaggtggaaggattagcatttgttagttatagtagcacccaagagcctactacttatgtagactcttcccataccattcctctttctgtaattcccaagacagactggggagtgttagtaccttctgttccatcagaagatgaagttctaggtgaaccctctcaagacatacttgtcattgatcagactcgccttgaagcgactatttctccagaaactatgagaacaacaaaaatcacagagggaacaactcaggaagaattcccttggaaagaacagactgcagagaaaccagttcctgctctcagttctacagcttggactcccaaggaggcagtaacaccactggatgaacaagagggcgatggatcagcatatacagtctctgaagatgaattgttgacaggttctgagagggtcccagttttagaaacaactccagttggaaaaattgatcacagtgtgtcttatccaccaggtgctgtaactgagcacaaagtgaaaacagatgaagtggtaacactaacaccacgcattgggccaaaagtatctttaagtccagggcctgaacaaaaatatgaaacagaaggtagtagtacaacaggatttacatcatctttgagtccttttagtacccacattacccagcttatggaagaaaccactactgagaaaacatccctagaggatattgatttaggctcaggattatttgaaaagcccaaagccacagaactcatagaattttcaacaatcaaagtcacagttccaagtgatattaccactgccttcagttcagtagacagacttcacacaacttcagcattcaagccatcttccgcgatcactaagaaaccacctctcatcgacagggaacctggtgaagaaacaaccagtgacatggtaatcattggagaatcaacatctcatgttcctcccactacccttgaagatattgtagccaaggaaacagaaaccgatattgatagagagtatttcacgacttcaagtcctcctgctacacagccaacaagaccacccactgtggaagacaaagaggcctttggacctcaggcgctttctacgccacagcccccagcaagcacaaaatttcaccctgacattaatgtttatattattgaggtcagagaaaataagacaggtcgaatgagtgatttgagtgtaattggtcatccaatagattcagaatctaaagaagatgaaccttgtagtgaagaaacagatccagtgcatgatctaatggctgaaattttacctgaattccctgacataattgaaatagacctataccacagtgaagaaaatgaagaagaagaagaagagtgtgcaaatgctactgatgtgacaaccaccccatctgtgcagtacataaatgggaagcatctcgttaccactgtgcccaaggacccagaagctgcagaagctaggcgtggccagtttgaaagtgttgcaccttctcagaatttctcggacagctctgaaagtgatactcatccatttgtaatagccaaaacggaattgtctactgctgtgcaacctaatgaatctacagaaacaactgagtctcttgaagttacatggaagcctgagacttaccctgaaacatcagaacatttttcaggtggtgagcctgatgttttccccacagtcccattccatgaggaatttgaaagtggaacagccaaaaaaggggcagaatcagtcacagagagagatactgaagttggtcatcaggcacatgaacatactgaacctgtatctctgtttcctgaagagtcttcaggagagattgccattgaccaagaatctcagaaaatagcctttgcaagggctacagaagtaacatttggtgaagaggtagaaaaaagtacttctgtcacatacactcccactatagttccaagttctgcatcagcatatgtttcagaggaagaagcagttaccctaataggaaatccttggccagatgacctgttgtctaccaaagaaagctgggtagaagcaactcctagacaagttgtagagctctcagggagttcttcgattccaattacagaaggctctggagaagcagaagaagatgaagatacaatgttcaccatggtaactgatttatcacagagaaatactactgatacactcattactttagacactagcaggataatcacagaaagcttttttgaggttcctgcaaccaccatttatccagtttctgaacaaccttctgcaaaagtggtgcctaccaagtttgtaagtgaaacagacacttctgagtggatttccagtaccactgttgaggaaaagaaaaggaaggaggaggagggaactacaggtacggcttctacatttgaggtatattcatctacacagagatcggatcaattaattttaccctttgaattagaaagtccaaatgtagctacatctagtgattcaggtaccaggaaaagttttatgtccttgacaacaccaacacagtctgaaagggaaatgacagattctactcctgtctttacagaaacaaatacattagaaaatttgggggcacagaccactgagcacagcagtatccatcaacctggggttcaggaagggctgaccactctcccacgtagtcctgcctctgtctttatggagcagggctctggagaagctgctgccgacccagaaaccaccactgtttcttcattttcattaaacgtagagtatgcaattcaagccgaaaaggaagtagctggcactttgtctccgcatgtggaaactacattctccactgagccaacaggactggttttgagtacagtaatggacagagtagttgctgaaaatataacccaaacatccagggaaatagtgatttcagagcgattaggagaaccaaattatggggcagaaataaggggcttttccacaggttttcctttggaggaagatttcagtggtgactttagagaatactcaacagtgtctcatcccatagcaaaagaagaaacggtaatgatggaaggctctggagatgcagcatttagggacacccagacttcaccatctacagtacctacttcagttcacatcagtcacatatctgactcagaaggacccagtagcaccatggtcagcacttcagccttcccctgggaagagtttacatcctcagctgagggctcaggtgagcaactggtcacagtcagcagctctgttgttccagtgcttcccagtgctgtgcaaaagttttctggtacagcttcctccattatcgacgaaggattgggagaagtgggtactgtcaatgaaattgatagaagatccaccattttaccaacagcagaagtggaaggtacgaaagctccagtagagaaggaggaagtaaaggtcagtggcacagtttcaacaaactttccccaaactatagagccagccaaattatggtctaggcaagaagtcaaccctgtaagacaagaaattgaaagtgaaacaacatcagaggaacaaattcaagaagaaaagtcatttgaatcccctcaaaactctcctgcaacagaacaaacaatctttgattcacagacatttactgaaactgaactcaaaaccacagattattctgtactaacaacaaagaaaacttacagtgatgataaagaaatgaaggaggaagacacttctttagttaacatgtctactccagatccagatgcaaatggcttggaatcttacacaactctccctgaagctactgaaaagtcacattttttcttagctactgcattagtaactgaatctataccagctgaacatgtagtcacagattcaccaatcaaaaaggaagaaagtacaaaacattttccgaaaggcatgagaccaacaattcaagagtcagatactgagctcttattctctggactgggatcaggagaagaagttttacctactctaccaacagagtcagtgaattttactgaagtggaacaaatcaataacacattatatccccacacttctcaagtggaaagtacctcaagtgacaaaattgaagactttaacagaatggaaaatgtggcaaaagaagttggaccactcgtatctcaaacagacatctttgaaggtagtgggtcagtaaccagcacaacattaatagaaattttaagtgacactggagcagaaggacccacggtggcacctctccctttctccacggacatcggacatcctcaaaatcagactgtcaggtgggcagaagaaatccagactagtagaccacaaaccataactgaacaagactctaacaagaattcttcaacagcagaaattaacgaaacaacaacctcatctactgattttctggctagagcttatggttttgaaatggccaaagaatttgttacatcagcaccaaaaccatctgacttgtattatgaaccttctggagaaggatctggagaagtggatattgttgattcatttcacacttctgcaactactcaggcaaccagacaagaaagcagcaccacatttgtttctgatgggtccctggaaaaacatcctgaggtgccaagcgctaaagctgttactgctgatggattcccaacagtttcagtgatgctgcctcttcattcagagcagaacaaaagctcccctgatccaactagcacactgtcaaatacagtgtcatatgagaggtccacagacggtagtttccaagaccgtttcagggaattcgaggattccaccttaaaacctaacagaaaaaaacccactgaaaatattatcatagacctggacaaagaggacaaggatttaatattgacaattacagagagtaccatccttgaaattctacctgagctgacatcggataaaaatactatcatagatattgatcatactaaacctgtgtatgaagacattcttggaatgcaaacagatatagatacagaggtaccatcagaaccacatgacagtaatgatgaaagtaatgatgacagcactcaagttcaagagatctatgaggcagctgtcaacctttctttaactgaggaaacatttgagggctctgctgatgttctggctagctacactcaggcaacacatgatgaatcaatgacttatgaagatagaagccaactagatcacatgggctttcacttcacaactgggatccctgctcctagcacagaaacagaattagacgttttacttcccacggcaacatccctgccaattcctcgtaagtctgccacagttattccagagattgaaggaataaaagctgaagcaaaagccctggatgacatgtttgaatcaagcactttgtctgatggtcaagctattgcagaccaaagtgaaataataccaacattgggccaatttgaaaggactcaggaggagtatgaagacaaaaaacatgctggtccttcttttcagccagaattctcttcaggagctgaggaggcattagtagaccatactccctatctaagtattgctactacccaccttatggatcagagtgtaacagaggtgcctgatgtgatggaaggatccaatcccccatattacactgatacaacattagcagtttcaacatttgcgaagttgtcttctcagacaccatcatctcccctcactatctactcaggcagtgaagcctctggacacacagagatcccccagcccagtgctctgccaggaatagacgtcggctcatctgtaatgtccccacaggattcttttaaggaaattcatgtaaatattgaagcaactttcaaaccatcaagtgaggaataccttcacataactgagcctccctctttatctcctgacacaaaattagaaccttcagaagatgatggtaaacctgagttattagaagaaatggaagcttctcccacagaacttattgctgtggaaggaactgagattctccaagatttccaaaacaaaaccgatggtcaagtttctggagaagcaatcaagatgtttcccaccattaaaacacctgaggctggaactgttattacaactgccgatgaaattgaattagaaggtgctacacagtggccacactctacttctgcttctgccacctatggggtcgaggcaggtgtggtgccttggctaagtccacagacttctgagaggcccacgctttcttcttctccagaaataaaccctgaaactcaagcagctttaatcagagggcaggattccacgatagcagcatcagaacagcaagtggcagcgagaattcttgattccaatgatcaggcaacagtaaaccctgtggaatttaatactgaggttgcaacaccaccattttcccttctggagacttctaatgaaacagatttcctgattggcattaatgaagagtcagtggaaggcacggcaatctatttaccaggacctgatcgctgcaaaatgaacccgtgccttaacggaggcacctgttatcctactgaaacttcctacgtatgcacctgtgtgccaggatacagcggagaccagtgtgaacttgattttgatgaatgtcactctaatccctgtcgtaatggagccacttgtgttgatggttttaacacattcaggtgcctctgccttccaagttatgttggtgcactttgtgagcaagataccgagacatgtgactatggctggcacaaattccaagggcagtgctacaaatactttgcccatcgacgcacatgggatgcagctgaacgggaatgccgtctgcagggtgcccatctcacaagcatcctgtctcacgaagaacaaatgtttgttaatcgtgtgggccatgattatcagtggataggcctcaatgacaagatgtttgagcatgacttccgttggactgatggcagcacactgcaatacgagaattggagacccaaccagccagacagcttcttttctgctggagaagactgtgttgtaatcatttggcatgagaatggccagtggaatgatgttccctgcaattaccatctcacctatacgtgcaagaaaggaacagttgcttgcggccagccccctgttgtagaaaatgccaagacctttggaaagatgaaacctcgttatgaaatcaactccctgattagataccactgcaaagatggtttcattcaacgtcaccttccaactatccggtgcttaggaaatggaagatgggctatacctaaaattacctgcatgaacccatctgcataccaaaggacttattctatgaaatactttaaaaattcctcatcagcaaaggacaattcaataaatacatccaaacatgatcatcgttggagccggaggtggcaggagtcgaggcgctgatccctaaaatggcgaacatgtgttttcatcatttcagccaaagtcctaacttcctgtgcctttcctatcacctcgagaagtaattatcagttggtttggatttttggaccaccgttcagtcattttgggttgccgtgctcccaaaacattttaaatgaaagtattggcattcaaaaagacagcagacaaaatgaaagaaaatgagagcagaaagtaagcatttccagcctatctaatttctttagttttctatttgcctccagtgcagtccatttcctaatgtataccagcctactgtactatttaaaatgctcaatttcagcaccgatggccatgtaaataagatgatttaatgttgattttaatcctgtatataaaataaaaagtcacaatgagtttgggcatatttaatgatgattatggagccttagaggtctttaatcattggttcggctgcttttatgtagtttaggctggaaatggtttcacttgctctttgactgtcagcaagactgaagatggcttttcctggacagctagaaaacacaaaatcttgtaggtcattgcacctatctcagccataggtgcagtttgcttctacatgatgctaaaggctgcgaatgggatcctgatggaactaaggactccaatgtcgaactcttctttgctgcattcctttttcttcacttacaagaaaggcctgaatggaggacttttctgtaaccagg

SEQ ID NO: 916 - protein, 2000 aa, Homo sapien
MFINIKSILWMCSTLIVTHALHKVKVGKSPPVRGSLSGKVSLPCHFSTMPTLPPSYNTSEFLRIKWSKIEVDKNGKDLKETTVLVAQNGNIKIGQDYKGRVSVPTHPEAVGDASLTVVKLLASDAGLYRCDVMYGIEDTQDTVSLTVDGVVFHYRAATSRYTLNFEAAQKACLDVGAVIATPEQLFAAYEDGFEQCDAGWLADQTVRYPIRAPRVGCYGDKMGKAGVRTYGFRSPQETYDVYCYVDHLDGDVFHLTVPSKFTFEEAAKECENQDARLATVGELQAAWRNGFDQCDYGWLSDASVRHPVTVARAQCGGGLLGVRTLYRFENQTGFPPPDSRFDAYCFKPKEATTIDLSILAETASPSLSKEPQMVSDRTTPIIPLVDELPVIPTEFPPVGNIVSFEQKATVQPQAITDSLATKLPTPTGSTKKPWDMDDYSPSASGPLGKLDISEIKEEVLQSTTGVSHYATDSWDGVVEDKQTQESVTQIEQIEVGPLVTSMEILKHIPSKEFPVTETPLVTARMILESKTEKKMVSTVSELVTTGHYGFTLGEEDDEDRTLTVGSDESTLIFDQIPEVITVSKTSEDTIHTHLEDLESVSASTTVSPLIMPDNNGSSMDDWEERQTSGRITEEFLGKYLSTTPFPSQHRTEIELFPYSGDKILVEGISTVIYPSLQTEMTHRRERTETLIPEMRTDTYTDEIQEEITKSPFMGKTEEEVFSGMKLSTSLSEPIHVTESSVEMTKSFDFPTLITKLSAEPTEVRDMEEDFTATPGTTKYDENITTVLLAHGTLSVEAATVSKWSWDEDNTTSKPLESTEPSASSKLPPALLTTVGMNGKDKDIPSFTEDGADEFTLIPDSTQKQLEEVTDEDIAAHGKFTIRFQPTTSTGIAEKSTLRDSTTEEKVPPITSTEGQVYATMEGSALGEVEDVDLSKPVSTVPQFAHTSEVEGLAFVSYSSTQEPTTYVDSSHTIPLSVIPKTDWGVLVPSVPSEDEVLGEPSQDILVIDQTRLEATISPETMRTTKITEGTTQEEFPWKEQTAEKPVPALSSTAWTPKEAVTPLDEQEGDGSAYTVSEDELLTGSERVPVLETTPVGKIDHSVSYPPGAVTEHKVKTDEVVTLTPRIGPKVSLSPGPEQKYETEGSSTTGFTSSLSPFSTHITQLMEETTTEKTSLEDIDLGSGLFEKPKATELIEFSTIKVTVPSDITTAFSSVDRLHTTSAFKPSSAITKKPPLIDREPGEETTSDMVIIGESTSHVPPTTLEDIVAKETETDIDREYFTTSSPPATQPTRPPTVEDKEAFGPQALSTPQPPASTKFHPDINVYIIEVRENKTGRMSDLSVIGHPIDSESKEDEPCSEETDPVHDLMAEILPEFPDIIEIDLYHSEENEEEEEECANATDVTTTPSVQYINGKHLVTTVPKDPEAAEARRGQFESVAPSQNFSDSSESDTHPFVIAKTELSTAVQPNESTETTESLEVTWKPETYPETSEHFSGGEPDVFPTVPFHEEFESGTAKKGAESVTERDTEVGHQAHEHTEPVSLFPEESSGEIAIDQESQKIAFARATEVTFGEEVEKSTSVTYTPTIVPSSASAYVSEEEAVTLIGNPWPDDLLSTKESWVEATPRQVVELSGSSSIPITEGSGEAEEDEDTMFTMVTDLSQRNTTDTLITLDTSRIITESFFEVPATTIYPVSEQPSAKVVPTKFVSETDTSEWISSTTVEEKKRKEEEGTTGTASTFEVYSSTQRSDQLILPFELESPNVATSSDSGTRKSFMSLTTPTQSEREMTDSTPVFTETNTLENLGAQTTEHSSIHQPGVQEGLTTLPRSPASVFMEQGSGEAAADPETTTVSSFSLNVEYAIQAEKEVAGTLSPHVETTFSTEPTGLVLSTVMDRVVAENITQTSREIVISERLGEPNYGAEIRGFSTGFPLEEDFSGDFREYSTVSHPIAKEETVMMEGSGDAAFRDTQTSPSTVPTSVHISHISDSEGPSSTMVSTSAFP

SEQ ID NO: 917 - DNA, 3427 bp, Homo sapien
gctcgcgcacggctccgcggtcccttttgcctgtccagccggccgcctgtccctgctccctccctccgtgagtgtccgggttcccttcgcccagctctcccacccctacccgaccccggcgcccgggctcccagagggaactgcacttcggcagagttgaatgaatgaagagagacgcggagaactcctaaggaggagattggacaggctggactccccattgcttttctaaaaatcttggaaactttgtccttcattgaattacgacactgtccacctttaatttcctcgaaaacgcctgtaactcggctgaagccatgccttgtgttcaggcgcagtatgggtcctcgcctcaaggagccagccccgcttctcagagctacagttaccactcttcgggagaatacagctccgatttcttaactccagagtttgtcaagtttagcatggacctcaccaacactgaaatcactgccaccacttctctccccagcttcagtacctttatggacaactacagcacaggctacgacgtcaagccaccttgcttgtaccaaatgcccctgtccggacagcagtcctccattaaggtagaagacattcagatgcacaactaccagcaacacagccacctgcccccccagtctgaggagatgatgccgcactccgggtcggtttactacaagccctcctcgcccccgacgcccaccaccccgggcttccaggtgcagcacagccccatgtgggacgacccgggatctctccacaacttccaccagaactacgtggccactacgcacatgatcgagcagaggaaaacgccagtctcccgcctctccctcttctcctttaagcaatcgccccctggcaccccggtgtctagttgccagatgcgcttcgacgggcccctgcacgtccccatgaacccggagcccgccggcagccaccacgtggtggacgggcagaccttcgctgtgcccaaccccattcgcaagcccgcgtccatgggcttcccgggcctgcagatcggccacgcgtctcagctgctcgacacgcaggtgccctcaccgccgtcgcggggctccccctccaacgaggggctgtgcgctgtgtgtggggacaacgcggcctgccaacactacggcgtgcgcacctgtgagggctgcaaaggcttctttaagcgcacagtgcaaaaaaatgcaaaatacgtgtgtttagcaaataaaaactgcccagtggacaagcgtcgccggaatcgctgtcagtactgccgatttcagaagtgcctggctgttgggatggtcaaagaagtggttcgcacagacagtttaaaaggccggagaggtcgtttgccctcgaaaccgaagagcccacaggagccctctcccccttcgcccccggtgagtctgatcagtgccctcgtcagggcccatgtcgactccaacccggctatgaccagcctggactattccaggttccaggcgaaccctgactatcaaatgagtggagatgacacccagcatatccagcaattctatgatctcctgactggctccatggagatcatccggggctgggcagagaagatccctggcttcgcagacctgcccaaagccgaccaagacctgctttttgaatcagctttcttagaactgtttgtccttcgattagcatacaggtccaacccagtggagggtaaactcatcttttgcaatggggtggtcttgcacaggttgcaatgcgttcgtggctttggggaatggattgattccattgttgaattctcctccaacttgcagaatatgaacatcgacatttctgccttctcctgcattgctgccctggctatggtcacagagagacacgggctcaaggaacccaagagagtggaagaactgcaaaacaagattgtaaattgtctcaaagaccacgtgactttcaacaatggggggttgaaccgccccaattatttgtccaaactgttggggaagctcccagaacttcgtaccctttgcacacaggggctacagcgcattttctacctgaaattggaagacttggtgccaccgccagcaataattgacaaacttttcctggacactttacctttctaagacctcctcccaagcacttcaaaggaactggaatgataatggaaactgtcaagagggggcaagtcacatgggcagagatagccgtgtgagcagtctcagctcaagctgccccccatttctgtaaccctcctagcccccttgatccctaaagaaaacaaacaaacaaacaaaaactgttgctatttcctaacctgcaggcagaacctgaaagggcattttggctccggggcatcctggatttagaacatggactacacacaatacagtggtataaactttttattctcagtttaaaaatcagtttgttgttcagaagaaagattgctataaggtataatgggaaatgtttggccatgcttggttgttgcagttcagacaaatgtaacacacacacacatacacacacacacacacacagagacacatcttaaggggacccacaagtattgccctttaacaagacttcaaagttttctgctgtaaagaaagctgtaatatatagtaaaactaaatgttgcgtgggtggcatgagttgaagaaggcaaaggcttgtaaatttacccaatgcagtttggctttttaaattattttgtgcctatttatgaataaatattacaaattctaaaagataagtgtgtttgcaaaaaaaaagaaaataaatacataaaaaagggacaagcatgttgattctaggttgaaaatgttataggcacttgctacttcagtaatgtctatattatataaatagtatttcagacactatgtagtctgttagattttataaagattggtagttatctgagcttaaacattttctcaattgtaaaataggtgggcacaagtattacacatcagaaaatcctgacaaaagggacacatagtgtttgtaacaccgtccaacattccttgtttgtaagtgttgtatgtaccgttgatgttgataaaaagaaagtttatatcttgattattttgttgtctaaagctaaacaaaacttgcatgcagcagcttttgactgtttccagagtgcttataatatacataactccctggaaataactgagcactttgaattttttttatgtctaaaattgtcagttaatttattattttgtttgagtaagaattttaatattgccatattctgtagtatttttctttgtatatttctagtatggcacatgatatgagtcactgcctttttttctatggtgtatgacagttagagatgctgattttttttctgataaattctttctttgagaaagacaattttaatgtttacaacaataaaccatgtaaatgaaaaaaaaaa

SEQ ID NO: 918 - protein, 598 aa, Homo sapien
MPCVQAQYGSSPQGASPASQSYSYHSSGEYSSDFLTPEFVKFSMDLTNTEITATTSLPSFSTFMDNYSTGYDVKPPCLYQMPLSGQQSSIKVEDIQMHNYQQHSHLPPQSEEMMPHSGSVYYKPSSPPTPTTPGFQVQHSPMWDDPGSLHNFHQNYVATTHMIEQRKTPVSRLSLFSFKQSPPGTPVSSCQMRFDGPLHVPMNPEPAGSHHVVDGQTFAVPNPIRKPASMGFPGLQIGHASQLLDTQVPSPPSRGSPSNEGLCAVCGDNAACQHYGVRTCEGCKGFFKRTVQKNAKYVCLANKNCPVDKRRRNRCQYCRFQKCLAVGMVKEVVRTDSLKGRRGRLPSKPKSPQEPSPPSPPVSLISALVRAHVDSNPAMTSLDYSRFQANPDYQMSGDDTQHIQQFYDLLTGSMEIIRGWAEKIPGFADLPKADQDLLFESAFLELFVLRLAYRSNPVEGKLIFCNGVVLHRLQCVRGFGEWIDSIVEFSSNLQNMNIDISAFSCIAALAMVTERHGLKEPKRVEELQNKIVNCLKDHVTFNNGGLNRPNYLSKLLGKLPELRTLCTQGLQRIFYLKLEDLVPPPAIIDKLFLDTLPF

SEQ ID NO: 919 - DNA, 5182 bp, Homo sapien
cgccgcgggaggcggacgagatgcgagcgcggccgcggccccggccgctctgggcgactgtgctggcgctgggggcgctggcgggcgttggcgtaggagggcccaacatctgtaccacgcgaggtgtgagctcctgccagcagtgcctggctgtgagccccatgtgtgcctggtgctctgatgaggccctgcctctgggctcacctcgctgtgacctgaaggagaatctgctgaaggataactgtgccccagaatccatcgagttcccagtgagtgaggcccgagtactagaggacaggcccctcagcgacaagggctctggagacagctcccaggtcactcaagtcagtccccagaggattgcactccggctccggccagatgattcgaagaatttctccatccaagtgcggcaggtggaggattaccctgtggacatctactacttgatggacctgtcttactccatgaaggatgatctgtggagcatccagaacctgggtaccaagctggccacccagatgcgaaagctcaccagtaacctgcggattggcttcggggcatttgtggacaagcctgtgtcaccatacatgtatatctccccaccagaggccctcgaaaacccctgctatgatatgaagaccacctgcttgcccatgtttggctacaaacacgtgctgacgctaactgaccaggtgacccgcttcaatgaggaagtgaagaagcagagtgtgtcacggaaccgagatgccccagagggtggctttgatgccatcatgcaggctacagtctgtgatgaaaagattggctggaggaatgatgcatcccacttgctggtgtttaccactgatgccaagactcatatagcattggacggaaggctggcaggcattgtccagcctaatgacgggcagtgtcatgttggtagtgacaatcattactctgcctccactaccatggattatccctctttggggctgatgactgagaagctatcccagaaaaacatcaatttgatctttgcagtgactgaaaatgtagtcaatctctatcagaactatagtgagctcatcccagggaccacagttggggttctgtccatggattccagcaatgtcctccagctcattgttgatgcttatgggaaaatccgttctaaagtagagctggaagtgcgtgacctccctgaagagttgtctctatccttcaatgccacctgcctcaacaatgaggtcatccctggcctcaagtcttgtatgggactcaagattggagacacggtgagcttcagcattgaggccaaggtgcgaggctgtccccaggagaaggagaagtcctttaccataaagcccgtgggcttcaaggacagcctgatcgtccaggtcacctttgattgtgactgtgcctgccaggcccaagctgaacctaatagccatcgctgcaacaatggcaatgggacctttgagtgtggggtatgccgttgtgggcctggctggctgggatcccagtgtgagtgctcagaggaggactatcgcccttcccagcaggacgagtgcagcccccgagagggtcagcccgtctgcagccagcggggcgagtgcctctgtggtcaatgtgtctgccacagcagtgactttggcaagatcacgggcaagtactgcgagtgtgacgacttctcctgtgtccgctacaagggggagatgtgctcaggccatggccagtgcagctgtggggactgcctgtgtgactccgactggaccggctactactgcaactgtaccacgcgtactgacacctgcatgtccagcaatgggctgctgtgcagcggccgcggcaagtgtgaatgtggcagctgtgtctgtatccagccgggctcctatggggacacctgtgagaagtgccccacctgcccagatgcctgcacctttaagaaagaatgtgtggagtgtaagaagtttgaccggggagccctacatgacgaaaatacctgcaaccgttactgccgtgacgagattgagtcagtgaaagagcttaaggacactggcaaggatgcagtgaattgtacctataagaatgaggatgactgtgtcgtcagattccagtactatgaagattctagtggaaagtccatcctgtatgtggtagaagagccagagtgtcccaagggccctgacatcctggtggtcctgctctcagtgatgggggccattctgctcattggccttgccgccctgctcatctggaaactcctcatcaccatccacgaccgaaaagaattcgctaaatttgaggaagaacgcgccagagcaaaatgggacacagccaacaacccactgtataaagaggccacgtctaccttcaccaatatcacgtaccggggcacttaatgataagcagtcatcctcagatcattatcagcctgtgccacgattgcaggagtccctgccatcatgtttacagaggacagtatttgtggggagggatttggggctcagagtggggtaggttgggagaatgtcagtatgtggaagtgtgggtctgtgtgtgtgtatgtgggggtctgtgtgtttatgtgtgtgtgttgtgtgtgggagtgtgtaatttaaaattgtgatgtgtcctgataagctgagctccttagcctttgtcccagaatgcctcctgcagggattcttcctgcttagcttgagggtgactatggagctgagcaggtgttcttcattacctcagtgagaagccagctttcctcatcaggccattgtccctgaagagaagggcagggctgaggcctctcattccagaggaagggacaccaagccttggctctaccctgagttcataaatttatggttctcaggcctgactctcagcagctatggtaggaactgctgggcttggcagcccgggtcatctgtacctctgcctcctttcccctccctcaggccgaaggaggagtcagggagagctgaactattagagctgcctgtgccttttgccatcccctcaacccagctatggttctctcgcaagggaagtccttgcaagctaattctttgacctgttgggagtgaggatgtctgggccactcaggggtcattcatggcctgggggatgtaccagcatctcccagttcataatcacaacccttcagatttgccttattggcagctctactctggaggtttgtttagaagaagtgtgtcacccttaggccagcaccatctctttacctcctaattccacaccctcactgctgtagacatttgctatgagctggggatgtctctcatgaccaaatgcttttcctcaaagggagagagtgctattgtagagccagaggtctggccctatgcttccggcctcctgtccctcatccatagcacctccacatacctggccctgagccttggtgtgctgtatccatccatggggctgattgtatttaccttctacctcttggctgccttgtgaaggaattattcccatgagttggctgggaataagtgccaggatggaatgatgggtcagttgtatcagcacgtgtggcctgttcttctatgggttggacaacctcattttaactcagtctttaatctgagaggccacagtgcaattttattttatttttctcatgatgaggttttcttaacttaaaagaacatgtatataaacatgcttgcattatatttgtaaatttatgtgatggcaaagaaggagagcataggaaaccacacagacttgggcagggtacagacactcccacttggcatcattcacagcaagtcactggccagtggctggatctgtgaggggctctctcatgatagaaggctatggggatagatgtgtggacacattggacctttcctgaggaagagggactgttcttttgtcccagaaaagcagtggctccattggtgttgacatacatccaacattaaaagccacccccaaatgcccaagaaaaaaagaaagacttatcaacatttgttccatgagcagaaaactggagctctggcctcagtgttacagctaaataatctttaattaaggcaagtcactttcttcttcttaaagctgttttctagtttgagaaatgatgggattttagcagccagtcttgaaggtctctttcagtatcaacattctaagatgctgggacttactgtgtcatcaaatgtgcggttaagattctctgggatattgatactgtttgtgtttttagttgggagatctgagagacctggctttggcaagagcagatgtcattccatatcacctttctcaatgaaagtctcattctatcctctctccaaacccgttttccaacatttgttaatagttacgtctctcctgatgtagcacttaagcttcatttagttattatttctttcttcactttgcacacatttgcatccacatattagggaagaggaatccataagtagctgaaatatctattctgtattattgtgttaacattgagaataagccttggaattagatatggggcaatgactgagccctgtctcacccatggattactccttactgtagggaatggcagtatggtagagggataaatagggggcggggagggatagtcatggatccaagaagtccttagaaatagtggcagggaacaggtgtggaagctcatgcctgtaattataaccttcagctactaagacaggtgtggtggctcacgcctgtgattataatcttcagttactaagacagagtccatgagagtgttaatgggacattttctttagataagatgttttatatgaagaaactgtatcaaagggggaagaaaatgtatttaacaggtgaatcaaatcaggaatcttgtctgagctactggaatgaagttcacaggtcttgaagaccaatattatttgtcaatatgtggggataacctgtagctgcattcatgaggtagcaaatagcagttttggcctgtggggtgaacagctaaacagtgttctggcatcagataacacggcacaaagggattgtgtctagctcttttggagaaaatttatgtccagtctcaggatctgtggacaataacggaaaactttgaatattcctgacaagttgccatattaggagtcagttctttacttctctgagattcccaggtcatccatgattttttttttaatttgagacaaag

SEQ ID NO: 920 - protein, 794 aa, Homo sapien
PREADEMRARPRPRPLWATVLALGALAGVGVGGPNICTTRGVSSCQQCLAVSPMCAWCSDEALPLGSPRCDLKENLLKDNCAPESIEFPVSEARVLEDRPLSDKGSGDSSQVTQVSPQRIALRLRPDDSKNFSIQVRQVEDYPVDIYYLMDLSYSMKDDLWSIQNLGTKLATQMRKLTSNLRIGFGAFVDKPVSPYMYISPPEALENPCYDMKTTCLPMFGYKHVLTLTDQVTRFNEEVKKQSVSRNRDAPEGGFDAIMQATVCDEKIGWRNDASHLLVFTTDAKTHIALDGRLAGIVQPNDGQCHVGSDNHYSASTTMDYPSLGLMTEKLSQKNINLIFAVTENVVNLYQNYSELIPGTTVGVLSMDSSNVLQLIVDAYGKIRSKVELEVRDLPEELSLSFNATCLNNEVIPGLKSCMGLKIGDTVSFSIEAKVRGCPQEKEKSFTIKPVGFKDSLIVQVTFDCDCACQAQAEPNSHRCNNGNGTFECGVCRCGPGWLGSQCECSEEDYRPSQQDECSPREGQPVCSQRGECLCGQCVCHSSDFGKITGKYCECDDFSCVRYKGEMCSGHGQCSCGDCLCDSDWTGYYCNCTTRTDTCMSSNGLLCSGRGKCECGSCVCIQPGSYGDTCEKCPTCPDACTFKKECVECKKFDRGALHDENTCNRYCRDEIESVKELKDTGKDAVNCTYKNEDDCVVRFQYYEDSSGKSILYVVEEPECPKGPDILVVLLSVMGAILLIGLAALLIWKLLITIHDRKEFAKFEEERARAKWDTANNPLYKEATSTFTNITYRGT

SEQ ID NO: 921 - DNA, 3997 bp, Homo sapien
gcgggaggcggacgagatgcgagcgcggccgcggccccggccgctctgggcgactgtgctggcgctgggggcgctggcgggcgttggcgtaggagggcccaacatctgtaccacgcgaggtgtgagctcctgccagcagtgcctggctgtgagccccatgtgtgcctggtgctctgatgaggccctgcctctgggctcacctcgctgtgacctgaaggagaatctgctgaaggataactgtgccccagaatccatcgagttcccagtgagtgaggcccgagtactagaggacaggcccctcagcgacaagggctctggagacagctcccaggtcactcaagtcagtccccagaggattgcactccggctccggccagatgattcgaagaatttctccatccaagtgcggcaggtggaggattaccctgtggacatctactacttgatggacctgtcttactccatgaaggatgatctgtggagcatccagaacctgggtaccaagctggccacccagatgcgaaagctcaccagtaacctgcggattggcttcggggcatttgtggacaagcctgtgtcaccatacatgtatatctccccaccagaggccctcgaaaacccctgctatgatatgaagaccacctgcttgcccatgtttggctacaaacacgtgctgacgctaactgaccaggtgacccgcttcaatgaggaagtgaagaagcagagtgtgtcacggaaccgagatgccccagagggtggctttgatgccatcatgcaggctacagtctgtgatgaaaagattggctggaggaatgatgcatcccacttgctggtgtttaccactgatgccaagactcatatagcattggacggaaggctggcaggcattgtccagcctaatgacgggcagtgtcatgttggtagtgacaatcattactctgcctccactaccatggattatccctctttggggctgatgactgagaagctatcccagaaaaacatcaatttgatctttgcagtgactgaaaatgtagtcaatctctatcagaactatagtgagctcatcccagggaccacagttggggttctgtccatggattccagcaatgtcctccagctcattgttgatgcttatgggaaaatccgttctaaagtagagctggaagtgcgtgacctccctgaagagttgtctctatccttcaatgccacctgcctcaacaatgaggtcatccctggcctcaagtcttgtatgggactcaagattggagacacggtgagcttcagcattgaggccaaggtgcgaggctgtccccaggagaaggagaagtcctttaccataaagcccgtgggcttcaaggacagcctgatcgtccaggtcacctttgattgtgactgtgcctgccaggcccaagctgaacctaatagccatcgctgcaacaatggcaatgggacctttgagtgtggggtatgccgttgtgggcctggctggctgggatcccagtgtgagtgctcagaggaggactatcgcccttcccagcaggacgaatgcagcccccgggagggtcagcccgtctgcagccagcggggcgagtgcctctgtggtcaatgtgtctgccacagcagtgactttggcaagatcacgggcaagtactgcgagtgtgacgacttctcctgtgtccgctacaagggggagatgtgctcaggccatggccagtgcagctgtggggactgcctgtgtgactccgactggaccggctactactgcaactgtaccacgcgtactgacacctgcatgtccagcaatgggctgctgtgcagcggccgcggcaagtgtgaatgtggcagctgtgtctgtatccagccgggctcctatggggacacctgtgagaagtgccccacctgcccagatgcctgcacctttaagaaagaatgtgtggagtgtaagaagtttgaccgggagccctacatgaccgaaaatacctgcaaccgttactgccgtgacgagattgagtcagtgaaagagcttaaggacactggcaaggatgcagtgaattgtacctataagaatgaggatgactgtgtcgtcagattccagtactatgaagattctagtggaaagtccatcctgtatgtggtagaagagccagagtgtcccaagggccctgacatcctggtggtcctgctctcagtgatgggggccattctgctcattggccttgccgccctgctcatctggaaactcctcatcaccatccacgaccgaaaagaattcgctaaatttgaggaagaacgcgccagagcaaaatgggacacagccaacaacccactgtataaagaggccacgtctaccttcaccaatatcacgtaccggggcacttaatgataagcagtcatcctcagatcattatcagcctgtgccacgattgcaggagtccctgccatcatgtttacagaggacagtatttgtggggagggatttggggctcagagtggggtaggttgggagaatgtcagtatgtggaagtgtgggtctgtgtgtgtgtatgtgggggtctgtgtgtttatgtgtgtgtgttgtgtgtgggagtgtgtaatttaaaattgtgatgtgtcctgataagctgagctccttagcctttgtcccagaatgcctcctgcagggattcttcctgcttagcttgagggtgactatggagctgagcaggtgttcttcattacctcagtgagaagccagctttcctcatcaggccattgtccctgaagagaagggcagggctgaggcctctcattccagaggaagggacaccaagccttggctctaccctgagttcataaatttatggttctcaggcctgactctcagcagctatggtaggaactgctgggcttggcagcccgggtcatctgtacctctgcctcctttcccctccctcaggccgaaggaggagtcagggagagctgaactattagagctgcctgtgccttttgccatcccctcaacccagctatggttctctcgcaagggaagtccttgcaagctaattctttgacctgttgggagtgaggatgtctgggccactcaggggtcattcatggcctgggggatgtaccagcatctcccagttcataatcacaacccttcagatttgccttattggcagctctactctggaggtttgtttagaagaagtgtgtcacccttaggccagcaccatctctttacctcctaattccacaccctcactgctgtagacatttgctatgagctggggatgtctctcatgaccaaatgcttttcctcaaagggagagagtgctattgtagagccagaggtctggccctatgcttccggcctcctgtccctcatccatagcacctccacatacctggccctgagccttggtgtgctgtatccatccatggggctgattgtatttaccttctacctcttggctgccttgtgaaggaattattcccatgagttggctgggaataagtgccaggatggaatgatgggtcagttgtatcagcacgtgtggcctgttcttctatgggttggacaacctcattttaactcagtctttaatctgagaggccacagtgcaattttattttatttttctcatgatgaggttttcttaacttaaaagaacatgtatataaacatgcttgcattatatttgtaaatttatgtgtatggcaaagaaggagagcataggaaaccacacagacttgggcagggtacagacactcccacttggcatcattcacagcaagtcactggccagtggctggatctgtgaggggctctctcatgatagaaggctatggggatagatgtgtggacacattggacctttcctgaggaagagggactgttcttttgtcccagaaaagcagtggctccattggtgttgacatacatccaacattaaaagccacccccaaatgcccaagaaaaaaagaaagacttatcaacatttgttccatgagg

SEQ ID NO: 922 - protein, 788 aa, Homo sapien
MRARPRPRPLWATVLALGALAGVGVGGPNICTTRGVSSCQQCLAVSPMCAWCSDEALPLGSPRCDLKENLLKDNCAPESIEFPVSEARVLEDRPLSDKGSGDSSQVTQVSPQRIALRLRPDDSKNFSIQVRQVEDYPVDIYYLMDLSYSMKDDLWSIQNLGTKLATQMRKLTSNLRIGFGAFVDKPVSPYMYISPPEALENPCYDMKTTCLPMFGYKHVLTLTDQVTRFNEEVKKQSVSRNRDAPEGGFDAIMQATVCDEKIGWRNDASHLLVFTTDAKTHIALDGRLAGIVQPNDGQCHVGSDNHYSASTTMDYPSLGLMTEKLSQKNINLIFAVTENVVNLYQNYSELIPGTTVGVLSMDSSNVLQLIVDAYGKIRSKVELEVRDLPEELSLSFNATCLNNEVIPGLKSCMGLKIGDTVSFSIEAKVRGCPQEKEKSFTIKPVGFKDSLIVQVTFDCDCACQAQAEPNSHRCNNGNGTFECGVCRCGPGWLGSQCECSEEDYRPSQQDECSPREGQPVCSQRGECLCGQCVCHSSDFGKITGKYCECDDFSCVRYKGEMCSGHGQCSCGDCLCDSDWTGYYCNCTTRTDTCMSSNGLLCSGRGKCECGSCVCIQPGSYGDTCEKCPTCPDACTFKKECVECKKFDREPYMTENTCNRYCRDEIESVKELKDTGKDAVNCTYKNEDDCVVRFQYYEDSSGKSILYVVEEPECPKGPDILVVLLSVMGAILLIGLAALLIWKLLITIHDRKEFAKFEEERARAKWDTANNPLYKEATSTFTNITYRGT

SEQ ID NO: 923 - DNA, 1413 bp, Homo sapien
agggaataaaggctcagggaccggcagttctactctagagcccaccagcctctcagagcctccggtgactggcctgtgtctccccctggatggacatgtggacggcgctgctcatcctgcaagccttgttgctaccctccctggctgatggtgccacccctgccctgcgctttgtagccgtgggtgactggggaggggtccccaatgccccattccacacggcccgggaaatggccaatgccaaggagatcgctcggactgtgcagatcctgggtgcagacttcatcctgtctctaggggacaatttttacttcactggtgtgcaagacatcaatgacaagaggttccaggagacctttgaggacgtattctctgaccgctcccttcgcaaagtgccctggtacgtgctagccggaaaccatgaccaccttggcaatgtctctgcccagattgcatactctaagatctccaagcgctggaacttccccagccctttctaccgcctgcacttcaagatcccacagaccaatgtgtctgtggccatttttatgctggacacagtgacactatgtggcaactcagatgacttcctcagccagcagcctgagaggccccgagacgtgaagctggcccgcacacagctgtcctggctcaagaaacagctggcggcggccagggaggactacgtgctggtggctggccactaccccgtgtggtccatagccgagcacgggcctacccactgcctggtcaagcagctacggccactgctggccacatacggggtcactgcctacctgtgcggccacgatcacaatctgcagtacctgcaagatgagaatggcgtgggctacgtgctgagtggggctgggaatttcatggacccctcaaagcggcaccagcgcaaggtccccaacggctatctgcgcttccactatgggactgaagactcactgggtggctttgcctatgtggagatcagctccaaagagatgactgtcacttacatcgaggcctcgggcaagtccctctttaagaccaggctgccgaggcgagccaggccctgaactcccatgactgcccagctctgaggcccgatctccactgttgggtgggtggcctgccgggaccctgctcacaggcaggcttttcctccaacctgtggcgctgcagcagggcaggaaggggaaacacagctgatgaactgtggtgccacatgacccttgtggcacagatgcccacgtatgtgaaacacacatggacatgtgtcccagccacagtgttatgctctgtggctggctcacctttgctgagttccggggtgcaatgggggagggagggagggaaagcttcctcctaaatcaagcatctttctgttactgatgttcaataaaagaatagttgccaaggctg

SEQ ID NO: 924 - protein, 325 aa, Homo sapien
MDMWTALLILQALLLPSLADGATPALRFVAVGDWGGVPNAPFHTAREMANAKEIARTVQILGADFILSLGDNFYFTGVQDINDKRFQETFEDVFSDRSLRKVPWYVLAGNHDHLGNVSAQIAYSKISKRWNFPSPFYRLHFKIPQTNVSVAIFMLDTVTLCGNSDDFLSQQPERPRDVKLARTQLSWLKKQLAAAREDYVLVAGHYPVWSIAEHGPTHCLVKQLRPLLATYGVTAYLCGHDHNLQYLQDENGVGYVLSGAGNFMDPSKRHQRKVPNGYLRFHYGTEDSLGGFAYVEISSKEMTVTYIEASGKSLFKTRLPRRARP

SEQ ID NO: 925 - DNA, 2306 bp, Homo sapien
cgggccgccgggacgggcacgggcgcgcgggctccggcgggcgccggctgccttcctccgtcgctcgctgtctctcccggccgcattctcctccgctgcggggccgagctctccccagcgctcgcaggaaggaagaagggagccgaggacgccgagaagttcccgcggcagccgcggatcccggccaaggcggaggctgcggctccgacggggcaggagcgcgatccacggcgaggggcgtacggccaaagggtccgcggcgtggagcgctcggaccttccgctctcccccgggcgtgggccgggaccccatgagacgcgcccacgaggggcgcgagattcctagcttgggcggcgctaggcggagggaggtgttgcaggccggccggagccagagagctgccggcaggaggcggcggcggcaagaacttgaacttggcgtcgggagcgggcgccccggaggccccccgccggggccggggcgccgagggacctgcgccgcagcgctgccccccgaatggccgcggcggcggaccgggctcccgcgccgcggccctaggccgcctctcgccatggccaagtggctaaacaagtacttcagcttgggcaacagcaagaccaagagccccccgcagccgccgcggccagactaccgcgagcagcggcgccgaggcgagcggccttcgcagcccccccaggccgtgccgcaggcctcctccgccgcctcggcgtcctgcggtccggccaccgcctcctgcttctcagcctcttcgggctcgctgcccgacgacagcggcagcaccagcgacctcatccgcgcctaccgcgcgcagaaggagcgacacttccaggacccctacaacgggcctggctcgtcgctgcgcaaactgcgcgccatgtgccgcctggactactgcggcggcagcggggagccaggcggggtccagcgcgccttctcggcctcgtccgcgtcgggcgccgcgggctgttgctgcgcctcctcgggcgcgggcgccgccgcgtcctcgtcctcgtcctccggctctccgcatctctaccgcagcagcagcgagcggcggcccgccacgccggccgaggtgcgctacatctcccccaagcaccgcctcatcaaagtggagagcgccgcgggcggtggggccggggaccccctggggggcgcctgcgcgggcggccgcacctggagcccgacggcctgcggaggcaagaaactgctcaacaagtgcgccgcctcagccgcggaggagagcggggccggcaagaaggacaaggtgaccatagccgatgactactcagatccctttgatgccaagaatgatctcaagagcaaagcaggaaagggggagagtgctggctacatggagccctatgaggcacagaggatcatgacagaatttcagaggcaggaaagtgtccggtcccagcataaaggtatccagttatatgacaccccttacgaacctgaaggccaaagtgttgactcggactcggagagcacagtcagcccccgactgcgggagagcaagctgccccaggatgacgacaggcccgccgatgagtacgaccagccttgggagtggaaccgggtcaccagcccagccctggcagcacagtttaatggcaacgagaagcggcagtcatccccctcaccttcgcgggaccggcggcgccagcttcgtgcccctggagggggctttaagcctatcaaacatgggagccctgagttctgcgggatcctaggagaaagggtggatcctgccgtccccctggagaagcaaatatggtatcacggagccatcagcagaggagacgccgagaacctgctgcgactctgcaaggagtgtagctaccttgtccggaacagccagaccagcaagcatgactaccccctctccctgaggagcaaccagggttttatgcacatgaaactggccaaaaccaaagagaaatacgttctgggtcagaacagccctccgttcgacagtgtcccggaagtcatccactactacaccaccagaaagctacccatcaaaggggctgagcacttgtccctcctctatcccgtggctgtgaggaccctgtgagcggaccagacctgccctgctctgtgacagagcctggagacttggaggtgccagaggccccccaccaaccagcccccagccactgttgctggctgtgtcgtttgtgttgtgtgtatggtactagcacaccactgcatgtctctagaatgctgttgccacttacgggggctggaggcctggataaagacagaagggcggcaacacc

SEQ ID NO: 926 - protein, 596 aa, Homo sapien
MRRAHEGREIPSLGGARRREVLQAGRSQRAAGRRRRRQELELGVGSGRPGGPPPGPGRRGTCAAALPPEWPRRRTGLPRRGPRPPLAMAKWLNKYFSLGNSKTKSPPQPPRPDYREQRRRGERPSQPPQAVPQASSAASASCGPATASCFSASSGSLPDDSGSTSDLIRAYRAQKERHFQDPYNGPGSSLRKLRAMCRLDYCGGSGEPGGVQRAFSASSASGAAGCCCASSGAGAAASSSSSSGSPHLYRSSSERRPATPAEVRYISPKHRLIKVESAAGGGAGDPLGGACAGGRTWSPTACGGKKLLNKCAASAAEESGAGKKDKVTIADDYSDPFDAKNDLKSKAGKGESAGYMEPYEAQRIMTEFQRQESVRSQHKGIQLYDTPYEPEGQSVDSDSESTVSPRLRESKLPQDDDRPADEYDQPWEWNRVTSPALAAQFNGNEKRQSSPSPSRDRRRQLRAPGGGFKPIKHGSPEFCGILGERVDPAVPLEKQIWYHGAISRGDAENLLRLCKECSYLVRNSQTSKHDYPLSLRSNQGFMHMKLAKTKEKYVLGQNSPPFDSVPEVIHYYTTRKLPIKGAEHLSLLYPVAVRTL

SEQ ID NO: 927 - DNA, 2222 bp, Homo sapien
gagtcccggcagtgcgggactccggtagccgcccctccggtagccgcccctcctccccccgcgccgccgccctatatgttgcccgccgcggcctctggggcatggagcacgctgcccagccctggcgatggcaacggcgacgggggtggcggaggagcgcctgctggccgcgctcgcctacctgcagtgcgccgtgggctgcgcggtcttcgcgcggaatcgtcagacgaactcagtgtacggccgccacgcgctgcccagccacaggctccgagtgccggcgcgggccgcctgggtggtgcaggagctgccctcgctggccctgccgctctaccagtacgccagcgagtccgccccgcgtctccgcagcgcgcccaactgcatcctcctggccatgttcctcgtccactacgggcatcggtgcttaatttacccgtttctgatgcgaggaggaaagcctatgccactgttggcatgtacaatggcgattatgttctgtacctgtaacggctatttgcaaagcagatacttgagccattgtgcagtgtatgctgatgactgggtaacagatccccgttttctaataggttttggcttgtggttaacaggcatgttgataaacatccattcagatcatatcctaaggaatctcagaaaaccaggagatactggatacaaaataccaaggggaggcttatttgaatacgtaactgcagccaactattttggagaaatcatggagtggtgtggctatgccctggccagctggtctgtccaaggcgcggcttttgctttcttcacgttttgttttttatctggtagagcaaaagagcatcatgagtggtacctccggaaatttgaagagtatccaaagttcagaaaaattataattccatttttgttttaagtgcgtttttcatgaaattatcttcaacttgaagctttccaatggcgcttctctatggactttgtaaataagttatatctttgtaattttcctgctactttatcattttcaagatgtcctctaggaattttttttctagtaattttgcaatctacctaataagtacctaaatacgctgaaatggaggttgaatatcctactgtgtaacaggtcagaatttcaagctctgggtaataactgctgatattttttctaatttcaaatttacctcttttggctatgtcttgccaagtgtgtatgagactagactttacaactgtctttgatggcattttcagaacaataaatgtcacaatcccttctatagccccctacagtgatctcttcaaggtcaactgcagtgttgcttccctccccctatagggctggaatctgtctaggagccctctctcggaggccatagaggctgggggtagccattgtgcagtcatggcccgggggaaacttgccaaccttcgtgtcaggtgctgtgtataagtggagaacttggggatagaggaggaagctcctcgtggcccttccaaggtgaggcaaaggcatctggacttgttccagcccagcccaccgggtgacatcaccgggcagggaggggtgctggtggtggttcatacggagtaagctgctctgcctgtgtgagtggctcctgggccctaaacaggcacctttaggccatgggtcactcaccgtgagccatcaatgtgctctggtctgacatggtttctctctgtcttctagtctagacctagtttttttgttctgttccccacgtatggatatagtagagattgttgtctgtgaaatttctcttttgtagattttgagttttcccttgtagtgtaaagaatgatcactttctgtaacaataacaagaccactttttaagatttatcctgtttgttctttgttgattgaaacataataattgttaaaattctctacagccttctttttcttccatagctaatcttccttctaatagtttttgctttctgttttgctgttgttgctttgcaaagctttcccctcatagcctgtacctgttatcaatataaaataatcttcctgttgaatgcttcatgacttgaattctactttgataaaaacattgccatactgctttttatcttgatgaattcatctggcattgctttgccttatcatctcatctggagtttttaaatgccatttgtttcagttgtctttaacaacataataaatagactttgccatttaaaaaaaaaaaaaaaaaaaaaaa

SEQ ID NO: 928 - protein, 259 aa, Homo sapien
MATATGVAEERLLAALAYLQCAVGCAVFARNRQTNSVYGRHALPSHRLRVPARAAWVVQELPSLALPLYQYASESAPRLRSAPNCILLAMFLVHYGHRCLIYPFLMRGGKPMPLLACTMAIMFCTCNGYLQSRYLSHCAVYADDWVTDPRFLIGFGLWLTGMLINIHSDHILRNLRKPGDTGYKIPRGGLFEYVTAANYFGEIMEWCGYALASWSVQGAAFAFFTFCFLSGRAKEHHEWYLRKFEEYPKFRKIIIPFLF

SEQ ID NO: 929 - DNA, 6914 bp, Homo sapien
tcattgcagctgggacagcccggagtgtggttagcagctcggcaagcgctgcccaggtcctggggtggtggcagccagcgggagcaggaaaggaagcatgttcccaggctgcccacgcctctgggtcctggtggtcttgggcaccagctgggtaggctgggggagccaagggacagaagcggcacagctaaggcagttctacgtggctgctcagggcatcagttggagctaccgacctgagcccacaaactcaagtttgaatctttctgtaacttcctttaagaaaattgtctacagagagtatgaaccatattttaagaaagaaaaaccacaatctaccatttcaggacttcttgggcctactttatatgctgaagtcggagacatcataaaagttcactttaaaaataaggcagataagcccttgagcatccatcctcaaggaattaggtacagtaaattatcagaaggtgcttcttaccttgaccacacattccctgcagagaagatggacgacgctgtggctccaggccgagaatacacctatgaatggagtatcagtgaggacagtggacccacccatgatgaccctccatgcctcacacacatctattactcccatgaaaatctgatcgaggatttcaactctgggctgattgggcccctgcttatctgtaaaaaagggaccctaactgagggtgggacacagaagacgtttgacaagcaaatcgtgctactatttgctgtgtttgatgaaagcaagagctggagccagtcatcatccctaatgtacacagtcaatggatatgtgaatgggacaatgccagatataacagtttgtgcccatgaccacatcagctggcatctgctgggaatgagctcggggccagaattattctccattcatttcaacggccaggtcctggagcagaaccatcataaggtctcagccatcacccttgtcagtgctacatccactaccgcaaatatgactgtgggcccagagggaaagtggatcatatcttctctcaccccaaaacatttgcaagctgggatgcaggcttacattgacattaaaaactgcccaaagaaaaccaggaatcttaagaaaataactcgtgagcagaggcggcacatgaagaggtgggaatacttcattgctgcagaggaagtcatttgggactatgcacctgtaataccagcgaatatggacaaaaaatacaggtctcagcatttggataatttctcaaaccaaattggaaaacattataagaaagttatgtacacacagtacgaagatgagtccttcaccaaacatacagtgaatcccaatatgaaagaagatgggattttgggtcctattatcagagcccaggtcagagacacactcaaaatcgtgttcaaaaatatggccagccgcccctatagcatttaccctcatggagtgaccttctcgccttatgaagatgaagtcaactcttctttcacctcaggcaggaacaacaccatgatcagagcagttcaaccaggggaaacctatacttataagtggaacatcttagagtttgatgaacccacagaaaatgatgcccagtgcttaacaagaccatactacagtgacgtggacatcatgagagacatcgcctctgggctaataggactacttctaatctgtaagagcagatccctggacaggcgaggaatacagagggcagcagacatcgaacagcaggctgtgtttgctgtgtttgatgagaacaaaagctggtaccttgaggacaacatcaacaagttttgtgaaaatcctgatgaggtgaaacgtgatgaccccaagttttatgaatcaaacatcatgagcactatcaatggctatgtgcctgagagcataactactcttggattctgctttgatgacactgtccagtggcacttctgtagtgtggggacccagaatgaaattttgaccatccacttcactgggcactcattcatctatggaaagaggcatgaggacaccttgaccctcttccccatgcgtggagaatctgtgacggtcacaatggataatgttggaacttggatgttaacttccatgaattctagtccaagaagcaaaaagctgaggctgaaattcagggatgttaaatgtatcccagatgatgatgaagactcatatgagatttttgaacctccagaatctacagtcatggctacacggaaaatgcatgatcgtttagaacctgaagatgaagagagtgatgctgactatgattaccagaacagactggctgcagcattaggaattaggtcattccgaaactcatcattgaaccaggaagaagaagagttcaatcttactgccctagctctggagaatggcactgaattcgtttcttcgaacacagatataattgttggttcaaattattcttccccaagtaatattagtaagttcactgtcaataaccttgcagaacctcagaaagccccttctcaccaacaagccaccacagctggttccccactgagacacctcattggcaagaactcagttctcaattcttccacagcagagcattccagcccatattctgaagaccctatagaggatcctctacagccagatgtcacagggatacgtctactttcacttggtgctggagaattcagaagtcaagaacatgctaagcgtaagggacccaaggtagaaagagatcaagcagcaaagcacaggttctcctggatgaaattactagcacataaagttgggagacacctaagccaagacactggttctccttccggaatgaggccctgggaggaccttcctagccaagacactggttctccttccagaatgaggccctgggaggaccctcctagtgatctgttactcttaaaacaaagtaactcatctaagattttggttgggagatggcatttggcttctgagaaaggtagctatgaaataatccaagatactgatgaagacacagctgttaacaattggctgatcagcccccagaatgcctcacgtgcttggggagaaagcacccctcttgccaacaagcctggaaagcagagtggccacccaaagtttcctagagttagacataaatctctacaagtaagacaggatggaggaaagagtagactgaagaaaagccagtttctcattaagacacgaaaaaagaaaaaagagaagcacacacaccatgctcctttatctccgaggacctttcaccctctaagaagtgaagcctacaacacattttcagaaagaagacttaagcattcgttggtgcttcataaatccaatgaaacatctcttcccacagacctcaatcagacattgccctctatggattttggctggatagcctcacttcctgaccataatcagaattcctcaaatgacactggtcaggcaagctgtcctccaggtctttatcagacagtgcccccagaggaacactatcaaacattccccattcaagaccctgatcaaatgcactctacttcagaccccagtcacagatcctcttctccagagctcagtgaaatgcttgagtatgaccgaagtcacaagtccttccccacagatataagtcaaatgtccccttcctcagaacatgaagtctggcagacagtcatctctccagacctcagccaggtgaccctctctccagaactcagccagacaaacctctctccagacctcagccacacgactctctctccagaactcattcagagaaacctttccccagccctcggtcagatgcccatttctccagacctcagccatacaaccctttctccagacctcagccatacaaccctttctttagacctcagccagacaaacctctctccagaactcagtcagacaaacctttctccagccctcggtcagatgcccctttctccagacctcagccatacaaccatttctctagacttcagccagacaaacctctctccagaactcagccatatgactctctctccagaactcagtcagacaaacctttccccagccctcggtcagatgcccatttctccagacctcagccatacaaccctttctctagacttcagccagacaaacctctctccagaactcagtcaaacaaacctttccccagccctcggtcagatgcccctttctccagaccccagccatacaaccctttctctagacctcagccagacaaacctctctccagaactcagtcagacaaacctttccccagacctcagtgagatgcccctctttgcagatctcagtcaaattccccttaccccagacctcgaccagatgacactttctccagaccttggtgagacagatctttccccaaactttggtcagatgtccctttccccagacctcagccaggtgactctctctccagacatcagtgacaccacccttctcccggatctcagccagatatcacctcctccagaccttgatcagatattctacccttctgaatctagtcagtcattgcttcttcaagaatttaatgagtcttttccttatccagaccttggtcagatgccatctccttcatctcctactctcaatgatacttttctatcaaaggaatttaatccactggttatagtgggcctcagtaaagatggtacagattacattgagatcattccaaaggaagaggtccagagcagtgaagatgactatgctgaaattgattatgtgccctatgatgacccctacaaaactgatgttaggacaaacatcaactcctccagagatcctgacaacattgcagcatggtacctccgcagcaacaatggaaacagaagaaattattacattgctgctgaagaaatatcctgggattattcagaatttgtacaaagggaaacagatattgaagactctgatgatattccagaagataccacatataagaaagtagtttttcgaaagtacctcgacagcacttttaccaaacgtgatcctcgaggggagtatgaagagcatctcggaattcttggtcctattatcagagctgaagtggatgatgttatccaagttcgttttaaaaatttagcatccagaccgtattctctacatgcccatggactttcctatgaaaaatcatcagagggaaagacttatgaagatgactctcctgaatggtttaaggaagataatgctgttcagccaaatagcagttatacctacgtatggcatgccactgagcgatcagggccagaaagtcctggctctgcctgtcgggcttgggcctactactcagctgtgaacccagaaaaagatattcactcaggcttgataggtcccctcctaatctgccaaaaaggaatactacataaggacagcaacatgcctgtggacatgagagaatttgtcttactatttatgacctttgatgaaaagaagagctggtactatgaaaagaagtcccgaagttcttggagactcacatcctcagaaatgaaaaaatcccatgagtttcacgccattaatgggatgatctacagcttgcctggcctgaaaatgtatgagcaagagtgggtgaggttacacctgctgaacataggcggctcccaagacattcacgtggttcactttcacggccagaccttgctggaaaatggcaataaacagcaccagttaggggtctggccccttctgcctggttcatttaaaactcttgaaatgaaggcatcaaaacctggctggtggctcctaaacacagaggttggagaaaaccagagagcagggatgcaaacgccatttcttatcatggacagagactgtaggatgccaatgggactaagcactggtatcatatctgattcacagatcaaggcttcagagtttctgggttactgggagcccagattagcaagattaaacaatggtggatcttataatgcttggagtgtagaaaaacttgcagcagaatttgcctctaaaccttggatccaggtggacatgcaaaaggaagtcataatcacagggatccagacccaaggtgccaaacactacctgaagtcctgctataccacagagttctatgtagcttacagttccaaccagatcaactggcagatcttcaaagggaacagcacaaggaatgtgatgtattttaatggcaattcagatgcctctacaataaaagagaatcagtttgacccacctattgtggctagatatattaggatctctccaactcgagcctataacagacctacccttcgattggaactgcaaggttgtgaggtaaatggatgttccacacccctgggtatggaaaatggaaagatagaaaacaagcaaatcacagcttcttcgtttaagaaatcttggtggggagattactgggaacccttccgtgcccgtctgaatgcccagggacgtgtgaatgcctggcaagccaaggcaaacaacaataagcagtggctagaaattgatctactcaagatcaagaagataacggcaattataacacagggctgcaagtctctgtcctctgaaatgtatgtaaagagctataccatccactacagtgagcagggagtggaatggaaaccatacaggctgaaatcctccatggtggacaagatttttgaaggaaatactaataccaaaggacatgtgaagaactttttcaaccccccaatcatttccaggtttatccgtgtcattcctaaaacatggaatcaaagtattgcacttcgcctggaactctttggctgtgatatttactagaattgaacattcaaaaacccctggaagagactctttaagacctcaaaccatttagaatgggcaatgtattttacgctgtgttaaatgttaacagttttccactatttctctttcttttctattagtgaataaaattttatac

SEQ ID NO: 930 - protein, 2000 aa, Homo sapien
MFPGCPRLWVLVVLGTSWVGWGSQGTEAAQLRQFYVAAQGISWSYRPEPTNSSLNLSVTSFKKIVYREYEPYFKKEKPQSTISGLLGPTLYAEVGDIIKVHFKNKADKPLSIHPQGIRYSKLSEGASYLDHTFPAEKMDDAVAPGREYTYEWSISEDSGPTHDDPPCLTHIYYSHENLIEDFNSGLIGPLLICKKGTLTEGGTQKTFDKQIVLLFAVFDESKSWSQSSSLMYTVNGYVNGTMPDITVCAHDHISWHLLGMSSGPELFSIHFNGQVLEQNHHKVSAITLVSATSTTANMTVGPEGKWIISSLTPKHLQAGMQAYIDIKNCPKKTRNLKKITREQRRHMKRWEYFIAAEEVIWDYAPVIPANMDKKYRSQHLDNFSNQIGKHYKKVMYTQYEDESFTKHTVNPNMKEDGILGPIIRAQVRDTLKIVFKNMASRPYSIYPHGVTFSPYEDEVNSSFTSGRNNTMIRAVQPGETYTYKWNILEFDEPTENDAQCLTRPYYSDVDIMRDIASGLIGLLLICKSRSLDRRGIQRAADIEQQAVFAVFDENKSWYLEDNINKFCENPDEVKRDDPKFYESNIMSTINGYVPESITTLGFCFDDTVQWHFCSVGTQNEILTIHFTGHSFIYGKRHEDTLTLFPMRGESVTVTMDNVGTWMLTSMNSSPRSKKLRLKFRDVKCIPDDDEDSYEIFEPPESTVMATRKMHDRLEPEDEESDADYDYQNRLAAALGIRSFRNSSLNQEEEEFNLTALALENGTEFVSSNTDIIVGSNYSSPSNISKFTVNNLAEPQKAPSHQQATTAGSPLRHLIGKNSVLNSSTAEHSSPYSEDPIEDPLQPDVTGIRLLSLGAGEFRSQEHAKRKGPKVERDQAAKHRFSWMKLLAHKVGRHLSQDTGSPSGMRPWEDLPSQDTGSPSRMRPWEDPPSDLLLLKQSNSSKILVGRWHLASEKGSYEIIQDTDEDTAVNNWLISPQNASRAWGESTPLANKPGKQSGHPKFPRVRHKSLQVRQDGGKSRLKKSQFLIKTRKKKKEKHTHHAPLSPRTFHPLRSEAYNTFSERRLKHSLVLHKSNETSLPTDLNQTLPSMDFGWIASLPDHNQNSSNDTGQASCPPGLYQTVPPEEHYQTFPIQDPDQMHSTSDPSHRSSSPELSEMLEYDRSHKSFPTDISQMSPSSEHEVWQTVISPDLSQVTLSPELSQTNLSPDLSHTTLSPELIQRNLSPALGQMPISPDLSHTTLSPDLSHTTLSLDLSQTNLSPELSQTNLSPALGQMPLSPDLSHTTISLDFSQTNLSPELSHMTLSPELSQTNLSPALGQMPISPDLSHTTLSLDFSQTNLSPELSQTNLSPALGQMPLSPDPSHTTLSLDLSQTNLSPELSQTNLSPDLSEMPLFADLSQIPLTPDLDQMTLSPDLGETDLSPNFGQMSLSPDLSQVTLSPDISDTTLLPDLSQISPPPDLDQIFYPSESSQSLLLQEFNESFPYPDLGQMPSPSSPTLNDTFLSKEFNPLVIVGLSKDGTDYIEIIPKEEVQSSEDDYAEIDYVPYDDPYKTDVRTNINSSRDPDNIAAWYLRSNNGNRRNYYIAAEEISWDYSEFVQRETDIEDSDDIPEDTTYKKVVFRKYLDSTFTKRDPRGEYEEHLGILGPIIRAEVDDVIQVRFKNLASRPYSLHAHGLSYEKSSEGKTYEDDSPEWFKEDNAVQPNSSYTYVWHATERSGPESPGSACRAWAYYSAVNPEKDIHSGLIGPLLICQKGILHKDSNMPVDMREFVLLFMTFDEKKSWYYEKKSRSSWRLTSSEMKKSHEFHAINGMIYSLPGLKMYEQEWVRLHLLNIGGSQDIHVVHFHGQTLLENGNKQHQLGVWPLLPGSFKTLEMKASKPGWWLLNTEVGENQRAGMQTPFLIMDRDCRMPMGLSTGIISDSQIKASEFLGYWEPRLARLNNGGSYNAWSVEKLAAEFASKPWIQVDMQKEVIITGIQTQGAKHYLKSCYTTEFYVAYSSN

SEQ ID NO: 931 - DNA, 1947 bp, Homo sapien
ggcacgaggccaagagctacgcggcggcggcggagcgcaggcctcgtgccgttacggccatcacggcggccgcagtggcgtcctggagccctcctcagtgctgaagctgctgaaagatggcagaagaagtggtggtagtagccaaatttgattatgtggcccaacaagaacaagagttggacatcaagaagaatgagagattatggcttctggatgattctaagtcctggtggcgagttcgaaattccatgaataaaacaggttttgtgccttctaactatgtggaaaggaaaaacagtgctcggaaagcatctattgtgaaaaacctaaaggataccttaggcattggaaaagtgaaaagaaaacctagtgtgccagattctgcatctcctgctgatgatagttttgttgacccaggggaacgtctctatgacctcaacatgcccgcttatgtgaaatttaactacatggctgagagagaggatgaattatcattgataaaggggacaaaggtgatcgtcatggagaaatgcagtgatgggtggtggcgtggtagctacaatggacaagttggatggttcccttcaaactatgtaactgaagaaggtgacagtcctttgggtgaccatgtgggttctctgtcagagaaattagcagcagtcgtcaataacctaaatactgggcaagtgttgcatgtggtacaggctctttacccattcagctcatctaatgatgaagaacttaatttcgagaaaggagatgtaatggatgttattgaaaaacctgaaaatgacccagagtggtggaaatgcaggaagatcaatggtatggttggtctagtaccaaaaaactatgttaccgttatgcagaataatccattaacttcaggtttggaaccatcacctccacagtgtgattacattaggccttcactcactggaaagtttgctggcaatccttggtattatggcaaagtcaccaggcatcaagcagaaatggcattaaatgaaagaggacatgaaggggatttcctcattcgtgatagtgaatcttcgccaaatgatttctcagtatcactaaaagcacaagggaaaaacaagcattttaaagtccaactaaaagagactgtctactgcattgggcagcgtaaattcagcaccatggaagaacttgtagaacattacaaaaaggcaccaatttttacaagtgaacaaggagaaaaattatatcttgtcaagcatttatcatgatactgctgaccagaagtgactgctgtgtagctgtaatttgtcatgtaattgaagactgagaaaatgttgggtccagtcgtgcttgattggaaattgttgtttctaaatctatatgagaattgacaataagtatttttattataactcagcccatacatatatactatgtatgcagtgcatctgcatagaacagttccttatccttggccttctgttttattgtttttttctttgctgttttccctttgcttctaatattacagttttgtattttgtaaacaaaaatcaaataatgcatatcagaatctttatatggaagaaatcctttattgcctttcctttgtttccttgtaaaggcaccctgttctgttatggtttttcattatataaaattattatatctatatatgacatatgctaaaatttcttggagagtgttaatcttttctgtgactaaatagcaataataagtggaaaattagaaattatttccaggtattatatttgtcacaggccattgtaaataccaagtatattgtgtctgccataatttttaaaaatacattcattgtcttcagtcatacagcaagacacatgagacatagattagaaaacatgttgtacaattttaatttacaactgttggaaataaaaatcacttaatttttttccaaaaaaaaaaaaaaaaaaaaaaaaa

SEQ ID NO: 932 - protein, 377 aa, Homo sapien
MAEEVVVVAKFDYVAQQEQELDIKKNERLWLLDDSKSWWRVRNSMNKTGFVPSNYVERKNSARKASIVKNLKDTLGIGKVKRKPSVPDSASPADDSFVDPGERLYDLNMPAYVKFNYMAEREDELSLIKGTKVIVMEKCSDGWWRGSYNGQVGWFPSNYVTEEGDSPLGDHVGSLSEKLAAVVNNLNTGQVLHVVQALYPFSSSNDEELNFEKGDVMDVIEKPENDPEWWKCRKINGMVGLVPKNYVTVMQNNPLTSGLEPSPPQCDYIRPSLTGKFAGNPWYYGKVTRHQAEMALNERGHEGDFLIRDSESSPNDFSVSLKAQGKNKHFKVQLKETVYCIGQRKFSTMEELVEHYKKAPIFTSEQGEKLYLVKHLS

SEQ ID NO: 933 - DNA, 4508 bp, Homo sapien
cgggcagcgtggaccccggatgagttgcttttaggcttgctggcccgcggggctgtccaggcacgcgaggcccctcaggtacgccctctcttccctgcaggatccggccctcaaagacgagggtcacgcacgcgttacaaccccgaaacagtagcacaagatttaatttttaaaagagcgtgtttcttcggggcttgccgttcgttcgtttccagcctcaggaatttatggtcgcctttttgaatgagcaacaaaatgcttcaacaagttccagaaaacataaattttcctgctgaagaagagaaaatcttggagttttggactgaatttaattgttttcaggaatgcttaaagcaatcaaaacataaaccaaaatttaccttctatgatggtcctccttttgcaactggactgcctcactatggacatatacttgcgggtacaattaaagatatagttacaagatatgctcaccagagtgggtttcatgttgacagaagatttggatgggattgccatggcttacctgtggaatatgaaattgataagacactgggaatcagaggaccagaggatgtggccaaaatggggattacagagtataacaatcagtgccgagcaattgtgatgagatattctgctgagtggaagtctactgttagcagacttggccgatggattgactttgacaatgactataaaactctgtatccacaattcatggaatcagtctggtgggtcttcaaacaactctatgataaaggccttgtttatagaggtgtgaaagtcatgcccttctctacggcatgtaacactccactttccaacttcgagtcacaccagaattataaggatgttcaagatccttcagtatttgtaactttccctttggaagaagatgaaactgtatctttagttgcttggacaaccactccctggactctacctagtaaccttgctgtgtgtgttaatccagaaatgcaatatgtgaaaattaaagatgttgccagaggacgattactcattttaatggaagccagattgtcagccctctataaattggagagtgactatgagatccttgaaagatttcctggtgcctatcttaaaggcaagaagtacaggcccctgtttgactatttcctgaagtgtaaagagaatggcgctttcactgtgcttgttgacaactatgtgaaggaagaagaaggcacaggggttgtccaccaagctccttacttcggtgctgaggactatcgggtctgtatggactttaacattattcggaaagactcactccctgtttgccctgtggatgcttcaggctgcttcacaacggaggtgacagatttcgcaggacagtatgtgaaggatgctgacaaaagtatcatcaggactttgaaggaacaaggccgacttctggttgccaccaccttcactcacagctaccctttttgctggagatcagacactcctctaatttacaaagcagtgcccagctggtttgtgcgagtggagaacatggtggaccagctcctaaggaacaatgacctgtgctactgggtcccagagttggtacgagaaaaacgatttggaaattggctgaaagatgcacgtgactggacaatttccagaaacagatactggggcacccccatcccactgtgggtcagcgatgactttgaggaggtggtatgcattgggtcagtggcggaacttgaagaactgtcaggagcaaagatctcagatctccacagagagagtgttgaccacctgaccattccttcacgctgtgggaagggatccttgcaccgcatctctgaagtgtttgactgttggtttgagagtggcagcatgccctatgctcaggttcattacccgtttgaaaacaagagggagtttgaggatgcttttcctgcagatttcattgccgagggcatcgaccaaaccagaggatggttttataccctgctggtgctggccacggccctctttggacaaccgcctttcaagaacgtaattgtgaatgggcttgtcctggcaagtgatggccaaaaaatgagcaaacggaaaaagaattatccagatccagtttccatcatccagaagtatggtgctgatgccctcagattatatctgattaactcccctgtggtgagagcagaaaacctccgctttaaagaagagggtgtgcgggacgtccttaaggatgtactgctcccatggtacaatgcctatcgcttcttaatccagaacgttctgaggctccagaaggaggaagaaatagaatttctctacaatgagaacacggttagagaaagccccaacattacagaccggtggatcctgtccttcatgcagtctctcattggcttctttgagactgaaatggcagcttataggctttatactgtggtgcctcgcctggtcaagtttgtagatattctgaccaattggtatgttagaatgaaccgcagaagattaaagggtgaaaatgggatggaggattgtgtcatggccctagaaaccttgtttagtgttctgctttctctttgcagacttatagctccctacacaccttttctcactgaattgatgtaccagaatctaaaggtgctgattgaccctgtttctgttcaggacaaggacacactcagcattcactacctcatgctgccccgtgttcgagaagaattgattgacaagaaaacagagagtgcagtatctcagatgcagtctgtgattgaacttggaagagtgatcagagaccgaaaaactattcccataaagtatcctttgaaagaaattgtggttatccatcaagatccagaagctcttaaagatatcaagtctttggagaagtatatcattgaggaactcaatgttcgaaaagttacactgtctacagataaaaacaagtatggcattcggctaagggcagaaccagatcacatggtcctggggaagcgtctgaagggagcctttaaggcagtgatgacgtccatcaagcagttgagcagtgaggagctggagcagttccagaagactgggaccattgttgtggaaggccatgaattgcacgatgaagacatccgcctcatgtacacctttgatcaggccacaggtgggactgcgcaatttgaagcacactcagatgctcaggctttggtcctcttagatgtcactcctgaccagtcaatggtagatgaaggaatggctcgggaagtcatcaatcgcatacagaaacttcgcaaaaagtgcaatctggttccaactgatgaaatcacagtgtactataaagcaaagtctgaaggaacatatctgaatagtgttattgaaagccacacagagttcatatttaccaccataaaggctcccttgaaaccatatccagtttctccatcggataaagtccttattcaagaaaaaacacagttgaagggatctgaactggaaattacactcaccagaggatcttcccttcctggtcctgcttgtgcatatgtcaatcttaacatttgtgcaaatggcagtgaacaaggtggagtattgctcctggaaaatccaaaaggtgacaataggttggaccttttaaagctgaagagtgttgtcactagcatttttggtgtgaaaaatacagagctggctgtcttccatgatgaaacagaaatacaaaaccaaactgacttactgagtcttagtggaaaaacactttgtgtgactgcaggatcggctccctctctgatcaacagttctagtactcttctttgtcagtatatcaacctacagctcctgaatgcaaagccacaagagtgtttaatggggacagtgggcactctcctgcttgaaaacccacttgggcagaatggactcacccaccaaggtcttctgtatgaagcagccaaggtgtttggccttcggagcaggaagctaaagctgtttctgaatgagacccaaacgcaggaaattacagaagacatccccgtgaagactttgaatatgaagactgtgtatgtttctgtgttaccaacaacagcagacttctagcatgtacttatcaatgttgttcggtcagcccttccctaattacacctatcccctacacatacatgcacatagacacacacatgaacacactgaagatatttccttcaggtgtgtgtaaaatatgctgcttggattgaaattcaaatgggattgattagtcaagtaacttgagacctcacagtaatcttcacacttaaccttagacacctatgcagtcatgttgggagcaggttacaatgttacttcagcccacagtttatttctattcttgagttcttaagtacagaagatagaagtgatttaaatggcatagtatatatatcattttctggccttttaaaatttatttgagacctcttgatgaaatggacatattatatatttctgccacctggattttcctggataatttgatggaatattttaagtttcagtaaatcagaacaataaacaaactcagatat

SEQ ID NO: 934 - protein, 1262 aa, Homo sapien
MLQQVPENINFPAEEEKILEFWTEFNCFQECLKQSKHKPKFTFYDGPPFATGLPHYGHILAGTIKDIVTRYAHQSGFHVDRRFGWDCHGLPVEYEIDKTLGIRGPEDVAKMGITEYNNQCRAIVMRYSAEWKSTVSRLGRWIDFDNDYKTLYPQFMESVWWVFKQLYDKGLVYRGVKVMPFSTACNTPLSNFESHQNYKDVQDPSVFVTFPLEEDETVSLVAWTTTPWTLPSNLAVCVNPEMQYVKIKDVARGRLLILMEARLSALYKLESDYEILERFPGAYLKGKKYRPLFDYFLKCKENGAFTVLVDNYVKEEEGTGVVHQAPYFGAEDYRVCMDFNIIRKDSLPVCPVDASGCFTTEVTDFAGQYVKDADKSIIRTLKEQGRLLVATTFTHSYPFCWRSDTPLIYKAVPSWFVRVENMVDQLLRNNDLCYWVPELVREKRFGNWLKDARDWTISRNRYWGTPIPLWVSDDFEEVVCIGSVAELEELSGAKISDLHRESVDHLTIPSRCGKGSLHRISEVFDCWFESGSMPYAQVHYPFENKREFEDAFPADFIAEGIDQTRGWFYTLLVLATALFGQPPFKNVIVNGLVLASDGQKMSKRKKNYPDPVSIIQKYGADALRLYLINSPVVRAENLRFKEEGVRDVLKDVLLPWYNAYRFLIQNVLRLQKEEEIEFLYNENTVRESPNITDRWILSFMQSLIGFFETEMAAYRLYTVVPRLVKFVDILTNWYVRMNRRRLKGENGMEDCVMALETLFSVLLSLCRLIAPYTPFLTELMYQNLKVLIDPVSVQDKDTLSIHYLMLPRVREELIDKKTESAVSQMQSVIELGRVIRDRKTIPIKYPLKEIVVIHQDPEALKDIKSLEKYIIEELNVRKVTLSTDKNKYGIRLRAEPDHMVLGKRLKGAFKAVMTSIKQLSSEELEQFQKTGTIVVEGHELHDEDIRLMYTFDQATGGTAQFEAHSDAQALVLLDVTPDQSMVDEGMAREVINRIQKLRKKCNLVPTDEITVYYKAKSEGTYLNSVIESHTEFIFTTIKAPLKPYPVSPSDKVLIQEKTQLKGSELEITLTRGSSLPGPACAYVNLNICANGSEQGGVLLLENPKGDNRLDLLKLKSVVTSIFGVKNTELAVFHDETEIQNQTDLLSLSGKTLCVTAGSAPSLINSSSTLLCQYINLQLLNAKPQECLMGTVGTLLLENPLGQNGLTHQGLLYEAAKVFGLRSRKLKLFLNETQTQEITEDIPVKTLNMKTVYVSVLPTTADF

SEQ ID NO: 935 - DNA, 1776 bp, Homo sapien
gggggctgtagctggtgagaggaagtcctagaggctatggacactctgctgctgggatcaccgagatgagcagcagctgctcagggctgagcagggtcctggtggccgtggctacagccctggtgtctgcctcctccccctgcccccaggcctggggccccccaggggtccagtatgggcagccaggcaggtccgtgaagctgtgttgtcctggagtgactgccggggacccagtgtcctggtttcgggatggggagccaaagctgctccagggacctgactctgggctagggcatgaactggtcctggcccaggcagacagcactgatgagggcacctacatctgccagaccctggatggtgcacttgggggcacagtgaccctgcagctgggctaccctccagcccgccctgttgtctcctgccaagcagccgactatgagaacttctcttgcacttggagtcccagccagatcagcggtttacccacccgctacctcacctcctacaggaagaagacagtcctaggagctgatagccagaggaggagtccatccacagggccctggccatgcccacaggatcccctaggggctgcccgctgtgttgtccacggggctgagttctggagccagtaccggattaatgtgactgaggtgaacccactgggtgccagcacacgcctgctggatgtgagcttgcagagcatcttgcgccctgacccaccccagggcctgcgggtagagtcagtaccaggttacccccgacgcctgcgagccagctggacataccctgcctcctggccgtgccagccccacttcctgctcaagttccgtttgcagtaccgtccggcgcagcatccagcctggtccacggtggagccagctggactggaggaggtgatcacagatgctgtggctgggctgccccatgctgtacgagtcagtgcccgggactttctagatgctggcacctggagcacctggagcccggaggcctggggaactccgagcactgggaccataccaaaggagataccagcatggggccagctacacacgcagccagaggtggagcctcaggtggacagccctgctcctccaaggccctccctccaaccacaccctcggctacttgatcacagggactctgtggagcaggtagctgtgctggcgtctttgggaatcctttctttcctgggactggtggctggggccctggcactggggctctggctgaggctgagacggggtgggaaggatggatccccaaagcctgggttcttggcctcagtgattccagtggacaggcgtccaggagctccaaacctgtagaggacccaggagggcttcggcagattccacctataattctgtcttgctggtgtggatagaaaccaggcaggacagtagatccctatggttggatctcagctggaagttctgtttggagcccatttctgtgagaccctgtatttcaaatttgcagctgaaaggtgcttgtacctctgatttcaccccagagttggagttctgctcaaggaacgtgtgtaatgtgtacatctgtgtccatgtgtgaccatgtgtctgtgaggcagggaacatgtattctctgcatgcatgtatgtaggtgcctggggagtgtgtgtgggtccttggctcttggcctttccccttgcaggggttgtgcaggtgtgaataaagagaataaggaagttcttggaaaaaaaaaaaaaaaaaaaaaaaaaaaaaaaaaaaaaaaaaaaaaaaaaaaaaa

SEQ ID NO: 936 - protein, 422 aa, Homo sapien
MSSSCSGLSRVLVAVATALVSASSPCPQAWGPPGVQYGQPGRSVKLCCPGVTAGDPVSWFRDGEPKLLQGPDSGLGHELVLAQADSTDEGTYICQTLDGALGGTVTLQLGYPPARPVVSCQAADYENFSCTWSPSQISGLPTRYLTSYRKKTVLGADSQRRSPSTGPWPCPQDPLGAARCVVHGAEFWSQYRINVTEVNPLGASTRLLDVSLQSILRPDPPQGLRVESVPGYPRRLRASWTYPASWPCQPHFLLKFRLQYRPAQHPAWSTVEPAGLEEVITDAVAGLPHAVRVSARDFLDAGTWSTWSPEAWGTPSTGTIPKEIPAWGQLHTQPEVEPQVDSPAPPRPSLQPHPRLLDHRDSVEQVAVLASLGILSFLGLVAGALALGLWLRLRRGGKDGSPKPGFLASVIPVDRRPGAPNL

SEQ ID NO: 937 - DNA, 1563 bp, Homo sapien
agttgcagtggaaagaaatgtgtcatctgtggtttggtttttaaaagtggaaaactagctgcacatatccttttttactgcagatttactttaaggctcatattctccaagtctattctgctttaaaaagaagacaagaaaagaagtggtttatcaaaatcacgttataatcagattttgaccaagcattttgtaagattgccaagtatgcccacggacatggaacacacaggacattacctacatcttgcctttctgatgacaacagttttttctttgtctcctggaacaaaagcaaactatacccgtctgtgggctaacagtacttcttcctgggattcagttattcaaaacaagacaggcagaaaccaaaatgaaaacattaacacaaaccctataactcctgaagtagattataaaggtaattctacaaacatgcctgaaacatctcacatcgtagctttaacttctaaatctgaacaggagctttatataccttctgtcgtcagcaacagtccttcaacagtacagagcattgaaaacacaagcaaaagtcatggtgaaattttcaaaaaggatgtctgtgcggaaaacaacaacaacatggctatgctaatttgcttaattataattgcagtgctttttcttatctgtacctttctatttctatcaactgtggttttggcaaacaaagtctcttctctcagacgatcaaaacaagtaggcaagcgtcagcctagaagcaatggcgattttctggcaagcggtctatggcccgctgaatcagacacttggaaaagaacaaaacagctcacaggacccaacctagtgatgcaatctactggagtgctcacagctacaagggaaagaaaagatgaagaaggaactgaaaaacttactaacaaacagataggttagtgaagaaaaatgcaaagtagcaatgagaaggcttatggagtaaaaatgaagtcagttggtatttaatcccaaagtgttgttctgattatctaaaatttgacatggtagaccttgcaatttagaatcaagcaggtgagacagggagaagtatgcctgcttaattatttaaactgtgtacttttgttttgacactgaatattttaaaaagcaaataataaaataactaagcatttgaggaaaattttaaggataaattgaggaaactgattaatagagatagcaagggataattaaataaatattccctatgtagcaacagtggttagatgatctttgtctgaatgtaataaaactttgaatagttttagtgtgtccttaaagccaagtatatgctttaacatcaaatggaagtcaaattcctaatgcatagatagagagagctaaactgtgtaatttaatggtatcttccttgctggatgtggcagaatccacaccagcttatcaaccaacacagctaattttagaataggtcctttatctttccatatggcacacgtaagaaagtgtttttctactattaatattaaattaaaacctttacttttgtataataaattaaaactcagaataaacctgtgaccacgt

SEQ ID NO: 938 - protein, 232 aa, Homo sapien
MEHTGHYLHLAFLMTTVFSLSPGTKANYTRLWANSTSSWDSVIQNKTGRNQNENINTNPITPEVDYKGNSTNMPETSHIVALTSKSEQELYIPSVVSNSPSTVQSIENTSKSHGEIFKKDVCAENNNNMAMLICLIIIAVLFLICTFLFLSTVVLANKVSSLRRSKQVGKRQPRSNGDFLASGLWPAESDTWKRTKQLTGPNLVMQSTGVLTATRERKDEEGTEKLTNKQIG

SEQ ID NO: 939 - DNA, 1787 bp, Homo sapien
ggtagcaggaggctggaagaaaggacagaagtagctctggctgtgatggggatcttactgggcctgctactcctggggcacctaacagtggacacttatggccgtcccatcctggaagtgccagagagtgtaacaggaccttggaaaggggatgtgaatcttccctgcacctatgaccccctgcaaggctacacccaagtcttggtgaagtggctggtacaacgtggctcagaccctgtcaccatctttctacgtgactcttctggagaccatatccagcaggcaaagtaccagggccgcctgcatgtgagccacaaggttccaggagatgtatccctccaattgagcaccctggagatggatgaccggagccactacacgtgtgaagtcacctggcagactcctgatggcaaccaagtcgtgagagataagattactgagctccgtgtccagaaactctctgtctccaagcccacagtgacaactggcagcggttatggcttcacggtgccccagggaatgaggattagccttcaatgccaggctcggggttctcctcccatcagttatatttggtataagcaacagactaataaccaggaacccatcaaagtagcaaccctaagtaccttactcttcaagcctgcggtgatagccgactcaggctcctatttctgcactgccaagggccaggttggctctgagcagcacagcgacattgtgaagtttgtggtcaaagactcctcaaagctactcaagaccaagactgaggcacctacaaccatgacataccccttgaaagcaacatctacagtgaagcagtcctgggactggaccactgacatggatggctaccttggagagaccagtgctgggccaggaaagagcctgcctgtctttgccatcatcctcatcatctccttgtgctgtatggtggtttttaccatggcctatatcatgctctgtcggaagacatcccaacaagagcatgtctacgaagcagccagggcacatgccagagaggccaacgactctggagaaaccatgagggtggccatcttcgcaagtggctgctccagtgatgagccaacttcccagaatctgggcaacaactactctgatgagccctgcataggacaggagtaccagatcatcgcccagatcaatggcaactacgcccgcctgctggacacagttcctctggattatgagtttctggccactgagggcaaaagtgtctgttaaaaatgccccattaggccaggatctgctgacataattgcctagtcagtccttgccttctgcatggccttcttccctgctacctctcttcctggatagcccaaagtgtccgcctaccaacactggagccgctgggagtcactggctttgccctggaatttgccagatgcatctcaagtaagccagctgctggatttggctctgggcccttctagtatctctgccgggggcttctggtactcctctctaaataccagagggaagatgcccatagcactaggacttggtcatcatgcctacagacactattcaactttggcatcttgccaccagaagacccgagggaggctcagctctgccagctcagaggaccagctatatccaggatcatttctctttcttcagggccagacagcttttaattgaaattgttatttcacaggccagggttcagttctgctcctccactataagtctaatgttctgactctctcctggtgctcaataaatatctaatcataacagcaaaaaaaaaaaaaaaaaaa

SEQ ID NO: 940 - protein, 399 aa, Homo sapien
MGILLGLLLLGHLTVDTYGRPILEVPESVTGPWKGDVNLPCTYDPLQGYTQVLVKWLVQRGSDPVTIFLRDSSGDHIQQAKYQGRLHVSHKVPGDVSLQLSTLEMDDRSHYTCEVTWQTPDGNQVVRDKITELRVQKLSVSKPTVTTGSGYGFTVPQGMRISLQCQARGSPPISYIWYKQQTNNQEPIKVATLSTLLFKPAVIADSGSYFCTAKGQVGSEQHSDIVKFVVKDSSKLLKTKTEAPTTMTYPLKATSTVKQSWDWTTDMDGYLGETSAGPGKSLPVFAIILIISLCCMVVFTMAYIMLCRKTSQQEHVYEAARAHAREANDSGETMRVAIFASGCSSDEPTSQNLGNNYSDEPCIGQEYQIIAQINGNYARLLDTVPLDYEFLATEGKSVC

SEQ ID NO: 941 - DNA, 2384 bp, Homo sapien
aaaacagctaagccaggcgcgcaaggagttggagaccctgcgggagcgcttcagcgaatcgaccgccatgggcgcctccaggcgtcccccagagcctgagaaagcgcctcccgctgccccgacgcggccctcggccctggagctgaaggtggaggagctggaggagaaggggttaatccgtattctgcgggggccgggggatgctgtctccatcgagatcctccccgtcgctgtggcaactccgagcggcggtgatgctccgactccgggggtgccgaccggctcccccagcccagatctcgcacctgcagcagagccggctcccggagcagcgccaccgccgccgcccccactgcccggcctcccctccccgcaggaagccccgccctctgcgcccccacaggccccgcctctccctggcagcccggagcccccgcctgcgccgccgctgcccggagacctgccgcccccacccccgccaccgccaccacctccgggcactgacgggccggtgcctccgccgccgccgccgccgccgccgcctcccggaggtcctcctgatgccctaggaagacgcgactcagaattgggcccaggagtgaaggccaagaagcccatccagactaagttccgaatgccactcttgaactgggtggcactgaaacccagccagatcaccggcactgtcttcacagagctcaatgatgagaaggtgctgcaggagctagacatgagtgattttgaggaacagttcaagaccaagtcccaaggccccagcctggacctcagcgctctcaagagtaaggcagcccagaaggcccccagcaaggcgacactcattgaggccaaccgggccaagaacttggccatcaccctgcggaagggcaacctgggggccgagcgcatctgccaagccattgaggcgtacgacctgcaggctctgggcctggacttcctggagctgctgatgcgcttcctgcccacagagtatgagcgcagcctcatcacccgctttgagcgggagcagcggccaatggaggagctgtcagaggaggaccgcttcatgctatgcttcagccgcatcccgcgcctgccggagcgcatgaccacactcaccttcctgggcaacttcccggacacagcccagctgctcatgccgcaactgaatgccatcattgcagcctcaatgtccatcaagtcctctgacaaactccgccagatcctggagattgtcctggcctttggcaactacatgaacagtagcaagcgtggggcagcctatggcttccggctccagagcctggatgcgctgttggagatgaagtcgactgatcgcaagcagacgctgctgcactacctggtgaaggtcattgctgagaagtacccgcaactcacaggcttccacagcgacctgcacttcctggacaaggcgggctcagtgtccctggacagtgtcctggcggacgtgcgctccctgcagcgaggcctagagttgacacagagagagtttgtgcggcaggatgactgcatggtgctcaaggagttcctgagggccaactcgcccaccatggacaagctgctggcagacagcaagacggctcaggaggcctttgagtctgtggtggagtacttcggagagaaccccaagaccacatccccaggcctgttcttctccctctttagccgcttcattaaggcctacaagaaagctgagcaggaggtggaacagtggaaaaaagaagccgctgcccaggaggcaggcgctgataccccgggcaaaggggagcccccagcacccaagtcaccgccaaaggcccggcggccacagatggacctcatctctgagctgaaacggaggcagcagaaggagccactcatttatgagagcgaccgtgatggggccattgaagacatcatcacagatctgcggaaccagccctacatccgcgcagacacaggccgccgcagtgcccgtcggcgtcccccgggccccccactgcaggtcacctccgacctctcgctgtagccgctatttctgcaggtggattctgcaggggtgtggggccgtggacaggctgaggctcaaggaaggtggtcctcagctcggctggccgggcagcccctcctccgctgtggcccgcctcaaacgggctggtgcatcctcctcttggccacagagggcagcatcgcccgccccttcccccaaatgctgcttgcagcacccaccctaaagccccctccaaatagccatacttagcctcagcaggagcctggcctgtaacttataaagtgcacctcgcccccgcaagccccagccccgaggaccgtccatggaccttatttttatatgagattaataaagatgtttgcaaaagaaaaaaaaa

SEQ ID NO: 942 - protein, 463 aa, Homo sapien
MPLLNWVALKPSQITGTVFTELNDEKVLQELDMSDFEEQFKTKSQGPSLDLSALKSKAAQKAPSKATLIEANRAKNLAITLRKGNLGAERICQAIEAYDLQALGLDFLELLMRFLPTEYERSLITRFEREQRPMEELSEEDRFMLCFSRIPRLPERMTTLTFLGNFPDTAQLLMPQLNAIIAASMSIKSSDKLRQILEIVLAFGNYMNSSKRGAAYGFRLQSLDALLEMKSTDRKQTLLHYLVKVIAEKYPQLTGFHSDLHFLDKAGSVSLDSVLADVRSLQRGLELTQREFVRQDDCMVLKEFLRANSPTMDKLLADSKTAQEAFESVVEYFGENPKTTSPGLFFSLFSRFIKAYKKAEQEVEQWKKEAAAQEAGADTPGKGEPPAPKSPPKARRPQMDLISELKRRQQKEPLIYESDRDGAIEDIITDLRNQPYIRADTGRRSARRRPPGPPLQVTSDLSL

SEQ ID NO: 943 - DNA, 3111 bp, Homo sapien
ggcacgagcggagagccgcgcagggcgcgggccgcgcggggtggggcagccggagcgcaggcccccgatccccggcgggcgcccccgggcccccgcgcgcgccccggcctccgggagactggcgcatgccacggagcgcccctcgggccgccgccgctcctgcccgggcccctgctgctgctgctgtcgcctgcgcctgctgccccaactcggcgcccgacttcttcatggtgtgcggaggtcatgttcgctccttagcaggcaaacgacttttctcctcgcctcctcgccccgcatgttcaggaccaaacgatctgcgctcgtccggcgtctctggaggagccgtgcgcccggcggcgaggacgaggaggagggcgcagggggaggtggaggaggaggcgagctgcggggagaaggggcgacggacagccgagcgcatggggccggtggcggcggcccgggcagggctggatgctgcctgggcaaggcggtgcgaggtgccaaaggtcaccaccatccccacccgccagccgcgggcgccggcgcggccgggggcgccgaggcggatctgaaggcgctcacgcactcggtgctcaagaaactgaaggagcggcagctggagctgctgctccaggccgtggagtcccgcggcgggacgcgcaccgcgtgcctcctgctgcccggccgcctggactgcaggctgggcccgggggcgcccgccggcgcgcagcctgcgcagccgccctcgtcctactcgctccccctcctgctgtgcaaagtgttcaggtggccggatctcaggcattcctcggaagtcaagaggctgtgttgctgtgaatcttacgggaagatcaaccccgagctggtgtgctgcaacccccatcaccttagccgactctgcgaactagagtctcccccccctccttactccagatacccgatggattttctcaaaccaactgcagactgtccagatgctgtgccttcctccgctgaaacagggggaacgaattatctggcccctggggggctttcagattcccaacttcttctggagcctggggatcggtcacactggtgcgtggtggcatactgggaggagaagacgagagtggggaggctctactgtgtccaggagccctctctggatatcttctatgatctacctcaggggaatggcttttgcctcggacagctcaattcggacaacaagagtcagctggtgcagaaggtgcggagcaaaatcggctgcggcatccagctgacgcgggaggtggatggtgtgtgggtgtacaaccgcagcagttaccccatcttcatcaagtccgccacactggacaacccggactccaggacgctgttggtacacaaggtgttccccggtttctccatcaaggctttcgactacgagaaggcgtacagcctgcagcggcccaatgaccacgagtttatgcagcagccgtggacgggctttaccgtgcagatcagctttgtgaagggctggggtcagtgctacacccgccagttcatcagcagctgcccgtgctggctagaggtcatcttcaacagccggtagccgcgtgcggaggggacagagcgtgagctgagcaggccacacttcaaactactttgctgctaatattttcctcctgagtgcttgcttttcatgcaaactctttggtcgttttttttttgtttgttggttggttttcttcttctcgtcctcgtttgtgttctgttttgtttcgctctttgagaaatagcttatgaaaagaattgttgggggtttttttggaagaaggggcaggtatgatcggcaggacaccctgataggaagaggggaagcagaaatccaagcaccaccaaacacagtgtatgaaggggggcggtcatcatttcacttgtcaggagtgtgtgtgagtgtgagtgtgcggctgtgtgtgcacgcgtgtgcaggagcggcagatggggagacaacgtgctctttgttttgtgtctcttatggatgtccccagcagagaggtttgcagtcccaagcggtgtctctcctgccccttggacacgctcagtggggcagaggcagtacctgggcaagctggcggctggggtcccagcagctgccaggagcacggctctgtccccagcctgggaaagcccctgcccctcctctccctcatcaaggacacgggcctgtccacaggcttctgagcagcgagcctgctagtggccgaaccagaaccaattattttcatccttgtcttattcccttcctgccagcccctgccattgtagcgtctttcttttttggccatctgctcctggatctccctgagatgggcttcccaagggctgccggggcagccccctcacagtattgctcacccagtgccctctcccctcagcctctcccctgcctgccctggtgacatcaggtttttcccggacttagaaaaccagctcagcactgcctgctcccatcctgtgtgttaagctctgctattaggccagcaagcggggatgtccctgggagggacatgcttagcagtccccttccctccaagaaggatttggtccgtcataacccaaggtaccatcctaggctgacacctaactcttctttcatttcttctacaactcatacactcgtatgatacttcgacactgttcttagctcaatgagcatgtttagactttaacataagctatttttctaactacaaaggtttaaatgaacaagagaagcattctcattggaaatttagcattgtagtgctttgagagagaaaggactcctgaaaaaaaacctgagatttattaaagaaaaaaatgtattttatgttatatataaatatattattacttgtaaatataaagacgttttataagcatcattatttatgtattgtgcaatgtgtataaacaagaaaaataaagaaaagatgcactttgctttaatataaatgcaaataacaaatgccaaattaaaaaagataaacacaagattggtgttttttcctatgggtgttatcacctagctgaatgtttttctaaaggagtttatgttccattaaacgatttttaaaatgtacacttgaaaaaaaaaaaaaaaaa

SEQ ID NO: 944 - protein, 426 aa, Homo sapien
MFRTKRSALVRRLWRSRAPGGEDEEEGAGGGGGGGELRGEGATDSRAHGAGGGGPGRAGCCLGKAVRGAKGHHHPHPPAAGAGAAGGAEADLKALTHSVLKKLKERQLELLLQAVESRGGTRTACLLLPGRLDCRLGPGAPAGAQPAQPPSSYSLPLLLCKVFRWPDLRHSSEVKRLCCCESYGKINPELVCCNPHHLSRLCELESPPPPYSRYPMDFLKPTADCPDAVPSSAETGGTNYLAPGGLSDSQLLLEPGDRSHWCVVAYWEEKTRVGRLYCVQEPSLDIFYDLPQGNGFCLGQLNSDNKSQLVQKVRSKIGCGIQLTREVDGVWVYNRSSYPIFIKSATLDNPDSRTLLVHKVFPGFSIKAFDYEKAYSLQRPNDHEFMQQPWTGFTVQISFVKGWGQCYTRQFISSCPCWLEVIFNSR

SEQ ID NO: 945 - DNA, 1188 bp, Homo sapien
atggcgccccgaagcctcctcctgctgctctcaggggccctggccctgaccgatacttgggcgggctcccactccttgaggtatttcagcaccgctgtgtcgcggcccggccgcggggagccccgctacatcgccgtggagtacgtagacgacacgcaattcctgcggttcgacagcgacgccgcgattccgaggatggagccgcgggagccgtgggtggagcaagaggggccgcagtattgggagtggaccacagggtacgccaaggccaacgcacagactgaccgagtggccctgaggaacctgctccgccgctacaaccagagcgaggctgggtctcacaccctccagggaatgaatggctgcgacatggggcccgacggacgcctcctccgcgggtatcaccagcacgcgtacgacggcaaggattacatctccctgaacgaggacctgcgctcctggaccgcggcggacaccgtggctcagatcacccagcgcttctatgaggcagaggaatatgcagaggagttcaggacctacctggagggcgagtgcctggagttgctccgcagatacttggagaatgggaaggagacgctacagcgcgcagatcctccaaaggcacacgttgcccaccaccccatctctgaccatgaggccaccctgaggtgctgggccctgggcttctaccctgcggagatcacgctgacctggcagcgggatggggaggaacagacccaggacacagagcttgtggagaccaggcctgcaggggatggaaccttccagaagtgggccgctgtggtggtgccttctggagaggaacagagatacacatgccatgtgcagcacgaggggctgccccagcccctcatcctgagatgggagcagtctccccagcccaccatccccatcgtgggcatcgttgctggccttgttgtccttggagctgtggtcactggagctgtggtcgctgctgtgatgtggaggaagaagagctcagatagaaacagagggagctactctcaggctgcagtcactgacagtgcccagggctctggggtgtctctcacagctaataaagtgtgagacagcttccttgtgtgggactgagaagcaagatatcaatgtagcagaattgcacttgtgcctcacgaacatacataaattttaaaaataaagaataaa

SEQ ID NO: 946 - protein, 362 aa, Homo sapien
MAPRSLLLLLSGALALTDTWAGSHSLRYFSTAVSRPGRGEPRYIAVEYVDDTQFLRFDSDAAIPRMEPREPWVEQEGPQYWEWTTGYAKANAQTDRVALRNLLRRYNQSEAGSHTLQGMNGCDMGPDGRLLRGYHQHAYDGKDYISLNEDLRSWTAADTVAQITQRFYEAEEYAEEFRTYLEGECLELLRRYLENGKETLQRADPPKAHVAHHPISDHEATLRCWALGFYPAEITLTWQRDGEEQTQDTELVETRPAGDGTFQKWAAVVVPSGEEQRYTCHVQHEGLPQPLILRWEQSPQPTIPIVGIVAGLVVLGAVVTGAVVAAVMWRKKSSDRNRGSYSQAAVTDSAQGSGVSLTANKV

SEQ ID NO: 947 - DNA, 519 bp, Homo sapien
  Unsure 433: Unknown base
  Unsure 456: Unknown base
  Unsure 497: Unknown base
  Unsure 506: Unknown base
  Unsure 512: Unknown base
ttactcaatctcaggcatttattcatagcaatgcaagaactaatacaaattgtaaaaagtatagtatagtaaatacataaaccagtaacatagtcatttattgtcattattaaatattatgtacaggacataattgctgtacttttacttgactggcagtgcaatagatttgtttacaccagtatcaccacaaacacgtgaggatgtattgcaatacatatgtcatcactaggctatgacatcactaggcgatagaaatttttcagctccattataatcttatgggaccactatcatatatgtagtctaccactgactgaaatgtcattatgtggcatacataatgtagagttttcaagggtaccttaaagaacatctataaatacatacacacacaaacacatttatacacccagtagtcaaaatgattttnaaaatcacgttagctcaaaaagntaattaacttttattattcattaaaaatgagctttctaaantattagtanatttcnttttaag

SEQ ID NO: 948 - DNA, 1496 bp, Homo sapien
cgcactccctgctgggtgagcagcactgtaaagatgaagctggctaactggtactggctgagctcagctgttcttgccacttacggttttttggttgtggcaaacaatgaaacagaggaaattaaagatgaaagagcaaaggatgtctgcccagtgagactagaaagcagagggaaatgcgaagaggcaggggagtgcccctaccaggtaagcctgccccccttgactattcagctcccgaagcaattcagcaggatcgaggaggtgttcaaagaagtccaaaacctcaaggaaatcgtaaatagtctaaagaaatcttgccaagactgcaagctgcaggctgatgacaacggagacccaggcagaaacggactgttgttacccagtacaggagccccgggagaggttggtgataacagagttagagaattagagagtgaggttaacaagctgtcctctgagctaaagaatgccaaagaggagatcaatgtacttcatggtcgcctggagaagctgaatcttgtaaatatgaacaacatagaaaattatgttgacagcaaagtggcaaatctaacatttgttgtcaatagtttggatggcaaatgttcaaagtgtcccagccaagaacaaatacagtcacgtccagttcaacatctaatatataaagattgctctgactactacgcaataggcaaaagaagcagtgagacctacagagttacacctgatcccaaaaatagtagctttgaagtttactgtgacatggagaccatggggggaggctggacagtgctgcaggcacgtctcgatgggagcaccaacttcaccagaacatggcaagactacaaagcaggctttggaaacctcagaagggaattttggctggggaacgataaaattcatcttctgaccaagagtaaggaaatgattctgagaatagatcttgaagactttaatggtgtcgaactatatgccttgtatgatcagttttatgtggctaatgagtttctcaaatatcgtttacacgttggtaactataatggcacagctggagatgcattacgtttcaacaaacattacaaccacgatctgaagtttttcaccactccagataaagacaatgatcgatatccttctgggaactgtgggctgtactacagttcaggctggtggtttgatgcatgtctttctgcaaacttaaatggcaaatattatcaccaaaaatacagaggtgtccgtaatgggattttctggggtacctggcctggtgtaagtgaggcacaccctggtggctacaagtcctccttcaaagaggctaagatgatgatcagacccaagcactttaagccataaatcactctgttcattcctccaggtattcgttatctaatagggcaattaattccttcagcactttagaatatgccttgtttcatatttttcatagctaaaaaatgtttgacatcctttgagatattttattactaaaatctgcc

SEQ ID NO: 949 - protein, 439 aa, Homo sapien
MKLANWYWLSSAVLATYGFLVVANNETEEIKDERAKDVCPVRLESRGKCEEAGECPYQVSLPPLTIQLPKQFSRIEEVFKEVQNLKEIVNSLKKSCQDCKLQADDNGDPGRNGLLLPSTGAPGEVGDNRVRELESEVNKLSSELKNAKEEINVLHGRLEKLNLVNMNNIENYVDSKVANLTFVVNSLDGKCSKCPSQEQIQSRPVQHLIYKDCSDYYAIGKRSSETYRVTPDPKNSSFEVYCDMETMGGGWTVLQARLDGSTNFTRTWQDYKAGFGNLRREFWLGNDKIHLLTKSKEMILRIDLEDFNGVELYALYDQFYVANEFLKYRLHVGNYNGTAGDALRFNKHYNHDLKFFTTPDKDNDRYPSGNCGLYYSSGWWFDACLSANLNGKYYHQKYRGVRNGIFWGTWPGVSEAHPGGYKSSFKEAKMMIRPKHFKP

SEQ ID NO: 950 - DNA, 1600 bp, Homo sapien
gccccgccgccggcagtggaccgctgtgcgcgaaccctgaaccctacggtcccgacccgcgggcgaggccgggtacctgggctgggatccggagcaagcgggcgagggcagcgccctaagcaggcccggagcgatggcagccttgatgaccccgggaaccggggccccacccgcgcctggtgacttctccggggaagggagccagggacttcccgacccttcgccagagcccaagcagctcccggagctgatccgcatgaagcgagacggaggccgcctgagcgaagcggacatcaggggcttcgtggccgctgtggtgaatgggagcgcgcagggcgcacagatcggggccatgctgatggccatccgacttcggggcatggatctggaggagacctcggtgctgacccaggccctggctcagtcgggacagcagctggagtggccagaggcctggcgccagcagcttgtggacaagcattccacagggggtgtgggtgacaaggtcagcctggtcctcgcacctgccctggcggcatgtggctgcaaggtgccaatgatcagcggacgtggtctggggcacacaggaggcaccttggataagctggagtctattcctggattcaatgtcatccagagcccagagcagatgcaagtgctgctggaccaggcgggctgctgtatcgtgggtcagagtgagcagctggttcctgcggacggaatcctatatgcagccagagatgtgacagccaccgtggacagcctgccactcatcacagcctccattctcagtaagaaactcgtggaggggctgtccgctctggtggtggacgttaagttcggaggggccgccgtcttccccaaccaggagcaggcccgggagctggcaaagacgctggttggcgtgggagccagcctagggcttcgggtcgcggcagcgctgaccgccatggacaagcccctgggtcgctgcgtgggccacgccctggaggtggaggaggcgctgctctgcatggacggcgcaggcccgccagacttaagggacctggtcaccacgctcgggggcgccctgctctggctcagcggacacgcggggactcaggctcagggcgctgcccgggtggccgcggcgctggacgacggctcggcccttggccgcttcgagcggatgctggcggcgcagggcgtggatcccggtctggcccgagccctgtgctcgggaagtcccgcagaacgccggcagctgctgcctcgcgcccgggagcaggaggagctgctggcgcccgcagatggcaccgtggagctggtccgggcgctgccgctggcgctggtgctgcacgagctcggggccgggcgcagccgcgctggggagccgctccgcctgggggtgggcgcagagctgctggtcgacgtgggtcagaggctgcgccgtgggaccccctggctccgcgtgcaccgggacggccccgcgctcagcggcccgcagagccgcgccctgcaggaggcgctcgtactctccgaccgcgcgccattcgccgccccctcgcccttcgcagagctcgttctgccgccgcagcaataaagctcctttgccgcgaaa

SEQ ID NO: 951 - protein, 482 aa, Homo sapien
MAALMTPGTGAPPAPGDFSGEGSQGLPDPSPEPKQLPELIRMKRDGGRLSEADIRGFVAAVVNGSAQGAQIGAMLMAIRLRGMDLEETSVLTQALAQSGQQLEWPEAWRQQLVDKHSTGGVGDKVSLVLAPALAACGCKVPMISGRGLGHTGGTLDKLESIPGFNVIQSPEQMQVLLDQAGCCIVGQSEQLVPADGILYAARDVTATVDSLPLITASILSKKLVEGLSALVVDVKFGGAAVFPNQEQARELAKTLVGVGASLGLRVAAALTAMDKPLGRCVGHALEVEEALLCMDGAGPPDLRDLVTTLGGALLWLSGHAGTQAQGAARVAAALDDGSALGRFERMLAAQGVDPGLARALCSGSPAERRQLLPRAREQEELLAPADGTVELVRALPLALVLHELGAGRSRAGEPLRLGVGAELLVDVGQRLRRGTPWLRVHRDGPALSGPQSRALQEALVLSDRAPFAAPSPFAELVLPPQQ

SEQ ID NO: 952 - DNA, 1752 bp, Homo sapien
agaacgcagaccagcccaagctgacagcttgagtatgccttcttctgctgcctggttttgggggctgtatgacgtactggtcggtagtaaagattaatatgtaagaaatgtggagctaggatcaagtcatactccacagcctgcctggcaaactatgttttacttctgactttgctctctcgctgagaacattaatctgtcaagctggcgggctcctttgatagcaactttcccaggggcatgatgtggcaatgccacctctcagcccaggactaccgctattaccccgtggacggctactccctgcttaaacgcttccctcttcatcctcttacaggacccagatgccctgtccaaacagtgggacaatggttggaaagcattgggctacctcagtacgagaaccacctgatggctaatggatttgacaatgtgcagtttatgggaagcaatgttatggaagatcaggatttgttggaaattggaatccttaattctgggcacagacaaagaattctacaggcaatccagctccttccaaagatgagacccattgggcatgatggctaccatcccacctctgtagctgagtggctggattccattgaactgggcgactacaccaaagcctttctaattaatggctacacttcgatggacctgttgaaaaaaatctgggaggttgaacttattaatgttttaaaaatcaatttgattggccacaggaaacgtattttggcatctctgggagacaggctgcacgacgatcccccacagaagccccctcggtccatcaccctcaggacaggagactggggagaaccttccattaccttgcgacctccgaatgaagccacagcctctaccccggtacagtactggcagcatcacccagaaaagcttatcttccagtcgtgtgattacaaagctttttatttaggttctatgctgataaaagagcttagggggacagaatcaacccaagatgcttgtgcaaaaatgcgggctaactgtcagaagtctacagagcaaatgaagaaggtccctactattattctttctgtctcatataaaggagtcaaatttattgatgcaacaaataagaacataattgctgagcatgaaattcgtaatatctcctgtgctgcccaggacccagaagacctctcaacatttgcctatatcacaaaagatttgaagtctaatcaccactactgtcatgtgtttactgcctttgatgtgaatttagcctatgaaatcatcctaaccctgggacaggcattcgaagtcgcttaccagctagcactacaagcaagaaaagggggacactcctccacacttccagaaagctttgaaaacaaaccctccaaacccatccccaagccccgcgttagcattcgcaagtccgtggatcttcttcatgccagccataccgggcaggaaccatcagagagacacactgaggaggcactcagaaaattttgatagaattgaatttacatatagctgataaagcctaaatagaaaggttgatgtatttagcttgaatccttcactttagtggtctaatcaacagataaatgacaagcaaagaatgaaacaatccaaaaatgtttttcaaaacaattttgtgaattttatttttacaaaaattttttaaattcatattttaaaatgtataccaaggcaaaaaaatcatataagctatatcataaatacaagagtttcaaaacatacaagagacatataatg

SEQ ID NO: 953 - protein, 414 aa, Homo sapien
MMWQCHLSAQDYRYYPVDGYSLLKRFPLHPLTGPRCPVQTVGQWLESIGLPQYENHLMANGFDNVQFMGSNVMEDQDLLEIGILNSGHRQRILQAIQLLPKMRPIGHDGYHPTSVAEWLDSIELGDYTKAFLINGYTSMDLLKKIWEVELINVLKINLIGHRKRILASLGDRLHDDPPQKPPRSITLRTGDWGEPSITLRPPNEATASTPVQYWQHHPEKLIFQSCDYKAFYLGSMLIKELRGTESTQDACAKMRANCQKSTEQMKKVPTIILSVSYKGVKFIDATNKNIIAEHEIRNISCAAQDPEDLSTFAYITKDLKSNHHYCHVFTAFDVNLAYEIILTLGQAFEVAYQLALQARKGGHSSTLPESFENKPSKPIPKPRVSIRKSVDLLHASHTGQEPSERHTEEALRKF

SEQ ID NO: 954 - DNA, 6133 bp, Homo sapien
tgcatgaagacaaaaggtcctgtgctcacctgggacccttctggacgttgccctgtgtacctcttcgactgcctgttcatctacgacgaaccccgggtattgaccccagacaacaatgccacttcatattggggacttcgtctgggattccaaggtgcattcattgcaaagttccttaaatattttctcactgcttcctactaaaggacggacagagcatttgttcttcagccacatactttccttccactggccagcattctcctctattagactagaactgtggataaacctcagaaaatggccacccagcagaaagcctctgacgagaggatctcccagtttgatcacaatttgctgccagagctgtctgctcttctgggcctagatgcagttcagttggcaaaggaactagaagaagaggagcagaaggagcgagcaaaaatgcagaaaggctacaactctcaaatgcgcagtgaagcaaaaaggttaaagacttttgtgacttatgagccgtacagctcatggataccacaggagatggcggccgctgggttttacttcactggggtaaaatctgggattcagtgcttctgctgtagcctaatcctctttggtgccggcctcacgagactccccatagaagaccacaagaggtttcatccagattgtgggttccttttgaacaaggatgttggtaacattgccaagtacgacataagggtgaagaatctgaagagcaggctgagaggaggtaaaatgaggtaccaagaagaggaggctagacttgcgtccttcaggaactggccattttatgtccaagggatatccccttgtgtgctctcagaggctggctttgtctttacaggtaaacaggacacggtacagtgtttttcctgtggtggatgtttaggaaattgggaagaaggagatgatccttggaaggaacatgccaaatggttccccaaatgtgaatttcttcggagtaagaaatcctcagaggaaattacccagtatattcaaagctacaagggatttgttgacataacgggagaacattttgtgaattcctgggtccagagagaattacctatggcatcagcttattgcaatgacagcatctttgcttacgaagaactacggctggactcttttaaggactggccccgggaatcagctgtgggagttgcagcactggccaaagcaggtcttttctacacaggtataaaggacatcgtccagtgcttttcctgtggagggtgtttagagaaatggcaggaaggtgatgacccattagacgatcacaccagatgttttcccaattgtccatttctccaaaatatgaagtcctctgcggaagtgactccagaccttcagagccgtggtgaactttgtgaattactggaaaccacaagtgaaagcaatcttgaagattcaatagcagttggtcctatagtgccagaaatggcacagggtgaagcccagtggtttcaagaggcaaagaatctgaatgagcagctgagagcagcttataccagcgccagtttccgccacatgtctttgcttgatatctcttccgatctggccacggaccacttgctgggctgtgatctgtctattgcttcaaaacacatcagcaaacctgtgcaagaacctctggtgctgcctgaggtctttggcaacttgaactctgtcatgtgtgtggagggtgaagctggaagtggaaagacggtcctcctgaagaaaatagcttttctgtgggcatctggatgctgtcccctgttaaacaggttccagctggttttctacctctcccttagttccaccagaccagacgaggggctggccagtatcatctgtgaccagctcctagagaaagaaggatctgttactgaaatgtgcatgaggaacattatccagcagttaaagaatcaggtcttattccttttagatgactacaaagaaatatgttcaatccctcaagtcataggaaaactgattcaaaaaaaccacttatcccggacctgcctattgattgctgtccgtacaaacagggccagggacatccgccgatacctagagaccattctagagatcaaagcatttcccttttataatactgtctgtatattacggaagctcttttcacataatatgactcgtctgcgaaagtttatggtttactttggaaagaaccaaagtttgcagaagatacagaaaactcctctctttgtggcggcgatctgtgctcattggtttcagtatccttttgacccatcctttgatgatgtggctgttttcaagtcctatatggaacgcctttccttaaggaacaaagcgacagctgaaattctcaaagcaactgtgtcctcctgtggtgagctggccttgaaagggtttttttcatgttgctttgagtttaatgatgatgatctcgcagaagcaggggttgatgaagatgaagatctaaccatgtgcttgatgagcaaatttacagcccagagactaagaccattctaccggtttttaagtcctgccttccaagaatttcttgcggggatgaggctgattgaactcctggattcagataggcaggaacatcaagatttgggactgtatcatttgaaacaaatcaactcacccatgatgactgtaagcgcctacaacaattttttgaactatgtctccagcctcccttcaacaaaagcagggcccaaaattgtgtctcatttgctccatttagtggataacaaagagtcattggagaatatatctgaaaatgatgactacttaaagcaccagccagaaatttcactgcagatgcagttacttaggggattgtggcaaatttgtccacaagcttacttttcaatggtttcagaacatttactggttcttgccctgaaaactgcttatcaaagcaacactgttgctgcgtgttctccatttgttttgcaattccttcaagggagaacactgactttgggtgcgcttaacttacagtactttttcgaccacccagaaagcttgtcattgttgaggagcatccacttcccaatacgaggaaataagacatcacccagagcacatttttcagttctggaaacatgttttgacaaatcacaggtgccaactatagatcaggactatgcttctgcctttgaacctatgaatgaatgggagcgaaatttagctgaaaaagaggataatgtaaagagctatatggatatgcagcgcagggcatcaccagaccttagtactggctattggaaactttctccaaagcagtacaagattccctgtctagaagtcgatgtgaatgatattgatgttgtaggccaggatatgcttgagattctaatgacagttttctcagcttcacagcgcatcgaactccatttaaaccacagcagaggctttatagaaagcatccgcccagctcttgagctgtctaaggcctctgtcaccaagtgctccataagcaagttggaactcagcgcagccgaacaggaactgcttctcaccctgccttccctggaatctcttgaagtctcagggacaatccagtcacaagaccaaatctttcctaatctggataagttcctgtgcctgaaagaactgtctgtggatctggagggcaatataaatgttttttcagtcattcctgaagaatttccaaacttccaccatatggagaaattattgatccaaatttcagctgagtatgatccttccaaactagtaaaattaattcaaaattctccaaaccttcatgttttccatctgaagtgtaacttcttttcggattttgggtctctcatgactatgcttgtttcctgtaagaaactcacagaaattaagttttcggattcattttttcaagccgtcccatttgttgccagtttgccaaattttatttctctgaagatattaaatcttgaaggccagcaatttcctgatgaggaaacatcagaaaaatttgcctacattttaggttctcttagtaacctggaagaattgatccttcctactggggatggaatttatcgagtggccaaactgatcatccagcagtgtcagcagcttcattgtctccgagtcctctcatttttcaagactttgaatgatgacagcgtggtggaaattgccaaagtagcaatcagtggaggtttccagaaacttgagaacctaaagctttcaatcaatcacaagattacagaggaaggatacagaaatttctttcaagcactggacaacatgccaaacttgcaggagttggacatctccaggcatttcacagagtgtatcaaagctcaggccacaacagtcaagtctttgagtcaatgtgtgttacgactaccaaggctcattagactgaacatgttaagttggctcttggatgcagatgatattgcattgcttaatgtcatgaaagaaagacatcctcaatctaagtacttaactattctccagaaatggatactgccgttctctccaatcattcagaaataaaagattcagctaaaaactgctgaatcaataatttgtcttggggcatattgaggatgtaaaaaaagttgttgattaatgctaaaaaccaaattatccaaaattattttattaaatattgcatacaaaagaaaatgtgtaaggcttgctaaaaaacaaaacaaaacaaaacacagtcctgcatactcaccaccaagctcaagaaataaatcatcaccaatacctttgaggtccctgagtaatccaccccagctaaaggcaaacccttcaatcaagtttatacagcaaaccctccattgtccatggtcaacagggaaggggttggggacaggtctgccaatctatctaaaagccacaatatggaagaagtattcaatttatataataaatggctaacttaacggttgaatcactttcatacatggatgaaacgggtttaacacaggatccacatgaatcttctgtgggccaagagatgttccttaatccttgtagaacctgttttctatattgaactagctttggtacagtagagttaacttactttccatttatccactgccaatataaagaggaaacaggggttagggaaaaatgacttcattccagaggcttctcagagttcaacatatgctataatttagaattttcttatgaatccactctacttgggtagaaaatattttatctctagtgattgcatattatttccatatcatagtatttcatagtattatatttgatatgagtgtctatatcaatgtcagtgtccagaatttcgttcctaccagttaagtagttttctgaacggccagaagaccattcgaaattcatgatactactataagttggtaaacaaccatacttttatcctcatttttattctcactaagaaaaaagtcaactcccctccccttgcccaagtatgaaatatagggacagtatgtatggtgtggtctcatttgtttagaaaaccacttatgactgggtgcggtggctcacacctgtaatcccagcactttgggaggctgaggcgggcgaatcatttgaggtgaggaattcgagaccagcctggccagcatggtgaaaccccatctctactaaaaatacaaaaattagccaggtgtggtggcacatgcctgtagtcccagccactagggcggctgagacgcaagacttgcttgaacccgggaggcagaggttgcagtgagccaagatggcgccactgcattccagcctgggcaacagagcaagaccctgtctgtctcaaaacaaaaaacaaaaccacttatattgctagctacattaagaatttctgaatatgttactgagcttgcttgtggtaaccatttataatatcagaaagtatatgtacaccaaaacatgttgaacatccatgttgtacaactgaaatataaataattttgtcaattatacctaaataaaactggaaaaaaatttctggaagtttatatctaaaaatgttaatagtgcgtacctctaggaagtgggcctggaagccattcttacttttcagtctctcccattctgtactgttttttgttttactttcgtgcctgcattatttttctatttaaaacaaaaataaatctagtttagcact

SEQ ID NO: 955 - protein, 1403 aa, Homo sapien
MATQQKASDERISQFDHNLLPELSALLGLDAVQLAKELEEEEQKERAKMQKGYNSQMRSEAKRLKTFVTYEPYSSWIPQEMAAAGFYFTGVKSGIQCFCCSLILFGAGLTRLPIEDHKRFHPDCGFLLNKDVGNIAKYDIRVKNLKSRLRGGKMRYQEEEARLASFRNWPFYVQGISPCVLSEAGFVFTGKQDTVQCFSCGGCLGNWEEGDDPWKEHAKWFPKCEFLRSKKSSEEITQYIQSYKGFVDITGEHFVNSWVQRELPMASAYCNDSIFAYEELRLDSFKDWPRESAVGVAALAKAGLFYTGIKDIVQCFSCGGCLEKWQEGDDPLDDHTRCFPNCPFLQNMKSSAEVTPDLQSRGELCELLETTSESNLEDSIAVGPIVPEMAQGEAQWFQEAKNLNEQLRAAYTSASFRHMSLLDISSDLATDHLLGCDLSIASKHISKPVQEPLVLPEVFGNLNSVMCVEGEAGSGKTVLLKKIAFLWASGCCPLLNRFQLVFYLSLSSTRPDEGLASIICDQLLEKEGSVTEMCMRNIIQQLKNQVLFLLDDYKEICSIPQVIGKLIQKNHLSRTCLLIAVRTNRARDIRRYLETILEIKAFPFYNTVCILRKLFSHNMTRLRKFMVYFGKNQSLQKIQKTPLFVAAICAHWFQYPFDPSFDDVAVFKSYMERLSLRNKATAEILKATVSSCGELALKGFFSCCFEFNDDDLAEAGVDEDEDLTMCLMSKFTAQRLRPFYRFLSPAFQEFLAGMRLIELLDSDRQEHQDLGLYHLKQINSPMMTVSAYNNFLNYVSSLPSTKAGPKIVSHLLHLVDNKESLENISENDDYLKHQPEISLQMQLLRGLWQICPQAYFSMVSEHLLVLALKTAYQSNTVAACSPFVLQFLQGRTLTLGALNLQYFFDHPESLSLLRSIHFPIRGNKTSPRAHFSVLETCFDKSQVPTIDQDYASAFEPMNEWERNLAEKEDNVKSYMDMQRRASPDLSTGYWKLSPKQYKIPCLEVDVNDIDVVGQDMLEILMTVFSASQRIELHLNHSRGFIESIRPALELSKASVTKCSISKLELSAAEQELLLTLPSLESLEVSGTIQSQDQIFPNLDKFLCLKELSVDLEGNINVFSVIPEEFPNFHHMEKLLIQISAEYDPSKLVKLIQNSPNLHVFHLKCNFFSDFGSLMTMLVSCKKLTEIKFSDSFFQAVPFVASLPNFISLKILNLEGQQFPDEETSEKFAYILGSLSNLEELILPTGDGIYRVAKLIIQQCQQLHCLRVLSFFKTLNDDSVVEIAKVAISGGFQKLENLKLSINHKITEEGYRNFFQALDNMPNLQELDISRHFTECIKAQATTVKSLSQCVLRLPRLIRLNMLSWLLDADDIALLNVMKERHPQSKYLTILQKWILPFSPIIQK

SEQ ID NO: 956 - DNA, 713 bp, Homo sapien
tcccagctgcgcgtcgcagtcccgacgcgagaagggctggagtcggcgtccagcctagagcccccggtgggagccaggccgggacgcgtgcaccatgccctacctgctcatcagcacccagatccgcatggaggtgggccccactatggtgggcgatgaacagtcggatccagagctgatgcagcatctgggggcttcaaagagaagagccttgggaaacaacttttatgaatactacgtcgatgaccctccccgcatagtcctggacaagctggaacgcaggggcttccgtgtgctgagcatgacgggggtgggccagacgctggtgtggtgtctgcacaaggagtgaccttctcatgctgatttgcagacggggcacccctgtggaggggctgctgtgggccctgacctccaagctcctgcctcaccgtctgccttgctcctctcttcccaaatcatcaccgccatgggcccagccccaaagggcagtgaatggccttctctgaaaccctgcgtcaagcagtgggagagggcagtgcccggtgccctggtgctcccagctgccctcctgcttcgggcctgggccgagggccttgtgtaggccatgttcctcgggcagctgccccgggccggagctgggcactccagcggccctggcgcgtggctcctgcatagctagcccaagccaataaagggctgtgatgagtggctgc

SEQ ID NO: 957 - protein, 84 aa, Homo sapien
MPYLLISTQIRMEVGPTMVGDEQSDPELMQHLGASKRRALGNNFYEYYVDDPPRIVLDKLERRGFRVLSMTGVGQTLVWCLHKE

SEQ ID NO: 958 - DNA, 1177 bp, Homo sapien
ggaaaggaaggtttaaaataattaatttaaaatgtcactaagtatagactgatgactgtatagagatgtgaaatgtataattacacatggaagcaatatgttgctgtgttgttattaggtttttttgtttttgttttctacatcttttaaagacttttggaaatttggctgaacaattagaacacaacaggccaactcatactcatttggatctatttagacaacgttaaccaatatatctatagctttagattatattcgataaaagtaattggactttttttctttttttgactcgttgacaagtgtctttgtaatatgtttttagttccctttttttgttgtattataggcagatgaacaaattaaatttggcctcaaagagagaacttactcccttctggatatttttgccacatttctttgcaaaaggagatatatatatctttagtcagttttgttgttatgagaaattatgggttattttgtggcatgctctttgggagctgcacagttatggggaggactcccactgctgtgcaagttaagtcttttacaaaacaaggacagcagaggagggtttgcagagacctccctctgaaaaacacaaagaatggactctctcctgggatgaggacttgctttctttacctccggttctttccatgtcttagttggatgtccctgaaatggacacaggctgtgcattgtgccagaaacattgtgttatcttttatgttgttgttgttgctgttaaactataatatgtgacttctttttttattattttttgtttgaatgctttaaaaatctttaagtctgtggactgctgatgtacagtgcctttgctgctatggatcaaatcaaagaccgtgtagatatactttattgtataagtagaaaattacttaatttcatactagaaatggatggatgctgcaagttgaaatggactgtccattgacgttcctaatgtggtagcagaaaaaaatggtgtcttaagtgcttagtgtttgatgtcattaacagtttcgtaaaactctacagtgtagaaagattttgatactaaactgtgcgttgtacatagttctaatgcattgtattgaccaccagtacttctataatggtagattgtttgtgaattcagacttttaagcattaaacataaataacttct

SEQ ID NO: 959 - protein, 84 aa, Homo sapien
MGRTPTAVQVKSFTKQGQQRRVCRDLPLKNTKNGLSPGMRTCFLYLRFFPCLSWMSLKWTQAVHCARNIVLSFMLLLLLLNYNM

SEQ ID NO: 960 - DNA, 1637 bp, Homo sapien
gaggcgaaccggagcgcggggccgcggtcgccccgaccagagccgggagaccgcagcacccgcagccgcccgcgagcgcgccgaagacagcgcgcaggcgagagcgcgcgggcgggggcgcgcaggccctgcccgccccttccgtccccacccccctccgccctttcctctccccaccttcctctcgcctcccgcgcccccgcaccgggcgcccaccctgtcctcctcctgcgggagcgttgtccgtgttggcggccgcagcgggccgggccggtccggcgggccgggggatggcgctgctggacctggccttggagggaatggccgtcttcgggttcgtcctcttcttggtgctgtggctgatgcatttcatggctatcatctacacccgattacacctcaacaagaaggcaactgacaaacagccttatagcaagctcccaggtgtctctcttctgaaaccactgaaaggggtagatcctaacttaatcaacaacctggaaacattctttgaattggattatcccaaatatgaagtgctcctttgtgtacaagatcatgatgatccagccattgatgtatgtaagaagcttcttggaaaatatccaaatgttgatgctagattgtttataggtggtaaaaaagttggcattaatcctaaaattaataatttaatgccaggatatgaagttgcaaagtatgatcttatatggatttgtgatagtggaataagagtaattccagatacgcttactgacatggtgaatcaaatgacagaaaaagtaggcttggttcacgggctgccttacgtagcagacagacagggctttgctgccaccttagagcaggtatattttggaacttcacatccaagatactatatctctgccaatgtaactggtttcaaatgtgtgacaggaatgtcttgtttaatgagaaaagatgtgttggatcaagcaggaggacttatagcttttgctcagtacattgccgaagattactttatggccaaagcgatagctgaccgaggttggaggtttgcaatgtccactcaagttgcaatgcaaaactctggctcatattcaatttctcagtttcaatccagaatgatcaggtggaccaaactacgaattaacatgcttcctgctacaataatttgtgagccaatttcagaatgctttgttgccagtttaattattggatgggcagcccaccatgtgttcagatgggatattatggtatttttcatgtgtcattgcctggcatggtttatatttgactacattcaactcaggggtgtccagggtggcacactgtgtttttcaaaacttgattatgcagtcgcctggttcatccgcgaatccatgacaatatacatttttttgtctgcattatgggacccaactataagctggagaactggtcgctacagattacgctgtgggggtacagcagaggaaatcctagatgtataactacagctttgtgactgtatataaaggaaaaaagagaagtattataaattatgtttatataaatgcttttaaaaatctaccttctgtagttttatcacatgtatgttttggtatctgttctttaatttatttttgcatggcacttgcatctgtgaaaaaaaa

SEQ ID NO: 961 - protein, 394 aa, Homo sapien
MALLDLALEGMAVFGFVLFLVLWLMHFMAIIYTRLHLNKKATDKQPYSKLPGVSLLKPLKGVDPNLINNLETFFELDYPKYEVLLCVQDHDDPAIDVCKKLLGKYPNVDARLFIGGKKVGINPKINNLMPGYEVAKYDLIWICDSGIRVIPDTLTDMVNQMTEKVGLVHGLPYVADRQGFAATLEQVYFGTSHPRYYISANVTGFKCVTGMSCLMRKDVLDQAGGLIAFAQYIAEDYFMAKAIADRGWRFAMSTQVAMQNSGSYSISQFQSRMIRWTKLRINMLPATIICEPISECFVASLIIGWAAHHVFRWDIMVFFMCHCLAWFIFDYIQLRGVQGGTLCFSKLDYAVAWFIRESMTIYIFLSALWDPTISWRTGRYRLRCGGTAEEILDV

SEQ ID NO: 962 - DNA, 3632 bp, Homo sapien
aaagagctggaggcgcgcaggccggctccgctccggccccggacgatgcggcgcgcccaggatgctgccgtgcctcgtagtgctgctggcggcgctcctcagcctccgtcttggctcagacgctcatgggacagagctgcccagccctccgtctgtgtggtttgaagcagaatttttccaccacatcctccactggacacccatcccaaatcagtctgaaagtacctgctatgaagtggcgctcctgaggtatggaatagagtcctggaactccatctccaactgtagccagaccctgtcctatgaccttaccgcagtgaccttggacctgtaccacagcaatggctaccgggccagagtgcgggctgtggacggcagccggcactccaactggaccgtcaccaacacccgcttctctgtggatgaagtgactctgacagttggcagtgtgaacctagagatccacaatggcttcatcctcgggaagattcagctacccaggcccaagatggcccccgcgaatgacacatatgaaagcatcttcagtcacttccgagagtatgagattgccattcgcaaggtgccgggaaacttcacgttcacacacaagaaagtaaaacatgaaaacttcagcctcctaacctctggagaagtgggagagttctgtgtccaggtgaaaccatctgtcgcttcccgaagtaacaaggggatgtggtctaaagaggagtgcatctccctcaccaggcagtatttcaccgtgaccaacgtcatcatcttctttgcctttgtcctgctgctctccggagccctcgcctactgcctggccctccagctgtatgtgcggcgccgaaagaagctacccagtgtcctgctcttcaagaagcccagccccttcatcttcatcagccagcgtccctccccagagacccaagacaccatccacccgcttgatgaggaggcctttttgaaggtgtccccagagctgaagaacttggacctgcacggcagcacagacagtggctttggcagcaccaagccatccctgcagactgaagagccccagttcctcctccctgaccctcacccccaggctgacagaacgctgggaaacggggagccccctgtgctgggggacagctgcagtagtggcagcagcaatagcacagacagcgggatctgcctgcaggagcccagcctgagccccagcacagggcccacctgggagcaacaggtggggagcaacagcaggggccaggatgacagtggcattgacttagttcaaaactctgagggccgggctggggacacacagggtggctcggccttgggccaccacagtcccccggagcctgaggtgcctggggaagaagacccagctgctgtggcattccagggttacctgaggcagaccagatgtgctgaagagaaggcaaccaagacaggctgcctggaggaagaatcgcccttgacagatggccttggccccaaattcgggagatgcctggttgatgaggcaggcttgcatccaccagccctggccaagggctatttgaaacaggatcctctagaaatgactctggcttcctcaggggccccaacgggacagtggaaccagcccactgaggaatggtcactcctggccttgagcagctgcagtgacctgggaatatctgactggagctttgcccatgaccttgcccctctaggctgtgtggcagccccaggtggtctcctgggcagctttaactcagacctggtcaccctgcccctcatctctagcctgcagtcaagtgagtgactcgggctgagaggctgcttttgattttagccatgcctgctcctctgcctggaccaggaggagggccctggggcagaagttaggcacgaggcagtctgggcacttttctgcaagtccactggggctggcccagccaggctgcagggctggtcagggtgtctggggcaggaggaggccaactcactgaactagtgcagggtatgtgggtggcactgacctgttctgttgactggggccctgcagactctggcagagctgagaagggcagggaccttctccctcctaggaactctttcctgtatcataaaggattatttgctcaggggaaccatggggctttctggagttgtggtgaggccaccaggctgaagtcagctcagacccagacctccctgcttaggccactcgagcatcagagcttccagcaggaggaagggctgtaggaatggaagcttcagggccttgctgctggggtcatttttaggggaaaaaggaggatatgatggtcacatggggaacctcccctcatcgggcctctggggcaggaagcttgtcactggaagatcttaaggtatatattttctggacactcaaacacatcataatggattcactgaggggagacaaagggagccgagaccctggatggggcttccagctcagaacccatccctctggtgggtacctctggcacccatctgcaaatatctccctctctccaacaaatggagtagcatccccctggggcacttgctgaggccaagccactcacatcctcactttgctgccccaccatcttgctgacaacttccagagaagccatggttttttgtattggtcataactcagccctttgggcggcctctgggcttgggcaccagctcatgccagccccagagggtcagggttggaggcctgtgcttgtgtttgctgctaatgtccagctacagacccagaggataagccactgggcactgggctggggtccctgccttgttggtgttcagctgtgtgattttggactagccacttgtcagagggcctcaatctcccatctgtgaaataaggactccacctttaggggaccctccatgtttgctgggtattagccaagctggtcctgggagaatgcagatactgtccgtggactaccaagctggcttgtttcttatgccagaggctaacagatccaatgggagtccatggtgtcatgccaagacagtatcagacacagccccagaagggggcattatgggccctgcctccccataggccatttggactctgccttcaaacaaaggcagttcagtccacaggcatggaagctgtgaggggacaggcctgtgcgtgccatccagagtcatctcagccctgcctttctctggagcattctgaaaacagatattctggcccagggaatccagccatgacccccacccctctgccaaagtactcttaggtgccagtctggtaactgaactccctctggaggcaggcttgagggaggattcctcagggttcccttgaaagctttatttatttattttgttcatttatttattggagaggcagcattgcacagtgaaagaattctggatatctcaggagccccgaaattctagctctgactttgctgtttccagtggtatgaccttggagaagtcacttatcctcttggagcctcagtttcctcatctgcagaataatgactgacttgtctaattcatagggatgtgaggttctgctgaggaaatgggtatgaatgtgccttgaacacaaagctctgtcaataagtgatacatgttttttattccaataaattgtcaagaccaca

SEQ ID NO: 963 - protein, 578 aa, Homo sapien
MLPCLVVLLAALLSLRLGSDAHGTELPSPPSVWFEAEFFHHILHWTPIPNQSESTCYEVALLRYGIESWNSISNCSQTLSYDLTAVTLDLYHSNGYRARVRAVDGSRHSNWTVTNTRFSVDEVTLTVGSVNLEIHNGFILGKIQLPRPKMAPANDTYESIFSHFREYEIAIRKVPGNFTFTHKKVKHENFSLLTSGEVGEFCVQVKPSVASRSNKGMWSKEECISLTRQYFTVTNVIIFFAFVLLLSGALAYCLALQLYVRRRKKLPSVLLFKKPSPFIFISQRPSPETQDTIHPLDEEAFLKVSPELKNLDLHGSTDSGFGSTKPSLQTEEPQFLLPDPHPQADRTLGNGEPPVLGDSCSSGSSNSTDSGICLQEPSLSPSTGPTWEQQVGSNSRGQDDSGIDLVQNSEGRAGDTQGGSALGHHSPPEPEVPGEEDPAAVAFQGYLRQTRCAEEKATKTGCLEEESPLTDGLGPKFGRCLVDEAGLHPPALAKGYLKQDPLEMTLASSGAPTGQWNQPTEEWSLLALSSCSDLGISDWSFAHDLAPLGCVAAPGGLLGSFNSDLVTLPLISSLQSSE

SEQ ID NO: 964 - DNA, 2621 bp, Homo sapien
cagtgtttggtgttgcaagcaggatccaaaggagacctatagtgactcccaggagctcttagtgaccaagtgaaggtacctgtggggctcattgtgcccattgctctttcactgctttcaactggtagttgtgggttgaagcactggacaatgccacatactttgtggatggtgtgggtcttgggggtcatcatcagcctctccaaggaagaatcctccaatcaggcttctctgtcttgtgaccgcaatggtatctgcaagggcagctcaggatctttaaactccattccctcagggctcacagaagctgtaaaaagccttgacctgtccaacaacaggatcacctacattagcaacagtgacctacagaggtgtgtgaacctccaggctctggtgctgacatccaatggaattaacacaatagaggaagattctttttcttccctgggcagtcttgaacatttagacttatcctataattacttatctaatttatcgtcttcctggttcaagcccctttcttctttaacattcttaaacttactgggaaatccttacaaaaccctaggggaaacatctcttttttctcatctcacaaaattgcaaatcctgagagtgggaaatatggacaccttcactaagattcaaagaaaagattttgctggacttaccttccttgaggaacttgagattgatgcttcagatctacagagctatgagccaaaaagtttgaagtcaattcagaatgtaagtcatctgatccttcatatgaagcagcatattttactgctggagatttttgtagatgttacaagttccgtggaatgtttggaactgcgagatactgatttggacactttccatttttcagaactatccactggtgaaacaaattcattgattaaaaagtttacatttagaaatgtgaaaatcaccgatgaaagtttgtttcaggttatgaaacttttgaatcagatttctggattgttagaattagagtttgatgactgtacccttaatggagttggtaattttagagcatctgataatgacagagttatagatccaggtaaagtggaaacgttaacaatccggaggctgcatattccaaggttttacttattttatgatctgagcactttatattcacttacagaaagagttaaaagaatcacagtagaaaacagtaaagtttttctggttccttgtttactttcacaacatttaaaatcattagaatacttggatctcagtgaaaatttgatggttgaagaatacttgaaaaattcagcctgtgaggatgcctggccctctctacaaactttaattttaaggcaaaatcatttggcatcattggaaaaaaccggagagactttgctcactctgaaaaacttgactaacattgatatcagtaagaatagttttcattctatgcctgaaacttgtcagtggccagaaaagatgaaatatttgaacttatccagcacacgaatacacagtgtaacaggctgcattcccaagacactggaaattttagatgttagcaacaacaatctcaatttattttctttgaatttgccgcaactcaaagaactttatatttccagaaataagttgatgactctaccagatgcctccctcttacccatgttactagtattgaaaatcagtaggaatgcaataactacgttttctaaggagcaacttgactcatttcacacactgaagactttggaagctggtggcaataacttcatttgctcctgtgaattcctctccttcactcaggagcagcaagcactggccaaagtcttgattgattggccagcaaattacctgtgtgactctccatcccatgtgcgtggccagcaggttcaggatgtccgcctctcggtgtcggaatgtcacaggacagcactggtgtctggcatgtgctgtgctctgttcctgctgatcctgctcacgggggtcctgtgccaccgtttccatggcctgtggtatatgaaaatgatgtgggcctggctccaggccaaaaggaagcccaggaaagctcccagcaggaacatctgctatgatgcatttgtttcttacagtgagcgggatgcctactgggtggagaaccttatggtccaggagctggagaacttcaatccccccttcaagttgtgtcttcataagcgggacttcattcctggcaagtggatcattgacaatatcattgactccattgaaaagagccacaaaactgtctttgtgctttctgaaaactttgtgaagagtgagtggtgcaagtatgaactggacttctcccatttccgtctttttgatgagaacaatgatgctgccattctcattcttctggagcccattgagaaaaaagccattccccagcgcttctgcaagctgcggaagataatgaacaccaagacctacctggagtggcccatggacgaggctcagcgggaaggattttgggtaaatctgagagctgcgataaagtcctaggttcccatatttaagaccagtctttgtctagttgggatctttatgtcactagttatagttaagttcattcagacataattatataaaaactacgtggatgtaccgtcatttgagga

SEQ ID NO: 965 - protein, 784 aa, Homo sapien
MPHTLWMVWVLGVIISLSKEESSNQASLSCDRNGICKGSSGSLNSIPSGLTEAVKSLDLSNNRITYISNSDLQRCVNLQALVLTSNGINTIEEDSFSSLGSLEHLDLSYNYLSNLSSSWFKPLSSLTFLNLLGNPYKTLGETSLFSHLTKLQILRVGNMDTFTKIQRKDFAGLTFLEELEIDASDLQSYEPKSLKSIQNVSHLILHMKQHILLLEIFVDVTSSVECLELRDTDLDTFHFSELSTGETNSLIKKFTFRNVKITDESLFQVMKLLNQISGLLELEFDDCTLNGVGNFRASDNDRVIDPGKVETLTIRRLHIPRFYLFYDLSTLYSLTERVKRITVENSKVFLVPCLLSQHLKSLEYLDLSENLMVEEYLKNSACEDAWPSLQTLILRQNHLASLEKTGETLLTLKNLTNIDISKNSFHSMPETCQWPEKMKYLNLSSTRIHSVTGCIPKTLEILDVSNNNLNLFSLNLPQLKELYISRNKLMTLPDASLLPMLLVLKISRNAITTFSKEQLDSFHTLKTLEAGGNNFICSCEFLSFTQEQQALAKVLIDWPANYLCDSPSHVRGQQVQDVRLSVSECHRTALVSGMCCALFLLILLTGVLCHRFHGLWYMKMMWAWLQAKRKPRKAPSRNICYDAFVSYSERDAYWVENLMVQELENFNPPFKLCLHKRDFIPGKWIIDNIIDSIEKSHKTVFVLSENFVKSEWCKYELDFSHFRLFDENNDAAILILLEPIEKKAIPQRFCKLRKIMNTKTYLEWPMDEAQREGFWVNLRAAIKS

SEQ ID NO: 966 - DNA, 1824 bp, Homo sapien
cagctctctgtcagaatggccaccatggtaccatccgtgttgtggcccagggcctgctggactctgctggtctgctgtctgctgaccccaggtgtccaggggcaggagttccttttgcgggtggagccccagaaccctgtgctctctgctggagggtccctgtttgtgaactgcagtactgattgtcccagctctgagaaaatcgccttggagacgtccctatcaaaggagctggtggccagtggcatgggctgggcagccttcaatctcagcaacgtgactggcaacagtcggatcctctgctcagtgtactgcaatggctcccagataacaggctcctctaacatcaccgtgtacgggctcccggagcgtgtggagctggcacccctgcctccttggcagccggtgggccagaacttcaccctgcgctgccaagtggagggtgggtcgccccggaccagcctcacggtggtgctgcttcgctgggaggaggagctgagccggcagcccgcagtggaggagccagcggaggtcactgccactgtgctggccagcagagacgaccacggagcccctttctcatgccgcacagaactggacatgcagccccaggggctgggactgttcgtgaacacctcagccccccgccagctccgaacctttgtcctgcccgtgacccccccgcgcctcgtggccccccggttcttggaggtggaaacgtcgtggccggtggactgcaccctagacgggctttttccagcctcagaggcccaggtctacctggcgctgggggaccagatgctgaatgcgacagtcatgaaccacggggacacgctaacggccacagccacagccacggcgcgcgcggatcaggagggtgcccgggagatcgtctgcaacgtgaccctagggggcgagagacgggaggcccgggagaacttgacggtctttagcttcctaggacccattgtgaacctcagcgagcccaccgcccatgaggggtccacagtgaccgtgagttgcatggctggggctcgagtccaggtcacgctggacggagttccggccgcggccccggggcagccagctcaacttcagctaaatgctaccgagagtgacgacggacgcagcttcttctgcagtgccactctcgaggtggacggcgagttcttgcacaggaacagtagcgtccagctgcgagtcctgtatggtcccaaaattgaccgagccacatgcccccagcacttgaaatggaaagataaaacgagacacgtcctgcagtgccaagccaggggcaacccgtaccccgagctgcggtgtttgaaggaaggctccagccgggaggtgccggtggggatcccgttcttcgtcaacgtaacacataatggtacttatcagtgccaagcgtccagctcacgaggcaaatacaccctggtcgtggtgatggacattgaggctgggagctcccactttgtccccgtcttcgtggcggtgttactgaccctgggcgtggtgactatcgtactggccttaatgtacgtcttcagggagcaccaacggagcggcagttaccatgttagggaggagagcacctatctgcccctcacgtctatgcagccgacagaagcaatgggggaagaaccgtccagagctgagtgacgctgggatccgggatcaaagttggcgggggcttggctgtgccctcagattccgcaccaataaagccttcaaactccctaaaaaaaaaaaaaaaaaaaaaaaaaaaaaaaaaaaaaaaaaaaaaaaaaaaaaaaaaaaaaaaaaaaaaaaaaaaaaaaaaaaaaa

SEQ ID NO: 967 - protein, 547 aa, Homo sapien
MATMVPSVLWPRACWTLLVCCLLTPGVQGQEFLLRVEPQNPVLSAGGSLFVNCSTDCPSSEKIALETSLSKELVASGMGWAAFNLSNVTGNSRILCSVYCNGSQITGSSNITVYGLPERVELAPLPPWQPVGQNFTLRCQVEGGSPRTSLTVVLLRWEEELSRQPAVEEPAEVTATVLASRDDHGAPFSCRTELDMQPQGLGLFVNTSAPRQLRTFVLPVTPPRLVAPRFLEVETSWPVDCTLDGLFPASEAQVYLALGDQMLNATVMNHGDTLTATATATARADQEGAREIVCNVTLGGERREARENLTVFSFLGPIVNLSEPTAHEGSTVTVSCMAGARVQVTLDGVPAAAPGQPAQLQLNATESDDGRSFFCSATLEVDGEFLHRNSSVQLRVLYGPKIDRATCPQHLKWKDKTRHVLQCQARGNPYPELRCLKEGSSREVPVGIPFFVNVTHNGTYQCQASSSRGKYTLVVVMDIEAGSSHFVPVFVAVLLTLGVVTIVLALMYVFREHQRSGSYHVREESTYLPLTSMQPTEAMGEEPSRAE

SEQ ID NO: 968 - DNA, 1999 bp, Homo sapien
gagcacgcagtcccttggtctcttcggtctcctgccgcccccgggaagcgcgctgcgctgccgaggcgagctaagcgcccgctcgccatggggagccccgcacatcggcccgcgctgctgctgctgctgccgcctctgctgctgctgctgctgctgcgcgtcccgcccagccgcagcttcccaggatcgggagactcaccactagaagacgatgaagtcgggtattcacaccctagatataaagataccccgtggtgctcccccatcaaggtgaagtatggggatgtgtactgcagggcccctcaaggaggatactacaaaacagccctgggaaccaggtgcgacattcgctgccagaagggctacgagctgcatggctcttccctactgatctgccagtcaaacaaacgatggtctgacaaggtcatctgcaaacaaaagcgatgtcctacccttgccatgccagcaaatggagggtttaagtgtgtagatggtgcctactttaactcccggtgtgagtattattgttcaccaggatacacgttgaaaggggagcggaccgtcacatgtatggacaacaaggcctggagcggccggccagcctcctgtgtggatatggaacctcctagaatcaagtgcccaagtgtgaaggaacgcattgcagaacccaacaaactgacagtccgggtgtcctgggagacacccgaaggaagagacacagcagatggaattcttactgatgtcattctaaaaggcctccccccaggctccaactttccagaaggagaccacaagatccagtacacagtctatgacagagctgagaataagggcacttgcaaatttcgagttaaagtaagagtcaaacgctgtggcaaactcaatgccccagagaatggttacatgaagtgctccagcgacggtgataattatggagccacctgtgagttctcctgcatcggcggctatgagctccagggtagccctgcccgagtatgtcaatccaacctggcttggtctggcacggagcccacctgtgcagccatgaacgtcaatgtgggtgtcagaacggcagctgcacttctggatcagttttatgagaaaaggagactcctcattgtgtccacacccacagcccgaaacctcctttaccggctccagctaggaatgctgcagcaagcacagtgtggccttgatcttcgacacatcaccgtggtggagctggtgggtgtgttcccgactctcattggcaggataggagcaaagattatgcctccagccctagcgctgcagctcaggctgttgctgcgaatcccactctactccttcagtatggtgctagtggataagcatggcatggacaaagagcgctatgtctccctggtgatgcctgtggccctgttcaacctgattgacacttttcccttgagaaaagaagagatggtcctacaagccgaaatgagccagacctgtaacacctgacatgatggttcctctcttggcaattcctcttcattgtctacatagtgacatgcacacgggaaagccttaaaaatatccttgatgtacagattttatttgtaattttaaaagtctattttattatgagctttctttgcacttaaaaattagcatgctgctttttgtacttggaagtgtttcaaaaaattatatgaccatatttactctttctaactttctttactccatcatggctggttgattttgtagagaaattagaacccataaccatacacaggctatcaacatgttattcaatgtgacacctaactcttttctattttgttttttaagtaagacttttattaataaaacaaaatgttttggagcaaaaaaaaaaaaaaaaaaaaaaaaaaaaaaaaaaaaaaaaaaaaaaaaaaaaaaaaaaaaaaaaaaaaaaaaaaaaaaaaaaaaaaaaaaaaaaaaaaaaaaaaaaaaaaaaaaaaaaaaaaaaaaaaaaaaaaaaaaaaaaaaaaaa

SEQ ID NO: 969 - protein, 464 aa, Homo sapien
MGSPAHRPALLLLLPPLLLLLLLRVPPSRSFPGSGDSPLEDDEVGYSHPRYKDTPWCSPIKVKYGDVYCRAPQGGYYKTALGTRCDIRCQKGYELHGSSLLICQSNKRWSDKVICKQKRCPTLAMPANGGFKCVDGAYFNSRCEYYCSPGYTLKGERTVTCMDNKAWSGRPASCVDMEPPRIKCPSVKERIAEPNKLTVRVSWETPEGRDTADGILTDVILKGLPPGSNFPEGDHKIQYTVYDRAENKGTCKFRVKVRVKRCGKLNAPENGYMKCSSDGDNYGATCEFSCIGGYELQGSPARVCQSNLAWSGTEPTCAAMNVNVGVRTAAALLDQFYEKRRLLIVSTPTARNLLYRLQLGMLQQAQCGLDLRHITVVELVGVFPTLIGRIGAKIMPPALALQLRLLLRIPLYSFSMVLVDKHGMDKERYVSLVMPVALFNLIDTFPLRKEEMVLQAEMSQTCNT

SEQ ID NO: 970 - DNA, 1670 bp, Homo sapien
attgagagtggctctaacaagtgccatttttccttgttagctttcatttctcagccctttacaagattaaaatagtctgcagtttaatctctccaaagctttacggacagtgattctgtcctaaacaagacagtgactccaggatttctgaagactattgtggaagaagcatccattaaggccaagctataacatcagaaatggtgaatgaatacaagaaaattcttttgctgaaaggatttgagctcatggatgattatcattttacatcaattaagtccttactggcctatgatttaggactaactacaaaaatgcaagaggaatacaacagaattaagattacagatttgatggaaaaaaagttccaaggcgttgcctgtctagacaaactaatagaacttgccaaagatatgccatcacttaaaaaccttgttaacaatcttcgaaaagagaagtcaaaagttgctaagaaaattaaaacacaagaaaaagctccagtgaaaaaaataaaccaggaagaagtgggtcttgcggcacctgcacccaccgcaagaaacaaactgacatcggaagcaagagggaggattcctgtagctcagaaaagaaaaactccaaacaaagaaaagactgaagccaaaaggaataaggtgtcccaagagcagagtaagcccccaggtccctcaggagccagcacatctgcagctgtggatcatcccccactaccccagacctcatcatcaactccatccaacacttcgtttactccgaatcaggaaacccaggcccaacggcaggtggatgcaagaagaaatgttccccaaaacgacccagtgacagtggtggtactgaaagcaacagcgccatttaaatacgagtccccagaaaatgggaaaagcacaatgtttcatgctacagtggccagtaagactcaatatttccatgtgaaagtcttcgacatcaacttgaaagagaaatttgtaaggaagaaggtcattaccatatctgattactctgaatgtaaaggagtaatggaaataaaggaagcatcatctgtgtctgactttaatcaaaattttgaggtcccaaacagaattatcgaaatagcaaataaaactcccaagatcagtcaactttacaagcaagcatctggaacaatggtgtatgggttgtttatgttacaaaagaaaagcgtacacaagaagaacacaatttatgaaatacaggataatacaggatccatggatgtagtggggagtggaaaatggcacaatatcaagtgtgagaaaggagataaacttcgactcttctgccttcaactgagaacagttgaccgcaagctgaaactggtgtgtggaagtcacagcttcatcaaggtcatcaaggccaagaaaaacaaggaaggaccaatgaatgttaattgaaatatgaaagctgaaatgcaacaaacaacttccgcttaaaacaattaagttgttaataactgtgattttgtaaatttcagtaattcatttaaatgatgtttcagtagatatattctagcatattaagagcttttataactgagttatagattagtttgctttctggaataaaattttcttcttatactcttccttttttttagatattacattttgcttttatgacattcacgaggcaaaaaaccg

SEQ ID NO: 971 - protein, 407 aa, Homo sapien
MVNEYKKILLLKGFELMDDYHFTSIKSLLAYDLGLTTKMQEEYNRIKITDLMEKKFQGVACLDKLIELAKDMPSLKNLVNNLRKEKSKVAKKIKTQEKAPVKKINQEEVGLAAPAPTARNKLTSEARGRIPVAQKRKTPNKEKTEAKRNKVSQEQSKPPGPSGASTSAAVDHPPLPQTSSSTPSNTSFTPNQETQAQRQVDARRNVPQNDPVTVVVLKATAPFKYESPENGKSTMFHATVASKTQYFHVKVFDINLKEKFVRKKVITISDYSECKGVMEIKEASSVSDFNQNFEVPNRIIEIANKTPKISQLYKQASGTMVYGLFMLQKKSVHKKNTIYEIQDNTGSMDVVGSGKWHNIKCEKGDKLRLFCLQLRTVDRKLKLVCGSHSFIKVIKAKKNKEGPMNVN

SEQ ID NO: 972 - DNA, 1339 bp, Homo sapien
ggccacccagtcatgggggacaccttcatccgtcacatcgccctgctgggctttgagaagcgcttcgtacccagccagcactatgtgtacatgttcctggtgaaatggcaggacctgtcggagaaggtggtctaccggcgcttcaccgagatctacgagttccataaaaccttaaaagaaatgttccctattgaggcaggggcgatcaatccagagaacaggatcatcccccacctcccagctcccaagtggtttgacgggcagcgggccgccgagaaccgccagggcacacttaccgagtactgcagcacgctcatgagcctgcccaccaagatctcccgctgtccccacctcctcgacttcttcaaggtgcgccctgatgacctcaagctccccacagacaaccagacaaaaaagccagagacatacttgatgcccaaagatggcaagagtaccgcgacagacatcaccggccccatcatcctgcagacgtaccgcgccattgccgactacgagaagacctcgggctccgagatggctctgtccacgggggacgtggtggaggtcgtggagaagagcgagagcggttggtggttctgtcagatgaaagcaaagcgaggctggatcccagcatccttcctcgagcccctggacagtcctgacgagacggaagaccctgagcccaactatgcaggtgagccatacgtcgccatcaaggcctacactgctgtggagggggacgaggtgtccctgctcgagggtgaagctgttgaggtcattcacaagctcctggacggctggtgggtcatcaggaaagacgacgtcacaggctactttccgtccatgtacctgcaaaagtcggggcaagacgtgtcccaggcccaacgccagatcaagcggggggcgccgccccgcaggtcgtccatccgcaacgcgcacagcatccatcagcggtcgcggaagcgcctcagccaggacgcctatcgccgcaacagcgtccgttttctgcagcagcgacgccgccaggcgcggccgggaccgcagagccccgggagcccgctcgaggaggagcggcagacgcagcgctctaaaccgcagccggcggtgcccccgcggccgagcgccgacctcatcctgaaccgctgcagcgagagcaccaagcggaagctggcgtctgccgtctgaggctggagcgcagtccccagctagcgtctcggcccttgccgccccgtgcctgtacatacgtgttctatagagcctggcgtctggacgccgagggcagccccgacccctgtccagcgcggctcccgccaccctcaataaatgttgcttggagtgg

SEQ ID NO: 973 - protein, 390 aa, Homo sapien [sequence omitted]

SEQ ID NO: 974 - DNA, 4221 bp, Homo sapien
aattcggcacgagacaaaaagagaaagaaaatgccgaaaccaatcaacgtaagagtaactacaatggatgctgagctggaatttgccattcagcccaatacaactggcaaacaactttttgaccaggtggtgaaaacagttggtttgcgtgaggtctggttttttgggctgcagtatgtagacagcaaaggttattctacatggcttaaactaaataaaaaggtaacacagcaggatgttaaaaaagagaatcctttacagttcaagtttagagctaaattctttcctgaagatgtttctgaggaattaattcaagaaataacccagagactcttcttcttgcaagttaaagaagccatcttaaatgatgagatatattgcccgccagaaactgcagttcttttggcttcctatgctgtccaagccaagtatggagattacaataaagagattcataagccaggctacctggctaatgatagactcctaccccagcgtgtattggaacaacacaaactaacaaaagaacagtgggaagaaagaatacagaactggcatgaagaacatagaggaatgttaagggaggattctatgatggaatacctgaagattgcacaagatctagaaatgtatggagtcaactattttgaaataaaaaataaaaaaggaactgaattgtggctaggtgttgatgctttgggtctgaatatttatgagcatgacgacaagttaacacctaaaattggttttccctggagtgaaatcagaaatatttcatttaatgacaaaaaatttgttataaagccaatcgacaaaaaggcacctgattttgtgttttatgcacctcgtctgagaatcaataagcggattttggccttatgtatgggaaaccatgaactatacatgcgaagaaggaagcctgatactattgaagtacaacagatgaaggctcaggctagggaggagaaacatcagaagcagttggaaagggcacaattagagaatgaaaagaagaaaagagaaatagcagaaaaggaaaaggaaagaatagaacgtgaaaaggaagagctaatggaacgtctaaaacaaattgaagagcagacaattaaagctcagaaagaactagaagaacagactcgaaaagctctagaactggatcaagaacgaaaacgagcaaaagaagaagcagaacgacttgaaaaggagcgtcgagctgctgaagaggcaaagtctgccatagcaaaacaagctgccgaccagatgaagaatcaggagcagctagcagcagaacttgctgaattcactgccaagattgcacttctagaggaagccaagaagaaaaaggaagaggaagcaactgagtggcaacacaaagcttttgcagcccaggaagacttggaaaagaccaaagaagagttaaaaactgtgatgtctgccccccctccacctccaccaccaccagtcattcctccaacagaaaacgaacatgatgaacacgatgagaataatgctgaagctagtgctgaattatcaaatgaaggggtaatgaaccatagaagcgaggaagaacgtgtaaccgaaacacagaaaaatgagcgtgttaagaagcaacttcaggcattaagttcagaattagcccaagccagagatgaaaccaagaaaacacaaaatgatgttcttcatgctgagaatgttaaagcaggccgtgataagtacaagactctgcgacagattcgacaaggcaatacaaagcagcgtatcgatgagtttgaagcaatgtgagagctgttattttgcatatatgttcttcataagctgaaccaccaacagagaaaagcaggcctttgcagatatgatggaatgcatcccaccttgccaaagcacttacaccagtttgactgtgctagctaaaagacaaatttaaggggagctcttcaacattaaggcagtatgatatcatgcttggttttcttttttcttttggtccagggaatggagaatggtgttccattgcctcttttcacattttttttctttttcttttttttttctgttgaagattaacactaattatcacgtctgacaaatgtgtatgtgtggtttcagttctgtgtacattttaaaggataatggtgaacattttaatgggtttcccttgccctttccatatttaacctatttccacattctctctcactcacattttctcagtgtgcccttctcttatctgccatgtccatagccataattccaccatcatacagatcaggcagtgtttaaaatgatggtaggtagcacagtggacagtctttgatcatcatgtagaatatggctatgaatcaggaaagagattagaacatttaataatgtatgtacagctggtgcttagtttttttttaatctaaatttaattaccttattggatatttgatatttggttatttaatcacagtcatctttaacagcttacactgattggtgttttatctcctgtgatcctttgatggctttttttgcctaccatttcacagaggtttagacagcagtagtagctccctaggagagtttactgatgaaacagcctctgcaagattttaaaagttttgttcttttatagactgatttagaaaaacaaatgattagttaaaaaaagaaaatatacatttgttggtaactaatgttattttttaaaacctggacctttctggaagggcagcatataaaaacatcagtcccgaggaggggacaacaatactacctcactactacatctgtgatgactggttgttcaaacacaatggagtgtgtaaggtatatgttttataattcataaccatagcctcgatcatcaagaaatactttcgaaatttcattttccttcagaatatcttaagagtgctaaatttttaactgcctttttgtcgagtcaaactgtgggattctgatttgtattaaaattgtaagctcctcactggtatactatcatcctggaggggtgttgtatggctgagcaagagagagagagaatgagagagagactgtgtgtgtgtgtgtgtgtgtgtgtactctgtgtgtgtatgagagagagagagaaatgctaaccttgtagcatgtgaagaatgtctgtaccttgatacgatagttacataatcagtatatttggtttctagatcactgtgcttattttgtttcaatctctgactaaaaatacttaaatttggtttgttaattcttattttagaaattataattttagtttatattaatttcggttatagcttactgaagaaatctttccagttagaaggaggttctaatattcacatgttctaatactttgtttattgtaaaacagctaaatttggagatacgtaaagccttgttttctctgtgtggttcagctactttccatttggtattacacagtcaaatttacatttatctattaaaattgccattttattaaacattttcatgcacagtagattcaagttgtgtctgaaaatatctcttgtgcttttttgattttgctgactttaaaaggattaatctgggcagacattatgtaaaagaaaggttgcgtttaatatattttttgaactttgtaggacaaaacatagctggttaaccttgaagtgactgttgtaccatggttgtgcacatgcttcagaatcctatggaagagaatattcctacttgcagtacatcaaaggaatggatggtggaccctactattcatgttttgagacataaatgttcactttaaagcaattgcataatagataaaaacctgaactttcattggatttttgttaattttcctcattttgaattatgtgcactaccatagctacatcagtttgatacagtattgaaaaattatcagttatattttgctgtttatgatctatttgtagattaggattaaaatggatttaatccatttttaaggctgtgtgaatttttctaaacaagaaccatttgcaatatggatttcttagagattaaaccaattataacttattagcagtcgcgagcacatgttcatatagtcaatgtaaaaatacactaatgagtatttggtaaatcccagtaggcttttaccattagcataattttgtgttgtacaattaagttacaattacatctctaattttggataatattcattggttaacaataaagtgacaaaagctcatgcaaaaaaaaaaaaaaaaaaaa

SEQ ID NO: 975 - protein, 583 aa, Homo sapien
MPKPINVRVTTMDAELEFAIQPNTTGKQLFDQVVKTVGLREVWFFGLQYVDSKGYSTWLKLNKKVTQQDVKKENPLQFKFRAKFFPEDVSEELIQEITQRLFFLQVKEAILNDEIYCPPETAVLLASYAVQAKYGDYNKEIHKPGYLANDRLLPQRVLEQHKLTKEQWEERIQNWHEEHRGMLREDSMMEYLKIAQDLEMYGVNYFEIKNKKGTELWLGVDALGLNIYEHDDKLTPKIGFPWSEIRNISFNDKKFVIKPIDKKAPDFVFYAPRLRINKRILALCMGNHELYMRRRKPDTIEVQQMKAQAREEKHQKQLERAQLENEKKKREIAEKEKERIEREKEELMERLKQIEEQTIKAQKELEEQTRKALELDQERKRAKEEAERLEKERRAAEEAKSAIAKQAADQMKNQEQLAAELAEFTAKIALLEEAKKKKEEEATEWQHKAFAAQEDLEKTKEELKTVMSAPPPPPPPPVIPPTENEHDEHDENNAEASAELSNEGVMNHRSEEERVTETQKNERVKKQLQALSSELAQARDETKKTQNDVLHAENVKAGRDKYKTLRQIRQGNTKQRIDEFEAM

SEQ ID NO: 976 - DNA, 451 bp, Homo sapien
acttccctgttcactttggttccagcatcctgtccagcaaagaagcaatcagccaaaatgatacctggaggcttatctgaggccaaacccgccactccagaaatccaggagattgttgataaggttaaaccacagcttgaagaaaaaacaaatgagacttatggaaaattggaagctgtgcagtataaaactcaagttgttgctggaacaaattactacattaaggtacgagcaggtgataataaatatatgcacttgaaagtattcaaaagtcttcccggacaaaatgaggacttggtacttactggataccaggttgacaaaaacaaggatgacgagctgacgggcttttagcagcatgtacccaaagtgttctgattccttcaactggctactgagtcatgatccttgctgataaatataaccatcaataaagaagcattcttttcca

SEQ ID NO: 977 - protein, 98 aa, Homo sapien
MIPGGLSEAKPATPEIQEIVDKVKPQLEEKTNETYGKLEAVQYKTQVVAGTNYYIKVRAGDNKYMHLKVFKSLPGQNEDLVLTGYQVDKNKDDELTGF

SEQ ID NO: 978 - DNA, 3714 bp, Homo sapien
gcctggcaccggggaccgttgcctgacgcgaggcccagctctacttttcgccccgcgtctcctccgcctgctcgcctcttccaccaactccaactccttctccctccagctccactcgctagtccccgactccgccagccctcggcccgctgccgtagcgccgcttcccgtccggtcccaaaggtgggaacgcgtccgccccggcccgcaccatggcacggttcggcttgcccgcgcttctctgcaccctggcagtgctcagcgccgcgctgctggctgccgagctcaagtcgaaaagttgctcggaagtgcgacgtctttacgtgtccaaaggcttcaacaagaacgatgcccccctccacgagatcaacggtgatcatttgaagatctgtccccagggttctacctgctgctctcaagagatggaggagaagtacagcctgcaaagtaaagatgatttcaaaagtgtggtcagcgaacagtgcaatcatttgcaagctgtctttgcttcacgttacaagaagtttgatgaattcttcaaagaactacttgaaaatgcagagaaatccctgaatgatatgtttgtgaagacatatggccatttatacatgcaaaattctgagctatttaaagatctcttcgtagagttgaaacgttactacgtggtgggaaatgtgaacctggaagaaatgctaaatgacttctgggctcgcctcctggagcggatgttccgcctggtgaactcccagtaccactttacagatgagtatctggaatgtgtgagcaagtatacggagcagctgaagcccttcggagatgtccctcgcaaattgaagctccaggttactcgtgcttttgtagcagcccgtactttcgctcaaggcttagcggttgcgggagatgtcgtgagcaaggtctccgtggtaaaccccacagcccagtgtacccatgccctgttgaagatgatctactgctcccactgccggggtctcgtgactgtgaagccatgttacaactactgctcaaacatcatgagaggctgtttggccaaccaaggggatctcgattttgaatggaacaatttcatagatgctatgctgatggtggcagagaggctagagggtcctttcaacattgaatcggtcatggatcccatcgatgtgaagatttctgatgctattatgaacatgcaggataatagtgttcaagtgtctcagaaggttttccagggatgtggaccccccaagcccctcccagctggacgaatttctcgttccatctctgaaagtgccttcagtgctcgcttcagaccacatcaccccgaggaacgcccaaccacagcagctggcactagtttggaccgactggttactgatgtcaaggagaaactgaaacaggccaagaaattctggtcctcccttccgagcaacgtttgcaacgatgagaggatggctgcaggaaacggcaatgaggatgactgttggaatgggaaaggcaaaagcaggtacctgtttgcagtgacaggaaatggattagccaaccagggcaacaacccagaggtccaggttgacaccagcaaaccagacatactgatccttcgtcaaatcatggctcttcgagtgatgaccagcaagatgaagaatgcatacaatgggaacgacgtggacttctttgatatcagtgatgaaagtagtggagaaggaagtggaagtggctgtgagtatcagcagtgcccttcagagtttgactacaatgccactgaccatgctgggaagagtgccaatgagaaagccgacagtgctggtgtccgtcctggggcacaggcctacctcctcactgtcttctgcatcttgttcctggttatgcagagagagtggagataattctcaaactctgagaaaaagtgttcatcaaaaagttaaaaggcaccagttatcacttttctaccatcctagtgactttgctttttaaatgaatggacaacaatgtacagtttttactatgtggccactggtttaagaagtgctgactttgttttctcattcagttttgggaggaaaagggactgtgcattgagttggttcctgctcccccaaaccatgttaaacgtggctaacagtgtaggtacagaactatagttagttgtgcatttgtgattttatcactctattatttgtttgtatgtttttttctcatttcgtttgtgggtttttttttccaactgtgatctcgccttgtttcttacaagcaaaccagggtcccttcttggcacgtaacatgtacgtatttctgaaatattaaatagctgtacagaagcaggttttatttatcatgttatcttattaaaagaaaaagcccaaaaagcagtaaaatttccatttctccctgttattttagttgccttatctggagagacgtggaggtgattttcttttttttaaattattattaagacagaatgtgagggcacaagcaggcttctgagccacttgtcagattgtattcaaagcatcaatccaagaaggaggttatgtgtacttcatttattggtgatagttggaagagactgcagactactgctttgaatgagttgaattacataagctaagatcactataggtccatttcttgaacccacttatacataaaatgtaacccatttagaaaaagattctggatatcatcccccttgaaagatagaaagcattcaggatgtcccagttatcacatgttcacacttgggtttaggggtgtttttttttaaaaccaggcaggttagctagcccaccctgtgctagttttcatgttcacactgaccctatttgaattaatatcctttgttagagtggtcgagatttcaaacccaattatgtacagggagctgtctgagagctagccagaactggggtacagcctgggctcagggaatagctgtcaacactcgggcaaagtttttgtctgtgcatgtgtatctccatttgttttgggatcccagtttttgttttaagagagtataaggtgtctcatttgagtctttttcttacctagccccctcttatcagtaaaacaaaggacttgccatggttcacagcaatgtgctacgatccaagatatcagccaaggagcccacttaggggagaactaggtgtccagatttttgtatgtgttgtttttcttgggggatggggtggggtgggagtaggtagagctgagaatactacatcttagtggtgacctttagccacgtgggtgaagtggcaaaggccatggccatatctgttgtcccaggccaaagactaacaactgccttgggaatcccttccttgtgtccttaccaaatgatagctcataaaactctgataatgtaacaaatcactttcaaaggagttcccagaagtcttcagaaagactaaaattctgtctcttcctgctttagacagccattaagatcccaactaattttaccgaacctaaaacccacaaagaggttgtttgtgttattgttcaatcttcagttgtaagagtaattctctatttttatattgaaacataattacttgatagctcagggtctacatttcattcaactttttacaccaaattctgcagagtggtcaaaatggaatattgggggctgttgtaaacagaggcttaattttattagaagtagccagttatttattaaagcatgatgttaataaaataggcatattc

SEQ ID NO: 979 - protein, 556 aa, Homo sapien
MARFGLPALLCTLAVLSAALLAAELKSKSCSEVRRLYVSKGFNKNDAPLHEINGDHLKICPQGSTCCSQEMEEKYSLQSKDDFKSVVSEQCNHLQAVFASRYKKFDEFFKELLENAEKSLNDMFVKTYGHLYMQNSELFKDLFVELKRYYVVGNVNLEEMLNDFWARLLERMFRLVNSQYHFTDEYLECVSKYTEQLKPFGDVPRKLKLQVTRAFVAARTFAQGLAVAGDVVSKVSVVNPTAQCTHALLKMIYCSHCRGLVTVKPCYNYCSNIMRGCLANQGDLDFEWNNFIDAMLMVAERLEGPFNIESVMDPIDVKISDAIMNMQDNSVQVSQKVFQGCGPPKPLPAGRISRSISESAFSARFRPHHPEERPTTAAGTSLDRLVTDVKEKLKQAKKFWSSLPSNVCNDERMAAGNGNEDDCWNGKGKSRYLFAVTGNGLANQGNNPEVQVDTSKPDILILRQIMALRVMTSKMKNAYNGNDVDFFDISDESSGEGSGSGCEYQQCPSEFDYNATDHAGKSANEKADSAGVRPGAQAYLLTVFCILFLVMQREWR

SEQ ID NO: 980 - DNA, 2961 bp, Homo sapien
aagagatgatttctccatcctgaacgtgcagcgagcttgtcaggaagatcggaggtgccaagtagcagagaaagcatcccccagctctgacagggagacagcacatgtctaaggcccacaagccttggccctaccggaggagaagtcaattttcttctcgaaaatacctgaaaaaagaaatgaattccttccagcaacagccaccgccattcggcacagtgccaccacaaatgatgtttcctccaaactggcagggggcagagaaggacgctgctttcctcgccaaggacttcaactttctcactttgaacaatcagccaccaccaggaaacaggagccaaccaagggcaatggggcccgagaacaacctgtacagccagtacgagcagaaggtgcgcccctgcattgacctcatcgactccctgcgggctctgggtgtggagcaggacctggccctgccagccatcgccgtcatcggggaccagagctcgggcaagagctctgtgctggaggcactgtcaggagtcgcgcttcccagaggcagcggaatcgtaaccaggtgtccgctggtgctgaaactgaaaaagcagccctgtgaggcatgggccggaaggatcagctaccggaacaccgagctagagcttcaggaccctggccaggtggagaaagagatacacaaagcccagaacgtcatggccgggaatggccggggcatcagccatgagctcatcagcctggagatcacctcccctgaggttccagacctgaccatcattgaccttcccggcatcaccagggtggctgtggacaaccagccccgagacatcggactgcagatcaaggctctcatcaagaagtacatccagaggcagcagacgatcaacttggtggtggttccctgtaacgtggacattgccaccacggaggcgctgagcatggcccatgaggtggacccggaaggggacaggaccatcggtatcctgaccaaaccagatctaatggacaggggcactgagaaaagcgtcatgaatgtggtgcggaacctcacgtaccccctcaagaagggctacatgattgtgaagtgccggggccagcaggagatcacaaacaggctgagcttggcagaggcaaccaagaaagaaattacattctttcaaacacatccatatttcagagttctcctggaggaggggtcagccacggttccccgactggcagaaagacttaccactgaactcatcatgcatatccaaaaatcgctcccgttgttagaaggacaaataagggagagccaccagaaggcgaccgaggagctgcggcgttgcggggctgacatccccagccaggaggccgacaagatgttctttctaattgagaaaatcaagatgtttaatcaggacatcgaaaagttagtagaaggagaagaagttgtaagggagaatgagacccgtttatacaacaaaatcagagaggattttaaaaactgggtaggcatacttgcaactaatacccaaaaagttaaaaatattatccacgaagaagttgaaaaatatgaaaagcagtatcgaggcaaggagcttctgggatttgtcaactacaagacatttgagatcatcgtgcatcagtacatccagcagctggtggagcccgcccttagcatgctccagaaagccatggaaattatccagcaagctttcattaacgtggccaaaaaacattttggcgaatttttcaaccttaaccaaactgttcagagcacgattgaagacataaaagtgaaacacacagcaaaggcagaaaacatgatccaacttcagttcagaatggagcagatggttttttgtcaagatcagatttacagtgttgttctgaagaaagtccgagaagagatttttaaccctctggggacgccttcacagaatatgaagttgaactctcattttcccagtaatgagtcttcggtttcctcctttactgaaataggcatccacctgaatgcctacttcttggaaaccagcaaacgtctcgccaaccagatcccatttataattcagtattttatgctccgagagaatggtgactccttgcagaaagccatgatgcagatactacaggaaaaaaatcgctattcctggctgcttcaagagcagagtgagaccgctaccaagagaagaatccttaaggagagaatttaccggctcactcaggcgcgacacgcactctgtcaattctccagcaaagagatccactgaagggcggcgatgcctgtggttgttttcttgtgcgtactcattcattctaaggggagtcggtgcaggatgccgcttctgctttggggccaaactcttctgtcactatcagtgtccatctctactgtactccctcagcatcagagcatgcatcaggggtccacacaggctcagctctctccaccacccagctcttccctgaccttcacgaagggatggctctccagtccttgggtcccgtagcacacagttacagtgtcctaagatactgctatcattcttcgctaatttgtatttgtattcccttccccctacaagattatgagaccccagagggggaaggtctgggtcaaattcttcttttgtatgtccagtctcctgcacagcacctgcagcattgtaactgcttaataaatgacatctcactgaacgaatgagtgctgtgtaagtgatggagatacctgaggctattgctcaagcccaggccttggacatttagtgactgttagccggtccctttcagatccagtggccatgccccctgcttcccatggttcactgtcattgtgtttcccagcctctccactcccccgccagaaaggagcctgagtgattctcttttcttcttgtttccctgattatgatgagcttccattgttctgttaagtcttgaagaggaatttaataaagcaaagaaactttttaaaaacgt

SEQ ID NO: 981 - protein, 715 aa, Homo sapien
MSKAHKPWPYRRRSQFSSRKYLKKEMNSFQQQPPPFGTVPPQMMFPPNWQGAEKDAAFLAKDFNFLTLNNQPPPGNRSQPRAMGPENNLYSQYEQKVRPCIDLIDSLRALGVEQDLALPAIAVIGDQSSGKSSVLEALSGVALPRGSGIVTRCPLVLKLKKQPCEAWAGRISYRNTELELQDPGQVEKEIHKAQNVMAGNGRGISHELISLEITSPEVPDLTIIDLPGITRVAVDNQPRDIGLQIKALIKKYIQRQQTINLVVVPCNVDIATTEALSMAHEVDPEGDRTIGILTKPDLMDRGTEKSVMNVVRNLTYPLKKGYMIVKCRGQQEITNRLSLAEATKKEITFFQTHPYFRVLLEEGSATVPRLAERLTTELIMHIQKSLPLLEGQIRESHQKATEELRRCGADIPSQEADKMFFLIEKIKMFNQDIEKLVEGEEVVRENETRLYNKIREDFKNWVGILATNTQKVKNIIHEEVEKYEKQYRGKELLGFVNYKTFEIIVHQYIQQLVEPALSMLQKAMEIIQQAFINVAKKHFGEFFNLNQTVQSTIEDIKVKHTAKAENMIQLQFRMEQMVFCQDQIYSVVLKKVREEIFNPLGTPSQNMKLNSHFPSNESSVSSFTEIGIHLNAYFLETSKRLANQIPFIIQYFMLRENGDSLQKAMMQILQEKNRYSWLLQEQSETATKRRILKERIYRLTQARHALCQFSSKEIH

SEQ ID NO: 982 - DNA, 4652 bp, Homo sapien
gggagaagctaggaaaaaatgtctttgagctgtgagatgcttgtatattttgaaaatatgattatatgcatgtgtttgtattttatgacttggataatctgaaaatcaatttgctttgtcaatgcttcctggattagaattccactatttggtccctatcctagtctactaaagaaaattgagcgggaaacatggcgggaaagtggcgtttcattaattgctactgtaactcgtctaatggagaggttgttagattacagaacttctataagactgaactgaacaaggaggagatgtatatacgctacattcacaaactctatgatctgcatctcaaagcacagaactttacagaagctgcatataccctcctcttatatgacgagctactggaatggtctgatcggcccctcagggagttcctgacctaccccatgcaaacagaatggcagcgcaaagagcacctgcacctcaccatcatccagaactttgacagaggcaaatgttgggagaatggcattatcttgtgccggaagattgcagagcagtatgagagttattatgactacagaaacctgagcaagatgcggatgatggaagcctctttgtatgacaaaattatggaccagcaacgtcttgaaccagagttcttcagagttggattttatggaaaaaaatttccatttttcttaagaaataaggagtttgtgtgtcgagggcatgactacgagaggctggaagccttccaacagagaatgctgaacgagttcccccatgccatcgccatgcagcacgccaaccagcccgatgagaccatcttccaggcagaagctcagtatttgcagatatatgctgtgactcccattccagagagccaggaggtcctgcagagagagggtgttccggacaacatcaaaagcttctataaagtgaatcacatctggaaattccgctatgaccgaccatttcacaaaggcacaaaagataaagagaatgaattcaagagtctctgggtggagagaacgtcattatacttggtgcagagtttgcctggcatctctcgctggtttgaagtggaaaagcgtgaagtggtagaaatgagtcctctggaaaatgcaattgaagtgctagaaaataagaatcagcagctgaagactctgattagtcagtgtcagacaagacagatgcagaatattaatcccctgactatgtgcctgaatggagttatagatgctgcagttaatggtggcgtttccaggtatcaagaggcattctttgtcaaagaatatatcttaagtcaccctgaagatggggagaaaattgcacgattaagagagctgatgcttgagcaggcacagattctggaatttggtttggccgtgcatgagaagtttgtacctcaagatatgagaccccttcacaaaaagctggttgaccaattctttgtgatgaagtcgagcttagggatacaggagttctctgcttgtatgcaagccagtcctgtccattttcctaatggaagccctcgtgtgtgtagaaactcagcacctgcttctgtgagcccagatggtaccagggtaattcctagacgcagcccgttaagttacccagctgtcaaccgatattcttcctcctcactgtcctcacaagcttctgctgaagtaagcaatattacagggcaatcagaaagctctgatgaagtctttaacatgcagccaagtccatctacctcaagcttgagttctactcactcggcttcacctaatgtgacaagttctgctccatcgagtgccagagcttctcctttgttgtctgacaaacacaaacattcccgagaaaactcttgcctgtcaccaagagagagaccatgcagtgccatctatccaacacctgtggagccttcgcagaggatgctgtttaatcatattggagacggggccttgccacgcagtgacccaaatctctctgcacctgaaaaagcttcaccagcaagacacacgacatcagtatccccctcgcctgccgggcgatctccattgaagggctctgtgcagtctttcaccccctctccagtggagtaccactcgccaggactcatctccaactcccctgtcttgtcgggcagctacagcagtgggatttcttctctcagccggtgcagcacgtcggaaacctcaggctttgaaaatcaggtgaatgaacagtcggcccccctgccggtgccagtgccggtgcccgtgccgagctacggcggggaggagccagtgcgcaaggagagcaagactccgcccccgtacagcgtctacgagcggactctgcggcgccccgtcccgctacctcacagcctctccatccccgtcacgtcggagccgcccgcgctgccccccaagcctctggcagcgcgatccagccacctggagaatggggcccggaggactgaccccggcccgcggcccaggcccctgccccgcaaggtctctcagttataagtcacttttctatgtacctgcgatgcattctttgcccgtttacaaaataagaagtatgatgagaagacatttagtgtaggcactttaataacttactcagctccttcgatgaatggaattaaaacttgcttattaaatatcatgttgcacaatattaaaagttgctgatctaaaacgccagatgttaaatgaagtatggctgaatttcattaaaacgtttctcatttggaagtggtaaatagtgataaagactccttttgtacctttttatgttcacttttttttatatagtttaatcttaaaaccaatacgatattgtcaaacgatacaatgtgtgacaatgttgtatcgtttttactgaatacttgatacttggagaaagcttattaagtcagtgcacatcctaacacagtggtccttattttagaagacttctgtaaataaggcaaggtttatcagtgcagatcatcagaattaaagttcaagcaggcgagcaagacagtatacttaaggggttgcaaagcttgggactggaaattgttttgttcttgaaacaaaatacttctttaaggttgcttttgctgtttgactgctgtctacattcgtaaaattctattttgtgaattggtagctaaatcccttactaccctgacaccgtggtatctactgtatttcttttcaaggtgcaatttgcttcagagttccaatcagctagattaagcaagaggctccagaagaaatgtttacttgaattttgcgcttcctttcttgatagtttcctatataaaatttgtcattgaacaagagcaaatgctgaagtattaatgaggcacaaatgactgtgccccattagcaagaattcaggaatcaatacagacagtattaaattaatagcttaagtgaagaaaaaaaaaaacttagtgaaaatgtattagcacgattaaatggcaaaaggacttataaaaggcaagggcattaactttcagtcctgcacaaaataaaaaattcctcacgactctccacttttaccagtggagtttgtcttagctgacctgtcgtctttctcttgaaggaggattgctgtagacttctctagcttgaatattgcaacatagcatcttaggtctagatagggatgctaatgccagttgtagaagtgtgaaaaaagcaccttgtatgtagtaatgtattttatatctttgttttttcttttactgactgtttataacactcaattgacaatagatatgaactgtattttaaatcatactgttaaatattttccctcttttgttgggaagctcattttagtttaaccatgtttgttttgttggtagcttacctggaaggcagtgaccacttttttatattctcttaatgaaaccattcagcaggtatatgctgttgaggctggttatagaggttttctataataaatgttcaagtatttttgtatataactggttaattttaataagagataccattatgtgtaaaaaaaagtaaaaataaacgcaaacagttgttgatgcagtatgattgttataattatgccaaatactttacgtatggaaaaagaatatttgtacatatgtgcttttaacaattctgccatattgactttacaattttgaatgtcggaaaaattaatatatgttaaatatttatgtttagtgaaagtgttcataattgagaaaaggaacatatgcattttagctttgtatcttgcaagttttgcagtcagaaattttttgaactagcttttgcttttgataacacttcgtgtttgtaaccacattcatatatatatacatatatatgtgaagctccatatttctgttgctttaaagaagtaaaaccttccatttaaataagatgacatgcataagataacaaagcttccttgatttccttttcctgtgtaatttaatagatttgttgactagtgcttgggcacattataaatcagtgttatttgctcttggagccattttttaaaaaaaattttggcagtgagcagttgaatttatcttgaatttatcatgtgtgtgtatttctgaagcagctacatagcagaacattttaagagattctgttagcccacatgttcatgttggttgctgctgaatggtaaatattaaataaaattaccagattaatctt

SEQ ID NO: 983 - protein, 765 aa, Homo sapien
MAGKWRFINCYCNSSNGEVVRLQNFYKTELNKEEMYIRYIHKLYDLHLKAQNFTEAAYTLLLYDELLEWSDRPLREFLTYPMQTEWQRKEHLHLTIIQNFDRGKCWENGIILCRKIAEQYESYYDYRNLSKMRMMEASLYDKIMDQQRLEPEFFRVGFYGKKFPFFLRNKEFVCRGHDYERLEAFQQRMLNEFPHAIAMQHANQPDETIFQAEAQYLQIYAVTPIPESQEVLQREGVPDNIKSFYKVNHIWKFRYDRPFHKGTKDKENEFKSLWVERTSLYLVQSLPGISRWFEVEKREVVEMSPLENAIEVLENKNQQLKTLISQCQTRQMQNINPLTMCLNGVIDAAVNGGVSRYQEAFFVKEYILSHPEDGEKIARLRELMLEQAQILEFGLAVHEKFVPQDMRPLHKKLVDQFFVMKSSLGIQEFSACMQASPVHFPNGSPRVCRNSAPASVSPDGTRVIPRRSPLSYPAVNRYSSSSLSSQASAEVSNITGQSESSDEVFNMQPSPSTSSLSSTHSASPNVTSSAPSSARASPLLSDKHKHSRENSCLSPRERPCSAIYPTPVEPSQRMLFNHIGDGALPRSDPNLSAPEKASPARHTTSVSPSPAGRSPLKGSVQSFTPSPVEYHSPGLISNSPVLSGSYSSGISSLSRCSTSETSGFENQVNEQSAPLPVPVPVPVPSYGGEEPVRKESKTPPPYSVYERTLRRPVPLPHSLSIPVTSEPPALPPKPLAARSSHLENGARRTDPGPRPRPLPRKVSQL

SEQ ID NO: 984 - DNA, 2838 bp, Homo sapien
ctccggcccggccccgagcaccgcctccccagccagcgccgccgcgatggcggaggacagcgagtctgcggccagccagcagagcctggaactggacgaccaggacacgtgcgggatagacggggacaatgaggaggagacggagcacgccaaaggaagtcctggagggtatttgggagccaaaaagaaaaagaagaaacagaagagaaaaaaggagaaaccaaattccggaggcaccaagtcagactcggcatctgattcccaggagattaaaattcagcagccttcgaaaaatcccagtgttccaatgcagaagttgcaggatatccagagagcaatggagctgctatccgcatgccagggcccagccaggaacattgatgaggctgcaaagcacagataccagttttgggacacacaaccggtaccaaaactagatgaagtcataacatctcatggtgcaattgaaccagataaagacaacgtacgccaagaaccgtattctttgccacagggttttatgtgggacactttagacttgagtgatgccgaagtgctcaaggagttatacacgttgttaaatgagaattacgtagaagatgatgacaatatgttccgatttgactattcacccgagttcctgttgtgggctctgcgtccaccaggctggctcctgcagtggcactgtggggtcagagtgtcttcaaataaaaaactggtcgggttcataagtgccatcccagcaaacattcggatttatgacagtgtgaagaagatggtagaaatcaactttctttgtgttcataagaagttgagatcgaaacgggtagccccagtgctaatccgagagatcactagaagagtgaacctggaagggatcttccaggctgtgtacaccgcgggagtggttcttcctaagcccatagccacatgcagatactggcatcgatcactaaaccccagaaaattggtagaagtgaaattttctcacttgagtagaaatatgactttacagagaacaatgaagctatacagacttccagatgttacaaagacttcaggtttgagaccaatggaaccaaaagatatcaaatcagttcgagaattaatcaacacttacctgaagcagtttcatctggctccagtgatggatgaagaggaagtagcccactggttcctcccccgggagcacattattgacacgtttgtagtggagagccccaacggtaaactgactgatttcctgagcttctatacgctcccctccacggtgatgcaccaccctgctcacaagagcctcaaagccgcctactcattctacaacatccacacagagacgcccctgctggacctcatgagcgacgcgctcatcctggctaaatcgaaaggatttgatgtattcaatgcactggatttgatggaaaataagacattcttggaaaaactcaagtttggtataggagatggcaatttgcagtattacctgtacaattggaggtgtccaggtacagattctgaaaaggttggactagtactacaatagatggatatttttatttctagaactctgacatcatcatttgttaatatttaatgatttctggaactgccattccaaagaagaataaaagcacaactcaagtgaaattgaagtagtcgataatcagaaaagatgacaaaagtccacatgtgacatttgtacgtttctagctagaatgttaaacttcatcctttttttactgttgacctatttgtgggagggatgaaaggctacaaagagcacattcttgtaattttcaaatttttgcctgtctcttgaagaggtattttttcacccttagaaaagggactgtttttctatggactaagtagaagttacagagtcatgtaagaaaatctttgctattgtgtggagagaaattgctgcatttctgtttcttaagtgatggtacatttgtccatgtaacagaacaaaagatccatttggaaattttttttactggtatcaccttacatggtatcactgggaacatttatggaatcaacacttctgtagctcagtgacaggtggtggttgtttaagtgcagagcaatattaaatgtactggtgactagtacatgtatttctccataagcagagttgccgaatcaataaacatgcaagtttgtactttgatctttaccaggtcagtggattgcttcaaaagcagagttttgtgcaagcactcactgtgctctctgaaagagcctgaggccgggcgtggtggctcacgcctgtaatcccagcactttgggaggccaaggtgggcagatcatgaggtcaggagatcgagaccattctggccaacatagtgaaaccccatctctactaaaaatacaaaaattagccgggcgtggtggcgtgtgcctgtagtcccagctgcttgggaggctgaggcaggagaatcgcttgaacctgagaggtgaggttgcagtgagccgagatcgagccactgcactccagcctgggtgacagagcgtgagactccgtctcaaaaaaaaaaaaaaaagaaagagcctgtacccgcgactaactagacttttcttgctgttgtgcaaagttcagtttcttctcagcaacatcaaggatatatgaagaaaaggaaataaaaaactgtaaagtcaaaagagatgcctggtggaacttattcgtgctatcagggcattgatagtttgaatgtttttattacttatgcaaaattgcacatactcctctatgctgattttatcatgaaaactgtcatgtgtcatgctaatggaaaatgtcttatttgtaaataagtattcataattttgccg

SEQ ID NO: 985 - protein, 498 aa, Homo sapien
MAEDSESAASQQSLELDDQDTCGIDGDNEEETEHAKGSPGGYLGAKKKKKKQKRKKEKPNSGGTKSDSASDSQEIKIQQPSKNPSVPMQKLQDIQRAMELLSACQGPARNIDEAAKHRYQFWDTQPVPKLDEVITSHGAIEPDKDNVRQEPYSLPQGFMWDTLDLSDAEVLKELYTLLNENYVEDDDNMFRFDYSPEFLLWALRPPGWLLQWHCGVRVSSNKKLVGFISAIPANIRIYDSVKKMVEINFLCVHKKLRSKRVAPVLIREITRRVNLEGIFQAVYTAGVVLPKPIATCRYWHRSLNPRKLVEVKFSHLSRNMTLQRTMKLYRLPDVTKTSGLRPMEPKDIKSVRELINTYLKQFHLAPVMDEEEVAHWFLPREHIIDTFVVESPNGKLTDFLSFYTLPSTVMHHPAHKSLKAAYSFYNIHTETPLLDLMSDALILAKSKGFDVFNALDLMENKTFLEKLKFGIGDGNLQYYLYNWRCPGTDSEKVGLVLQ

SEQ ID NO: 986 - DNA, 3380 bp, Homo sapien
gcacaccatggtgcacttctgtggcctactcaccctccaccgggagccagtgccgctgaagagtatctctgtgagcgtgaacatttacgagtttgtggctggtgtgtctgcaactttgaactacgagaatgaggagaaagttcctttggaggccttctttgtgttccccatggatgaagactctgctgtttacagctttgaggccttggtggatgggaagaaaattgtagcagaattacaagacaagatgaaggcccgcaccaactatgagaaagccatctcccagggccaccaggccttcttattggagggggacagcagctccagggatgtcttctcttgcaatgtgggtaacctccaacctgggtcgaaggcggcagtcaccctgaagtatgtgcaggagctgcctctggaagcagatggggctctgcgctttgtgctcccagctgtcctgaatcctagataccagttctctgggtcgtctaaggacagttgccttaatgtgaagactcctatagtccctgtggaggacctgccctacacactcagcatggtcgccaccatagattcccagcatggcattgagaaggtccaatccaactgccccttgagtcctaccgagtacctaggagaggacaagacttctgctcaggtttccctggctgctggacacaagtttgatcgggacgtggaactcctgatttactacaatgaggtgcatacccccagcgtggttttggagatggggatgcctaacatgaagccaggtcatttgatgggagatccatctgcaatggtgagtttctatccaaatatcccagaagatcaaccatcaaatacctgtggagagtttatctttctcatggaccgctcgggaagtatgcagagccccatgagtagccaggatacatctcgctgcgaatacaggcagccaaggaaacactgattttgctgctgaagagtttacctataggctgttatttcaacatctatggatttggctcttcctatgaggcatgctttccggagagtgtgaagtacactcagcaaacaatggaggaggctctggggagagtgaagcttatgcaggccgacctagggggcactgaaatcttggcaccactccagaacatttacaggggaccctccatcccaggccaccccctacagctttttgtctttacagatggagaagttacagacacgtttagtgtaattaaagaagttaggatcaacagacagaaacacaggtgtttctcatttggtattggagaaggcacctccaccagcctaataaaaggtattgcccgggcatcagggggcacctcagaatttatcacaggcaaagacaggatgcagtccaaggctctcaggactctgaaacgctctctgcagcctgtggtagaggatgtctctctgagctggcatttgcctcctggtctgtctgctaaaatgctttccccagaacagactgtcatctttaggggtcagagattaatcagctatgcccagctgaccgggaggatgccagcagcagagacaacaggagaagtatgcctcaaatatacactccagggcaagacttttgaggataaggtgacatttcctctacaacccaagcctgatgtcaacctcaccattcaccgccttgctgccaagtccttgctccagaccaaggacatgggcctcagggagactccagcaagtgataaaaaagatgcattgaaccttagccttgagtctggtgtcataagctccttcacagctttcattgctatcaataaggagctcaacaagccggttcaggggcctctggctcatagggacgtcccaaggccaattctgttgggtgcttctgccccattgaagataaaatgccaatcaggttttcgaaaggccttacactctgaccgtcctccttctgcatctcagcccagaggggaacttatgtgttataaggccaagacattccagatggacgattacagtctctgtgggttgataagtcacaaggaccagcacagtccaggctttggagagaatcaccttgtgcagctgatttaccaccaaaatgcaaatggttcctgggatctgaatgaagatctagccaagatcctaggtatgagtttggaagaaataatggctgcacagcctgccgagcttgtggattcctcaggctgggccaccatcctggccgtgatctggctgcacagcaatggtaaggacttgaagtgtgaatgggagcttctggaaaggaaggccgtggcctggatgcgtgcccatgcaggctccaccatgccttcggttgtgaaagctgctattactttcctgaagtcatctgtggatcctgctatctttgccttttgaagataccatccagaaaaagaagtgcctttaatttgctactgtcatttcctctagtatcacttttgctgtgatgatgtgttcttgtgtattataactctttattttttgccataaaagtaaaggatgcttactccacttcgcttctctgctccaggttcactttggatatgatctttcttttcccaacatatgccctcagaaaagtgacagtggtcccagaacctattccctttcttgagggagttcaaaacattcataggcagtaatgttcctcccagggtttccagggaaacaacatgaaaaacaggtgacatgaactacagactaaagattgcagcatttatgttagagaatgcttgaattagagaattttctgcattatctttgtctgttcactttctatcttatatacttatcagggccatactggtaagcttgcgtaggaggagttagagggaagttgaaagccaacatctggatcaatgtaatgtcaagatcacaaagacagagactgcaggggtccactgtgagaggtgacactgttggggaccttcctgattcattcttcttgggctttgctagcctgtacaacctacatgtcttttcttccactgcctgaaagacttgggttgaactataactgttggagagagatgttcctctttaatcatgaaacaccttaagaagtctataatgcaatccttagtcctaccctgaacctatgtgtcctctaagtcaggccctgatctagtgcagtaaagggaagggtgggcttaatgggagctttgcctgggacctgaacctggagcacttaccgcattaggaagaaaggagctccccgtaatcgttcctgacccttgtgtctcatataccctatcctggtggaaatgaccctatttgatatgctgtcccttaaaataacttgtatcaatattaaaatgactatttctaccctttaaaaaaaaaaaaaaaaaaaaaaaaaaaaaaaaaaaaaaaaaaaaaaaaaaaaaaaa

SEQ ID NO: 987 - protein, 437 aa, Homo sapien
MEEALGRVKLMQADLGGTEILAPLQNIYRGPSIPGHPLQLFVFTDGEVTDTFSVIKEVRINRQKHRCFSFGIGEGTSTSLIKGIARASGGTSEFITGKDRMQSKALRTLKRSLQPVVEDVSLSWHLPPGLSAKMLSPEQTVIFRGQRLISYAQLTGRMPAAETTGEVCLKYTLQGKTFEDKVTFPLQPKPDVNLTIHRLAAKSLLQTKDMGLRETPASDKKDALNLSLESGVISSFTAFIAINKELNKPVQGPLAHRDVPRPILLGASAPLKIKCQSGFRKALHSDRPPSASQPRGELMCYKAKTFQMDDYSLCGLISHKDQHSPGFGENHLVQLIYHQNANGSWDLNEDLAKILGMSLEEIMAAQPAELVDSSGWATILAVIWLHSNGKDLKCEWELLERKAVAWMRAHAGSTMPSVVKAAITFLKSSVDPAIFAF

SEQ ID NO: 988 - DNA, 839 bp, Homo sapien
aagccacaggctccctggctggcgtcagctaaagtggctgttgggtgtccgcaggcttctgcctggccgccgccgcctataagctaccaggaggagctttacgacttcccgtcctgcgggaagtggcgggcacgatcgcaaggtagcgcagaagcttctcaatggccagcgccagctgcagccccggcggcgcactcgcctcacctgagcctgggaggaaaattcttccaaggatgatctcccactcagagctgaggaagcttttctactcagcagatgctgtgtgttttgatgttgacagcacggtcatcagtgaagaaggaatcggatgctttcattggatttggaggaaatgtgatcaggcaacaagtcaaggataacgccaaatggtatatcactgattttgtagagctgctgggagaaccggaagaataacatccattgtcatacagctccaaacaacttcagatgaatttttacaagttacacagattgatactgtttgcttacaattgcctattacaacttgctataaaaagttggtacagatgatctgcactgtcaagtaaactacagttaggaatcctcaaagattggtttgtttgtttttaactgtagttccagtattatatgatcactatcgatttcctggagagttttgtaatctgaattctttatgtatattcctagctatatttcatacaaagtgttttaagagtggagagtcaattaaacacctttactcttaggaatatagattcggcagccttcagtgaatattggtttttttccctttggtatgtcaataaaagtttatccatgtgtcagaaaaaaaaaaa

SEQ ID NO: 989 - protein, 72 aa, Homo sapien
MASASCSPGGALASPEPGRKILPRMISHSELRKLFYSADAVCFDVDSTVISEEGIGCFHWIWRKCDQATSQG

SEQ ID NO: 990 - DNA, 6906 bp, Homo sapien
gcccgggcaggtggttgcagcattgcagaagagaaaagtagtttgttggcagagaatcaggtattaatggaaagactcaatcaatctgattctatagaagaccctaacagtccagcaggaagaaggcatttgcagctccagactcaattagaacagctccaagaagaaacattcagactagaagcagccaaagatgattatcgaatacgttgtgaagagttagaaaaggagatctctgaacttcggcaacagaatgatgaactgaccactttggcagatgaagctcagtctctgaaagatgagatcgacgtgctgagacattcttctgataaagtatctaaactagaaggtcaagtatcactagaattcagcggccgctgaattctagggaggcgcgccccccggctgggcgccgcgcgcaccatggggctcccagcgctcgagttcagcgactgctgcctcgatagtccgcacttccgagagacgctcaagtcgcacgaagcagagctggacaagaccaacaaattcatcaaggagctcatcaaggacgggaagtcactcataagcgcgctcaagaatttgtcttcagcgaagcggaagtttgcagattccttaaatgaatttaaatttcagtgcataggagatgcagaaacagatgatgagatgtgtatagcaaggtctttgcaggagtttgccactgtcctcaggaatcttgaagatgaacggatacggatgattgagaatgccagcgaggtgctcatcactcccttggagaagtttcgaaaggaacagatcggggctgccaaggaagccaaaaagaaatatgacaaagagacagaaaagtattgtggcatcttagaaaaacacttgaatttgtcttccaaaaagaaagaatctcagcttcaggaggcagacagccaagtggacctggtccggcagcatttctatgaagtatccctggaatatgtcttcaaggtgcaggaagtccaagagagaaagatgtttgagtttgtggagcctctgctggccttcctgcaaggactcttcactttctatcaccatggttacgaactggccaaggatttcggggacttcaagacacagttaaccattagcatacagaacacaagaaatcgctttgaaggcactagatcagaagtggaatcactgatgaaaaagatgaaggagaatccccttgagcacaagaccatcagtccctacaccatggagggatacctctacgtgcaggagaaacgtcactttggaacttcttgggtgaagcactactgtacatatcaacgggattccaaacaaatcaccatggtaccatttgaccaaaagtcaggaggaaaagggggagaagatgaatcagttatcctcaaatcctgcacacggcggaaaacagactccattgagaagaggttttgctttgatgtggaagcagtagacaggccaggggttatcaccatgcaagctttgtcggaagaggaccggaggctctggatggaagccatggatggccgggaacctgtctacaactcgaacaaagacagccagagtgaagggactgcgcagttggacagcattggcttcagcataatcaggaaatgcatccatgctgtggaaaccagagggatcaacgagcaagggctgtatcgaattgtgggggtcaactccagagtgcagaagttgctgagtgtcctgatggaccccaagactgcttctgagacagaaacagatatctgtgctgaatgggagataaagaccatcactagtgctctgaagacctacctaagaatgcttccaggaccactcatgatgtaccagtttcaaagaagtttcatcaaagcagcaaaactggagaaccaggagtctcgggtctctgaaatccacagccttgttcatcggctcccagagaaaaatcggcagatgttacagctgctcatgaaccacttggcaaatgttgctaacaaccacaagcagaatttgatgacggtggcaaaccttggtgtggtgtttggacccactctgctgaggcctcaggaagaaacagtagcagccatcatggacatcaaatttcagaacattgtcattgagatcctaatagaaaaccacgaaaagatatttaacaccgtgcccgatatgcctctcaccaatgcccagctgcacctgtctcggaagaagagcagtgactccaagcccccgtcctgcagcgagaggcccctgacgctcttccacaccgttcagtcaacagagaaacaggaacaaaggaacagcatcatcaactccagtttggaatctgtctcatcaaatccaaacagcatccttaattccagcagcagcttacagcccaacatgaactccagtgacccagacctggctgtggtcaaacccacccggcccaactcactccccccgaatccaagcccaacttcacccctctcgccatcttggcccatgttctcggcgccatccagccctatgcccacctcatccacgtccagcgactcatcccccgtcaggtctgttgcagggtttgtttggttttctgttgctgccgttgttctctcattggctcggtcctctcttcatgcagtgttcagcctcctcgtcaactttgttccctgccatccaaacctgcacttgctttttgacaggccagaagaagcggtacatgaagactccagcacaccgttccggaaggcaaaagccttgtatgcctgcaaagctgaacatgactcagaactttcgttcacagcaggcacggtcttcgataatgttcacccatctcaggagcctggctggttggaggggactctgaacggaaagactggcctcatccctgagaattacgtggagttcctctaaccgtgggccccagcagaactgctgagctttacatggtatccatgacaactgctgattccagtgtcgaggccatttctctttgccactgagaaatgcagcgtgactgactctgttgctacctgtcaacatgaatgtttctgtgagctctggtgtcactcatctccatgatcatctcagccaacatgcatcagtactgcaagaaaagaagtcaatcagcagaggagagcatttgataactaagaggaagacttgcaaagccgttttctcatgagtaccctgaatagggggcactcattttgtttcaacggtccaaacgcccaaccttcagaaagaggaagtcagatagaaatagtccctgagagcacactgtgtagctaagcctgctggggctgggtgaagaaattggcgctgagatccaggctggatccattgcttttgtttacaataggcactctctctaccccacctctcagtacttgagacttaaagtgctacaggcagctggatctgtttgcatgcaggatgaagagggttaaaacactgtttatataagatccaatctctcaccatctctaaagcagccgttggcctgtcatcagtgagatacaatccagtcttctcatgcacgggaacacacacaccctgcgtttctccctcccaggctaggaacctctctgccaccaagggctgccatccatcgcctagtaaccacggcaacccaacctactctaaaaccaaaccaaaaaaataaaataacacatcctctttgcatgacacattttttttctcccctttttggtacactttttttgaatggttttctaacaacttgaagcacaggatcaaggaattagggtggtctacttgaggcagatgggatagtagctgggaactgttccctttctgattaatttcagcagcatcggaatatatttggagcacaccctagtaacctcttgagattaaattacatagtcttaatatttctgttcctccatgcaactgatgtttgttttttaaagggtaagatgctgcctcccaatgggtgatgccatctgactggtttccccatgtcctcccattcacccatctctgctcccacccttgcctgcctctaacccaccactggccagcccccttgccctactctgggctgctgaacactggtgctgtggtggttttcaaggttaattcctaggctaaccgtatggcctatagtttaaaagcacatctatgttcactgccactctgaaaaagggaattatttctcagtctttcaaggcttgagactaatataggccattgtgattcaggaagaaacccaaggttggagggtgggatgagtaccctctgaaaaagggaatttgctggtgaaaagaggctggatcttgtggaagactgtcttggatggggaagtactacctggagatttcaaattcacttggcctgcaaacaacagagttatccgtatcttccacatgtgaatgtcattgcaagggtgactctagacaaactacaaaccgatggaccgtcaagctccccaggagccccttggatggcagcgttgcttcagagtgtttcctgtttctggaattccttgttagggaactttaaagaagaaaagaaaaacttgaattgtgttgaattactgtatcttttactttttttttttgaaaagataaacttgtaaatagagtgatttgaaatactatatggcaaagttttatatttgatattctttaagttagttgctcacacacttaggctttgattgctgaagaagtatgtttaagagggagagaggggaggcaaagctgaagagagtcaaggtcactgtccccgcttcggcctgaaggaaagagaagacatttctatggccttgctctctgctgtcctgttggtgggcacgacacatcagtggtgttcagtctttatgtgtttttaagcatcccttgggctttggatttggagatgggaagagcatctccaggcaatgagtttttcaaagaatgcctacttagtagtaagatgaagctcaggatttaaataagtggggtcaggcattcgagtttttgtctttcttctcaggtgtatttcttggtacccccaagatatcaggccagaaagagatgagtcagttgctgtgctctttacttctttttctccacatcttctgaggctttagaaatgtggacaagctagttttcaaattttgtgtgcgtctgtaagttcttaaagaaccagcttcttagaatgttcagttctcaatgtgctgctgctttcccttctcctaaacattttaaaactcttccctttcacctccaattcccgtgatcccaaaagaagaggaagactccaggaggggtatagattgtgccgtcatagctttacaggtggttttaaagttagcaggggtttgtcatggtgattcactactcagtttatcagctcaaggattatacagctcttttccgggaactcacccaggagcaagcgagacactaccattgaatcagggaatgagaattaagaatggacaggaccaagacagaactcaagaaagccactggggaaaactcgagaagaaagggagtatactagtaggttagatctgtgaacctgaggacaagaagaccttgggaaatggaggcctcaggggatgtgcattcacatactattacgcttctcaaagagagaccaacatcatgcttttaacacatttgatgaggttttttatttgtgtttttgtttgttttttgagatggagtctcactctgtggcccaggctggagtgcagtggcgcggtcttggctcactgcaacctccgcctcccgggttcaagtgattctcctgtctcagcctcccaagtagctgggactgcaggcatgagccatcacacccggctggttttttgtgtttttagtagagatggggttttgccatgtttgccgggctgatctcgaactcctgacctcaagtgatctgcccacttcggacccccaaagtgctgggattccaggtgtgagccgctgcggccgaccacatttgatgtttgaagttgtaatctgtcccatcataaacttacctggagctcatgtggaggaacagaaggccaagatccttgctttgggggtgcctcacgaagcatccctgtagacacttggccccagcttcactgcttggaagcatgtccctccctcttgagttggctctgatttgaaatcgggagaaacagagctgctgccaatgggatcttttaggtaactccctccctagcttccgtgtgtctgtgcagtgcccatgagctgctgccaatgggatctttcaggtaccccctccccagcttccctgtggctgtgcggtgcccttgacagatggcttctctgtttccctttgcccagccaggctcccctccttcctattagctacaaaactggataaacttcagaatatgagccaatgagtaggaaggaacttgaagactaaagattttactctctcccctatccatgccccctacctctgactctctctgtgtgaacaggaaactttagggtagatgaggagaatgaattggttatcagagtggaagaccatggcccaggatccctgagctttcccagtagcctccagtttcctttgtaagacccagggatcacttagccatagcctgaatcttttaggggtattaaggtcagcctctcactcttccttcaggttactaacaaaatttcgtagctaaagaatgccatggccgggtgcagtggctcacgcctataatcccagcactttgggaggccgaggcgggcggatcacgaggtcaggagattgagaccatcctggctacgacggtgaagccccgtctctgctaagagtgcaaaaaattagccgggtgtggtggcgggcgcctgtagtcccagctactctggaggctgaggcaggagaatggcatgagcccgggaggcggagattgcggtgagccaagatcgcgcccctgcactccagcctgggtgacagagccagactccgtctcaaagg

SEQ ID NO: 991 - protein, 814 aa, Homo sapien
MGLPALEFSDCCLDSPHFRETLKSHEAELDKTNKFIKELIKDGKSLISALKNLSSAKRKFADSLNEFKFQCIGDAETDDEMCIARSLQEFATVLRNLEDERIRMIENASEVLITPLEKFRKEQIGAAKEAKKKYDKETEKYCGILEKHLNLSSKKKESQLQEADSQVDLVRQHFYEVSLEYVFKVQEVQERKMFEFVEPLLAFLQGLFTFYHHGYELAKDFGDFKTQLTISIQNTRNRFEGTRSEVESLMKKMKENPLEHKTISPYTMEGYLYVQEKRHFGTSWVKHYCTYQRDSKQITMVPFDQKSGGKGGEDESVILKSCTRRKTDSIEKRFCFDVEAVDRPGVITMQALSEEDRRLWMEAMDGREPVYNSNKDSQSEGTAQLDSIGFSIIRKCIHAVETRGINEQGLYRIVGVNSRVQKLLSVLMDPKTASETETDICAEWEIKTITSALKTYLRMLPGPLMMYQFQRSFIKAAKLENQESRVSEIHSLVHRLPEKNRQMLQLLMNHLANVANNHKQNLMTVANLGVVFGPTLLRPQEETVAAIMDIKFQNIVIEILIENHEKIFNTVPDMPLTNAQLHLSRKKSSDSKPPSCSERPLTLFHTVQSTEKQEQRNSIINSSLESVSSNPNSILNSSSSLQPNMNSSDPDLAVVKPTRPNSLPPNPSPTSPLSPSWPMFSAPSSPMPTSSTSSDSSPVRSVAGFVWFSVAAVVLSLARSSLHAVFSLLVNFVPCHPNLHLLFDRPEEAVHEDSSTPFRKAKALYACKAEHDSELSFTAGTVFDNVHPSQEPGWLEGTLNGKTGLIPENYVEFL

SEQ ID NO: 992 - DNA, 1839 bp, Homo sapien
ttttttttttttttgccggagtcgagcgggtgctgctagcggaggcgccatattggaggggacaaaactccggcgacagcgagtgacacaaataaacccctggacccccttgttccctcagctctaagggccgcgatgttgtacctagaagactatctggaaatgattgagcagcttcctatggatctgcgggaccgcttcacggaaatgcgcgagatggacctgcaggtgcagaatgcaatggatcaactagaacaaagagtcagtgaattctttatgaatgcaaagaaaaataaacctgagtggagggaagagcaaatggcatccatcaaaaaagactactataaagctttggaagatgcagatgagaaggttcagttggcaaaccagatatatgacttggtagatcgacacttgagaaagctggatcaggaactggctaagtttaaaatggagctggaagctgataatgctggaattacagaaatattagagaggcgatctttggaattagacactccttcacagccagtgaacaatcaccatgctcattcacatactccagtggaaaaaaggaaatataatccaacttctcaccatacgacaacagatcatattcctgaaaagaaatttaaatctgaagctcttctatccacccttacgtcagatgcctctaaggaaaatacactaggttgtcgaaataataattccacagcctcttctaacaatgcctacaatgtgaattcctcccaacctctgggatcctataacattggctcgttatcttcaggaactggtgcaggggcaattaccatggcagctgctcaagcagttcaggctacagctcagatgaaggagggacgaagaacatcaagtttaaaagccagttatgaagcatttaagaataatgactttcagttgggaaaagaattttcaatggccagggaaacagttggctattcatcatcttcggcacttatgacaacattaacacagaatgccagttcatcagcagccgactcacggagtggtcgaaagagcaaaaacaacaacaagtcttcaagccagcagtcatcatcttcctcctcctcttcttccttatcatcgagttcttcatcatcaactgttgtacaagaaatctctcaacaaacaactgtagtgccagaatctgattcaaatagtcaggttgattggacttacgacccaaatgaacctcgatactgcatttgtaatcaggtatcttatggtgagatggtgggatgtgataaccaagattgccctatagaatggttccattatggctgcgttggattgacagaggcaccaaaaggcaaatggtactgtccacagtgcactgctgcaatgaagagaagaggcagcagacacaaataaaggtggtccttttgtttgatgaagaaataaacttcagctgaagattttatataggactttaaaaagaagagaagagaaagaagaaacaatgcatttccaggcaaccacttaaaggatttacatagacaatcctataagatcttgaacttgaattttatgggttgtattttaataatgtaagtaaattatttatgcactcctggtgtgctatgaatattattccagttagccttggattatttcagtggccaacatatgcagacatttgtactcctcaaccattttctcaaagtaatgggcattctatgatttagacttcaaggaattccaatgatgaagattttaaggaaagtattttatattcaacaggtatattctgctgcatgtactgtactccagagctgttatgtaacactgtatataaatggttacaaaaaaaaaaaaaaa

SEQ ID NO: 993 - protein, 418 aa, Homo sapien
MLYLEDYLEMIEQLPMDLRDRFTEMREMDLQVQNAMDQLEQRVSEFFMNAKKNKPEWREEQMASIKKDYYKALEDADEKVQLANQIYDLVDRHLRKLDQELAKFKMELEADNAGITEILERRSLELDTPSQPVNNHHAHSHTPVEKRKYNPTSHHTTTDHIPEKKFKSEALLSTLTSDASKENTLGCRNNNSTASSNNAYNVNSSQPLGSYNIGSLSSGTGAGAITMAAAQAVQATAQMKEGRRTSSLKASYEAFKNNDFQLGKEFSMARETVGYSSSSALMTTLTQNASSSAADSRSGRKSKNNNKSSSQQSSSSSSSSSLSSSSSSSTVVQEISQQTTVVPESDSNSQVDWTYDPNEPRYCICNQVSYGEMVGCDNQDCPIEWFHYGCVGLTEAPKGKWYCPQCTAAMKRRGSRHK

SEQ ID NO: 994 - DNA, 3252 bp, Homo sapien
gcggcccaggcccggaaccttccctggtcgtgcgccctatgtaaggccagccgcggcaggaccaaggcggcggtgtcagctcgcgagcctaccctccgcggacggtcttgggtcgcctgctgcctggcttgcctggtcggcggcgggtgccccgcgcgcacgcgcaaagcccgccgcgttccccgaccccaggccgcgctctgtgggcctctgagggcggcatgcgggactacgacgaggtgaccgccttcctgggcgagtgggggcccttccagcgcctcatcttcttcctgctcagcgccagcatcatccccaatggcttcaccggcctgtcctccgtgttcctgatagcgaccccggagcaccgctgccgggtgccggacgccgcgaacctgagcagcgcctggcgcaaccacactgtcccactgcggctgcgggacggccgcgaggtgccccacagctgccgccgctaccggctcgccaccatcgccaacttctcggcgctcgggctggagccggggcgcgacgtggacctggggcagctggagcaggagagctgtctggatggctgggagttcagtcaggacgtctacctgtccaccattgtgaccgagtggaacctggtgtgtgaggacgactggaaggccccactcacaatctccttgttcttcgtgggtgtgctgttgggctccttcatttcagggcagctgtcagacaggtttggccggaagaatgtgctgttcgtgaccatgggcatgcagacaggcttcagcttcctgcagatcttctcgaagaattttgagatgtttgtcgtgctgtttgtccttgtaggcatgggccagatctccaactatgtggcagcatttgtcctggggacagaaattcttggcaagtcagttcgtataatattctctacgttaggagtgtgcatattttatgcatttggctacatggtgctgccactgtttgcttacttcatccgagactggcggatgctgctggtggcgctgacgatgccgggggtgctgtgcgtggcactctggtggttcatccctgagtccccccgatggctcatctctcagggacgatttgaagaggcagaggtgatcatccgcaaggctgccaaagccaatgggattgttgtgccttccactatctttgacccgagtgagttacaagacctaagttccaagaagcaacagtcccacaacattctggatctgcttcgaacctggaatatccggatggtcaccatcatgtccataatgctgtggatgaccatatcagtgggctattttgggctttcgcttgatactcctaacttgcatggggacatctttgtgaactgcttcctttcagcgatggttgaagtcccagcatatgtgttggcctggctgctgctgcaatatttgccccggcgctattccatggccactgccctcttcctgggtggcagtgtccttctcttcatgcagctggtacccccagacttgtattatttggctacagtcctggtgatggtgggcaagtttggagtcacggctgccttttccatggtctacgtgtacacagccgagctgtatcccacagtggtgagaaacatgggtgtgggagtcagctccacagcatcccgcctgggcagcatcctgtctccctacttcgtttaccttggtgcctacgaccgcttcctgccctacattctcatgggaagtctgaccatcctgacagccatcctcaccttgtttctcccagagagcttcggtaccccactcccagacaccattgaccagatgctaagagtcaaaggaatgaaacacagaaaaactccaagtcacacaaggatgttaaaagatggtcaagaaaggcccacaatccttaaaagcacagccttctaacatcgcttccagtaagggagaaactgaagaggaaagactgtcttgctagaaatggccagcttgtgcagactccgagtccttcagtgacaaaggcctttgctgtttgtcctcttgacctgtgtctgacttgctcctggatgggcacccacactcagaggctacatatggccctagagcaccaccttcctctagggacactggggctacctacagacaacttcatctaagtcctaactattacaatgatggactcagcacctccaaagcagttaatttttcactagaaccagtgagatctggaggaatgtgagaagcatatgctaaatgtacattttaattttagactacttgaaaaggcccctaataaggctagaggtctaagtcccccacccctttccccactcccctctagtggtgaactttagaggaaaaggaagtaattgcacaaggagtttgattcttaccttttctcagttacagaggacattaactggatcattgcttccccagggcaggagagcgcagagctagggaaagtgaaaggtaatgaagatggagcagaatgagcagatgcagatcaccagcaaagtgcactgatgtgtgagctcttaagaccactcagcatgacgactgagtagacttgtttacatctgatcaaagcactgggcttgtccaggctcataataaatgctccattgaatctactattcttgttttccactgctgtggaaacctccttgctactatagcgtcttatgtatggtttaaaggaaatttatcaggtgagagagatgagcaacgttgtcttttctctcaaagctgtaatgtgggttttgttttactgtttatttgtttgttgttgtatccttttctccttgttatttgcccttcagaatgcacttgggaaaggctggttccttagcctcctggtttgtgtctttttttttttttttttaaacacagaatcactctggcaattgtctgcagctgccactggtgcaaggccttaccagccctagcctctagcacttctctaagtgccaaaaacagtgtcattgtgtgtgttcctttcttgatacttagtcatgggaggatattacaaaaaagaaatttaaattgtgttcatagtctttcagagtagctcactttagtcctgtaactttattgggtgatattttgtgttcagtgtaattgtcttctctttgctgattatgttaccatggtactcctaaagcatatgcctcacctggttaaaaaagaacaaacatgtttttgtgaaagctactgaagtgccttgggaaatgagaaagttttaataagtaaaatgattttttaaatatcaaaaaaaaaaaaaaaa

SEQ ID NO: 995 - protein, 557 aa, Homo sapien
MRDYDEVTAFLGEWGPFQRLIFFLLSASIIPNGFTGLSSVFLIATPEHRCRVPDAANLSSAWRNHTVPLRLRDGREVPHSCRRYRLATIANFSALGLEPGRDVDLGQLEQESCLDGWEFSQDVYLSTIVTEWNLVCEDDWKAPLTISLFFVGVLLGSFISGQLSDRFGRKNVLFVTMGMQTGFSFLQIFSKNFEMFVVLFVLVGMGQISNYVAAFVLGTEILGKSVRIIFSTLGVCIFYAFGYMVLPLFAYFIRDWRMLLVALTMPGVLCVALWWFIPESPRWLISQGRFEEAEVIIRKAAKANGIVVPSTIFDPSELQDLSSKKQQSHNILDLLRTWNIRMVTIMSIMLWMTISVGYFGLSLDTPNLHGDIFVNCFLSAMVEVPAYVLAWLLLQYLPRRYSMATALFLGGSVLLFMQLVPPDLYYLATVLVMVGKFGVTAAFSMVYVYTAELYPTVVRNMGVGVSSTASRLGSILSPYFVYLGAYDRFLPYILMGSLTILTAILTLFLPESFGTPLPDTIDQMLRVKGMKHRKTPSHTRMLKDGQERPTILKSTAF

SEQ ID NO: 996 - DNA, 2732 bp, Homo sapien
cacacctttccaaggacccccaaactctgctccgtgcacgtcaaatgctcctttcccttgtgtccaaccccctacccctctccctaacacccctcttctcaacaagactcagcctctccccgaggtgggtgagcatccttgaggtttcccacccttaactgctgtgtccccggatggagccagagaaatgtggtgggggggccggggcagagtttcaacattgccccccagaaggaggagccagagatggggtctgtccaggaaaacaggatgccggagcccaggagtcgtcagcctagcagttgcctggcctccagatgcctcccaggggagcagatcctagcatgggccccaggggtgaggaagggcctggaaccagaattgtctggaaccctgatctgtaccaactttagggtcaccttccagccctgtggatggcagtggaatcaggacactcccttgaacagtgaatacgattttgccctggtcaacattggacgattagaggctgtgagcggcttgtcccgagtccagctcctccgtccagggtccctgcataaatttatccctgaggagattctgattcatggccgagacttccggctgctcagagttggttttgaggctggaggcctagagcctcaggcttttcaggtgaccatggccattgtccaagccagagctcagagcaatcaagcccaacagtattcggggataaccctgagcaaggctggccagggttctggctccagaaaaccaccaattcctctcatggagacagcggaagactgggagactgagcggaagaagcaggcagccagaggctggagggtcagcacggtcaacgagaggttcgacgtagccaccaggctccggtgtttctcctcttccttgattgtgtctggcagctcctccagcagtttccagctgattttgaattctctgagtttttccttcttgctcttcatgacagtgtcagggttcctgacacccttaccttcctgagaaataccccctgggagcgcggaaagcagagcggacaggtcagtgacttctatttttgactcgtgtttttttttccattgagatgtactctctgaagtttggtcttgatttgttttatgagaagtgaggtctgtgagtggggagggggagatttattctcattttcaggacgagacttttgccctacatctttcctagaataagaggtgagaatctcatgatttgtctctagatgtgggaggattgtgtgtaaccatcctttttcttgcttcctctgtccagttaaactcctatacacaagtctacaccccaggatactccagcctccagctgggaactcttttaacctgcagctgtctgtctgggactgggatttacgttatagcaatgcacagatactacaattccagaatcctggctatgacccagaacactgtccagattcctggctccctagaccacagccaagcttcatggttcctggaccccccagttttgtgtggctcttctctagaggagcattgacccccctgaatcagctctgtccttggcgggacagtccttccctgctggcagtctcttctcgttggctccctcgacctgctatctcctctgaaagctggctgaccaggaatggggtctcccctcacattggggagcttgccctttacctccagggctgctgctgcctgggtatctgggaccccagatcaggctctggagacgctgctacctgaggggaaggcctgaggtccaggtaagaagggaaaatagactgggagtgggacaagggacttgactctgctgaaccagatgaacaggagctggaaaggcaaggagctgaagcctctgggagtctgggaagtgaagttctactcctcttggcatcaaacaaggtttgggagtgtaggaggtgcgggaaagtgcttgtggcttagattaagtggaatttagggcatagctgaaaggggaaacagaattaaagacaccagaagtagcagagaagcagggggccagagctacaacagtattcttctctgttcctctttgcctcctccccagatgggcctctcatctcccacaatctctggcctccaggatgagctatcccatcttcaggagttattacggaaaggacaccaagaatatctcctgaggatcactccaagaaaagagatccacataccattctcaatcccactgaaattgctggcattctcaaaggcagggcagagggggatctggggtagagggagggttctgtctaatcttttttttttcttttgtatctgcacttgcagcctcagctttcatacttcagcccttaagttcactaagaaggtctgagtttctgctgcagatagtggtgttaactgctccaactcttgtcttgcttagtttctacaaatatttttgcttcttgtcatttgaaggattaagaaacaaaaacaatccagaaattgatcggtttttttaggccaatcccatcccttctggataaccagatgttaaatcatgagatcagagatgctgttcatcagtcccaacaagatggcctagaaatcgcattctcacctcgccttgctgctgctttaattccaagttctatttcttcccttatagttttctatgggaatgaggcggatacaggaaacaccctatctcctctgtatttttgtagtggaatttctatttaaggggctcattaaagcatagtatttatacac

SEQ ID NO: 997 - protein, 252 aa, Homo sapien
MGSVQENRMPEPRSRQPSSCLASRCLPGEQILAWAPGVRKGLEPELSGTLICTNFRVTFQPCGWQWNQDTPLNSEYDFALVNIGRLEAVSGLSRVQLLRPGSLHKFIPEEILIHGRDFRLLRVGFEAGGLEPQAFQVTMAIVQARAQSNQAQQYSGITLSKAGQGSGSRKPPIPLMETAEDWETERKKQAARGWRVSTVNERFDVATRLRCFSSSLIVSGSSSSSFQLILNSLSFSFLLFMTVSGFLTPLPS

SEQ ID NO: 998 - DNA, 1281 bp, Homo sapien
cccagacctagaactacccagagcaagaccacagctggtgaacagtccaggagcagacaagatggagacaaattcctctctccccacgaacatctctggagggacacctgctgtatctgctggctatctcttcctggatatcatcacttatctggtatttgcagtcacctttgtcctcggggtcctgggcaacgggcttgtgatctgggtggctggattccggatgacacacacagtcaccaccatcagttacctgaacctggccgtggctgacttctgtttcacctccactttgccattcttcatggtcaggaaggccatgggaggacattggcctttcggctggttcctgtgcaaattcgtctttaccatagtggacatcaacttgttcggaagtgtcttcctgatcgccctcattgctctggaccgctgtgtttgcgtcctgcatccagtctggacccagaaccaccgcaccgtgagcctggccaagaaggtgatcattgggccctgggtgatggctctgctcctcacattgccagttatcattcgtgtgactacagtacctggtaaaacggggacagtagcctgcacttttaacttttcgccctggaccaacgaccctaaagagaggataaatgtggccgttgccatgttgacggtgagaggcatcatccggttcatcattggcttcagcgcacccatgtccatcgttgctgtcagttatgggcttattgccaccaagatccacaagcaaggcttgattaagtccagtcgtcccttacgggtcctctcctttgtcgcagcagccttttttctctgctggtccccatatcaggtggtggcccttatagccacagtcagaatccgtgagttattgcaaggcatgtacaaagaaattggtattgcagtggatgtgacaagtgccctggccttcttcaacagctgcctcaaccccatgctctatgtcttcatgggccaggacttccgggagaggctgatccacgcccttcccgccagtctggagagggccctgaccgaggactcaacccaaaccagtgacacagctaccaattctactttaccttctgcagaggtggagttacaggcaaagtgaggagggagctgggggacactttcgagctcccagctccagcttcgtctcaccttgagttaggctgagcacaggcatttcctgcttattttaggattacccactcatcagaaaaaaaaaaaaaagcctttgtgtcccctgatttggggagaataaacagatatgagttt

SEQ ID NO: 999 - protein, 350 aa, Homo sapien
METNSSLPTNISGGTPAVSAGYLFLDIITYLVFAVTFVLGVLGNGLVIWVAGFRMTHTVTTISYLNLAVADFCFTSTLPFFMVRKAMGGHWPFGWFLCKFVFTIVDINLFGSVFLIALIALDRCVCVLHPVWTQNHRTVSLAKKVIIGPWVMALLLTLPVIIRVTTVPGKTGTVACTFNFSPWTNDPKERINVAVAMLTVRGIIRFIIGFSAPMSIVAVSYGLIATKIHKQGLIKSSRPLRVLSFVAAAFFLCWSPYQVVALIATVRIRELLQGMYKEIGIAVDVTSALAFFNSCLNPMLYVFMGQDFRERLIHALPASLERALTEDSTQTSDTATNSTLPSAEVELQAK

SEQ ID NO: 1000 - DNA, 538 bp, Homo sapien
gctacactagagcagagtacgagtctgaggcggagggagtaatggcaggacaagcgtttagaaagtttcttccactctttgaccgagtattggttgaaaggagtgctgctgaaactgtaaccaaaggaggcattatgcttccagaaaaatctcaaggaaaagtattgcaagcaacagtagtcgctgttggatcgggttctaaaggaaagggtggagagattcaaccagttagcgtgaaagttggagataaagttcttctcccagaatatggaggcaccaaagtagttctagatgacaaggattatttcctatttagagatggtgacattcttggaaagtacgtagactgaaataagtcactattgaaatggcatcaacatgatgctgcccattccactgaagttctgaaatctttcgtcatgtaaataatttccatatttctcttttataataaactaatgataactaatgacatccagtgtctccaaaattgtttccttgtactgatataaacacttccaaataaaaatatgtaaat

SEQ ID NO: 1001 - protein, 102 aa, Homo sapien
MAGQAFRKFLPLFDRVLVERSAAETVTKGGIMLPEKSQGKVLQATVVAVGSGSKGKGGEIQPVSVKVGDKVLLPEYGGTKVVLDDKDYFLFRDGDILGKYVD

SEQ ID NO: 1002 - DNA, 1421 bp, Homo sapien
gaagcaggcctgagcctccccaaaggcagctcctggggactcccaggaccacaggctgagacgagacgcagggtggctggaggaagtgagaggtgaactcagcctgggactggctgggcgagactctccacctgctccctgggaccatcgcccaccatggctgtggcccagcagctgcgggccgagagtgactttgaacagcttccggatgatgttgccatctcggccaacattgctgacatcgaggagaagagaggcttcaccagccactttgttttcgtcatcgaggtgaagacaaaaggaggatccaagtacctcatctaccgccgctaccgccagttccatgctttgcagagcaagctggaggagcgcttcgggccagacagcaagagcagtgccctggcctgtaccctgcccacactcccagccaaagtctacgtgggtgtgaaacaggagatcgccgagatgcggatacctgccctcaacgcctacatgaagagcctgctcagcctgccggtctgggtgctgatggatgaggacgtccggatcttcttttaccagtcgccctatgactcagagcaggtgccccaggcactccgccggctccgcccgcgcacccggaaagtcaagagcgtgtccccacagggcaacagcgttgaccgcatggcagctccgagagcagaggctctatttgacttcactggaaacagcaaactggagctgaatttcaaagctggagatgtgatcttcctcctcagtcggatcaacaaagactggctggagggcactgtccggggagccacgggcatcttccctctctccttcgtgaagatcctcaaagacttccctgaggaggacgaccccaccaactggctgcgttgctactactacgaagacaccatcagcaccatcaagtctgtggcctgggagggaggggcctgtccagccttcctgccatccctacgaccaccgcccctcacatcaccttctcatgggtccctctcccactccaaagcccccagtggctcccagatgagccacaatgctgtaacaagccatcaacgtccagggtggcctggccagcctcattcccctttcccccaccccacaccccacttccagcctgatgcctccttactccagcctgtcacccccttagggacatcgcggtggaggaagatctcagcagcactcccctattgaaagacctgctggagctcacaaggcgggagttccagagagaggacatagctctgaattaccgggacgctgagggggatctggttcggctgctgtcggatgaggacgtagcgctcatggtgcggcaggctcgtggcctcccctcccagaagcgcctcttcccctggaagctgcacatcacgcagaaggacaactacagggtctacaacacgatgccatga

SEQ ID NO: 1003 - protein, 348 aa, Homo sapien
MAVAQQLRAESDFEQLPDDVAISANIADIEEKRGFTSHFVFVIEVKTKGGSKYLIYRRYRQFHALQSKLEERFGPDSKSSALACTLPTLPAKVYVGVKQEIAEMRIPALNAYMKSLLSLPVWVLMDEDVRIFFYQSPYDSEQVPQALRRLRPRTRKVKSVSPQGNSVDRMAAPRAEALFDFTGNSKLELNFKAGDVIFLLSRINKDWLEGTVRGATGIFPLSFVKILKDFPEEDDPTNWLRCYYYEDTISTIKSVAWEGGACPAFLPSLRPPPLTSPSHGSLSHSKAPSGSQMSHNAVTSHQRPGWPGQPHSPFPHPTPHFQPDASLLQPVTPLGTSRWRKISAALPY

SEQ ID NO: 1004 - DNA, 1157 bp, Homo sapien
gtcagcagaggcctcgctcgggcgcccagtggtcctgccgcctggtctcacctcgctatggttcgtctgcctctgcagtgcgtcctctggggctgcttgctgaccgctgtccatccagaaccacccactgcatgcagagaaaaacagtacctaataaacagtcagtgctgttctttgtgccagccaggacagaaactggtgagtgactgcacagagttcactgaaacggaatgccttccttgcggtgaaagcgaattcctagacacctggaacagagagacacactgccaccagcacaaatactgcgaccccaacctagggcttcgggtccagcagaagggcacctcagaaacagacaccatctgcacctgtgaagaaggctggcactgtacgagtgaggcctgtgagagctgtgtcctgcaccgctcatgctcgcccggctttggggtcaagcagattgctacaggggtttctgataccatctgcgagccctgcccagtcggcttcttctccaatgtgtcatctgctttcgaaaaatgtcacccttggacaagctgtgagaccaaagacctggttgtgcaacaggcaggcacaaacaagactgatgttgtctgtggtccccaggatcggctgagagccctggtggtgatccccatcatcttcgggatcctgtttgccatcctcttggtgctggtctttatcaaaaaggtggccaagaagccaaccaataaggccccccaccccaagcaggaaccccaggagatcaattttcccgacgatcttcctggctccaacactgctgctccagtgcaggagactttacatggatgccaaccggtcacccaggaggatggcaaagagagtcgcatctcagtgcaggagagacagtgaggctgcacccacccaggagtgtggccacgtgggcaaacaggcagttggccagagagcctggtgctgctgctgctgtggcgtgagggtgaggggctggcactgactgggcatagctccccgcttctgcctgcacccctgcagtttgagacaggagacctggcactggatgcagaaacagttcaccttgaagaacctctcacttcaccctggagcccatccagtctcccaacttgtattaaagacagaggcagaaaaaaaaaaaaaaa

SEQ ID NO: 1005 - protein, 277 aa, Homo sapien
MVRLPLQCVLWGCLLTAVHPEPPTACREKQYLINSQCCSLCQPGQKLVSDCTEFTETECLPCGESEFLDTWNRETHCHQHKYCDPNLGLRVQQKGTSETDTICTCEEGWHCTSEACESCVLHRSCSPGFGVKQIATGVSDTICEPCPVGFFSNVSSAFEKCHPWTSCETKDLVVQQAGTNKTDVVCGPQDRLRALVVIPIIFGILFAILLVLVFIKKVAKKPTNKAPHPKQEPQEINFPDDLPGSNTAAPVQETLHGCQPVTQEDGKESRISVQERQ

SEQ ID NO: 1006 - DNA, 3236 bp, Homo sapien
gacccggccatgcgcggcctcgggctctggctgctgggcgcgatgatgctgcctgcgattgcccccagccggccctgggccctcatggagcagtatgaggtcgtgttgccgcggcgtctgccaggcccccgagtccgccgagctctgccctcccacttgggcctgcacccagagagggtgagctacgtccttggggccacagggcacaacttcaccctccacctgcggaagaacagggacctgctgggttccggctacacagagacctatacggctgccaatggctccgaggtgacggagcagcctcgcgggcaggaccactgcttataccagggccacgtagaggggtacccggactcagccgccagcctcagcacctgtgccggcctcaggggtttcttccaggtggggtcagacctgcacctgatcgagcccctggatgaaggtggcgagggcggacggcacgccgtgtaccaggctgagcacctgctgcagacggccgggacctgcggggtcagcgacgacagcctgggcagcctcctgggaccccggacggcagccgtcttcaggcctcggcccggggactctctgccatcccgagagacccgctacgtggagctgtatgtggtcgtggacaatgcagagttccagatgctggggagcgaagcagccgtgcgtcatcgggtgctggaggtggtgaatcacgtggacaagctatatcagaaactcaacttccgtgtggtcctggtgggcctggagatttggaatagtcaggacaggttccacgtcagccccgaccccagtgtcacactggagaacctcctgacctggcaggcacggcaacggacacggcggcacctgcatgacaacgtacagctcatcacgggtgtcgacttcaccgggactactgtggggtttgccagggtgtccgccatgtgctcccacagctcaggggctgtgaaccaggaccacagcaagaaccccgtgggcgtggcctgcaccatggcccatgagatgggccacaacctgggcatggaccatgatgagaacgtccagggctgccgctgccaggaacgcttcgaggccggccgctgcatcatggcaggcagcattggctccagtttccccaggatgttcagtgactgcagccaggcctacctggagagctttttggagcggccgcagtcggtgtgcctcgccaacgcccctgacctcagccacctggtgggcggccccgtgtgtgggaacctgtttgtggagcgtggggagcagtgcgactgcggcccccccgaggactgccggaaccgctgctgcaactctaccacctgccagctggctgagggggcccagtgtgcgcacggtacctgctgccaggagtgcaaggtgaagccggctggtgagctgtgccgtcccaagaaggacatgtgtgacctcgaggagttctgtgacggccggcaccctgagtgcccggaagacgccttccaggagaacggcacgccctgctccgggggctactgctacaacggggcctgtcccacactggcccagcagtgccaggccttctgggggccaggtgggcaggctgccgaggagtcctgcttctcctatgacatcctaccaggctgcaaggccagccggtacagggctgacatgtgtggcgttctgcagtgcaagggtgggcagcagcccctggggcgtgccatctgcatcgtggatgtgtgccacgcgctcaccacagaggatggcactgcgtatgaaccagtgcccgagggcacccggtgtggaccagagaaggtttgctggaaaggacgttgccaggacttacacgtttacagatccagcaactgctctgcccagtgccacaaccatggggtgtgcaaccacaagcaggagtgccactgccacgcgggctgggccccgccccactgcgcgaagctgctgactgaggtgcacgcagcgtccgggagcctccccgtcctcgtggtggtggttctggtgctcctggcagttgtgctggtcaccctggcaggcatcatcgtctaccgcaaagcccggagccgcatcctgagcaggaacgtggctcccaagaccacaatggggcgctccaaccccctgttccaccaggctgccagccgcgtgccggccaagggcggggctccagccccatccaggggcccccaagagctggtccccaccacccacccgggccagcccgcccgacacccggcctcctcggtggctctgaagaggccgccccctgctcctccggtcactgtgtccagcccacccttcccagttcctgtctacacccggcaggcaccaaagcaggtcatcaagccaacgttcgcacccccagtgcccccagtcaaacccggggctggtgcggccaaccctggtccagctgagggtgctgttggcccaaaggttgccctgaagccccccatccagaggaagcaaggagccggagctcccacagcaccctaggggggcacctgcgcctgtgtggaaatttggagaagttgcggcagagaagccatgcgttccagccttccacggtccagctagtgccgctcagccctagaccctgactttgcaggctcagctgctgttctaacctcagtaatgcatctacctgagaggctcctgctgtccacgccctcagccaattccttctccccgccttggccacgtgtagccccagctgtctgcaggcaccaggctgggatgagctgtgtgcttgcgggtgcgtgtgtgtgtacgtgtctccaggtggccgctggtctcccgctgtgttcaggaggccacatatacagcccctcccagccacacctgcccctgctctggggcctgctgagccggctgccctgggcacccggttccaggcagcacagacgtggggcatccccagaaagactccatcccaggaccaggttcccctccgtgctcttcgagagggtgtcagtgagcagactgcaccccaagctcccgactccaggtcccctgatcttgggcctgtttcccatgggattcaagagggacagccccagctttgtgtgtgtttaagcttaggaatgccctttatggaaagggctatgtgggagagtcagctatcttgtctggttttcttgagacctcagatgtgtgttcagcagggctgaaagcttttattctttaataatgagaaatgtatattttactaataaattattgaccgagttctgtagattcttgttaga

SEQ ID NO: 1007 - protein, 824 aa, Homo sapien
MRGLGLWLLGAMMLPAIAPSRPWALMEQYEVVLPRRLPGPRVRRALPSHLGLHPERVSYVLGATGHNFTLHLRKNRDLLGSGYTETYTAANGSEVTEQPRGQDHCLYQGHVEGYPDSAASLSTCAGLRGFFQVGSDLHLIEPLDEGGEGGRHAVYQAEHLLQTAGTCGVSDDSLGSLLGPRTAAVFRPRPGDSLPSRETRYVELYVVVDNAEFQMLGSEAAVRHRVLEVVNHVDKLYQKLNFRVVLVGLEIWNSQDRFHVSPDPSVTLENLLTWQARQRTRRHLHDNVQLITGVDFTGTTVGFARVSAMCSHSSGAVNQDHSKNPVGVACTMAHEMGHNLGMDHDENVQGCRCQERFEAGRCIMAGSIGSSFPRMFSDCSQAYLESFLERPQSVCLANAPDLSHLVGGPVCGNLFVERGEQCDCGPPEDCRNRCCNSTTCQLAEGAQCAHGTCCQECKVKPAGELCRPKKDMCDLEEFCDGRHPECPEDAFQENGTPCSGGYCYNGACPTLAQQCQAFWGPGGQAAEESCFSYDILPGCKASRYRADMCGVLQCKGGQQPLGRAICIVDVCHALTTEDGTAYEPVPEGTRCGPEKVCWKGRCQDLHVYRSSNCSAQCHNHGVCNHKQECHCHAGWAPPHCAKLLTEVHAASGSLPVLVVVVLVLLAVVLVTLAGIIVYRKARSRILSRNVAPKTTMGRSNPLFHQAASRVPAKGGAPAPSRGPQELVPTTHPGQPARHPASSVALKRPPPAPPVTVSSPPFPVPVYTRQAPKQVIKPTFAPPVPPVKPGAGAANPGPAEGAVGPKVALKPPIQRKQGAGAPTAP

SEQ ID NO: 1008 - DNA, 1432 bp, Homo sapien
gaggaaaattcttccagcgatggtctcccactcagagctgaggaagcttttctactcagcagatgctgtgtgttttgatgttgacagcacggtcatcagagaagaaggaatcgatgagctagccaaaatctgtggcgttgaggacgcggtgtcagaaatgacacggcgagccatgggcggggcagtgcctttcaaagctgctctcacagagcgcttagccctcatccagccctccagggagcaggtgcagagactcatagcagagcaacccccacacctgacccccggcataagggagctggtaagtcgcctacaggagcgaaatgttcaggttttcctaatatctggtggctttaggagtattgtagagcatgttgcttcaaagctcaatatcccagcaaccaatgtatttgccaataggctgaaattctactttaacggtgaatatgcaggttttgatgagacgcagccaacagctgaatctggtggaaaaggaaaagtgattaaacttttaaaggaaaaatttcattttaagaaaataatcatgattggagatggtgccacagatatggaagcctgtcctcctgctgatgctttcattggatttggaggaaatgtgatcaggcaacaagtcaaggataacgccaaatggtatatcactgattttgtagagctgctgggagaactggaagaataacatccattgtcgtacagctccaaacaacttcagatgaatttttacaagttatacagattgatactgtttgcttacagttgcctattacaacttgctatagaaagttggtacaaatgatctgtactttaaactacagttaggaatcctagaagattgctttttttttttttttaactgtagttccagtattatatgatgactattgatttcctggagaggttttttttttttttgagacagaatcttgctctgttgcccaggctggagtgcagtggcgcggtctcggctcactgcaagctctgcctcccaggttcacgccattctcctgcctcagcctcccgagtagctgggactacaggcacccgccaccacatccggctaattttttgtatttttagtagagacggggtttgaccgtgttagccaggatggtcttgatctcctgaccttgtgatccgcctgcctcagcctcccaaagtgctgggattacaggcttgggccaccgcgcccagccaatgtcctagagagttttgtgatctgaattctttatgtatatttgtagctatatttcatacaaagtgctttaagtgtggagagtcaattaaacacctttactcttagaaatacggattcggcagccttcagtgaatattggtttctctttggtatgtcaataaaagtttatccgtatgtcagaacggatttgtggaaaaaaaaaaaaaaaaaaaaaaaaaa

SEQ ID NO: 1009 - protein, 225 aa, Homo sapien
MISHSELRKLFYSADAVCFDVDSTVIREEGIDELAKICGVEDAVSEMTRRAMGGAVPFKAALTERLALIQPSREQVQRLIAEQPPHLTPGIRELVSRLQERNVQVFLISGGFRSIVEHVASKLNIPATNVFANRLKFYFNGEYAGFDETQPTAESGGKGKVIKLLKEKFHFKKIIMIGDGATDMEACPPADAFIGFGGNVIRQQVKDNAKWYITDFVELLGELEE

SEQ ID NO: 1010 - DNA, 1627 bp, Homo sapien
ctccgctgctgtcgccaggagtcacttcacgagaagccaggtcacaaccgtcggcccttgtctggaaaagtaaaagtggatcctgccacgttcggagctccctggcgcctcgcccggctggagctagagaactcgtcctgtggcggcccccggcgtggggcgggacagcggccccctggagggggcagtcccgggagaacctgcggcggccggagcggtaaaaataagtgactaaagaagcagacctgggaatcacctaacatgtcgaggaggagatttgattgccgaagtatttcaggcctactaactacaactcctcaaattccaataaaaatggaaaactttaataatttctatatacttacatctaaagagctagggagaggaaaatttgctgtggttagacaatgtatatcaaaatctactggccaagaatatgctgcaaaatttctaaaaaagagaagaagaggacaggattgtcgggcagaaattttacacgagattgctgtgcttgaattggcaaagtcttgtccccgtgttattaatcttcatgaggtctatgaaaatacaagtgaaatcattttgatattggaatatgctgcaggtggagaaattttcagcctgtgtttacctgagttggctgaaatggtttctgaaaatgatgttatcagactcattaaacaaatacttgaaggagtttattatctacatcagaataacattgtacaccttgatttaaagccacagaatatattactgagcagcatataccctctcggggacattaaaatagtagattttggaatgtctcgaaaaatagggcatgcgtgtgaacttcgggaaatcatgggaacaccagaatatttagctccagaaatcctgaactatgatcccattaccacagcaacagatatgtggaatattggtataatagcatatatgttgttaactcacacatcaccatttgtgggagaagataatcaagaaacatacctcaatatttctcaagttaatgtagattattcggaagaaactttttcatcagtttcacagctggccacagactttattcagagccttttagtaaaaaatccagagaaaagaccaacagcagagatatgcctttctcattcttggctacagcagtgggactttgaaaacttgtttcaccctgaagaaacttccagttcctctcaaactcaggatcattctgtaaggtcctctgaagacaagacttctaaatcctcctgtaatggaacctgtggtgatagagaagacaaagagaatatcccagaggatagcagcatggtttccaaaagatttcgtttcgatgactcattacccaatccccatgaacttgtttcagatttgctctgttagcacttttttctttgactcatttggactgaatttgaaattttatatccactccagtgagattatgatttgtagcttcatatatgacatgtttatattgtaaatgcacttttccatggaataatttagggaagtgttttaatgttaaattactagttgctagcatgttatgatttcatatcctgagatagctctgcagataagaaaatatttaaatatatgacaaaaagtaaaattgtacatgtgaaag

SEQ ID NO: 1011 - protein, 372 aa, Homo sapien
MSRRRFDCRSISGLLTTTPQIPIKMENFNNFYILTSKELGRGKFAVVRQCISKSTGQEYAAKFLKKRRRGQDCRAEILHEIAVLELAKSCPRVINLHEVYENTSEIILILEYAAGGEIFSLCLPELAEMVSENDVIRLIKQILEGVYYLHQNNIVHLDLKPQNILLSSIYPLGDIKIVDFGMSRKIGHACELREIMGTPEYLAPEILNYDPITTATDMWNIGIIAYMLLTHTSPFVGEDNQETYLNISQVNVDYSEETFSSVSQLATDFIQSLLVKNPEKRPTAEICLSHSWLQQWDFENLFHPEETSSSSQTQDHSVRSSEDKTSKSSCNGTCGDREDKENIPEDSSMVSKRFRFDDSLPNPHELVSDLLC

SEQ ID NO: 1012 - DNA, 2051 bp, Homo sapien
cgccactttgctggagcattcactaggcgaggcgctccatcggactcactagccgcactcatgaatcggcaccatctgcaggatcactttctggaaatagacaagaagaactgctgtgtgttccgagatgacttcattgccaaggtgttgccgccggtgttggggctggagtttatctttgggcttctgggcaatggccttgccctgtggattttctgtttccacctcaagtcctggaaatccagccggattttcctgttcaacctggcagtagctgactttctactgatcatctgcctgccgttcgtgatggactactatgtgcggcgttcagactggaactttggggacatcccttgccggctggtgctcttcatgtttgccatgaaccgccagggcagcatcatcttcctcacggtggtggcggtagacaggtatttccgggtggtccatccccaccacgccctgaacaagatctccaattggacagcagccatcatctcttgccttctgtggggcatcactgttggcctaacagtccacctcctgaagaagaagttgctgatccagaatggccctgcaaatgtgtgcatcagcttcagcatctgccataccttccggtggcacgaagctatgttcctcctggagttcctcctgcccctgggcatcatcctgttctgctcagccagaattatctggagcctgcggcagagacaaatggaccggcatgccaagatcaagagagccatcaccttcatcatggtggtggccatcgtctttgtcatctgcttccttcccagcgtggttgtgcggatccgcatcttctggctcctgcacacttcgggcacgcagaattgtgaagtgtaccgctcggtggacctggcgttctttatcactctcagcttcacctacatgaacagcatgctggaccccgtggtgtactacttctccagcccatcctttcccaacttcttctccactttgatcaaccgctgcctccagaggaagatgacaggtgagccagataataaccgcagcacgagcgtcgagctcacaggggaccccaacaaaaccagaggcgctccagaggcgttaatggccaactccggtgagccatggagcccctcttatctgggcccaacctcaaataaccattccaagaagggacattgtcaccaagaaccagcatctctggagaaacagttgggctgttgcatcgagtaatgtcactggactcggcctaaggtttcctggaacttccagattcagagaatctgatttagggaaactgtggcagatgagtgggagactggttgcaaggtgtgaccacaggaatcctggaggaacagagagtaaagcttctaggcatctgaaacttgcttcatctctgacgctcgcaggactgaagatgggcaaattgtaggcgtttctgctgagcagagttggagccagagatctacttgtgacttgttggccttcttcccacatctgcctcagactggggggggctcagctcctcgggtgatatctagcctgcttgtgagctctagcagggataaggagagctgagattggagggaattgtgttgctcctggaggaagcccaggcatcattaaacaagccagtaggtcacctggcttccgtggaccaattcatctttcagacaagctttagagaaatggactcagggaagagactcacatgctttggttagtatctgtgtttccggtgggtgtaataggggattagccccagaagggactgagctaaacagtgttattatgggaaaggaaatggcattgctgctttcaaccagcgactaatgcaatccattcctctcttgtttatagtaatctaagggttgagcagttaaaacggcttcaggatagaaagctgtttcccacctgtttcgttttaccattaaaagggaaacgtgcctctgccccacgggtagagggggtgcacgttcctcctggttccttcgcttgtgtttctgtacttaccaaaaatctaccacttcaataaattttgataggagacaaaaaaaaaa

SEQ ID NO: 1013 - protein, 387 aa, Homo sapien
MNRHHLQDHFLEIDKKNCCVFRDDFIAKVLPPVLGLEFIFGLLGNGLALWIFCFHLKSWKSSRIFLFNLAVADFLLIICLPFVMDYYVRRSDWNFGDIPCRLVLFMFAMNRQGSIIFLTVVAVDRYFRVVHPHHALNKISNWTAAIISCLLWGITVGLTVHLLKKKLLIQNGPANVCISFSICHTFRWHEAMFLLEFLLPLGIILFCSARIIWSLRQRQMDRHAKIKRAITFIMVVAIVFVICFLPSVVVRIRIFWLLHTSGTQNCEVYRSVDLAFFITLSFTYMNSMLDPVVYYFSSPSFPNFFSTLINRCLQRKMTGEPDNNRSTSVELTGDPNKTRGAPEALMANSGEPWSPSYLGPTSNNHSKKGHCHQEPASLEKQLGCCIE

SEQ ID NO: 1014 - DNA, 1292 bp, Homo sapien
cagggagttgagaaactgtggcacaaggcgagagctggtttcctctgccctgttagagctgggggactcttcagagtcaaaggccagagagcatggagctgagtggagccaccatggcccgggggctcgctgtcctgctagtcttgttcctgcatatcaagaacctgcctgcccaggctgcggacacatgtccagaggtgaaggtggtgggcctggagggctctgacaagctcaccattctccgaggctgcccggggctgcccggggccccagggccaaagggagaggcaggtgtcattggagagagaggagaacgcggtctccctggagcccctggaaaggcaggaccagtggggcccaaaggagaccgaggagagaaggggatgcgtggagagaaaggagacgctgggcagtctcagtcgtgtgcgacaggcccacgcaactgcaaggacctgctagaccgggggtatttcctgagcggctggcacaccatctacctgcccgactgccggcccctgactgtgctctgtgacatggacacggacggagggggctggaccgttttccagcggaggatggatggctctgtggacttctatcgggactgggccgcatacaagcagggcttcggcagtcagctgggggagttctggctggggaacgacaacatccacgccctgactgcccagggaagcagcgagctccgtgtagacctggtggactttgagggcaaccaccagtttgctaagtacaaatcattcaaggtggctgacgaggcagagaagtacaagctggtactgggagcctttgtcgggggcagtgcgggtaattctctaacgggccacaacaacaacttcttctccaccaaagaccaagacaatgatgtgagttcttcgaattgtgctgagaagttccagggagcctggtggtacgccgactgtcatgcttcaaacctcaatggtctctacctcatgggaccccatgagagctatgccaatggtatcaactggagtgcggcgaaggggtacaaatatagctacaaggtgtcagagatgaaggtgcggcccgcctagacgggccaggacccctccacatgcacctgctagtggggaggccacacccacaagcgctgcgtcgtggaagtcaccccatttccccagccagacacactcccatgacgcccacagctgcccctttgcccccagctcagtcaagccgccacatgcccacaacctcaccagagggagaattatgtttctaaatatgtttactttgggacagaaaaaaaaaaa

SEQ ID NO: 1015 - protein, 326 aa, Homo sapien
MELSGATMARGLAVLLVLFLHIKNLPAQAADTCPEVKVVGLEGSDKLTILRGCPGLPGAPGPKGEAGVIGERGERGLPGAPGKAGPVGPKGDRGEKGMRGEKGDAGQSQSCATGPRNCKDLLDRGYFLSGWHTIYLPDCRPLTVLCDMDTDGGGWTVFQRRMDGSVDFYRDWAAYKQGFGSQLGEFWLGNDNIHALTAQGSSELRVDLVDFEGNHQFAKYKSFKVADEAEKYKLVLGAFVGGSAGNSLTGHNNNFFSTKDQDNDVSSSNCAEKFQGAWWYADCHASNLNGLYLMGPHESYANGINWSAAKGYKYSYKVSEMKVRPA

SEQ ID NO: 1016 - DNA, 931 bp, Homo sapien
gcagagcccagggagctggaggtcggcgcttcctctcgtgcttggtccactgacgcgcggccccgccgcgaggagcatcagatccatgctgctgctgactcggagccccacagcttggcacaggctctctcagctcaagcctccggtcctccctgggaccctgggaggccaggccctgcatctgaggtcctggcttttgtcaaggcagggccctgcagagacaggtgggcagggccagccccagggccctgggcttcgaacccggctgctgatcacaggcctgttcggggctggactcggtggggcctggctggccctgagggctgagaaggagaggctgcagcagcaaaagcgaacagaagccctgcgccaggcagctgtgggccagggcgacttccacctgctggatcacagaggccgggctcgctgcaaggctgacttccggggccagtgggtgctgatgtactttggcttcactcactgccctgacatctgcccagacgagctggagaagctggtgcaggtggtgcggcagctggaagcagagcctggtttgcctccagtgcagcctgtcttcatcactgtggaccccgagcgggacgacgttgaagccatggcccgctacgtccaggacttccacccaagactgttgggtctgaccggctccaccaaacaggttgcccaggctagtcacagttaccgcgtgtactacaatgccggccccaaggatgaggaccaggactacatcgtggaccactccattgccatctacctgctcaaccctgacggcctcttcacggattactacggccggagcagatcggctgagcagatctcagacagtgtgcggcggcacatggcggctttccgcagtgtcctgtcttgagccactgcagtctgggccccatcattaaacgggctgcgtttaaaa

SEQ ID NO: 1017 - protein, 266 aa, Homo sapien
MLLLTRSPTAWHRLSQLKPPVLPGTLGGQALHLRSWLLSRQGPAETGGQGQPQGPGLRTRLLITGLFGAGLGGAWLALRAEKERLQQQKRTEALRQAAVGQGDFHLLDHRGRARCKADFRGQWVLMYFGFTHCPDICPDELEKLVQVVRQLEAEPGLPPVQPVFITVDPERDDVEAMARYVQDFHPRLLGLTGSTKQVAQASHSYRVYYNAGPKDEDQDYIVDHSIAIYLLNPDGLFTDYYGRSRSAEQISDSVRRHMAAFRSVLS

SEQ ID NO: 1018 - DNA, 2984 bp, Homo sapien
taactgagcgaggagcaattgattaatagctcggcgaggggactcactgactgttataataacactacaccagcaactcctggcttcccagcagccggaacacagacaggagagagtcagtggcaaatagacatttttcttatttcttaaaaaacagcaacttgtttgctacttttatttctgttgatttttttttcttggtgtgtgtggtggttgtttttaagtgtggagggcaaaaggagataccatcccaggctcagtccaacccctctccaaaacggcttttctgacactccaggtagcgagggagttgggtctccaggttgtgcgaggagcaaatgatgaccgccaaggccgtagacaaaatcccagtaactctcagtggttttgtgcaccagctgtctgacaacatctacccggtggaggacctcgccgccacgtcggtgaccatctttcccaatgccgaactgggaggcccctttgaccagatgaacggagtggccggagatggcatgatcaacattgacatgactggagagaagaggtcgttggatctcccatatcccagcagctttgctcccgtctctgcacctagaaaccagaccttcacttacatgggcaagttctccattgaccctcagtaccctggtgccagctgctacccagaaggcataatcaatattgtgagtgcaggcatcttgcaaggggtcacttccccagcttcaaccacagcctcatccagcgtcacctctgcctcccccaacccactggccacaggacccctgggtgtgtgcaccatgtcccagacccagcctgacctggaccacctgtactctccgccaccgcctcctcctccttattctggctgtgcaggagacctctaccaggacccttctgcgttcctgtcagcagccaccacctccacctcttcctctctggcctacccaccacctccttcctatccatcccccaagccagccacggacccaggtctcttcccaatgatcccagactatcctggattctttccatctcagtgccagagagacctacatggtacagctggcccagaccgtaagccctttccctgcccactggacaccctgcgggtgccccctccactcactccactctctacaatccgtaactttaccctggggggccccagtgctggggtgaccggaccaggggccagtggaggcagcgagggaccccggctgcctggtagcagctcagcagcagcagcagccgccgccgccgccgcctataacccacaccacctgccactgcggcccattctgaggcctcgcaagtaccccaacagacccagcaagacgccggtgcacgagaggccctacccgtgcccagcagaaggctgcgaccggcggttctcccgctctgacgagctgacacggcacatccgaatccacactgggcataagcccttccagtgtcggatctgcatgcgcaacttcagccgcagtgaccacctcaccacccatatccgcacccacaccggtgagaagcccttcgcctgtgactactgtggccgaaagtttgcccggagtgatgagaggaagcgccacaccaagatccacctgagacagaaagagcggaaaagcagtgccccctctgcatcggtgccagccccctctacagcctcctgctctgggggcgtgcagcctgggggtaccctgtgcagcagtaacagcagcagtcttggcggagggccgctcgccccttgctcctctcggacccggacaccttgagatgagactcaggctgatacaccagctcccaaaggtcccggaggccctttgtccactggagctgcacaacaaacactaccaccctttcctgtccctctctccctttgttgggcaaagggctttggtggagctagcactgccccctttccacctagaagcaggttcttcctaaaacttagcccattctagtctctcttaggtgagttgactatcaacccaaggcaaaggggaggctcagaaggaggtggtgtggggatcccctggccaagagggctgaggtctgaccctgctttaaagggttgtttgactaggttttgctaccccacttccccttattttgacccatcacaggtttttgaccctggatgtcagagttgatctaagacgttttctacaataggttgggagatgctgatcccttcaagtggggacagcaaaaagacaagcaaaactgatgtgcactttatggcttgggactgatttgggggacattgtacagtgagtgaagtatagcctttatgccacactctgtggccctaaaatggtgaatcagagcatatctagttgtctcaacccttgaagcaatatgtattatatactcagagaacagaagtgcaatgtgatgggaggaacgtagcaatatctgctccttttcgagttgtttgagaaatgtaggctattttttcagtgtatatccactcagattttgtgtatttttgatgtacccacactgttctctaaattctgaatctttgggaaaaaatgtaaagcatttatgatctcagaggttaacttatttaagggggatgtacatattctctgaaactaggatgcatgcaattgtgttggaagtgtccttggtcgccttgtgtgatgtagacaaatgttacaaggctgcatgtaaatgggttgccttattatggagaaaaaaatcactccctgagtttagtatggctgtatatttatgcctattaatatttggaattttttttagaaagtatatttttgtatgctttgttttgtgacttaaaagtgttacctttgtagtcaaatttcagataagaatgtacataatgttaccggagctgatttgtttggtcattagctcttaatagttgtgaaaaaataaatctattctaacgcaaaaccactaactgaagttcagatataatggatggtttgtgactatagtgtaaataaatacttttcaacaat

SEQ ID NO: 1019 - protein, 476 aa, Homo sapien
MMTAKAVDKIPVTLSGFVHQLSDNIYPVEDLAATSVTIFPNAELGGPFDQMNGVAGDGMINIDMTGEKRSLDLPYPSSFAPVSAPRNQTFTYMGKFSIDPQYPGASCYPEGIINIVSAGILQGVTSPASTTASSSVTSASPNPLATGPLGVCTMSQTQPDLDHLYSPPPPPPPYSGCAGDLYQDPSAFLSAATTSTSSSLAYPPPPSYPSPKPATDPGLFPMIPDYPGFFPSQCQRDLHGTAGPDRKPFPCPLDTLRVPPPLTPLSTIRNFTLGGPSAGVTGPGASGGSEGPRLPGSSSAAAAAAAAAAYNPHHLPLRPILRPRKYPNRPSKTPVHERPYPCPAEGCDRRFSRSDELTRHIRIHTGHKPFQCRICMRNFSRSDHLTTHIRTHTGEKPFACDYCGRKFARSDERKRHTKIHLRQKERKSSAPSASVPAPSTASCSGGVQPGGTLCSSNSSSLGGGPLAPCSSRTRTP

SEQ ID NO: 1020 - DNA, 583 bp, Homo sapien
ctactcgccgagttccctgtacgtgctgtgtccgatgacctgcagcgtggaagacaagaggtttgagcatggcagaaggaaacaccctgatatcagtggattatgaaatttttgggaaggtgcaaggggtgtttttccgtaagcatactcaggctgagggtaaaaagctgggattggtaggctgggtccagaacactgaccggggcacagtgcaaggacaattgcaaggtcccatctccaaggtgcgtcatatgcaggaatggcttgaaacaagaggaagtcctaaatcacacatcgacaaagcaaacttcaacaatgaaaaagtcatcttgaagttggattactcagacttccaaattgtaaaataatggcctgaatttaagttttctaagataaactcagtggtttggtttttattattaatagagatagaactattgtgtgttaatattagcattagtcaataagttattttaatgtcagatttttgaatgttattatatattacctgtatgatggaaggattaccactgtacacaaatctaatcaataaaaacgttagaaccttctgcttagagtactt

SEQ ID NO: 1021 - protein, 99 aa, Homo sapien
MAEGNTLISVDYEIFGKVQGVFFRKHTQAEGKKLGLVGWVQNTDRGTVQGQLQGPISKVRHMQEWLETRGSPKSHIDKANFNNEKVILKLDYSDFQIVK

SEQ ID NO: 1022 - DNA, 2427 bp, Homo sapien
gacatcggctccaacaggggtgttccacagggtagctgggagttggaagagccaagaacgcctccgagctctggatttgagcttctctgcccatgggtgaagcgcccatgctcagcttgtgagcttcttcccgggagagcagccatggcactgaggaatgtgccctttcgctcagaggtcctgggctgggaccccgacagccttgctgactatttcaagaagctcaactataaggactgtgagaaggcagtgaagaagtaccacatcgatggggctcgcttcttgaacctgacagaaaatgacatccagaagttccccaagctccgggtgccgattctcagtaagttaagtcaggaaatcaacaagaacgaagagaggaggagcatcttcacacgcaaaccccaagtcccgcggtttcctgaagagacagaaagccacgaagaggacaatgggggctggtcgtcctttgaagaagacgattatgaaagtcccaatgatgaccaggatggggaggatgatggagactatgagtcccccaatgaggaggaagaggcacccgtggaagatgacgcggattatgagccgccaccctccaatgacgaggaagctctgcagaactccatcctgcctgccaagcctttccccaactccaactccatgtacatcgaccggcccccctctgggaaaaccccccagcagcctcctgtgcccccccagagaccgatggccgccctcccgcccccaccagccggccggaatcactcgccactgcccccaccccagaccaaccacgaagaacccagcagaagcagaaaccacaaaacggcaaagctccctgctccttcaatagacagaagcacgaaacctcccctagatcgttcattagctccgtttgatagagaacccttcacactaggaaagaaaccaccattttctgacaagccctcgattccagcgggaaggtcactcggggagcatttacccaagattcaaaagcctcctttaccaccgaccacggaaagacatgaaaggagcagccccctgccagggaagaagccacctgtgccaaagcatggatggggaccagacagaagagagaatgatgaagatgatgtgcatcagagacctttgccccagccagcactacttcctatgagctccaacactttcccttcaagatctactaagccaagtcccatgaaccctctcccatcctctcacatgcctggagcattctcagaaagtaacagcagttttccacagagtgcctccctgccaccatacttctctcaaggccctagcaacagaccacctatcagagccgaaggcagaaacttccccttgccacttccaaacaaacctcggcccccatcccccgcggaggaagagaattcattaaatgaagagtggtacgtttcttatattacccgaccagaggcagaagctgctcttagaaagataaaccaggatggcacatttctggtcagagacagctctaaaaaaacaacaaccaatccatatgtcctcatggtgttgtacaaagataaagtttacaacatccagatccgttatcagaaggaaagtcaagtttacttgttgggaactggactccgagggaaagaggactttctgtctgtgtcagatattattgactacttcaggaaaatgccacttctgctcattgatgggaaaaaccgaggttccagataccagtgcacattaacgcatgctgcagggtacccatagcaagttatagccgagcaaatgaaccgtcctcctgcctctgttgccaacacgagatcaatcagccttggtcaatggacaaacacttaggactgaactgaacccctccccatgaacacaagggttttatcctttcctttaaaaacagtgtttgaaatgaagactgtcaactatcccataatttatttattcttcttcaatgtttgtaaagtgcatgagtcatgttcacacttgaagtctagtagtgcactgtaataattcattttttaaaagattatttaatgcccatttcaaaatacagtagtttacacagctacagaaacaatttggggcaagttttaaaacactgaaacagtaatagttattggtgtcacataaaactgatttgttttttacagccaaacctctgtcagtcagaggcattcattagttttatacatgtaatttgaaaatcactaaacctcgttttctcagcagcaataatttaagaggcttcaaaaatataatttcactcttatttagtattttttcctgggggcatttttacgtaatttttttatgaaaagacaaatgcatgttgagataacttctgggattaaaatagtcttttgctttaaaaaaaaaaaaaaaaaaaaaaaaaaaaaaaaaaaaaaaaaaaaaaaaaaaaaaaaaaaaaaaaaaaaa

SEQ ID NO: 1023 - protein, 533 aa, Homo sapien
MALRNVPFRSEVLGWDPDSLADYFKKLNYKDCEKAVKKYHIDGARFLNLTENDIQKFPKLRVPILSKLSQEINKNEERRSIFTRKPQVPRFPEETESHEEDNGGWSSFEEDDYESPNDDQDGEDDGDYESPNEEEEAPVEDDADYEPPPSNDEEALQNSILPAKPFPNSNSMYIDRPPSGKTPQQPPVPPQRPMAALPPPPAGRNHSPLPPPQTNHEEPSRSRNHKTAKLPAPSIDRSTKPPLDRSLAPFDREPFTLGKKPPFSDKPSIPAGRSLGEHLPKIQKPPLPPTTERHERSSPLPGKKPPVPKHGWGPDRRENDEDDVHQRPLPQPALLPMSSNTFPSRSTKPSPMNPLPSSHMPGAFSESNSSFPQSASLPPYFSQGPSNRPPIRAEGRNFPLPLPNKPRPPSPAEEENSLNEEWYVSYITRPEAEAALRKINQDGTFLVRDSSKKTTTNPYVLMVLYKDKVYNIQIRYQKESQVYLLGTGLRGKEDFLSVSDIIDYFRKMPLLLIDGKNRGSRYQCTLTHAAGYP

SEQ ID NO: 1024 - DNA, 1984 bp, Homo sapien
gaagagaccatatttgttcgcagaggaagccgttgctttctgggatctggctacggcagaaaagacatcggctccaacaggggtgttccacagggtagctgggagttggaagagccaagaacgcctccgagctctggatttgagcttctctgcccatgggtgaagcgcccatgctcagcttgtgagcttcttcccgggagagcagccatggcactgaggaatgtgccctttcgctcagaggtcctgggctgggaccccgacagccttgctgactatttcaagaagctcaactataaggactgtgagaaggcagtgaagaagtaccacatcgatggggctcgcttcttgaacctgacagaaaatgacatccagaagttccccaagctccgggtgccgattctcagtaagttaagtcaggaaatcaacaagaacgaagagaggaggagcatcttcacacgcaaaccccaagtcccgcggtttcctgaagagacagaaagccacgaagaggacaatgggggttggtcgtcctttgaagaagacgattatgaaagtcccaatgatgaccaggatggggaggatgatggagactatgagtcccccaatgaggaggaagaggcacccgtggaagatgacgcggattatgagccgccaccctccaatgacgaggaagctctgcagaactccatcctgcctgccaagcctttccccaactccaactccatgtacatcgaccggcccccctctgggaaaaccccccagcagcctcctgtgcccccccagagaccgatggccgccctcccgcccccaccagccggccggaatcactcgccactgcccccaccccagaccaaccacgaagaacccagcagaagcagaaaccacaaaacggcaaagctccctgctccttcaatagacagaagcacgaaacctcccctagatcgttcattagctccgtttgatagagaacccttcacactaggaaagaaaccaccattttctgacaagccctcgattccagcgggaaggtcactcggggagcatttacccaagattcaaaagcctcctttaccaccgaccacggaaagacatgaaaggagcagccccctgccagggaagaagccacctgtgccaaagcatggatggggaccagacagaagagagaatgatgaagatgatgtgcatcagagacctttgccccagccagcactacttcctatgagctccaacactttcccttcaagatctactaagccaagtcccatgaaccctctcccatcctctcacatgcctggagcattctcagaaagtaacagcagttttccacagagtgcctccctgccaccatacttctctcaaggccctagcaacagaccacctatcagagccgaaggcagaaacttccccttgccacttccaaacaaacctcggcccccatcccccgcggaggaagagaattcattaaatgaagagtggtacgtttcttatattacccgaccagaggcagaagctgctcttagaaagataaaccaggatggcacatttctggtcagagacagctctaaaaaaacaacaaccaatccatatgtcctcatggtgttgtacaaagataaagtttacaacatccagatccgttatcagaaggaaagtcaagtttacttgttgggaactggactccgagggaaagaggactttctgtctgtgtcagatattattgactacttcaggaaaatgccacttctgctcattgatgggaaaaaccgaggttccagataccagtgcacattaacgcatgctgcagggtacccatagcaagttatagccgagcaaatgaaccgtcctcctgcctctgttgccaacacgagatcaatcagccttggtcaatggacaaacacttaggactgaactgaacccctccccatgaacacaagggttttatcctttcctttaaaaacagtgtttgaaatgaagactgtcaactatcccc

SEQ ID NO: 1025 - protein, 533 aa, Homo sapien; identical to SEQ ID NO: 1023

SEQ ID NO: 1026 - DNA, 5000 bp, Homo sapien
ggcacgagcagaagcaacaataattgtgaaaaatacttcagcagttatggactcatctgtcattcaaaggaaaaaagtagctgtcattggtggtggcttggttggctcattacaagcatgctttcttgcaaagaggaatttccagattgatgtatatgaagctagggaagatactcgagtggctaccttcacacgtggaagaagcattaacttagccctttctcatagaggacgacaagccttgaaagctgttggcctggaagatcagattgtatcccaaggtattcccatgagagcaagaatgatccactctctttcaggaaaaaagtctgcaattccctatgggacaaagtctcagtatattctttctgtaagcagagaaaatctaaacaaggatctattgactgctgctgagaaataccccaatgtgaaaatgcactttaaccacaggctgttgaaatgtaatccagaggaaggaatgatcacagtgcttggatctgacaaagttcccaaagatgtcacttgtgacctcattgtaggatgtgatggagcctattcaactgtcagatctcacctgatgaagaaacctcgctttgattacagtcagcagtacattcctcatgggtacatggagttgactattccacctaagaacggagattatgccatggaacctaattatctgcatatttggcctagaaatacctttatgatgattgcacttcctaacatgaacaaatcattcacatgtactttgttcatgccctttgaagagtttgaaaaacttctaaccagtaatgatgtggtagatttcttccagaaatactttccggatgccatccctctaattggagagaaactcctagtgcaagatttcttcctgttgcctgcccagcccatgatatctgtaaagtgctcttcatttcactttaaatctcactgtgtactgctgggagatgcagctcatgctatagtgccgttttttgggcaaggaatgaatgcgggctttgaagactgcttggtatttgatgagttaatggataaattcagtaacgaccttagtttgtgtcttcctgtgttctcaagattgagaatcccagatgatcacgcgatttcagacctatccatgtacaattacatagagatgcgagcacatgtcaactcaagctggttcatttttcagaagaacatggagagatttcttcatgcgattatgccatcgacctttatccctctctatacaatggtcactttttccagaataagataccatgaggctgtgcagcgttggcattggcaaaaaaaggtgataaacaaaggactctttttcttgggatcactgatagccatcagcagtacctacctacttatacactacatgtcaccacgatctttcctctgcttgagaagaccatggaactggatagctcacttccggaatacaacatgtttccccgcaaaggccgtggactccctagaacaaatttccaatctcattagcaggtgatagaaaggttttgtggtagcaaatgcatgatttctctgtgaccaaaattaagcatgaaaaaaatgtttccattgccatatttgattcactagtggaagatagtgttctgcttataattaaactgaatgtagagtatctctgtatgttaattgcaattactggttggggggtgcattttaaaagatgaaacatgcagcttccctacattacacacactcaggttgagtcattctaactataaaagtgcaatgactaagatccttcacttctctgaaagtaaggccctagatgcctcagggaagacagtaatcatgccttttctttaaaagacacaataggactcgcaacagcattgactcaacacctaggactaaaaatcacaacttaactagcatgttaactgcacttttcattacgtgaatggaacttacctaaccacagggctcagacttactagataaaaccagaaatggaaataaggaattcaggggagttccagagacttacaaaatgaactcattttattttcccaccttcaaatataagtattatcatctatctgtttatcgtctatctatctatcatctatctatctatctatcatctatctatctatctatctatctatctatctatctatctatctatctatctctatttatttatgtatttagagatcaggtctcactctgttgaccaggctggagtgcagtggtgagatctgggttcactgcaacctctgcctcctgggctcaagcaatcctcccacttcagcctcccaaatagctggggctaccatggtatttttcagtagagaccgggtcttgccatgctgcccaggccagtctcaaactcctggcctcatgtgatctgcccacctcagcctcccaaagtacagggattagagttgtgagccaccgctgccagcccagagttaccctctaaagataagaaaaaggctattaatatcatactaagtgaaggacaggaaagggttttattcataaattaaatgtctacatgtgccagaatggaaaggaaacaaggggagacaacttttatagaaatacaaagccattactttattcaatttcagaccctcagaagcaatttactaatttattcttcgactacatactgcagcagaaccagcaatacacttgatttttaaaagcacatttagtgaaatgttttctttggttcatccttctttaacaggctgctgagtcactcagaaatccttcaaacatgattaattatgaagatgaaacactagagtcatataagaaataaaaattgggcaataaaataaaatgattcagtgtttcttttctatattgtcaatgaaaaccttgagttctaataatccatgttcagtttgtagggaaagaaaaaataatttttccttctacccactttaggttccttggctggggcccctataacaaaagacagattgacaagagaaaaacaaacataaatttattagcgggtatatgtaatatatatgtgggaaatacaggggaatgagcaaatctcaaagagctggcgtcttagaactccctggcttatatagcatcgacaaagaacagtaaatttttagagaaacaacaaaacaaagaaaaagagctttgagtctgtaggggcagcaatttgggggaagcaaatatatgggagtttgccttgtagattcctctggtggtggtctccaggctgacaaggattcaaagttgtctctgaaactcctctttgtcatactgcacatataaaacgtcttttgtttccaacaagaggatttctttttcattctagaattatctccttgataacttgatcagatataggacatgacactgaatagagtccaacagtacaaaaaaaattcagtatgttctagctacttcacacatgtgtacgcgacagttatttttacagtaaggtattttcgagaaaaatgcattacgtgttttggaaaatagagtaatttaaaaaatatatttgaaatgaaaatctccaacacattagaagatgatgatgttagatgcccatcgtgtgccacaagtggttttttcattatgtaaagcacccgttgaattaaaagaatttgtttttgttcaacctcttcctgaggcccaagagcatatgggcaattcggatttcctgctggaccacaaggttctgttgatattacatagaaacgggtattccagacacttcttatgatgaaagtccaaaagtggcatccaatttaaggccccatctttcgttgccattcttcattcctacaaaggacgaacttggattacatcaactttggacccattggttttgtcgctgtcgtcaactgacagtgattcaccactggtgatgataaaaatgatggaagaagagttgaaagtcacttttttctttggcctgtccccatctttctgtgacatcacaatgggtctgatctgcatttcacttccagctgctggtaggtctttagcaggcctctggcacctcagcagtcggaggcacagaagctgcaaaagggatcttcgaaactgggcagagaaaaaataaagtggaatattaagtaaaagttgggcactaatctggattaacattcgaggaaatcagttgagctgatttaagttgttttttgtttgttagcaggtgtggatgtggggttatgtggtcatgctcagatctacctaaatcaccccagagctttatgtcttttattcattctaaatcttattaaccggaatatgtaggaccatttcaataccttgtaatcctccaagcttcaatctgcacacactttctatgagggcaggtacaactattaagagattttgaacattaagttagtccacaaatattcagtgggcatctactaggtgacagccactgtgctataattagagactttttactataagcatcaaaaacagataaggctcttcctggcagagtttacagcctggtgtacttgctaatgtctctttaattaggtgaagaattttttttttctatcgaaattactaatcagttggggaaaaaaatactatagcagacagcactaatgtcatcaacaaacattgttcttctccgtgtcctgggtacaacatcgaataatatttcttggcctcctttccgcttctcctctctgctgttcctctctacaagaacctgggaggccaacgcctaaagatcataatatcacaatggaaggaacctagattcctaaatgactgcataggacagatcccatctcctccacccaatacattattagactgaactgtgacctgaaatgagcaataaactctgtattaattcactgaaatgttggggttgcttgttatagtagtcggtccatcatgaccagtaaaacataaatcaaaagttaatgtaattgttatcccattatttagagcgaaataaatgttgaatatatggactttctcagattaggaaataccaattaaaaatataataaatagct

SEQ ID NO: 1027 - protein, 486 aa, Homo sapien
MDSSVIQRKKVAVIGGGLVGSLQACFLAKRNFQIDVYEAREDTRVATFTRGRSINLALSHRGRQALKAVGLEDQIVSQGIPMRARMIHSLSGKKSAIPYGTKSQYILSVSRENLNKDLLTAAEKYPNVKMHFNHRLLKCNPEEGMITVLGSDKVPKDVTCDLIVGCDGAYSTVRSHLMKKPRFDYSQQYIPHGYMELTIPPKNGDYAMEPNYLHIWPRNTFMMIALPNMNKSFTCTLFMPFEEFEKLLTSNDVVDFFQKYFPDAIPLIGEKLLVQDFFLLPAQPMISVKCSSFHFKSHCVLLGDAAHAIVPFFGQGMNAGFEDCLVFDELMDKFSNDLSLCLPVFSRLRIPDDHAISDLSMYNYIEMRAHVNSSWFIFQKNMERFLHAIMPSTFIPLYTMVTFSRIRYHEAVQRWHWQKKVINKGLFFLGSLIAISSTYLLIHYMSPRSFLCLRRPWNWIAHFRNTTCFPAKAVDSLEQISNLISR

SEQ ID NO: 1028 - DNA, 1444 bp, Homo sapien
ggggggtctgcgtcttcccgagccagtgtgctgagctctccgcgtcgcctctgtcgcccgcgcctggcctaccgcggcactcccggctgcacgctctgcttggcctcgccatgccggtggacctcagcaagtggtccgggcccttgagcctgcaagaagtggacgagcagccgcagcacccgctgcatgtcacctacgccggggcggcggtggacgagctgggcaaagtgctgacgcccacccaggttaagaatagacccaccagcatttcgtgggatggtcttgattcagggaagctctacaccttggtcctgacagacccggatgctcccagcaggaaggatcccaaatacagagaatggcatcatttcctggtggtcaacatgaagggcaatgacatcagcagtggcacagtcctctccgattatgtgggctcggggcctcccaagggcacaggcctccaccgctatgtctggctggtttacgagcaggacaggccgctaaagtgtgacgagcccatcctcagcaaccgatctggagaccaccgtggcaaattcaaggtggcgtccttccgtaaaaagtatgagctcagggccccggtggctggcacgtgttaccaggccgagtgggatgactatgtgcccaaactgtacgagcagctgtctgggaagtagggggttagcttggggacctgaactgtcctggaggccccaagccatgttccccagttcagtgttgcatgtataatagatttctcctcttcctgccccccttggcatgggtgagacctgaccagtcagatggtagttgagggtgacttttcctgctgcctggcctttataattttactcactcactctgatttatgttttgatcaaatttgaacttcattttggggggtattttggtactgtgatggggtcatcaaattattaatctgaaaatagcaacccagaatgtaaaaaagaaaaaactggggggaaaaagaccaggtctacagtgatagagcaaagcatcaaagaatctttaagggaggtttaaaaaaaaaaaaaaaaaaaaagattggttgcctctgcctttgtgatcctgagtccagaatggtacacaatgtgattttatggtgatgtcactcacctagacaaccagaggctggcattgaggctaacctccaacacagtgcatctcagatgcctcagtaggcatcagtatgtcactctggtccctttaaagagcaatcctggaagaagcaggagggagggtggctttgctgttgttgggacatggcaatctagaccggtagcagcgcctcgctgacagcttgggaggaaacctgagatctgtgttttttaaattgatcgttcttcatgggggtaagaaaagctggtctggagttgctgaatgttgcattaattgtgctgtttgcttgtagttgaataaaaacccg

SEQ ID NO: 1029 - protein, 187 aa, Homo sapien
MPVDLSKWSGPLSLQEVDEQPQHPLHVTYAGAAVDELGKVLTPTQVKNRPTSISWDGLDSGKLYTLVLTDPDAPSRKDPKYREWHHFLVVNMKGNDISSGTVLSDYVGSGPPKGTGLHRYVWLVYEQDRPLKCDEPILSNRSGDHRGKFKVASFRKKYELRAPVAGTCYQAEWDDYVPKLYEQLSGK

SEQ ID NO: 1030 - DNA, 1071 bp, Homo sapien
gcagttctggtcctcctaggagcggccgcctgcgcggcgcggccccgtggtcggatgctgggcggcagagaggccgaggcgcacgcgcggccctacatggcgtcggtgcagctgaacggcgcgcacctgtgcgcaggcgtcctggtggcggagcggtgggtgctgagcgcggcgcactgcctggaggacgcggccgacgggaaggtgcaggttctcctgggcgcgcactccctgtcgcagccggagccctccaagcgcctgtacgacgtgctccgcgcagtgccccacccggacagccagcccgacaccatcgaccacgacctcctgctgctacagctgtcggagaaggccacactgggccctgctgtgcgccccctgccctggcagcgcgtggaccgcgacgtggcaccgggaactctctgcgacgtggccggctggggcatagtcaaccacgcgggccgccgcccggacagcctgcagcacgtgctcttgccagtgctggaccgcgccacctgcaaccggcgcacgcaccacgacggcgccatcaccgagcgcttgatgtgcgcggagagcaatcgccgggacagctgcaagggtgactccgggggcccgctggtgtgcgggggcgtgctcgagggcgtggtcacctcgggctcgcgcgtttgcggcaaccgcaagaagcccgggatctacacccgcgtggcgagctatgcggcctggatcgacagcgtcctggcctagggtgccggggcctgaaggtcagggtcacccaagcaacaaagtcccgagcaatgaagtcatccactcctgcatctggttggtctttattgagcacctactatatgcagaaggggaggccgaggtgggaggatcattggatctcaggagttggagatcagcatgggccacgtagcgcgactccatctctacaaataaataaaaattagctgggcaattggcgggcatggaggtgggtgcttgtagttccagctactcaggaggctgaggtgggaggatgacttgaacgcaggaggctgaggctgcagtgagttgtgattgcaccactgccct

SEQ ID NO: 1031 - protein, 228 aa, Homo sapien
MLGGREAEAHARPYMASVQLNGAHLCAGVLVAERWVLSAAHCLEDAADGKVQVLLGAHSLSQPEPSKRLYDVLRAVPHPDSQPDTIDHDLLLLQLSEKATLGPAVRPLPWQRVDRDVAPGTLCDVAGWGIVNHAGRRPDSLQHVLLPVLDRATCNRRTHHDGAITERLMCAESNRRDSCKGDSGGPLVCGGVLEGVVTSGSRVCGNRKKPGIYTRVASYAAWIDSVLA

SEQ ID NO: 1032 - DNA, 2074 bp, Homo sapien
cacaaggcggtagccatggcggaggcggcggctgcagcgggtgggactggcttgggcgcgggcgcgagctacgggtctgcagcggaccgggaccgggacccggacccggaccgcgccgggcggaggctgcgggttctctctggccatctgctgggccggccccgggaggctctgagtaccaatgagtgcaaagcgcggagagccgcgtcggcggccacggcagcgcccacggccactcccgccgcgcaggagtcgggcaccatcccaaagaagcggcaagaagttatgaaatggaatggatggggatataatgattctaaattcatcttcaataagaagggccaaattgaattgactgggaaaaggtaccctcttagtggcatgggtttaccaacatttaaagaatggatccaaaatacccttggagtaaatgtggagcataaaactacctctaaagcatccttaaatcctagtgatacacctccttctgttgtaaatgaagattttcttcatgaccttaaagaaactaatatttcatattcacaagaggcagatgatcgagtatttagagctcatggtcattgtcttcatgagatatttttgctcagggaaggaatgtttgagcgaattcctgatatagttttatggccaacatgccatgatgatgtagttaagattgtgaatctagcttgcaaatataatctttgtatcataccaattggtggaggaacaagtgtttcatatggcctgatgtgtcctgcagatgagacaagaacaattatttctttggacacttcacaaatgaatcgaattctctgggttgatgagaacaatttgacagctcatgtggaggctggcataacaggacaagagttggaaagacagcttaaagaaagtggttattgtacaggtcatgaaccagattccctggagttcagtactgtaggaggatgggtatctactcgcgcatcaggcatgaagaagaatatctatggcaatatcgaggacctggtggttcatataaaaatggtaacacctagaggtataatagaaaaaagctgtcaaggacctcgtatgtcaacaggccctgatatccatcacttcatcatgggatctgaaggaactcttggtgtaataacagaagctacaataaaaatcagaccagtccctgaataccaaaagtatggctcagtagctttccctaattttgaacaaggagtagcctgtttaagagaaattgcaaaacagagatgtgctccggcatctattcgcctcatggacaacaagcagtttcagtttggtcatgctcttaaacctcaggtttcctctatctttacatcatttttggacggattaaaaaagttttatattacaaagtttaaaggatttgacccaaatcagctaagtgtagccacattactgtttgagggggatcgtgagaaggttcttcaacatgaaaaacaagtgtatgatattgctgcaaaatttggtgggttggcagctggagaagataatggacagagaggttatttgctgacctatgttattgcatacattcgagacttggctttggaatactatgtattaggagaatcttttgagacttctgctccttgggacagggtggtagatctctgtagaaatgtaaaagaaagaataacaagggaatgcaaagagaagggtgttcagtttgctcctttttctacatgcagggtgacgcagacttacgatgcaggtgcttgtatctacttctattttgcctttaactacaggggaattagtgacccactgaccgtatttgaacaaactgaggcagctgctagagaagaaatccttgctaatggagggagcctgtcacatcaccatggagtgggcaagttacggaagcaatggctaaaggaaagtatctctgatgtcggctttgggatgctgaagtctgtcaaggaatatgtggaccccaataacatctttggaaacagaaaccttttataaatccattagtaccattacaaaaaaatgtcaattttttttttaagttttcaactgtggttatactagtaatcaaatatatcat

SEQ ID NO: 1033 - protein, 658 aa, Homo sapien
MAEAAAAAGGTGLGAGASYGSAADRDRDPDPDRAGRRLRVLSGHLLGRPREALSTNECKARRAASAATAAPTATPAAQESGTIPKKRQEVMKWNGWGYNDSKFIFNKKGQIELTGKRYPLSGMGLPTFKEWIQNTLGVNVEHKTTSKASLNPSDTPPSVVNEDFLHDLKETNISYSQEADDRVFRAHGHCLHEIFLLREGMFERIPDIVLWPTCHDDVVKIVNLACKYNLCIIPIGGGTSVSYGLMCPADETRTIISLDTSQMNRILWVDENNLTAHVEAGITGQELERQLKESGYCTGHEPDSLEFSTVGGWVSTRASGMKKNIYGNIEDLVVHIKMVTPRGIIEKSCQGPRMSTGPDIHHFIMGSEGTLGVITEATIKIRPVPEYQKYGSVAFPNFEQGVACLREIAKQRCAPASIRLMDNKQFQFGHALKPQVSSIFTSFLDGLKKFYITKFKGFDPNQLSVATLLFEGDREKVLQHEKQVYDIAAKFGGLAAGEDNGQRGYLLTYVIAYIRDLALEYYVLGESFETSAPWDRVVDLCRNVKERITRECKEKGVQFAPFSTCRVTQTYDAGACIYFYFAFNYRGISDPLTVFEQTEAAAREEILANGGSLSHHHGVGKLRKQWLKESISDVGFGMLKSVKEYVDPNNIFGNRNLL

SEQ ID NO: 1034 - DNA, 1286 bp, Homo sapien
gccacgtgctgctgggtctcagtcctccacttcccgtgtcctctggaagttgtcaggagcaatgttgcgcttgtacgtgttggtaatgggagtttctgccttcacccttcagcctgcggcacacacaggggctgccagaagctgccggtttcgtgggaggcattacaagcgggagttcaggctggaaggggagcctgtagccctgaggtgcccccaggtgccctactggttgtgggcctctgtcagcccccgcatcaacctgacatggcataaaaatgactctgctaggacggtcccaggagaagaagagacacggatgtgggcccaggacggtgctctgtggcttctgccagccttgcaggaggactctggcacctacgtctgcactactagaaatgcttcttactgtgacaaaatgtccattgagctcagagtttttgagaatacagatgctttcctgccgttcatctcatacccgcaaattttaaccttgtcaacctctggggtattagtatgccctgacctgagtgaattcacccgtgacaaaactgacgtgaagattcaatggtacaaggattctcttcttttggataaagacaatgagaaatttctaagtgtgagggggaccactcacttactcgtacacgatgtggccctggaagatgctggctattaccgctgtgtcctgacatttgcccatgaaggccagcaatacaacatcactaggagtattgagctacgcatcaagaaaaaaaaagaagagaccattcctgtgatcatttcccccctcaagaccatatcagcttctctggggtcaagactgacaatcccgtgtaaggtgtttctgggaaccggcacacccttaaccaccatgctgtggtggacggccaatgacacccacatagagagcgcctacccgggaggccgcgtgaccgaggggccacgccaggaatattcagaaaataatgagaactacattgaagtgccattgatttttgatcctgtcacaagagaggatttgcacatggattttaaatgtgttgtccataataccctgagttttcagacactacgcaccacagtcaaggaagcctcctccacgttctcctggggcattgtgctggccccactttcactggccttcttggttttggggggaatatggatgcacagacggtgcaaacacagaactggaaaagcagatggtctgactgtgctatggcctcatcatcaagactttcaatcctatcccaagtgaaataaatggaatgaaataattcaaacac

SEQ ID NO: 1035 - protein, 398 aa, Homo sapien
MLRLYVLVMGVSAFTLQPAAHTGAARSCRFRGRHYKREFRLEGEPVALRCPQVPYWLWASVSPRINLTWHKNDSARTVPGEEETRMWAQDGALWLLPALQEDSGTYVCTTRNASYCDKMSIELRVFENTDAFLPFISYPQILTLSTSGVLVCPDLSEFTRDKTDVKIQWYKDSLLLDKDNEKFLSVRGTTHLLVHDVALEDAGYYRCVLTFAHEGQQYNITRSIELRIKKKKEETIPVIISPLKTISASLGSRLTIPCKVFLGTGTPLTTMLWWTANDTHIESAYPGGRVTEGPRQEYSENNENYIEVPLIFDPVTREDLHMDFKCVVHNTLSFQTLRTTVKEASSTFSWGIVLAPLSLAFLVLGGIWMHRRCKHRTGKADGLTVLWPHHQDFQSYPK

SEQ ID NO: 1036 - DNA, 1375 bp, Homo sapien
attcagaggctgctgcctgcttaggaggttgtagaaagctctgtaggttctctctgtgtgtcctacaggagtcttcaggccagctccctgtcggatggcttttatgaaaaaatatctcctccccattctggggctcttcatggcctactactactattctgcaaacgaggaattcagaccagagatgctccaaggaaagaaagtgattgtcacaggggccagcaaagggatcggaagagagatggcttatcatctggcgaagatgggagcccatgtggtggtgacagcgaggtcaaaagaaactctacagaaggtggtatcccactgcctggagcttggagcagcctcagcacactacattgctggcaccatggaagacatgaccttcgcagagcaatttgttgcccaagcaggaaagctcatgggaggactagacatgctcattctcaaccacatcaccaacacttctttgaatctttttcatgatgatattcaccatgtgcgcaaaagcatggaagtcaacttcctcagttacgtggtcctgactgtagctgccttgcccatgctgaagcagagcaatggaagcattgttgtcgtctcctctctggctgggaaagtggcttatccaatggttgctgcctattctgcaagcaagtttgctttggatgggttcttctcctccatcagaaaggaatattcagtgtccagggtcaatgtatcaatcactctctgtgttcttggcctcatagacacagaaacagccatgaaggcagtttctgggatagtccatatgcaagcagctccaaaggaggaatgtgccctggagatcatcaaagggggagctctgcgccaagaagaagtgtattatgacagctcactctggaccactcttctgatcagaaatccatgcaggaagatcctggaatttctctactcaacgagctataatatggacagattcataaacaagtaggaactccctgagggctgggcatgctgagggattttgggactgttctgtctcatgtttatctgagctcttatctatgaagacatcttcccagagtgtccccagagacatgcaagtcatgggtcacacctgacaaatggaaggagttcctctaacatttgcaaaatggaaatgtaataataatgaatgtcatgcaccgctgcagccagcagttgtaaaattgttagtaaacataggtataattaccagatagttatattaaatttatatcttatatataataatatgtgatgattaatacaatattaattataataaaggtcacataaactttataaattcataactggtagctataacttgagcttattcaggatggttctttaaaccataaactgtacaatg

SEQ ID NO: 1037 - protein, 292 aa, Homo sapien
MAFMKKYLLPILGLFMAYYYYSANEEFRPEMLQGKKVIVTGASKGIGREMAYHLAKMGAHVVVTARSKETLQKVVSHCLELGAASAHYIAGTMEDMTFAEQFVAQAGKLMGGLDMLILNHITNTSLNLFHDDIHHVRKSMEVNFLSYVVLTVAALPMLKQSNGSIVVVSSLAGKVAYPMVAAYSASKFALDGFFSSIRKEYSVSRVNVSITLCVLGLIDTETAMKAVSGIVHMQAAPKEECALEIIKGGALRQEEVYYDSSLWTTLLIRNPCRKILEFLYSTSYNMDRFINK

SEQ ID NO: 1038 - DNA, 1518 bp, Homo sapien
aggccgctagggtgcggggttggggaggaggccgctagtctacgcctgtggagccgatactcagccctctgcgaccatggctgtgctggcggcacttctgcgcagcggcgcccgcagccgcagccccctgctccggaggctggtgcaggaaataagatatgtggaacggagttatgtatcaaaacccactttgaaggaagtggtcatagtaagtgctacaagaacacccattggatcttttttaggcagcctttccttgctgccagccactaagcttggttccattgcaattcagggagccattgaaaaggcagggattccaaaagaagaagtgaaagaagcatacatgggtaatgttctacaaggaggtgaaggacaagctcctacaaggcaggcagtattgggtgcaggcttacctatttctactccatgtaccaccataaacaaagtttgtgcttcaggaatgaaagccatcatgatggcctctcaaagtcttatgtgtggacatcaggatgtgatggtggcaggtgggatggagagcatgtccaatgttccatatgtaatgaacagaggatcaacaccatatggtggggtaaagcttgaagatttgattgtaaaagacgggctaactgatgtctacaataaaattcatatgggcagctgtgctgagaatacagcaaagaagctgaatattgcacgaaatgaacaggacgcttatgctattaattcttataccagaagtaaagcagcatgggaagctgggaaatttggaaatgaagttattcctgtcacagttacagtaaaaggtcaaccagatgtagtggtgaaagaagatgaagaatataaacgtgttgattttagcaaagttccaaagctgaagacagttttccagaaagaaaatggcacagtaacagctgccaatgccagtacactgaatgatggagcagctgctctggttctcatgacggcagatgcagcgaagaggctcaatgttacaccactggcaagaatagtagcatttgctgacgctgctgtagaacctattgattttccaattgctcctgtatatgctgcatctatggttcttaaagatgtgggattgaaaaaagaagatattgcaatgtgggaagtaaatgaagcctttagtctggttgtactagcaaacattaaaatgttggagattgatccccaaaaagtgaatatcaatggaggagctgtttctctgggacatccaattgggatgtctggagccaggattgttggtcatttgactcatgccttgaagcaaggagaatacggtcttgccagtatttgcaatggaggaggaggtgcttctgccatgctaattcagaagctgtagacaacctctgctatttaaggagacaaccctatgtgaccagaaggcctgctgtaatcagtgtgactactgtgggtcagcttatattcagataagctgtttcattttttattattttctatgttaacttttaaaaatcaaaatgatgaaatcccaaaaca

SEQ ID NO: 1039 - protein, 427 aa, Homo sapien
MAVLAALLRSGARSRSPLLRRLVQEIRYVERSYVSKPTLKEVVIVSATRTPIGSFLGSLSLLPATKLGSIAIQGAIEKAGIPKEEVKEAYMGNVLQGGEGQAPTRQAVLGAGLPISTPCTTINKVCASGMKAIMMASQSLMCGHQDVMVAGGMESMSNVPYVMNRGSTPYGGVKLEDLIVKDGLTDVYNKIHMGSCAENTAKKLNIARNEQDAYAINSYTRSKAAWEAGKFGNEVIPVTVTVKGQPDVVVKEDEEYKRVDFSKVPKLKTVFQKENGTVTAANASTLNDGAAALVLMTADAAKRLNVTPLARIVAFADAAVEPIDFPIAPVYAASMVLKDVGLKKEDIAMWEVNEAFSLVVLANIKMLEIDPQKVNINGGAVSLGHPIGMSGARIVGHLTHALKQGEYGLASICNGGGGASAMLIQKL

SEQ ID NO: 1040 - DNA, 6626 bp, Homo sapien
cagcatcaataaggccattaatacgcaggaagtggctgtaaaggaaaaacacgccagaacgtgcatactgggcacccaccatgagaaaggggcacagaccttctggtctgttgtcaaccgcctgcctctgtctagcaacgcagtgctctgctggaagttctgccatgtgttccacaaactcctccgagatggacacccgaacgtcctgaaggactctctgagatacagaaatgaattgagtgacatgagcaggatgtggggccacctgagcgaggggtatggccagctgtgcagcatctacctgaaactgctaagaaccaagatggagtaccacaccaaaaatcccaggttcccaggcaacctgcagatgagtgaccgccagctggacgaggctggagaaagtgacgtgaacaactttttccagttaacagtggagatgtttgactacctggagtgtgaactcaacctcttccaaacagtattcaactccctggacatgtcccgctctgtgtccgtgacggcagcagggcagtgccgcctcgccccgctgatccaggtcatcttggactgcagccacctttatgactacactgtcaagcttctcttcaaactccactcctgcctcccagctgacaccctgcaaggccaccgggaccgcttcatggagcagtttacaaagttgaaagatctgttctaccgctccagcaacctgcagtacttcaagcggctcattcagatcccccagctgcctgagaacccacccaacttcctgcgagcctcagccctgtcagaacatatcagccctgtggtggtgatccctgcagaggcctcatcccccgacagcgagccagtcctagagaaggatgacctcatggacatggatgcctctcagcagaatttatttgacaacaagtttgatgacatctttggcagttcattcagcagtgatcccttcaatttcaacagtcaaaatggtgtgaacaaggatgagaaggaccacttaattgagcgactatacagagagatcagtggattgaaggcacagctagaaaacatgaagactgagagccagcgggttgtgctgcagctgaagggccacgtcagcgagctggaagcagatctggccgagcagcagcacctgcggcagcaggcggccgacgactgtgaattcctgcgggcagaactggacgagctcaggaggcagcgggaggacaccgagaaggctcagcggagcctgtctgagatagaaaggaaagctcaagccaatgaacagcgatatagcaagctaaaggagaagtacagcgagctggttcagaaccacgctgacctgctgcggaagaatgcagaggtgaccaaacaggtgtccatggccagacaagcccaggtagatttggaacgagagaaaaaagagctggaggattcgttggagcgcatcagtgaccagggccagcggaagactcaagaacagctggaagttctagagagcttgaagcaggaacttgccacaagccaacgggagcttcaggttctgcaaggcagcctggaaacttctgcccagtcagaagcaaactgggcagccgagttcgccgagctagagaaggagcgggacagcctggtgagtggcgcagctcatagggaggaggaattatctgctcttcggaaagaactgcaggacactcagctcaaactggccagcacagaggaatctatgtgccagcttgccaaagaccaacgaaaaatgcttctggtggggtccaggaaggctgcggagcaggtgatacaagacgccctgaaccagcttgaagaacctcctctcatcagctgcgctgggtctgcagatcacctcctctccacggtcacatccatttccagctgcatcgagcaactggagaaaagctggagccagtatctggcctgcccagaagacatcagtggacttctccattccataaccctgctggcccacttgaccagcgacgccattgctcatggtgccaccacctgcctcagagccccacctgagcctgccgactcactgaccgaggcctgtaagcagtatggcagggaaaccctcgcctacctggcctccctggaggaagagggaagccttgagaatgccgacagcacagccatgaggaactgcctgagcaagatcaaggccatcggcgaggagctcctgcccaggggactggacatcaagcaggaggagctgggggacctggtggacaaggagatggcggccacttcagctgctattgaaactgccacggccagaatagaggagatgctcagcaaatcccgagcaggagacacaggagtcaaattggaggtgaatgaaaggatccttggttgctgtaccagcctcatgcaagctattcaggtgctcatcgtggcctctaaggacctccagagagagattgtggagagcggcaggggtacagcatcccctaaagagttttatgccaagaactctcgatggacagaaggacttatctcagcctccaaggctgtgggctggggagccactgtcatggtggatgcagctgatctggtggtacaaggcagagggaaatttgaggagctaatggtgtgttctcatgaaattgctgctagcacagcccagcttgtggctgcatccaaggtgaaagctgataaggacagccccaacctagcccagctgcagcaggcctctcggggagtgaaccaggccactgccggcgttgtggcctcaaccatttccggcaaatcacagatcgaagagacagacaacatggacttctcaagcatgacgctgacacagatcaaacgccaagagatggattctcaggttagggtgctagagctagaaaatgaattgcagaaggagcgtcaaaaactgggagagcttcggaaaaagcactacgagcttgctggtgttgctgagggctgggaagaaggaacagaggcatctccacctacactgcaagaagtggtaaccgaaaaagaatagagccaaaccaacaccccatatgtcagtgtaaatccttgttacctatctcgtgtgtgttatttccccagccacaggccaaatccttggagtcccaggggcagccacaccactgccattacccagtgccgaggacatgcatgacacttcccaaagactccctccatagcgacaccctttctgtttggacccatggtcatctctgttcttttcccgcctccctagttagcatccaggctggccagtgctgcccatgagcaagcctaggtacgaagaggggtggtggggggcagggccactcaacagagaggaccaacatccagtcctgctgactatttgacccccacaacaatgggtatccttaatagaggagctgcttgttgtttgttgacagcttggaaagggaagatcttatgccttttcttttctgttttcttctcagtcttttcagtttcatcatttgcacaaacttgtgagcatcagagggctgatggattccaaaccaggacactaccctgagatctgcacagtcagaaggacggcaggagtgtcctggctgtgaatgccaaagccattctccccctctttgggcagtgccatggatttccactgcttcttatggtggttggttgggttttttggttttgttttttttttttaagtttcactcacatagccaactctcccaaagggcacacccctggggctgagtctccagggccccccaactgtggtagctccagcgatggtgctgcccaggcctctcggtgctccatctccgcctccacactgaccaagtgctggcccacccagtccatgctccagggtcaggcggagctgctgagtgacagctttcctcaaaaagcagaaggagagtgagtgcctttccctcctaaagctgaatcccggcggaaagcctctgtccgcctttacaagggagaagacaacagaaagagggacaagagggttcacacagcccagttcccgtgacgaggctcaaaaacttgatcacatgcttgaatggagctggtgagatcaacaacactacttccctgccggaatgaactgtccgtgaatggtctctgtcaagcgggccgtctcccttggcccagagacggagtgtgggagtgattcccaactcctttctgcagacgtctgccttggcatcctcttgaataggaagatcgttccactttctacgcaattgacaaacccggaagatcagatgcaattgctcccatcagggaagaaccctatacttggtttgctacccttagtatttattactaacctcccttaagcagcaacagcctacaaagagatgcttggagcaatcagaacttcaggtgtgactctagcaaagctcatctttctgcccggctacatcagccttcaagaatcagaagaaagccaaggtgctggactgttactgacttggatcccaaagcaaggagatcatttggagctcttgggtcagagaaaatgagaaaggacagagccagcggctccaactcctttcagccacatgccccaggctctcgctgccctgtggacaggatgaggacagagggcacatgaacagcttgccagggatgggcagcccaacagcacttttcctcttctagatggaccccagcatttaagtgaccttctgatcttgggaaaacagcgtcttccttctttatctatagcaactcattggtggtagccatcaagcacttcccaggatctgctccaacagaatattgctaggttttgctacatgacgggttgtgagacttctgtttgatcactgtgaaccaacccccatctccctagcccacccccctccccaactccctctctgtgcattttctaagtgggacattcaaaaaactctctcccaggacctcggatgaccatactcagacgtgtgacctccatactgggttaaggaagtatcagcactagaaattgggcagtcttaatgttgaatgctgctttctgcttagtatttttttgattcaaggctcagaaggaatggtgcgtggcttccctgtcccagttgtggcaactaaaccaatcggtgtgttcttgatgcgggtcaacatttccaaaagtggctagtcctcacttctagatctcagccattctaactcatatgttcccaattaccaaggggtggccgggcacagtggctcacgcctgtaatcccagcactttgagaggctgaggtggtaggatcacctgaggtcaggagttcaagaccagcctgtccaacatggtgaaacccccatctctactaaaaataccaaaaattagccgagcgtagtgacgggtgcccgtaatcccagctactcaggaggctgagacaggagaatcacctgaaccccagaggcagaggttgcagtgagctgagatcacgccattgtactccagcctgggcaacaagagcaaaactccgtctcaaaaaaaaaaaaaaattacaaatggggcaaacagtctagtgtaatggatcaaattaagattctctgcccagccgggcacagtggcgcatgcctgtaatcccagaactttgggaggccaagacgggatgattgcttgagctcaggagtttgagaccaggctgggcatcatagcaagacctcatctctactaaaattcaaaaacaaaattagccgggcatgatggtgcatgcctgtagtctcagctagttggggagctaaggtgggagaattgcttgagcttgggaagtcgaggctgcagtcagccctgattgtgccagtgcactccggcctgggtgacagagtgagacccgtgctcaaaaaaaaaaagattctgtgtcagagcccagcccaggagtttgaggctgcaatgagccatgatttcccactgcactccagcctgagtgacagagcgagactccatctctttaaaaacaaacaaaaaattatctgaatgatcctgtctctaaaaagaagccacagaaatgtttaaaaacttcatcgacttagcctgagtcataacggttaagaaagcacttaaacagaagcagaggctaattcagtgtcacatgaggaagtagctgtcagatgtcacataattactttcgtaatagctcagattagaatggctaccccattctctagacaaaatcaaattgtcctattgtgactcttctaaaaatgaagatgaagagctatttaatgacacaccttggattaaaacgggaatcacatcttaaagctaaaaatgaacctgcaagccttctaaatgagtcactgagcatcactagtgacaagtctcgggtgagcgtaaatgggtcatgacaagatgggacagcaacaaaatcatggcttaggatcgacaagaagttaaaaaacagctgcatctgttacttaagtttgtaagacagtgccctgagacctctagagaaaagatgtttgtttacataagagaaagaaggccagacatggtgtctcacacgtttaatcccagcactttgggaggcaggggcgggtggatcacctgaggtcaggagttcaagactagcctggccaacatggtgaaaccccgtctctactaaaaatacaaaaattagccgggcatggtggcaggcgcctataatcccagctactggggaggctgaggcaggagaatc

SEQ ID NO: 1041 - protein, 914 aa, Homo sapien
MSRMWGHLSEGYGQLCSIYLKLLRTKMEYHTKNPRFPGNLQMSDRQLDEAGESDVNNFFQLTVEMFDYLECELNLFQTVFNSLDMSRSVSVTAAGQCRLAPLIQVILDCSHLYDYTVKLLFKLHSCLPADTLQGHRDRFMEQFTKLKDLFYRSSNLQYFKRLIQIPQLPENPPNFLRASALSEHISPVVVIPAEASSPDSEPVLEKDDLMDMDASQQNLFDNKFDDIFGSSFSSDPFNFNSQNGVNKDEKDHLIERLYREISGLKAQLENMKTESQRVVLQLKGHVSELEADLAEQQHLRQQAADDCEFLRAELDELRRQREDTEKAQRSLSEIERKAQANEQRYSKLKEKYSELVQNHADLLRKNAEVTKQVSMARQAQVDLEREKKELEDSLERISDQGQRKTQEQLEVLESLKQELATSQRELQVLQGSLETSAQSEANWAAEFAELEKERDSLVSGAAHREEELSALRKELQDTQLKLASTEESMCQLAKDQRKMLLVGSRKAAEQVIQDALNQLEEPPLISCAGSADHLLSTVTSISSCIEQLEKSWSQYLACPEDISGLLHSITLLAHLTSDAIAHGATTCLRAPPEPADSLTEACKQYGRETLAYLASLEEEGSLENADSTAMRNCLSKIKAIGEELLPRGLDIKQEELGDLVDKEMAATSAAIETATARIEEMLSKSRAGDTGVKLEVNERILGCCTSLMQAIQVLIVASKDLQREIVESGRGTASPKEFYAKNSRWTEGLISASKAVGWGATVMVDAADLVVQGRGKFEELMVCSHEIAASTAQLVAASKVKADKDSPNLAQLQQASRGVNQATAGVVASTISGKSQIEETDNMDFSSMTLTQIKRQEMDSQVRVLELENELQKERQKLGELRKKHYELAGVAEGWEEGTEASPPTLQEVVTEKE

SEQ ID NO: 1042 - DNA, 1769 bp, Homo sapien
cggcggcggcgggcagcggacgggcggactgacgggcgcctccaccttgctccctccctggctgccggcttccttttgtctttctgggcggcgatgagcgcagggccggcgcagcagctgcgggcgcacggaggcccgcgctgctagtcactcctcccggcctcggcgcgcttgtcccgggcagcggcccgggcccgctgcagccgccgccggcgccgaacttgggctcgggaagccggcggaccgcgtcctgcgccggagcaggggcatggtctagtggcccagtcaggacgcggaaacactccctggaggttctgacccactccctctcagcctccgcctggtctctggtgtagtcgccgccgccagccgccatgggcaaacagaacagcaagctgcggcccgaggtgctgcaggacctgcgggagaacacggagttcaccgaccacgagctgcaggagtggtacaagggcttcctcaaggactgccccaccggccacctgaccgtggacgagttcaagaagatctacgccaacttcttcccctacggcgacgcttccaagttcgccgagcacgtcttccgcaccttcgacaccaacggcgacggcaccatcgacttccgggagttcatcattgcgctgagcgtgacctcgcggggcaagctggagcagaagctcaagtgggccttcagcatgtacgacctggacggcaacggctacatcagccgcagcgagatgctggagatcgtgcaggccatctacaagatggtgtcgtctgtgatgaagatgccggaggatgagtccaccccggagaagcgcacagacaagatcttcaggcagatggacaccaacaatgacggcaaactgtccttggaagaattcatcagaggtgccaagagcgacccctccatcgtccgcctgctgcagtgcgaccccagcagtgccagtcagttctgagcgagcggcccctggacagttgcagagaaacacaggcttgtcgtgccgtttaagctttgcttgcaagagtggatgccccgcaatcgttcctgctctcccgggccccgggcctggggcatgcgttgcacctgcccggcccggtggctgcgcctccctcctccacctgaccaacgcgacattcctcccctcacgcctggcccggtcccttccagggcaactcccagggatgtggtgacatgcagggttcaagtgttcttggttccaggcacctcccggctcacggggagctcagaggtccatgccgaggagaccaggcaggacctcccgaggctgcgccccggccggcccatgcgttttgtgatcccaagtgactctgtgggaagggtggggacgaggcgtcgggagggtatacagggagcccctcccgtgcatggctgcccccccgttcattttctccaccacagccgcttgcacgtatagatactgtggtcccctttcttttaatatataaattatgtatggtgaagtggagtgtattgtgtaggtcccgtatttaatgcctctgactgcctttgaagcgcagccctctgtggcccgcagccccctgagcctggctgttgtgtggtatttatgctctctttgtctgcctgtttctaaggaaatgcatgtgtgccctgagccgtgatgatcctcccatccgtgttgtgagcacaggcatttgtgtctggtctgtcctccctgttgattggtctggcatttccggtattaaaatgataaaataaatggcattttctgaaaaaaaaaaaaaaaaaa

SEQ ID NO: 1043 - protein, 193 aa, Homo sapien
MGKQNSKLRPEVLQDLRENTEFTDHELQEWYKGFLKDCPTGHLTVDEFKKIYANFFPYGDASKFAEHVFRTFDTNGDGTIDFREFIIALSVTSRGKLEQKLKWAFSMYDLDGNGYISRSEMLEIVQAIYKMVSSVMKMPEDESTPEKRTDKIFRQMDTNNDGKLSLEEFIRGAKSDPSIVRLLQCDPSSASQF

SEQ ID NO: 1044 - DNA, 1305 bp, Homo sapien
cgcggctcagtaattgaaggcctgaaacgcccatgtgccactgactaggaggcttccctgctgcggcacttcatgacccagcggcgcgcggcccagtgaagccaccgtggtgtccagcatggccgcgctgctcctgggcgcggtgctgctggtggcccagccccagctagtgccttcccgccccgccgagctaggccagcaggagcttctgcggaaagcggggaccctccaggatgacgtccgcgatggcgtggccccaaacggctctgcccagcagttgccgcagaccatcatcatcggcgtgcgcaagggcggcacgcgcgcactgctggagatgctcagcctgcaccccgacgtggcggccgcggagaacgaggtccacttcttcgactgggaggagcattacagccacggcttgggctggtacctcagccagatgcccttctcctggccacaccagctcacagtggagaagacccccgcgtatttcacgtcgcccaaagtgcctgagcgagtctacagcatgaacccgtccatccggctgctgctcatcctgcgagacccgtcggagcgcgtgctatctgactacacccaagtgttctacaaccacatgcagaagcacaagccctacccgtccatcgaggagttcctggtgcgcgatggcaggctcaatgtggactacaaggccctcaaccgcagcctctaccacgtgcacatgcagaactggctgcgctttttcccgctgcgccacatccacattgtggacggcgaccgcctcatcagggaccccttccctgagatccaaaaggtcgagaggttcctaaagctgtcgccgcagatcaatgcttcgaacttctactttaacaaaaccaagggcttttactgcctgcgggacagcggccgggaccgctgcttacatgagtccaaaggccgggcgcacccccaagtcgatcccaaactactcaataaactgcacgaatattttcatgagccaaataagaagttcttcgagcttgttggcagaacatttgactggcactgatttgcaataagctaagctcagaaactttcctactgtaagttctggtgtacatctgaggggaaaaagaattttaaaaaagcatttaaggtataatttatttgtaaaatccataaagtacttctgtacagtattagattcacaattgccatatatactagttatatttttctacttgttaaatggagggcattttgtattgtttttcatggttgttaacattgtgtaatatgtctctatatgaaggaactaaactatttcactga

SEQ ID NO: 1045 - protein, 307 aa, Homo sapien
MAALLLGAVLLVAQPQLVPSRPAELGQQELLRKAGTLQDDVRDGVAPNGSAQQLPQTIIIGVRKGGTRALLEMLSLHPDVAAAENEVHFFDWEEHYSHGLGWYLSQMPFSWPHQLTVEKTPAYFTSPKVPERVYSMNPSIRLLLILRDPSERVLSDYTQVFYNHMQKHKPYPSIEEFLVRDGRLNVDYKALNRSLYHVHMQNWLRFFPLRHIHIVDGDRLIRDPFPEIQKVERFLKLSPQINASNFYFNKTKGFYCLRDSGRDRCLHESKGRAHPQVDPKLLNKLHEYFHEPNKKFFELVGRTFDWH

SEQ ID NO: 1046 - DNA, 3320 bp, Homo sapien
ctagatgactgccagaagctcatagaacacggagtcaacactgcagaggacttagtccgagaaggtgaaatcgccatgcttggtggtgtgggagaagagaatgggaaactgtggagctttaccaaaaaggcctcgcacattcagttggacagcttaccagaagtacctttactggttgatgtgccttgtttatctgctcagttggatgactcaattcttaacatagtgaaagaccacatttttaagcatggaacagtagcatctcgcccaccagtacagatagaagaactaatagagaaacctggaggcatcattgtacgatggtgtaaggtggatgatgactttacagcccaagattacaggctccagtttcgtaaatgtacttcaaatcattttgaggatgtatatgtaggttctgaaactgaattcatagtattgcacatagaccccaacgttgattaccagttcagagtctgcgcccgaggagatggagctggagcctgagctgctgttgcaggaggcccgcgagaacgtggaggcagcgcagagctaccggcgggagctgggtcaccggcttgaggggctgcgtgaggcgcggaggcagatcaaagaaagtgcatcacagacaagggatgttctcaaacagcattttaatgatttaaagggaaccgttggaaagctcctggatgagcgattggtgacccttttgcaagaggtggacaccattgaacaggagaccattaaaccactagatgactgccagaagctcatagaacacggagtcaacactgcagaggacttagtccgagaaggtgaaatcgccatgcttggtggtgtgggagaagagaatgagaaactgtggagctttaccaaaaaggcctcgcacattcagttggacagcttaccagaagtacctttactggttgatgtgccttgtttatctgctcagttggatgactcaattcttaacatagtgaaagaccacatttttaagcatggaacagtagcatctcgcccaccagtacagatagaagaactaatagagaaacctggaggcatcattgtacgatggtgtaaggtggatgatgactttacagcccaagattacaggctccagtttcgtaaatgtacttcaaatcattttgaggatgtatatgtaggttctgaaactgaattcatagtattgcacatagaccccaacgttgattaccagttcagagtctgcgcccgaggagatggccgacaggagtggagtccttggagtgtcccccagataggtcattccacattggtgcctcatgagtggacagctggttttgaggggtacagtctgagcagtcgaagaaatatagcacttcggaacgattctgaatcatcgggtgttctctactccagagctccgacttatttctgtgggcagacattaacattcagagttgaaactgtgggacagccagacagaagagatagcataggagtgtgcgcagaaaaacaggatggatatgactctctgcagcgggatcaagctgtgtgcattagtacaaatggtgcagtttttgtcaatggaaaagaaatgacaaatcagttacccgcagttacttctgggtccactgtcacgtttgacattgaagccgtgactctaggaaccaccagtaataatgaaggtggacacttcaagcttcgagtaactataagttcaaataatagagaagtggtttttgactggttacttgatcagtcttgtggttctctttactttggatgctcatttttctatcctggatggaaagtgttagtgttttagatgtttgggtgcttggctttggttttcagggtctaacgtagctgtcctcagcccagcgtagttgtaattgctttaaaaaaaaagttgaattcatctctaacttaggccattggaaagtgtttactggattcattttgtaatattttagcaaaaagagacttcaatgttgtggacaaaatcatacaattcagtcaattttatttttagcatactgttaaatatcacatcacaataaaaatcaaattggcattaaaagtatagaagatataggaagttctatacccttccactgtacttctcaaagttggttattagaccaggaaaacttaatgtaatattatttttaaaatcatcttaaaggatccaagtccatgtaactctttagaacaagaggaataggtcagatagaagaagctgtgtaatgtattaatacatccgttcatgtgctgtccacatgaatgtgttgactgtgctctccatgttcaggtatttgtaagcagtgttgacttttatcccctcttcagtaatctttaagtccccaaaacattataattttttctttttttgttgagacggagtctcactcttgtcactcaggctggagtgcagtggtgtgatctcagttcactgcaacctctgcctcccacgttcaagcgatcctcctgcctcagcctcctgagtagctgggattacaggtgtcggccaccacacctggctaatttttgtatttttagtagagacagggtttcaccatgttggccaggctggtctttaactcctgacctcaggtgttccacccacctcagccttccaaagtgctaggattacaggcgtgagccactgcagtgggccaatttttgtatttttttaaatgcttgaccaagtgtctaaaataggcaagtagtaccttttgttctttcattgcaatttgatacagtataggctacagtatttttacagggtaaaactagttatggcagtagtatgcacagcagtgttagccatttcgtatgtatgtaatatgcacgtgtgtatccaatctgcctgtgacatgcattttactctttgcagagaatgagctgcagtccagtttaatgtcagtttaataagtggtctctttttagcagagcaaaaaaatatagcgtaaatacttattttttttaaaaacttacttaaatttgtgtgtaaaatatttatttgaaggactttaatatgtaaaaataattgtcttctatgccaccctacagattctattttaatgtgaattatttttttcatttttaccagtagtaaaaaagtagaaaagcaagtatgatatttttgtaagataatttatttggggattcatgttcccctgttagacaatcatgaccttttctacttgtctttttatatataagtagtagatttccacttgtttagggattaagaagatgttctagaatgtagataccttgtccagccataggaatcaaaataaaaaactaaaaaaaaaaaaaaaaaaaaaaaaaaaaaa

SEQ ID NO: 1047 - protein, 438 aa, Homo sapien
MELEPELLLQEARENVEAAQSYRRELGHRLEGLREARRQIKESASQTRDVLKQHFNDLKGTVGKLLDERLVTLLQEVDTIEQETIKPLDDCQKLIEHGVNTAEDLVREGEIAMLGGVGEENEKLWSFTKKASHIQLDSLPEVPLLVDVPCLSAQLDDSILNIVKDHIFKHGTVASRPPVQIEELIEKPGGIIVRWCKVDDDFTAQDYRLQFRKCTSNHFEDVYVGSETEFIVLHIDPNVDYQFRVCARGDGRQEWSPWSVPQIGHSTLVPHEWTAGFEGYSLSSRRNIALRNDSESSGVLYSRAPTYFCGQTLTFRVETVGQPDRRDSIGVCAEKQDGYDSLQRDQAVCISTNGAVFVNGKEMTNQLPAVTSGSTVTFDIEAVTLGTTSNNEGGHFKLRVTISSNNREVVFDWLLDQSCGSLYFGCSFFYPGWKVLVF

SEQ ID NO: 1048 - DNA, 2304 bp, Homo sapien
gtccccgcagcgccgtcgcgccctcctgccgcaggccaccgaggccgccgccgtctagcgccccgacctcgccaccatgagagccctgctggcgcgcctgcttctctgcgtcctggtcgtgagcgactccaaaggcagcaatgaacttcatcaagttccatcgaactgtgactgtctaaatggaggaacatgtgtgtccaacaagtacttctccaacattcactggtgcaactgcccaaagaaattcggagggcagcactgtgaaatagataagtcaaaaacctgctatgaggggaatggtcacttttaccgaggaaaggccagcactgacaccatgggccggccctgcctgccctggaactctgccactgtccttcagcaaacgtaccatgcccacagatctgatgctcttcagctgggcctggggaaacataattactgcaggaacccagacaaccggaggcgaccctggtgctatgtgcaggtgggcctaaagccgcttgtccaagagtgcatggtgcatgactgcgcagatggaaaaaagccctcctctcctccagaagaattaaaatttcagtgtggccaaaagactctgaggccccgctttaagattattgggggagaattcaccaccatcgagaaccagccctggtttgcggccatctacaggaggcaccgggggggctctgtcacctacgtgtgtggaggcagcctcatcagcccttgctgggtgatcagcgccacacactgcttcattgattacccaaagaaggaggactacatcgtctacctgggtcgctcaaggcttaactccaacacgcaaggggagatgaagtttgaggtggaaaacctcatcctacacaaggactacagcgctgacacgcttgctcaccacaacgacattgccttgctgaagatccgttccaaggagggcaggtgtgcgcagccatcccggactatacagaccatctgcctgccctcgatgtataacgatccccagtttggcacaagctgtgagatcactggctttggaaaagagaattctaccgactatctctatccggagcagctgaaaatgactgttgtgaagctgatttcccaccgggagtgtcagcagccccactactacggctctgaagtcaccaccaaaatgctatgtgctgctgacccccaatggaaaacagattcctgccagggagactcagggggacccctcgtctgttccctccaaggccgcatgactttgactggaattgtgagctggggccgtggatgtgccctgaaggacaagccaggcgtctacacgagagtctcacacttcttaccctggatccgcagtcacaccaaggaagagaatggcctggccctctgagggtccccagggaggaaacgggcaccacccgctttcttgctggttgtcatttttgcagtagagtcatctccatcagctgtaagaagagactgggaagataggctctgcacagatggatttgcctgtggcaccaccagggtgaacgacaatagctttaccctcacggataggcctgggtgctggctgcccagaccctctggccaggatggaggggtggtcctgactcaacatgttactgaccagcaacttgtctttttctggactgaagcctgcaggagttaaaaagggcagggcatctcctgtgcatgggctcgaagggagagccagctcccccgaccggtgggcatttgtgaggcccatggttgagaaatgaataatttcccaattaggaagtgtaagcagctgaggtctcttgagggagcttagccaatgtgggagcagcggtttggggagcagagacactaacgacttcagggcagggctctgatattccatgaatgtatcaggaaatatatatgtgtgtgtatgtttgcacacttgttgtgtgggctgtgagtgtaagtgtgagtaagagctggtgtctgattgttaagtctaaatatttccttaaactgtgtggactgtgatgccacacagagtggtctttctggagaggttataggtcactcctggggcctcttgggtcccccacgtgacagtgcctgggaatgtacttattctgcagcatgacctgtgaccagcactgtctcagtttcactttcacatagatgtccctttcttggccagttatcccttccttttagcctagttcatccaatcctcactgggtggggtgaggaccactccttacactgaatatttatatttcactatttttatttatatttttgtaattttaaataaaagtgatcaataaaatgtgatttttctga

SEQ ID NO: 1049 - protein, 431 aa, Homo sapien
MRALLARLLLCVLVVSDSKGSNELHQVPSNCDCLNGGTCVSNKYFSNIHWCNCPKKFGGQHCEIDKSKTCYEGNGHFYRGKASTDTMGRPCLPWNSATVLQQTYHAHRSDALQLGLGKHNYCRNPDNRRRPWCYVQVGLKPLVQECMVHDCADGKKPSSPPEELKFQCGQKTLRPRFKIIGGEFTTIENQPWFAAIYRRHRGGSVTYVCGGSLISPCWVISATHCFIDYPKKEDYIVYLGRSRLNSNTQGEMKFEVENLILHKDYSADTLAHHNDIALLKIRSKEGRCAQPSRTIQTICLPSMYNDPQFGTSCEITGFGKENSTDYLYPEQLKMTVVKLISHRECQQPHYYGSEVTTKMLCAADPQWKTDSCQGDSGGPLVCSLQGRMTLTGIVSWGRGCALKDKPGVYTRVSHFLPWIRSHTKEENGLAL

SEQ ID NO: 1050 - DNA, 634 bp, Homo sapien
cggctgagaggcagcgaactcatctttgccagtacaggagcttgtgccgtggcccacagcccacagcccacagccatgggctgggacctgacggtgaagatgctggcgggcaacgaattccaggtgtccctgagcagctccatgtcggtgtcagagctgaaggcgcagatcacccagaagattggcgtgcacgccttccagcagcgtctggctgtccacccgagcggtgtggcgctgcaggacagggtcccccttgccagccagggcctgggccctggcagcacggtcctgctggtggtggacaaatgcgacgaacctctgagcatcctggtgaggaataacaagggccgcagcagcacctacgaggtccggctgacgcagaccgtggcccacctgaagcagcaagtgagcgggctggagggtgtgcaggacgacctgttctggctgaccttcgaggggaagcccctggaggaccagctcccgctgggggagtacggcctcaagcccctgagcaccgtgttcatgaatctgcgcctgcggggaggcggcacagagcctggcgggcggagctaagggcctccaccagcatccgagcaggatcaagggccggaaataaaggctgttgtaagagaat

SEQ ID NO: 1051 - protein, 165 aa, Homo sapien
MGWDLTVKMLAGNEFQVSLSSSMSVSELKAQITQKIGVHAFQQRLAVHPSGVALQDRVPLASQGLGPGSTVLLVVDKCDEPLSILVRNNKGRSSTYEVRLTQTVAHLKQQVSGLEGVQDDLFWLTFEGKPLEDQLPLGEYGLKPLSTVFMNLRLRGGGTEPGGRS

SEQ ID NO: 1052 - DNA, 1461 bp, Homo sapien
tttaaggcgccgggtttccggggctcctggccccgcttattccgcgggggtcggcggggtcggcctgggcgcccgcgccgccgctgcgctttgtccgctgggcacactgcttctgggaggggcgggcagacatggtggcggccgccgccccctcctcggccctagcatgccgcggccgcctcgcggctacccggcttgccggtcccgagcggcagccccggggtggcgatggggtcgcgccgaggcagcggaggttctgcgggcgactggaggttggcagtgggcgggagaaagaggaaggcaggcgcggctgggcctcggcctctggcgccgcggtaccctttgtctcggcagcctgacggccccgccgggctctccggagaggggaacgggcggcgagggtggcgggtcctgggcgccctgtgctgcggggccgagaggcgctcgggtcgcggcgggaccggccggaccagacagggttaatggaagagcctggccagtcccgcgcggggcccccgcagcgacagccttggccgcggggactggagtcctgagggggagaagcctgccgttctgaaggctcgggacttctgccccaaagacttcgccgccgagaactgcgggtgcactgcctcagggaagaagttgagaattttgccaggtcatctctgccagggcacagttcatcactgtgtgtttagtgtgtttcggtgaagctctccaagtgtgttgaatcagcgtgcctagcctcaagggtgcatcgtgaaaactgaaaccaaaggaatgatacaggcctgctttgtgtgtgtcttcccactttaagcttgttttcagtacaaatactcttgctttaaacctgattggactgtggcgagcggacatctgttcaaaggaggggccgagaccacagtacttctgaagggggcttgataatgtggaaacattttaagttttctctccggactgttttgctctctcaattcaggcaagttactgaagtacgttttttatctagaaaaaggtttgatgtagtctgtaaatggtccttgtaaagtacattgccatctcagaattaaaagatccactctcatttattatgcagaagttagtggtcattctttcctgtagatagtttatctcatgtaaagacccacccagcttggtttaaatttttttctcactgacgtataaccatcagctttgatacttccattttcaggctcagactttgaatttaaggaaactaaagatgactttattttcttttctcttggtttttttttccaaaaacaaaaaataaatccattacatgttaacatagatgataagagtgacatcttgcatttttgcaaatctttttaatgcctggtttaatagaagattctcagatctacgtcagactgttgtggttagcacaccatgtaacctctggaacactccactgtacactcatactttttt

SEQ ID NO: 1053 - protein, 136 aa, Homo sapien
MPRPPRGYPACRSRAAAPGWRWGRAEAAEVLRATGGWQWAGERGRQARLGLGLWRRGTLCLGSLTAPPGSPERGTGGEGGGSWAPCAAGPRGARVAAGPAGPDRVNGRAWPVPRGAPAATALAAGTGVLRGRSLPF

SEQ ID NO: 1054 - DNA, 1511 bp, Homo sapien
cgacgcgggagccgcacgcgccggacgaggctcgctgcgctccctgttgcccagcgcgggcccgttgaggcggagccctcagttcccggccaggacacggtctgggccgccgaatctccggccgaagagcggcggcggcagcggcgggaaaaaaatgaagaatgaaattgctgccgttgtcttctttttcacaaggctagttcgaaaacatgataagttgaaaaaagaggcagttgagaggtttgctgagaaattgaccctaatacttcaagaaaaatataaaaatcactggtatccagaaaaaccatcgaaaggacaggcctacagatgtattcgtgtcaataaatttcagagagttgatcctgatgtcctgaaagcctgtgaaaacagctgcatcttgtatagtgacctgggcttgccaaaggagctcactctctgggtggacccatgtgaggtgtgctgtcgtagagatggggtttcaccatgttggccagactgctctcaaactcctgacctcgtgatccgcccgccttggcctcccaaagcgctggattacaggcgtgagccactgcgcccggcctcctcctttttgattatgtatggagagaaaaacaatgcattcattgttgccagctttgaaaataaagatgagaacaaggatgagatctccaggaaagttaccagggcccttgataaggttacctctgattatcattcaggatcctcttcttcagatgaagaaacaagtaaggaaatggaagtgaaacccagttcggtgactgcagccgcaagtcctgtgtaccagatttcagaacttatatttccacctcttccaatgtggcaccctttgcccagaaaaaagccaggaatgtatcgagggaatggccatcagaatcactatcctcctcctgttccatttggttatccaaatcagggaagaaaaaataaaccatatcgcccaattccagtgacatgggtacctcctcctggaatgcattgtgaccggaatcactggattaatcctcacatgttagcacctcactaacttcgtttttgattgtgttggtgtcatgttgagaaaaaggtagaataaaccttactacacattaaaagttaaaagttcttactaatagtagtgaagttagatgggccaaaccatcaaacttatttttatagaagttattgagaataatctttcttaaaaaatatatgcactttagatattgatatagtttgagaaattttattaaagttagtcaagtgcctaagtttttaatattggacttgagtatttatatattgtgcatcaactctgttggatacgagaaccctgtagaagtggacgatttgttttagcccctttgagaatttactttatggagcgtatgtaagttatttatatacaaggaaatctattttatgtcgttgtttaagagaattgtgtgaaatcatgtagttgcaaataaaaaatagtttgaggcaaaaaaaaaaaaaaaaaaaaaaaaaaaaaa

SEQ ID NO: 1055 - protein, 296 aa, Homo sapien
MKNEIAAVVFFFTRLVRKHDKLKKEAVERFAEKLTLILQEKYKNHWYPEKPSKGQAYRCIRVNKFQRVDPDVLKACENSCILYSDLGLPKELTLWVDPCEVCCRRDGVSPCWPDCSQTPDLVIRPPWPPKALDYRREPLRPASSFLIMYGEKNNAFIVASFENKDENKDEISRKVTRALDKVTSDYHSGSSSSDEETSKEMEVKPSSVTAAASPVYQISELIFPPLPMWHPLPRKKPGMYRGNGHQNHYPPPVPFGYPNQGRKNKPYRPIPVTWVPPPGMHCDRNHWINPHMLAPH

SEQ ID NO: 1056 - DNA, 2948 bp, Homo sapien
aggtaatgattaatctgtcaggcacaaaagggattgttttggggatttcgggttctaagtcgcagattcaaacaaatagcagcgaacagggaatgacagttccaccagaagacgattaagccacagcctctaattggaacggcatttgtacagtcagagactcttaccagacatctccaggaatctgtgagccattgtcaaaacgtccattttcatctggctgtgaaagtgaggaccacaacaggtaggtattggtagaaacaggagtcctcagagaagccccaagatgcagcctgagggagcagaaaagggaaaaagcttcaagcagagactggtcttgaagagcagcttagcgaaagaaaccctctctgagttcttgggcacgttcatcttgattgtccttggatgtggctgtgttgcccaagctattctcagtcgaggacgttttggaggggtcatcactatcaatgttggattttcaatggcagttgcaatggccatttatgtggctggcggtgtctctggtggtcacatcaacccagctgtgtctttagcaatgtgtctctttggacggatgaaatggttcaaattgccattttatgtgggagcccagttcttgggagcctttgtgggggctgcaaccgtctttggcatttactatgatggacttatgtcctttgctggtggaaaactgctgatcgtgggagaaaatgcaacagcacacatttttgcaacatacccagctccgtatctatctctggcgaacgcatttgcagatcaagtggtggccaccatgatactcctcataatcgtctttgccatttttgactccagaaacttgggagcccccagaggcctagagcccattgccatcggcctcctgattattgtcattgcttcctccctgggactgaacagtggctgtgccatgaacccagctcgagacctgagtcccagacttttcactgccttggcaggctgggggtttgaagtcttcagagctggaaacaacttctggtggattcctgtagtgggccctttggttggtgctgtcattggaggcctcatctatgttcttgtcattgaaatccaccatccagagcctgactcagtctttaaggcagaacaatctgaggacaaaccagagaaatatgaactcagtgtcatcatgtagtggcatgctcagctctggatttgcagtcagtttgggattctcttcagaaagatggcatctaagtgtctgtgttcttgtaagcctgaggtggaatccacccagttttgtctgctagccatatgggacatctaattggaaaagcatctgcataaaagtttggaaacaatgaccacttctctaccattgtcccccaccccaccccccagaataacgctgactgtcccctgaaacagccttctctcctgccctgtttatttcatcctcgatgggaattcttgctaggtaagcactaataactcggcatcttgacgatagtcccatttgggtggtttcagctgcactatctgtatgaaatggtgtcaccaaaacccttttcttcagtatcgacaaagattacattctgagtaccaaccaaaccctaaattgaaagacaaaactatggtttcagtcaacatattcatgaattagggagctaatgggttaagcttccagttcccgctatgctactggatttgtataaatactgatattctccaaacctagtggtgtagggagcaagagaatgcagctggaaggcacaaggggaggacattgtggcattcagaaactgcaggagacaagatgaatttgagaagccaaatggaatttttaatggaaaccatttatcagattaatctcttgctctcctgcattttagaggacaccaattaatttcctggtctttagtatataataacctaaaataccattgtaacctcagtcatgaaaaatacatcactctgtctttttagctcaaatgtattttcctaattgcccacttgagaacagacatttgacaagttatatcaacgactgtgcttgtccattattttacacatgccctagaagccaaaactgaaagccactggatcctggtctagctgaatcttcagagtgggaggtctccaaaaagatattaccttattgggcttaacaattcacaaggcactttcacacccattatctaatttaatcctcataatgactatgtgaggcaaatgccacattgcccatttttcagataaagaaacaaaatcttagggaagataagttgagttgtccaagagcacactgaaagttgaatgttatctaatgcattcctctacctttcagaagatcagtagctggctgagaatctttgccaaatcttccttgctagccagaagtggaattggcagcttctagaatatgtacacctctggacaaaatgttcctcaatcttaagatacaaagaccctcattgtctgggtctattcccacacttactgagtacagatgaaggaaagtggtagcaatttaatcataactttcatttgctgaaaaacattatgagaaggcctcccttcctaagccacctctggtcttgctaagtcttgatcttgcttcctgccagcaccaaacattacattcaggggatttcctctggctcagtcttttccccttgaagttctctaatagatgttacttttgacaaaagatcgcctatgagttacaagcaccaggggatgctctacatcaagggatgcaccttcagtcaaactgtcaaaaagcccagaattcccaaaggcattaggtttcccaactgctttgtgctgatatcagaacagcagaaattaaatgtgaaatgtttctgatgacttatgttctacaatctatggacatacgggatttttttttcttgctttgaagctacctggatatttcctatttgaaataaaattgttcggtcattgtt

SEQ ID NO: 1057 - protein, 295 aa, Homo sapien
MQPEGAEKGKSFKQRLVLKSSLAKETLSEFLGTFILIVLGCGCVAQAILSRGRFGGVITINVGFSMAVAMAIYVAGGVSGGHINPAVSLAMCLFGRMKWFKLPFYVGAQFLGAFVGAATVFGIYYDGLMSFAGGKLLIVGENATAHIFATYPAPYLSLANAFADQVVATMILLIIVFAIFDSRNLGAPRGLEPIAIGLLIIVIASSLGLNSGCAMNPARDLSPRLFTALAGWGFEVFRAGNNFWWIPVVGPLVGAVIGGLIYVLVIEIHHPEPDSVFKAEQSEDKPEKYELSVIM

SEQ ID NO: 1058 - DNA, 5428 bp, Homo sapien
gcggggagccggcggttatctgggcggcggagcgctcacaatgtggcaggagacagaaaagataagatgctcccaagtcccttgcagctctcttcagaagaaaaatcactagtgctctgctcttgccataataccaaacctttttgactcatgctttggtgctgcaacactggaagaattgcacacagtttccaggaatatctttttttcatttgagtgattctttgtggatgagaaaagatttgagtcttaataattaccttgttttaaagctatttctttatagtctgaactgtttaataaattgggccacttaccaatgagccacacagccagttcttgtcaggagctggttgaaaactgtgctgtgcatgtagcaggaatggcacaagaagatagccgtcgtggtcaagtgccatcttccttttatcatggtgccaaccaagaacttgacctgtccaccaaagtgtacaaaagggaatcaggaagtccttattctgtgttagtggacaccaagatgagcaaaccgcatctccatgaaacagaagaacagccatatttcagggagacaagagcagtgtctgacgtgcatgctgttaaggaagaccgggagaattctgatgacacagaggaggaagaggaagaagtctcttacaaaagggagcagatcatagtggaggtaaaccttaataatcaaacattaaatgtatctaaaggggaaaagggtgtctcttctcagtccaaagagactcctgttcttaagacaagcagtgaggaggaagaggaagagagtgaggaagaggccacagatgacagcaatgactatggagagaatgaaaagcagaagaaaaaggagaagatagtagagaaagtcagcgttacacaaaggagaaccaggagagctgcctctgttgccgcagctaccacttcccctactcccagaactacaagaggtcgtaggaagagtgtagagccacctaagcgtaagaagcgggccacaaaggagcccaaagcaccagtccagaaagctaagtgtgaagagaaagagactctgacctgtgagaagtgccccagggtatttaacactcgctggtacctggagaagcacatgaacgttactcataggcgcatgcagatttgtgataaatgtggcaagaagtttgtcctggaaagtgagctgtcccttcaccagcaaacagactgtgaaaaaaacattcagtgtgtttcctgtaacaaatcgttcaagaaactctggtcccttcatgaacatatcaagatcgtccatggatatgcagaaaagaaattttcctgtgaaatttgtgagaagaaattctataccatggctcatgtgcggaaacacatggttgcacacacaaaagacatgccatttacatgcgaaacctgtggaaaatcattcaaacgcagtatgtcactcaaggtgcactccttgcagcattctggagagaagccctttagatgcgagaactgtgacgaaaggtttcagtacaagtaccagctacgctcccacatgagcattcatattgggcacaaacagttcatgtgccagtggtgtggcaaggatttcaacatgaagcagtacttcgacgaacacatgaaaacacacactggagagaaaccctttatctgtgaaatctgtggcaaaagcttcaccagccgccccaacatgaagagacaccgcagaactcacacaggcgagaagccctatccatgtgatgtgtgtggccagcggttccgcttctcgaacatgcttaaggcccacaaggagaagtgctttcgggtgaccagccccgtgaatgtgccacctgctgtccagatcccacttacaacttccccagccaccccagttccttctgtggtgaacacagccacaaccccaacccctccaatcaatatgaatcctgtaagcactcttccccctcggcccatcccccaccccttctcacacctgcacatccacccacaccctcaccacccacaccaccttcccatccctccagtccctcacctcccgccacctccagctctctttaagagtgagcctttaaatcatagaggccagagtgaggacaactttctgcggcacctggcagagaagaacagttcagcacagcatcattaacatccgtctccttagtgtgttctccaggagacacgtccccatgtgtgagcgtgcacagagggagtcggtgagcatttccttagttctcagactctcctccgcctctaccaagagcttcgccagtgtcactgaatcaacagatccaagggaatgaacaagaagactaccttgagctcacagagggactgtcatctaaaccaggggaaccactgaactaaagcccaatttgcttgcattttctgatgacttttataagtttcaaatactcagacttgtggaattttataatttcatatcagctgatgaggtatgcttgcttttatatcccagacttctcctcaaagaggggataggcctggtttcctttgtactaatcgggaaggctgtgagattaatccagagcattaattgtatcactgtgtatggtaaggaattcttttcagcttttggtgccagctacagagttgagctggccatgtttcacagtatatcaagcattatagagaaagacagaaattttcttctttgtgtagctctcctaacgcactctttattttactacagaaattattttagagtttttgtatagacttctttggtagtctgtttctaaaatgaaatgtatttcaataagcagtgtaattttttcagtgtagctgaacctatgttgtaaaatagaaaaaaatttttataatcatcaaaatgtgattcttaaagatgcatataacttctataattcaaagctattcttacatccgtacaactcaaaaggtgcttcagagactagatgtatctgagagggtctccagaccaggttactgcaaaaatgaggttttgctttcaggatttggcgtaaatacttggtagttttgacatctctgcttaacactcaagagaggctccctaatgtgctcctgtcctccatgttctgcttggcttcgttagtgcattacatgaaatgatttgcaggggatggggccttttccagggaagtcacctaaagcttgcatgttttgaaaatttgaataaggctgtttgctgacaggaggaggaagtagtggagatcatttcatctcagtcacgtctgtttctcacttcccttaggaattgtgttgatgtttaacttttatgggatgacaaattgaaatcgctcattttgaggttgctttatttttctagaattgttataagaagctaaaatagtaaacttaaaatcacaaacatgacattgctgatagtggctgagaaattcagatgagaagacaaattggttatgaattttgaaatatctattatatgtaaaatgtggatatgttcacaaccttgagctattttaacacagtttaaatatagtgagggaaaactcctaagttttactgccctgtcctctgcaaattatgtaataccagcattcttaggcgataaagagagcagcacctctagtacctttaggcagattactttttcaagtttggggaacttcaaaagaccataatcaaccaggagcttattataggaaaggctgaacagaagggctagtgtattgattacacttaacagatcatatttatccagactcagtatagcttaaaattttgtatttctttatctgagagaactgagttcccaggctaaatcacttacctcccaccccctctccaattttttttttaagagacaaggtcttgctatgttgcccaggctagagtgcagtggctattcacaggtgcagttatagcacactacagcctccaactcttgggttcaagcaaccctgcctcagctaaccaagtagctgggactacaggtgcatgctaccatgcccagtccattttttaatcttgaaatttcttcatttttctttcttcggtttcttaaaatctttgcctgaatcagaacgctggcttttatttatttttttatttttaatattaaatgtgcagatatgcttcgagcacttttctaactaatgagctctgtggtaagaaaaaatgaactctttcaattgagattaagtccatatttttcaaacatcacgttctctattggctttttggtttagtgtttctaaattttctccttctgattttgcctgtcttatataatgagcataggaaaattttggaatgaggcagaaaagtatatcaagacatacttcctggttttggatgtaagttttaaagaatggtatttttaatatttgtacacattctttgagcacccaggtacccaagccaataaggaaagttaattccttgcatatgactgttatatctttagtggttgtctccctctccctccacagtctccttggcattccatgacaagtttgtcaacctacacttttatatagacatgtcattatttcatggtcaagcctgtagtattaaaatgatttttttaaaagatgtaaactgtgcttagttaattggttatattttgttctgtttttttttttttttttttttttttttgaggcagagtcttgttctgttgcctgggctggagtgcagtggcgtgatcttggctcactgcaacccccgccccccgggttcaagtgattctcctgcctcagcctcccgagtagctggaattacaggcatgcgccagcacgcccggctaagttttgtatttttggcagagatggggtttcaccatattggccaggctggtctcaaactcctgaccttgtgatccgcccacctcagcctccgaaagtgctgggattacaggcgtgagccaccacgtccaactgccttattttgttctgaataaatttacagtattgggcagcaattctggattctagacttgagaccacagaatcaaccatttcatgaggttgtactgtaattatacactggaatattcaggtagtcatctttgatttttcattcaagtaaatatagccataagaaaatatctgctatacaggaaaaccagtattaagcaaataccaccatccttaacagaaacaaaaatatatatatatattatttttaaaaattagcattgtcatacagtacaattcttagtgaagtgtattgtggaacaatttagaaacttcctttttttcccctagattaaggatactttccttgacttgagacttgtggtcttcaggaaaactactcagaatataatgactcctcatcagtatcatattgtatataaataatgaaatgcattaagaatattcacaacattgaacccaggaggcggagcttgcagtgagccgagattgcgccactgcgctccagcctgggcaacagagcgagactccatctc

SEQ ID NO: 1059 - protein, 606 aa, Homo sapien
MSHTASSCQELVENCAVHVAGMAQEDSRRGQVPSSFYHGANQELDLSTKVYKRESGSPYSVLVDTKMSKPHLHETEEQPYFRETRAVSDVHAVKEDRENSDDTEEEEEEVSYKREQIIVEVNLNNQTLNVSKGEKGVSSQSKETPVLKTSSEEEEEESEEEATDDSNDYGENEKQKKKEKIVEKVSVTQRRTRRAASVAAATTSPTPRTTRGRRKSVEPPKRKKRATKEPKAPVQKAKCEEKETLTCEKCPRVFNTRWYLEKHMNVTHRRMQICDKCGKKFVLESELSLHQQTDCEKNIQCVSCNKSFKKLWSLHEHIKIVHGYAEKKFSCEICEKKFYTMAHVRKHMVAHTKDMPFTCETCGKSFKRSMSLKVHSLQHSGEKPFRCENCDERFQYKYQLRSHMSIHIGHKQFMCQWCGKDFNMKQYFDEHMKTHTGEKPFICEICGKSFTSRPNMKRHRRTHTGEKPYPCDVCGQRFRFSNMLKAHKEKCFRVTSPVNVPPAVQIPLTTSPATPVPSVVNTATTPTPPINMNPVSTLPPRPIPHPFSHLHIHPHPHHPHHLPIPPVPHLPPPPALFKSEPLNHRGQSEDNFLRHLAEKNSSAQHH

SEQ ID NO: 1060 - DNA, 9344 bp, Homo sapien
gcggggcactttgaagaatcacgtgtgttgaggccctcttaaagagataggcacctacttttccctccaccctaaacaccgccctgagggcggcggcgaccgtggtaattgcaactgctcaggggcagggcttgccccagcgccgagtagtggcaacggcgtggttgcgtcgggggtgcctgggagcctggagtcccgggggcctgaaatcggcagcttcccgggcagacactctctccctcaggaagaggtgccgccgagtcagcgcggggcagtgtgagcgccccgaggtgctttctcagttgaggagaggtggggttacagggcacaggtgacagggccggagaaagatggagcagcccggggcggcggcgtcgggagcgggaggcggcagcgaggaacccggtgggggccggagcaacaagcggagcgcggggaaccgggccgccaatgaagaggaaacgaaaaacaaacccaaattgaacattcaaataaaaactttggcagatgatgtgcgtgaccgaattacaagttttagaaaatctactgtcaaaaaagaaaaacctcttattcaacatcctattgattctcaagtcgcgatgagtgagtttcctgcagctcagccattatatgatgaacgatctttgaatttgtcagaaaaggaagtattggatctctttgaaaaaatgatggaggacatgaaccttaacgaagagaaaaaagctcctttacgaaacaaagactttaccaccaaacgtgagatggttgtccagtatatttctgccactgccaaatctggtgggctgaaaaacagcaaacatgaatgcaccctgtcttcacaagaatatgttcatgaattacgatcgggtatatcagatgagaaacttcttaattgcctagaatccctcagggtttctttaaccagcaatccggtcagctgggttaacaactttggccatgaaggtcttggactcttattggatgagctggaaaagcttctggacaaaaaacagcaagaaaatattgacaagaagaatcagtataaacttattcaatgcctcaaagcatttatgaataataagtttggattacaaaggattctaggagatgaaagaagtcttttactattggcaagagcaattgaccccaaacaacccaacatgatgactgaaatagtaaaaatactttctgctatttgcattgttggagaagagaacattctagataaacttttaggggctataacaacagcagcagaaagaaataacagggaacgattttcaccaattgtggaaggtttagaaaatcaggaagccttgcaattacaggtggcctgcatgcagtttataaatgcccttgtcacttctccttatgagcttgattttcgaatacatttaaggaatgaattcctccgttcaggactaaaaacaatgttaccagatctaaaagaaaaagagaatgatgagcttgatattcagttgaaagtatttgatgaaaacaaagaagatgacctaactgaattatcacaccgtctcaatgacattcgagcagaaatggatgatatgaatgaagtctaccatcttctatataatatgctgaaggacactgctgctgaaaattacttcttatctattctacaacattttttgcttatcagaaatgattattatatcaggccacaatattataaaataattgaggaatgtgtttcacagatagtgctacactgcagtggtatggatccagacttcaaatacaggcaaagattagacatcgatttaactcatctgatagattcttgtgtgaacaaggcgaaagttgaagaaagtgaacaaaaagctgcagagttttcaaagaagttcgatgaagaattcacagctcgacaggaagctcaagcagagcttcaaaaaagagatgagaaaatcaaagaacttgaagcagaaatccagcaacttcgaacccaggcacaagtactctcaagttcatcaggaattccaggtcctcctgcagcacctccattgccaggtgtagggccgcctccaccaccacccgcgccacctctacccggaggagctcctcttcctcctccaccacctcctttacctggaatgatggggataccaccaccacccccaccaccacttttatttgggggacctcctccaccaccaccccttggaggagttcctcctcccccaggaatatcacttaatctaccttatggaatgaagcagaaaaaaatgtataaacctgaagtgtccatgaagagaatcaattggtcaaagattgaacccacagaattatctgagaactgtttctggttaagagtcaaagaagacaagtttgagaatccagatctctttgccaaattggcattgaattttgctactcagataaaagttcaaaagaacgcagaagcattagaagaaaagaagactgggcctacaaagaagaaagtgaaagaactgagaattttggatcccaaaacagctcagaatctgtccatctttctgggatcatatcgcatgccatatgaagacataagaaacgttattctggaggttaatgaagacatgctgagtgaggctttaattcagaaccttgtgaaacatcttcctgagcagaagatactcaacgaattagcagagcttaagaatgaatatgatgacctctgtgagcctgaacaatttggagttgtgatgagctctgtgaaaatgttacagcctcgtctcagtagtatcctgttcaagctcacatttgaagaacacataaacaacatcaaaccaagcatcatagcagtaactcttgcctgtgaagaactgaagaaaagtgaaagctttaacagacttttagagttagttcttcttgttggaaactacatgaactcaggctcaagaaatgcccagtctttgggatttaagatcaacttcctttgtaagatcagagatactaaatcagcggatcaaaaaacaacccttttgcattttattgccgacatttgtgaggaaaaatatcgagatatcctaaaatttcctgaagaactggaacacgtagaaagtgcaagcaaagtttcagctcaaattctcaagagcaaccttgcatcaatggaacaacaaattgttcatctggaacgtgacatcaagaaattcccccaagcagaaaatcaacacgataagtttgtggaaaagatgaccagctttacaaagactgcccgagaacagtatgaaaaactctccaccatgcacaacaacatgatgaagctctatgagaatcttggagaatacttcatttttgactcaaagacagtgagcatagaagagttctttggtgatctcaacaacttccgaactttgtttttggaagcagtgagagaaaacaataagagaagagaaatggaagagaagaccaggagggcaaaacttgcaaaagagaaagctgaacaagaaaagttagaacgccagaagaaaaagaaacaactcattgatataaacaaagagggtgatgagactggtgtgatggataatcttctagaagccctacaatcaggtgcagcattcagagaccgtcgaaagcggattccaaggaatccagataacagacgagtacctttggaaaggtcacgctctcgccacaatggagctatctcatctaagtgattcctgatgccaaagaatatgaaaatatttaagtaaaaacaaaatgatgcattttgagaagaacaaagtgtgcactcagcggctggaaaggaaataagtgcatttctgcaaagatcaagataagctggatgaagtagtgtgcatttgtaatactattgcaagactcctcccacaattattctaatctgaacacagttatcaggattacaaaatgtgttccattttagtgtaaagatgtgtatcatttgtaattgtgtgtgacctgactgtgatgatggaagtgtaagaaattgaagagttctaaggctttcaaaaacactcagtcaaaaatttaaaatcttaaatgtgtaagtcacccccaccaaaaacaaaagagaagaaaaagaatagaaagaattatccagtgtcagcttccaatccctagtacatatataatagaaaagggccaagaaaaatatgcatcttgatttggagagaggctaatattatgcacactgtaagagaagccattttggaaattcacgaaagtactgctccaccccagttgagttatttagaattttatctcaagtgaaagctgatggattcatctgctttggctgaaattaaacttatcattagtctagctagcatttcagcatgatattgcaagcacttctcattgctaaaaataaataaaccaaagtttaaccgaatcagttagggaaagtgatttaaactttatttaaagaggtattttctaattatgcacagatatctactttatacaaatactttatatggctatttttgagaaaaccctcacattttaatgtttatgctagggatgaacctggaaaattctattacgtttatttagatttcaaaggcaaatattgattcctatgctctgtggtttatttcttttttctattgcttctttctcccttgagtcccttgaaggcagggaaatagacttctagaaaacctgagaggaaaaagaattctttttacaggaggcagcagaaaactgtctgaaaggtcaattgttttatctccctttccactctctttccaatttcactttggtggtctgaagaagaaaaagaaattttatgtatgtatgtgtaaatatgtgtatatatttctatctcttgctacaataattccaactaagtgaacttcttctcaattatcatcatacttacttaccttatattaacaaattaagatgatgctgccaaaacaagtctagcagggaaaacaggttctacatttttcttaaataaattagggagtaaaagttatacttaacttgtctgtctattattttaaaatatgcattgaaataatgtggtataacttctctggagtgcaattttaagtctaattcatgcagatgattgattgtgattattgtaagaaatttcttacatgtatatttcttatgttagaaaatactgtttctactcattcaaagcacattgtagatattcagagagaagaacaaatggctggcttggcaaatccccatctgagataaagtaaacaagtgaccagcagcccacagataattcctttatatagatgtataatgattcaaactgctgcctttgcctccagtgcatccttacttaggtattatacttctttaaaaagctctgaagctgctacaatagaaaaatcaaaaagggtaacagtatctgaaatttcacagtcctatccgatctgaaaacacacatacacaaatgcacacacatgcacacacacatttcagggacatagcagtaacactgttttttaacaacaacaaaagtttaggttctaatttatgtaaatacctagtatgtgtatttttgactttacaaagtctttcttttctgaaatcttcgtggtatggcttttttaattcttttgacagcttatcagtctgtaggagaatgatcttgaaatgttaaccctgactaaaatttgggagcatatgccttgctatattatcaagctggtcaaggtagaaatactgatatgtatcatcaccttttccagatacaaacttgccttattttctagtttgtgaacaagaacgaatgaagtactattattgataacttacttatatatttttatttagagcaatcccacatgcttttcacaaacattaaaaaaaaaaacctttcagggtctttcatgaagttccaatagttgagtgagttaaaaggtttgtttcccagatttgtaatggtcctgctctagccatttgcagttttgttttagatgattggaaagtatatcaccaaaaaaagtatatagtgacatttttagtatgaaaccaaattacactaaggtcttttgttggccatattactgccacacatgagaagcaccatttatgcagattttcttcagaatatttttaaaaggtacagaatccttaaaatattaacaactaattgcatccattatctcctttggctgctgtaacaaattaccaccaataatatgatggcttaacacaacagaaacttatttgcttacatttttgaagggcagcaaagccatggctccctccagaggctctagaggagaatctttccttgccacgtccaccttttggtggctattggcattttttggcttatggccacatttctctttctgctgtgtcttcacatcaccctcctctgtatacctaatctgcctctgcctctgtttaataaggatccttatgatgacttttagggactacccagattactccaggataatctcctcacctcatgagtcttaacttaattacatctgcaaggcccccttctccaaataagataaattcatggttttggggattaggatgtggctatgtcttttaggaagccactcttagcccaccagagtctgccctttggcccaaaatttatgtctgtctcatgtgtaaaagacattcatcccatcctaacattaccaaaagtctcaacccattatatcaatcctaagtccaaaatttcattcaaatatcatcggttcaaaagttccaaagcttatcatttagatcatctaaatcaggtatgagtgaaactctgggtatggtctttcctgaggccaaatcctcttcctctgagaaccagtgaaacagaaaagttaatctgctttcaaattacaatggtgggaacaggcataggataacagttacagacatttctgtctcaaaaaggagagaatggaaattggaatggagtctcctgtcccaatcattttcaaaatctagccaggcaaatttctgttctatttcaaggcctggcagtaatcctctttctcagggctccaccctttgggcctgtagctcttctttcttggactatggattgggcctctgcctctgtgcctatgggttgcacttcttcctctgttcccacacttgggcctctgcctctgtacctgcagctctgctctcgggatggtgcttcctttatcttgaagggtggcacatgtttgcagctgagaagttttatcaacgggtttcctacctgtagaattctggcagtctcacaatcttctttcatttttttctgtctctgtcccttttaggcccagttggaagtgtttctgatggtagaacattctcaaaaatcttgtgggtcttctacgtatgtcacattgattcacacattcagaaaagagggtcctcacagatttttcctgaacaaccccatctctattcttggcttctgttgaaacagtcaaataaatccacaagttaatgcctaacctcttcagcactagccaaaggttgtcaagacacacccttgggcttatctacagagcacacttttctaacagtgaatctcctaattttagcatctttttttttttttttacaatcattccagattgtgaattcaggctcagaattacccagtcatcagatactgattccttttgtccacttatatagttattttctctttaaaaaaaaattttttttaatgtattagagatgaggtctcactctgtcacccaggctgcagtgtagtggtgcaaacatagctccctgtaacctcaaactcccaggctcaagggatcctcctgcatcagccttccaagtagctgggtctacaggtgcataccaccatgcctggctaattttttgcatttttttgtagagacttgatcttgctatgttgtccaggctgctctcgaactcctagcctcaagcaatccacccatcttggcctcctaaagtgccggattacaggtgtaagccaccatgcccagcctgttttgtcaatgtatctgttttctgtcttattttactataagcactaagaagaaactaagctatatctctaacactagacttgaaaatttcctcagctaaacatccaagttcatcatttattcaacttttcacactactgtagtagacaatttagatagataaactttttgccactatatgacaaggattccctttcttccattttccaataaaatcttcatttccttctaaaccatcactagaaatgcctttaacattcatactactaccatctggtaaaggcaatctagttttttctatcacatccaccaaaattcttctagtctctacccattatccaattccaaagcctttttcacattttaagacatttgttacagaagtacccaatccgtcccagttccacaatctgcattagattcccatggctgctgtaacaaattaccctctagcccagtggcttaaaacaatagaaatttattatcttgttgttttggaggccaaaagtccaaaattgaggggttggcagggctgaacgtcttctggagactctaagggaaacactcttcccgtgtcttccagtttcttgtggctgccatcattccttggtttgtgactgcatctccctctcctctgtcttcacatcacttcccctctgtatatataatctacctctgcctctctcttataaggacacttgtgacgggacttagggcccatccagattacccatgataattcccttattccaagattcttaattatatctgaaaggaccttttttccaaataaggtactatcacaggttccagggagtaggatattgaatatcttttttggggagggggcaccatgcagctcactacactattcattgcacacaaatgaatttttcactttttaagatgcattcttggtgctcaaaccagatcgaagtttgtctctaaaagctattgtctgcacaggctgctgcatgctctgttgttaaatggatggacaggctattctaaattttggttgatacttttgctactatgggcaattaacttgaaaaaaataatcgatcccaactctgtgctctgatgtacctcttctgccccttttatgacacctttgaccaaatgccttctatggttcacagtgcaggcacaaaactacctctgatacagaagggttctttacaagcttattttacataccgtgaatccctcacctaaagggagaggtgaaagcaaagactgctttgaatgggtattgagggagattgtgtccataccaagccaccctgaagaagtatttcacttgcagtagaactgtggatttgtgctgtcatttcaccttggaataaacacctatctctaagcaggaccaagaatgacttgcaatctatatgtaatggctacttacttattcaataaagttaagatatacgt

SEQ ID NO: 1061 - protein, 1101 aa, Homo sapien
MEQPGAAASGAGGGSEEPGGGRSNKRSAGNRAANEEETKNKPKLNIQIKTLADDVRDRITSFRKSTVKKEKPLIQHPIDSQVAMSEFPAAQPLYDERSLNLSEKEVLDLFEKMMEDMNLNEEKKAPLRNKDFTTKREMVVQYISATAKSGGLKNSKHECTLSSQEYVHELRSGISDEKLLNCLESLRVSLTSNPVSWVNNFGHEGLGLLLDELEKLLDKKQQENIDKKNQYKLIQCLKAFMNNKFGLQRILGDERSLLLLARAIDPKQPNMMTEIVKILSAICIVGEENILDKLLGAITTAAERNNRERFSPIVEGLENQEALQLQVACMQFINALVTSPYELDFRIHLRNEFLRSGLKTMLPDLKEKENDELDIQLKVFDENKEDDLTELSHRLNDIRAEMDDMNEVYHLLYNMLKDTAAENYFLSILQHFLLIRNDYYIRPQYYKIIEECVSQIVLHCSGMDPDFKYRQRLDIDLTHLIDSCVNKAKVEESEQKAAEFSKKFDEEFTARQEAQAELQKRDEKIKELEAEIQQLRTQAQVLSSSSGIPGPPAAPPLPGVGPPPPPPAPPLPGGAPLPPPPPPLPGMMGIPPPPPPPLLFGGPPPPPPLGGVPPPPGISLNLPYGMKQKKMYKPEVSMKRINWSKIEPTELSENCFWLRVKEDKFENPDLFAKLALNFATQIKVQKNAEALEEKKTGPTKKKVKELRILDPKTAQNLSIFLGSYRMPYEDIRNVILEVNEDMLSEALIQNLVKHLPEQKILNELAELKNEYDDLCEPEQFGVVMSSVKMLQPRLSSILFKLTFEEHINNIKPSIIAVTLACEELKKSESFNRLLELVLLVGNYMNSGSRNAQSLGFKINFLCKIRDTKSADQKTTLLHFIADICEEKYRDILKFPEELEHVESASKVSAQILKSNLASMEQQIVHLERDIKKFPQAENQHDKFVEKMTSFTKTAREQYEKLSTMHNNMMKLYENLGEYFIFDSKTVSIEEFFGDLNNFRTLFLEAVRENNKRREMEEKTRRAKLAKEKAEQEKLERQKKKKQLIDINKEGDETGVMDNLLEALQSGAAFRDRRKRIPRNPDNRRVPLERSRSRHNGAISSK

SEQ ID NO: 1062 - DNA, 2373 bp, Homo sapien
ggcacgaggagcgtttcgtttggacttctcgacttgagtgcccgcctccttcgccgccgcctctgcagtcctcagcgcagttatgcccagttcttcccgctgtggggacacgaccacggaggaatccttgcttcagggactcgggaccctgctggaccccttcctcgggtttaggggatgtggggaccaggagaaagtcaggatccctaagagtcttccctgcctggatggatgagtggcttcttctccacctagattctttccacaggagccagcatacttcctgaacatggagagtgttgttcgccgctgcccattcttatcccgagtcccccaggcctttctgcagaaagcaggcaaatctctgttgttctatgcccaaaactgccccaagatgatggaagttggggccaagccagcccctcgggcattgtccactgcagcagtacactaccaacagatcaaagaaacccctccggccagtgagaaagacaaaactgctaaggccaaggtccaacagactcctgatggatcccagcagagtccagatggcacacagcttccgtctggacaccccttgcctgccacaagccagggcactgcaagcaaatgccctttcctggcagcacagatgaatcagagaggcagcagtgtcttctgcaaagccagtcttgagcttcaggaggatgtgcaggaaatgaatgccgtgaggaaagaggttgctgaaacctcagcaggccccagtgtggttagtgtgaaaaccgatggaggggatcccagtggactgctgaagaacttccaggacattatgcaaaagcaaagaccagaaagagtgtctcatcttcttcaagataacttgccaaaatctgtttccacttttcagtatgatcgtttctttgagaaaaaaattgatgagaaaaagaatgaccacacctatcgagtttttaaaactgtgaaccggcgagcacacatcttccccatggcagatgactattcagactccctcatcaccaaaaagcaagtgtcagtctggtgcagtaatgactacctaggaatgagtcgccacccacgggtgtgtggggcagttatggacactttgaaacaacatggtgctggggcaggtggtactagaaatatttctggaactagtaaattccatgtggacttagagcgggagctggcagacctccatgggaaagatgccgcactcttgttttcctcgtgctttgtggccaatgactcaaccctcttcaccctggctaagatgatgccaggctgtgagatttactctgattctgggaaccatgcctccatgatccaagggattcgaaacagccgagtgccaaagtacatcttccgccacaatgatgtcagccacctcagagaactgctgcaaagatctgacccctcagtccccaagattgtggcatttgaaactgtccattcaatggatggggcggtgtgcccactggaagagctgtgtgatgtggcccatgagtttggagcaatcaccttcgtggatgaggtccacgcagtggggctttatggggctcgaggcggagggattggggatcgggatggagtcatgccaaaaatggacatcatttctggaacacttggcaaagcctttggttgtgttggagggtacatcgccagcacgagttctctgattgacaccgtacggtcctatgctgctggcttcatcttcaccacctctctgccacccatgctgctggctggagccctggagtctgtgcggatcctgaagagcgctgagggacgggtgcttcgccgccagcaccagcgcaacgtcaaactcatgagacagatgctaatggatgccggcctccctgttgtccactgccccagccacatcatccctgtgcgggttgcagatgctgctaaaaacacagaagtctgtgatgaactaatgagcagacataacatctacgtgcaagcaatcaattaccctacggtgccccggggagaagagctcctacggattgcccccacccctcaccacacaccccagatgatgaactacttccttgagaatctgctagtcacatggaagcaagtggggctggaactgaagcctcattcctcagctgagtgcaacttctgcaggaggccactgcattttgaagtgatgagtgaaagagagaagtcctatttctcaggcttgagcaagttggtatctgctcaggcctgagcatgacctcaattatttcacttaaccccaggccattatcatatccagatggtcttcagagttgtctttatatgtgaattaagttatattaaattttaatctatagtaaaaacatagtcctggaaataaaaaaaaaaaaaaaaaaaaaaaaaaaaaaaaaa

SEQ ID NO: 1063 - protein, 640 aa, Homo sapien
MESVVRRCPFLSRVPQAFLQKAGKSLLFYAQNCPKMMEVGAKPAPRALSTAAVHYQQIKETPPASEKDKTAKAKVQQTPDGSQQSPDGTQLPSGHPLPATSQGTASKCPFLAAQMNQRGSSVFCKASLELQEDVQEMNAVRKEVAETSAGPSVVSVKTDGGDPSGLLKNFQDIMQKQRPERVSHLLQDNLPKSVSTFQYDRFFEKKIDEKKNDHTYRVFKTVNRRAHIFPMADDYSDSLITKKQVSVWCSNDYLGMSRHPRVCGAVMDTLKQHGAGAGGTRNISGTSKFHVDLERELADLHGKDAALLFSSCFVANDSTLFTLAKMMPGCEIYSDSGNHASMIQGIRNSRVPKYIFRHNDVSHLRELLQRSDPSVPKIVAFETVHSMDGAVCPLEELCDVAHEFGAITFVDEVHAVGLYGARGGGIGDRDGVMPKMDIISGTLGKAFGCVGGYIASTSSLIDTVRSYAAGFIFTTSLPPMLLAGALESVRILKSAEGRVLRRQHQRNVKLMRQMLMDAGLPVVHCPSHIIPVRVADAAKNTEVCDELMSRHNIYVQAINYPTVPRGEELLRIAPTPHHTPQMMNYFLENLLVTWKQVGLELKPHSSAECNFCRRPLHFEVMSEREKSYFSGLSKLVSAQA

SEQ ID NO: 1064 - DNA, 3486 bp, Homo sapien
ggcacgagggttgacccttgttgccagagaggctccacccgccggcacctgcattgctaggcaagtcgcacggccatagctgtggactctcttgtggctgaggaagtattgcccccgtgttgctagggagatggcacccccggcaaccaggagtagactgcccttgtgttcctgacagctgcagtcagccttcccccaggggcttggactgcggctgggggaacagcctgttgatgtaaatgatgaactactactccctgctagggttgtcccctagtcgtcacaaactgccattctgttgtgggggtagtgacacccccacgggaatttgttaccactgccctaataaccgtgccctgacctccagctgctagagagaggatgtccccctagtaaagccaagcaggaattgaaggtttttctaaatctgctcggtcctcactcctaaaggatggctcccctcctgtcatcagaggccaccaaggcttcatatgggccagtgtttcccactgctggggctgtcgacatgagtgatgagggagccactgtattgctagaggtgacacttctccaataatcactgcgaccaggaaaaaagccccttcctaaaagcctttctaaacatcctaggcattgttgctaaggaatgccttttccttagcaacaaagatcatggggaccccactggcgcctggaacatctccctagcaaccgtgaagcaccttgttattagggatgataaccacaacttccctggcaactgcagtgtccgacaatttagaagggaccatccttggcggcttctctgaatatactgagtttggttgctaaaggactcatagcttagcaaccatagcccttcaaggcttttcatggctgtggcgggccccattaggtaccaaaagaagaagaaccccattgtcagtgaactgtaccacccagcccacccaccttcctaccctacaggcaccctctgggccaccctcccttgctgccctagcaagtctgacagccagagggccattgcctggccaggatcccttccttagcatccggggctgggacactagcaggcgtcgggagggggcctggctgagctgcatgtctgtcccccaccctcatcctccaccccccagtccggagaaggcggcttccttggagtatgactatgagaccatccgcaacatcgactgctacagcacagatttctgcgtgcgggtgcgcgatggcatgcggtactggaacatgacggtgcagtggtggctggcgcagtatatctacaagagcgcacctgcccgttcctatgtcctgcggagcgcctggaccatgctgctgagcgcctactggcacggcctccacccgggctactacctgagcttcctgaccatcccgctgtgcctggctgccgagggccggctggagtcagccctgcgggggcggctgagcccagggggccagaaggcctgggactgggtgcactggttcctgaagatgcgcgcctatgactacatgtgcatgggcttcgtgctgctctccttggccgacacccttcggtactgggcctccatctacttctgtatccacttcctggccctggcagccctggggctggggctggctttaggtgggggcagccccagccggcggaaggcagcatcccagcccaccagccttgccccggagaagctccgggaggagtaagctgtcacgacgctccctctgccagctggtcccgggaattctgtgaaccaggctgctgtctcctccccagaaagagtccttaccttggagagggtcctggagagaatttcctcttccccagctaaataccctgcctgcaactgaagcagacccgggggtgtcctccctgccctctgcccagaggccacctccactcctacaaaatcaaagtattgtccagacaagagtcactggcccctgctccagcttctgggtatccagagagcactgcacttccccaaaacggaaggggcccctgggcagtgggttttgggcaaattccctttctttgcatccacaatgtggggtcggagcttgggggcaggtcctgggagtgggaagcctcttccttgtgtctttcgctccacttttagctcatcgcaccaatattgcagacttggaaggaagcataagcttcccatttcacaaaggggaaactgaggtgcgggtgcgcgggcctggggacggccgtcccatggcttccatctgagccacctcgggaccccagcactcctggcgccctcttctcatcgcttggcctatgacaggtcaccgtgtgtaaatctttcccaataaagtgttgcacaaagaaaaaaaaaaaaaaaaaacggcagccctgggcggctgggagcacggacggggcgcccgcgcagctgcctctcgtgctcaccgcgctgtgggccgcggccgtgggcctggagctggcttacgtgctggtgctcggtcccgggccgccgccgctgggacccctggcccgggccttgcagctggcgctggccgccttccagctgctcaacctgctgggcaacgtggggctcttcctgcgctcggatcccagcatccgtggcgtgatgctggccggccgcggtctgggccggggctgggcttactgctaccaatgccaaagccaggtgccgccacgcagcggacactgctctgcctgccgcgtctgcatcctgcgtcgggaccaccactgccgcctgctgggccgctgcgtgggcttcggcaactaccggcccttcctgtgcctgctgcttcatgccgccggcgtcctgctccacgtctctgtgctgctgggccctgcactgtcggccctgctgcgagcccacacgcccctccacatggctgccctcctcctgcttccctggctcatgttgctcacaggcagagtgtctctggcacagtttgccttggccttcgtgacggacacgtgcgtggcgggtgcgctgctgtgcggggctgggctgctcttccatgggatgctgctgctgcggggccagaccacatgggagtgggctcggggccagcactcctatgacctgggtccctgccacaacctgcaggcagccctggggccccgctgggccctcgtctggctctggcccttcctggcctccccattgcctggggatgggatcaccttccagaccacagcagatgtgggacacacagcctcctgactccaggaagagccagagctgtgcagggaggaaggggtgagaggggggcccccacacctagactcagtaaggaagtcgggttggaccttaacatctgcattggacaactccaccccttccttggccttgcccctgcccgcctacactcctacgtgtccagggcttgggccgtgacttaggcagaggagtgcagaggagggtctggcaggggctgctcaggccgcctagctgcccctttgccaggttaataaagcactgacttgttaaaaaaaaaaaaaaaaaaaaa

SEQ ID NO: 1065 - protein, 199 aa, Homo sapien
MSVPHPHPPPPSPEKAASLEYDYETIRNIDCYSTDFCVRVRDGMRYWNMTVQWWLAQYIYKSAPARSYVLRSAWTMLLSAYWHGLHPGYYLSFLTIPLCLAAEGRLESALRGRLSPGGQKAWDWVHWFLKMRAYDYMCMGFVLLSLADTLRYWASIYFCIHFLALAALGLGLALGGGSPSRRKAASQPTSLAPEKLREE

SEQ ID NO: 1066 - DNA, 2254 bp, Homo sapien
aaagaaccgcacaccacagactccctccagctctttgtgtgtggctctctcagggtccaacaagagcaagctgtgggtctgtgagtgtttatgtgtgcttttattcacttcacacttattgaaaagtgtgtatgtgagagggtggggtgtgtgtgtcaaagagagtgaggaagagaaggagagagagatcaattgattctgcagcctcagctccagcatccctcagttgggagcttccaaagccgggtgatcacttggggtgcatagctcggagatgcagtccccctggaaaatccttacggtggcgcctctattcttgctcctgtctcttcagtcctcggcctctccagccaacgatgaccagtccaggcccagcctctcgaatgggcacacctgtgtagggtgtgtgctggtggtgtctgtaatagaacagcttgctcaagttcacaactcgacggtccaggcctcgatggagagactgtgcagctacctgcctgaaaaactgttcttgaaaaccacctgctatttagtcattgacaagtttggatcagacatcataaaactgcttagcgcagatatgaatgctgatgtggtatgtcacactctggagttttgtaaacagaacactggccaaccattgtgtcatctctaccctcttcccaaggagacatggaaatttacactacagaaggcaagacaaattgtcaagaagtccccgattctgaaatattctagaagtggttctgacatttgttcactcccggttttggccaagatctgccagaaaattaaattagctatggaacagtctgtgccattcaaagatgtggattcagacaaatacagcgttttcccaacactgcggggctatcactggcgggggagagactgtaatgacagcgacgagtcagtgtacccaggtagaaggccgaacaactgggatgtccatcaggattcaaactgtaatggcatttggggtgtcgatccaaaagatggagttccatatgagaagaaattctgtgaaggttcacagcccaggggaatcattttgctgggagactcagctggggctcattttcacatctctcctgaatggatcacagcgtcgcagatgtctttgaactctttcatcaatctaccaacagcccttaccaacgagcttgactggccccaactctctggtgctacaggatttctggactccactgttggaattaaagaaaaatctatttaccttcgcttatggaaaagaaaccactgtaatcacagggactaccagaatatttcaagaaatggtgcatcttcccgaaacctgaagaaatttatagaaagcttgtctagaaacaaggtgttggactatcccgccatcgttatatatgccatgattggaaatgatgtctgcagtgggaagagtgacccagtcccagccatgaccactcctgagaaactctactccaacgtcatgcagactctgaagcatctaaattcccacctgcccaatggcagccatgttattttgtatggcttaccagatggaacctttctctgggataatttgcacaacagatatcatcctctcggccagctaaataaagacatgacctatgcgcagttgtactccttcctgaactgcctccaggtcagcccctgccacggctggatgtcttccaacaagacgttgcggactctcacttcagagagagcagagcaactctccaacacactgaaaaaaattgcagccagtgagaaatttacaaacttcaatcttttctacatggattttgccttccatgaaatcatacaggagtggcagaagagaggcggacagccctggcagctcatcgagcccgtggatggattccaccccaacgaggtggctttgctgttgttggcggatcatttctggaaaaaggtgcagctccagtggccccaaatcctgggaaaggagaatccgttcaacccccagattaaacaggtgtttggagaccaaggcgggcactgagcctctcaggagcatgcacccctggggagcacagggaggcagaggcttgggtaaactcattccacaaaccctatgggggctgccacgtcacaggcccaaaggactcttcttcagcagcatctttgcaaaatgtctttctctcaatgaagagcatatctggacgactgtgcaatgctgtgtgctcccggggatcagtaacccttccgctgttcctgaaataacctttcataaagtgctttgggtgccattcca

SEQ ID NO: 1067 - protein, 575 aa, Homo sapien
MQSPWKILTVAPLFLLLSLQSSASPANDDQSRPSLSNGHTCVGCVLVVSVIEQLAQVHNSTVQASMERLCSYLPEKLFLKTTCYLVIDKFGSDIIKLLSADMNADVVCHTLEFCKQNTGQPLCHLYPLPKETWKFTLQKARQIVKKSPILKYSRSGSDICSLPVLAKICQKIKLAMEQSVPFKDVDSDKYSVFPTLRGYHWRGRDCNDSDESVYPGRRPNNWDVHQDSNCNGIWGVDPKDGVPYEKKFCEGSQPRGIILLGDSAGAHFHISPEWITASQMSLNSFINLPTALTNELDWPQLSGATGFLDSTVGIKEKSIYLRLWKRNHCNHRDYQNISRNGASSRNLKKFIESLSRNKVLDYPAIVIYAMIGNDVCSGKSDPVPAMTTPEKLYSNVMQTLKHLNSHLPNGSHVILYGLPDGTFLWDNLHNRYHPLGQLNKDMTYAQLYSFLNCLQVSPCHGWMSSNKTLRTLTSERAEQLSNTLKKIAASEKFTNFNLFYMDFAFHEIIQEWQKRGGQPWQLIEPVDGFHPNEVALLLLADHFWKKVQLQWPQILGKENPFNPQIKQVFGDQGGH

SEQ ID NO: 1068 - DNA, 1820 bp, Homo sapien
acagagatggcactgatgcaggaactgtatagcacaccagcctccaggctggactccttcgtggctcagtggctgcagccccaccgggagtggaaggaagaggtgctagacgctgtgcggaccgtggaggagtttctgaggcaggagcatttccaggggaagcgtgggctggaccaggatgtgcgggtgctgaaggtagtcaaggtgggctccttcgggaatggcacggttctcaggagcaccagagaggtggagctggtggcgtttctgagctgtttccacagcttccaggaggcagccaagcatcacaaagatgttctgaggctgatatggaaaaccatgtggcaaagccaggacctgctggacctcgggctcgaggacctgaggatggagcagagagtccccgatgctcttgtcttcaccatccagaccagggggactgcggagcccatcacggtcaccattgtgcctgcctacagagccctggggccttctcttcccaactcccagccaccccctgaggtctatgtgagcctgatcaaggcctgcggtggtcctggaaatttctgcccatccttcagcgagctgcagagaaatttcgtgaaacatcggccaactaagctgaagagcctcctgcgcctggtgaaacactggtaccagcagtatgtgaaagccaggtcccccagagccaatctgccccctctctatgctcttgaacttctaaccatctatgcctgggaaatgggtactgaagaagacgagaatttcatgttggacgaaggcttcaccactgtgatggacctgctcctggagtatgaagtcatctgtatctactggaccaagtactacacactccacaatgcaatcattgaggattgtgtcagaaaacagctcaaaaaagagaggcccatcatcctggatccggccgaccccaccctcaacgtggcagaagggtacagatgggacatcgttgctcagagggcctcccagtgcctgaaacaggactgttgctatgacaacagggagaaccccatctccagctggaacgtgaagagggcacgagacatccacttgacagtggagcagaggggttacccagatttcaacctcatcgtgaacccttatgagcccataaggaaggttaaagagaaaatccggaggaccaggggctactctggcctgcagcgtctgtccttccaggttcctggcagtgagaggcagcttctcagcagcaggtgctccttagccaaatatgggatcttctcccacactcacatctatctgctggagaccatcccctccgagatccaggtcttcgtgaagaatcctgatggtgggagctacgcctatgccatcaaccccaacagcttcatcctgggtctgaagcagcagattgaagaccagcaggggcttcctaaaaagcagcagcagctggaattccaaggccaagtcctgcaggactggttgggtctggggatctatggcatccaagacagtgacactctcatcctctcgaagaagaaaggagaggctctgtttccagccagttagttttctctgggagacttctctgtacatttctgccatgtactccagaactcatcctgtcaatcactctgtcccattgtctactgggaaggtcccaggtcttcaccagttttacaatgagttatcccaggccagacgtggtagctcacacctgtaatcccagaactttgggaggccgaggtgggaggagcgcttgagccgaggagttcaagaccagcctgggtatcatagggagaccccgtctctacaaaataaaaaaataattcactggg

SEQ ID NO: 1069 - protein, 514 aa, Homo sapien
MALMQELYSTPASRLDSFVAQWLQPHREWKEEVLDAVRTVEEFLRQEHFQGKRGLDQDVRVLKVVKVGSFGNGTVLRSTREVELVAFLSCFHSFQEAAKHHKDVLRLIWKTMWQSQDLLDLGLEDLRMEQRVPDALVFTIQTRGTAEPITVTIVPAYRALGPSLPNSQPPPEVYVSLIKACGGPGNFCPSFSELQRNFVKHRPTKLKSLLRLVKHWYQQYVKARSPRANLPPLYALELLTIYAWEMGTEEDENFMLDEGFTTVMDLLLEYEVICIYWTKYYTLHNAIIEDCVRKQLKKERPIILDPADPTLNVAEGYRWDIVAQRASQCLKQDCCYDNRENPISSWNVKRARDIHLTVEQRGYPDFNLIVNPYEPIRKVKEKIRRTRGYSGLQRLSFQVPGSERQLLSSRCSLAKYGIFSHTHIYLLETIPSEIQVFVKNPDGGSYAYAINPNSFILGLKQQIEDQQGLPKKQQQLEFQGQVLQDWLGLGIYGIQDSDTLILSKKKGEALFPAS

SEQ ID NO: 1070 - DNA, 885 bp, Homo sapien
agcctacgcacgaaagtgactagggaggaaggatattataaagtgatgcaaacagaaattccaccagcctccatgtatcatcatgtgtcataactcagtcaagctcagtgagcattctcagcacattgcctcaacagcttcaaggtgagccagctcaagactttgctctccaccaggcagaagatgacagactgtgaatttggatatatttacaggctggctcaggactatctgcagtgcgtcctacagataccacaacctggatcaggtccaagcaaaacgtccagagtgctacaaaatgttgcgttctcagtccaaaaagaagtggaaaagaatctgaagtcatgcttggacaatgttaatgttgtgtccgtagacactgccagaacactattcaaccaagtgatggaaaaggagtttgaagacggcatcattaactggggaagaattgtaaccatatttgcatttgaaggtattctcatcaagaaacttctacgacagcaaattgccccggatgtggatacctataaggagatttcatattttgttgcggagttcataatgaataacacaggagaatggataaggcaaaacggaggctgggaaaatggctttgtaaagaagtttgaacctaaatctggctggatgacttttctagaagttacaggaaagatctgtgaaatgctatctctcctgaagcaatactgttgaccagaaaggacactccatattgtgaaaccggcctaatttttctgactgatatggaaacgattgccaacacatacttctacttttaaataaacaactttgatgatgtaacttgaccttccagagttatggaaattttgtccccatgtaatgaataaattgtatgtatttttctct

SEQ ID NO: 1071 - protein, 175 aa, Homo sapien
MTDCEFGYIYRLAQDYLQCVLQIPQPGSGPSKTSRVLQNVAFSVQKEVEKNLKSCLDNVNVVSVDTARTLFNQVMEKEFEDGIINWGRIVTIFAFEGILIKKLLRQQIAPDVDTYKEISYFVAEFIMNNTGEWIRQNGGWENGFVKKFEPKSGWMTFLEVTGKICEMLSLLKQYC

SEQ ID NO: 1072 - DNA, 3486 bp, Homo sapien
cacaacctagtccagagcctcacagtcctactgaacctcctgcatggggcagcagtattgtgaaagttccgtctggtatatttgatgtcaacagcaggaaaagtagcactggtagtatatcaaatgtgctgttttctactcaagatccagttgaagatgcagtctttggcgaagctactaatctcaagaagaatggtgatagaggagaaaaaagacaaaagcattttcctgagaggagttgtagttttagttctgaaagtcgagcaggaatgttgcttaagaagagtagtttggattcgaattcaagtgaaatggctatcatgatgggagcagatgccaagattctcacagcagcattgacatgtcctaagacttctctacttcatattgcaagaacccatagctttgagaatgttagctgtcacctacctgatagtaggacttgtatgtctgaaagcacttggaatcctgagcacagatcatctccggtgccagagatgcttgaggaaagccaagaactccttgagcctgtggttgatgacgtacctaaaactactgcaacagtagatacatatgagagtctactaagtgatagtaacagtaatcagtccagagacttgaaaacagtatccaaagatctgagaaataagagaagtagtttatatggtattgctaaggtggttcagagggaagatgttgaaactggactagatcctttgtctcttttagccactgaatgtacaggaggaaaaactcctgattctgaagataagttgttttctccagttattgcacgtaatctggctgatgaaatagaaagctatatgaacctaaaaagtcccctaggtagtaaatcttctagtatggaattacacagagaggaaaacagagagtctggcatgactactgcatttattcatgctctagagaggagatcaagcctacctttagatcatggttcaccagcacaggaaaatcctgaaagtgaaaagagctcacctgcagtgtccaggtctaaaacttttactgggcgtttcaagcagcaaaccccctctcgaactcataaagaacgttcaacttctttgtcagcactggtgcgttcttcgccacatggctcgttgggttctgtagtaaattctttgtcagggctaaagctggataatatactctcagggcccaagatagatgtcctgaaatctggtatgaaacaagcagcgacagtagccagtaagatgtgggtagctgttgcgtctgcctacagctactcagatgatgaggaagaaactaatagagactacagcttcccagctggcctagaagaccatattttgggggagaatatatcgcctaacacaagtatctcagggttggtccccagtgaacttacccagagcaacacaagtcttggcagtagcagcagtagtggagatgtaggaaaactgcattatccaacaggtgaagttccatttccaagaggcatgaaagggcaagactttgaaaaatcagatcatggttcttctcaaaataccagcatgtctagcatctatcagaattgtgcaatggaggttttgatgtccagttgttcacagtgtagagcttgtggagctttagtttatgatgaagaaattatggctggatggacagcagatgactcaaatttgaatacagcttgtccattctgtaaaagcaacttcttgcctcttctcaatatagaattcaaagatttgagaggttctgcaagctttttcctgaaaccaagtacctctggtgacagtttacaaagtggaagcattccattggcaaatgaatccttggagcacaaacctgtatccagtttagcagaacctgacttgatcaactttatggacttcccaaaacataaccagatcataactgaagaaacaggctctgcagttgaaccaagtgatgaaataaagagagccagtggagatgtccaaactatgaaaatttcatctgtgcctaatagtttatcaaagcgaaatgtgtctttgactcgaagtcacagtgttggaggcccattgcagaatattgactttacccagcgaccgtttcatggcatctcaacagttagtcttccaaatagtctgcaggaagttgtggatcctttaggaaaaagacccaatcctccccctgtttctgtgccctacttgagtcctctagtactccgtaaagaacttgaatctttgctagaaaatgaaggtgatcaggtgattcatacatcttctttcatcaatcaacatccaatcattttctggaacctcgtttggtatttcagacgtttggaccttcctagtaacttgccaggacttatcctcacatctgaacattgtaatgaaggtgtacagcttcctctgtcatctctgtcccaggatagcaaacttgtgtatattcagctgttatgggataatatcaaccttcatcaggaaccaagagaacctctgtatgtctcatggaggaattttaattctgaaaagaaatcatctctcctgtcagaggaacaacaagaaacaagcactttagtagaaaccatcaggcagagtattcagcacaataatgttcttaaacccatcaacctactttcacagcaaatgaagccaggcatgaaaagacaaagaggcatttgacaatgaatatggaattgcatacaatagtctgtcttcagagattcttgaaaggttgcagaaaattgatgctccaccaagtgccagtgtcgagtggtgcaggaagtgttttggagcgcctctcatttaaatagagattcactagaatgttgacacacaaggcttggggattagatttcatctggaaacattcaagttttttttttccaaatcgtaagaactggtgaatacggaattgaagtaactcttggggacaatatataatgaattatgattcatattgcattaccttgaaatatgaagtgccatttgaatgtcccagggcttattaatattgaagattttcaacccctgaactgcttttctgcctctgtggaaaactactttgggattcttcagtatttgtagtagtttgatagaaataatgaggaaccatattcattctaggcattgtttatatttgaagttactgagtttgaggaatggcaaattaaatttgcctaacccccaaaacaaatgaaatatctcaattataaaagcaacatggccgggcacggtggctcaggcctgtaatcccagcactttgggaggctgagcaaggtgggtggatcacttgaggccaggagttcgagaccagcctggccaacacggtgagaccctgtctttactaaaaatacaaaaattagccaggcgcaccactgtagtcccagctactcaggctgaggcaggagaatcgcttgaactgaggcagaggctacagtgagtggagatcacgccactgcaactccagcttgggtgacagagtgagaccgtctcaaaaaaaaaaaaaaaaaaaaaaaaaaaa

SEQ ID NO: 1073 - protein, 791 aa, Homo sapien
MLLKKSSLDSNSSEMAIMMGADAKILTAALTCPKTSLLHIARTHSFENVSCHLPDSRTCMSESTWNPEHRSSPVPEMLEESQELLEPVVDDVPKTTATVDTYESLLSDSNSNQSRDLKTVSKDLRNKRSSLYGIAKVVQREDVETGLDPLSLLATECTGGKTPDSEDKLFSPVIARNLADEIESYMNLKSPLGSKSSSMELHREENRESGMTTAFIHALERRSSLPLDHGSPAQENPESEKSSPAVSRSKTFTGRFKQQTPSRTHKERSTSLSALVRSSPHGSLGSVVNSLSGLKLDNILSGPKIDVLKSGMKQAATVASKMWVAVASAYSYSDDEEETNRDYSFPAGLEDHILGENISPNTSISGLVPSELTQSNTSLGSSSSSGDVGKLHYPTGEVPFPRGMKGQDFEKSDHGSSQNTSMSSIYQNCAMEVLMSSCSQCRACGALVYDEEIMAGWTADDSNLNTACPFCKSNFLPLLNIEFKDLRGSASFFLKPSTSGDSLQSGSIPLANESLEHKPVSSLAEPDLINFMDFPKHNQIITEETGSAVEPSDEIKRASGDVQTMKISSVPNSLSKRNVSLTRSHSVGGPLQNIDFTQRPFHGISTVSLPNSLQEVVDPLGKRPNPPPVSVPYLSPLVLRKELESLLENEGDQVIHTSSFINQHPIIFWNLVWYFRRLDLPSNLPGLILTSEHCNEGVQLPLSSLSQDSKLVYIQLLWDNINLHQEPREPLYVSWRNFNSEKKSSLLSEEQQETSTLVETIRQSIQHNNVLKPINLLSQQMKPGMKRQRGI

SEQ ID NO: 1074 - DNA, 2718 bp, Homo sapien
ccgccatggggtccctgttccggagcgagaccatgtgcctggcgcagctcttcctgcagtcgggcacggcctacgagtgcctcagcgccctgggcgagaaaggcctggtccagttccgagacctcaaccagaacgtaagttctttccaaagaaaatttgttggtgaggtgaagaggtgtgaagagctagagcgaatattggtgtatttggtacaggaaattaatagagctgatattccccttcctgaaggagaggccagccctcctgcgccacccctgaaacaggttctagaaatgcaggagcagttgcagaagctcgaggttgaactgagagaagtcactaagaacaaggagaaactgaggaaaaacttgctggaactgatagagtacactcacatgctgagagtgacaaagacctttgtgaaacgcaacgttgagtttgaacccacttatgaagaattcccttccttagagagcgattctttgttggattacagctgtatgcagaggctgggagcaaaactgggatttgtgtctggcctaattaaccaaggaaaagtggaagcatttgaaaaaatgttgtggagagtctgcaaagggtacaccatcgtgtcctatgcagaactggatgaatcccttgaagaccctgaaacaggggaagtcataaaatggtatgtctttttaatatccttttggggagagcagattggccacaaggttaagaagatatgtgattgctaccactgccacgtgtacccctatccaaacacagccgaggagcggagggagatccaggaggggctgaacacccgcatccaggatctctacactgtactgcacaaaaccgaggactatttgaggcaagtgctatgtaaagccgccgagtctgtctacagccgtgtgatccaggtgaagaaaatgaaggccatctatcacatgctgaacatgtgcagctttgacgtgaccaacaagtgcctcattgctgaagtctggtgtcccgaggcggatctgcaggacctgcgccgggcactggaggagggctcgagagagagtggtgctacaatcccctcattcatgaatataatccccacaaaagaaacaccccccactcggatccgcaccaacaaattcaccgagggatttcagaacatcgtggatgcttatggagtcggaagctacagagaagtcaatccagctctctttaccatcatcaccttcccgtttttatttgctgtgatgtttggagacttcggacatggctttgtgatgtttttatttgccctcttgtgggtgttaaatgaaaatcatcccagactaaatcagtcacaagagatcatgaggatgttttttaatggccggtacatcctcctgctgatggggctgttctcagtgtacactggcctcatctacaacgactgcttttcaaagtcagtcaacctgttcggctctgggtggaacgtgtcggccatgtacagctccagccacccacccgcagagcataagaagatggtgctttggaacgacagcgtcgttagacacaacagcattttgcagctggatccaagcattcctggagtgttccgaggcccttatccccttggcattgatcctatttggaacttggccacaaatcgcctcacttttctaaactctttcaaaatgaaaatgtccgtgattttaggaatcattcatatgacttttggagtcattctgggaatatttaaccacttgcacttcaggaagaagttcaacatttacctggtttccatcccggaacttctcttcatgctctgtatctttggataccttatatttatgattttctacaagtggctggttttttcagcagaaacctccagagttgctcccagcattctgattgaatttattaacatgtttttattcccagccagtaaaacaagtggcctttacacagggcaggagtatgtccagagagtgctgctggttgtcacagcattgtctgtccctgtcctcttcttgggaaagccactgtttttgttgtggcttcacaatgggcgtagttgcttcggggtgaaccggagtggctacacacttataaggaaagatagtgaggaagaagtttcattgctgggaagccaagatatagaagagggaaatcaccaggtggaagatggatgtagagaaatggcgtgtgaagagtttaattttggagaaatattaatgacccaagtaatccattccatcgagtactgtctgggatgcatctccaacaccgcctcctacctgaggctctgggcgcttagcctggctcacgcacagttgtctgatgtcctgtgggccatgctgatgcgcgtgggcctccgcgttgacaccacctatggcgtcttgctactgctcccggttatcgcgctctttgcagttttgaccattttcatccttctgatcatggaagggctttctgcgtttcttcacgccatacgcctccactgggtagaatttcagaacaaattctacgttggtgcaggcaccaaatttgttcctttctcattcagtctactttcatcaaagttcaataacgacgacagtgtggcatgatcatattgctgtaaccaacaagctttcagatttatggagaatgaccatgttatagactttcacttatgtcagatttatgataggaaaaattccatcttcattactgccttatgacatagccaaataattctgtaagatatac

SEQ ID NO: 1075 - protein, 856 aa, Homo sapien
MGSLFRSETMCLAQLFLQSGTAYECLSALGEKGLVQFRDLNQNVSSFQRKFVGEVKRCEELERILVYLVQEINRADIPLPEGEASPPAPPLKQVLEMQEQLQKLEVELREVTKNKEKLRKNLLELIEYTHMLRVTKTFVKRNVEFEPTYEEFPSLESDSLLDYSCMQRLGAKLGFVSGLINQGKVEAFEKMLWRVCKGYTIVSYAELDESLEDPETGEVIKWYVFLISFWGEQIGHKVKKICDCYHCHVYPYPNTAEERREIQEGLNTRIQDLYTVLHKTEDYLRQVLCKAAESVYSRVIQVKKMKAIYHMLNMCSFDVTNKCLIAEVWCPEADLQDLRRALEEGSRESGATIPSFMNIIPTKETPPTRIRTNKFTEGFQNIVDAYGVGSYREVNPALFTIITFPFLFAVMFGDFGHGFVMFLFALLWVLNENHPRLNQSQEIMRMFFNGRYILLLMGLFSVYTGLIYNDCFSKSVNLFGSGWNVSAMYSSSHPPAEHKKMVLWNDSVVRHNSILQLDPSIPGVFRGPYPLGIDPIWNLATNRLTFLNSFKMKMSVILGIIHMTFGVILGIFNHLHFRKKFNIYLVSIPELLFMLCIFGYLIFMIFYKWLVFSAETSRVAPSILIEFINMFLFPASKTSGLYTGQEYVQRVLLVVTALSVPVLFLGKPLFLLWLHNGRSCFGVNRSGYTLIRKDSEEEVSLLGSQDIEEGNHQVEDGCREMACEEFNFGEILMTQVIHSIEYCLGCISNTASYLRLWALSLAHAQLSDVLWAMLMRVGLRVDTTYGVLLLLPVIALFAVLTIFILLIMEGLSAFLHAIRLHWVEFQNKFYVGAGTKFVPFSFSLLSSKFNNDDSVA

SEQ ID NO: 1076 - DNA, 2374 bp, Homo sapien
acctggtgcgggaggcccgggcagggagaagtgtgcggggccgggacaagccggctccgagtgcggggcgggaggggcctgcgcggcggcgggagcccagagccgcgctaaagcgggtcaagcgtcctccttttctccccgccccttctcctcctcctacctgggcctctgcgtggagacgcgcacctggcaaccggaggccgcgtctccgccttctctgctcgcgcctggcgcccggagcctgcccgggacctccgccggagccgcgctcgctgcaggcggcctcgagcgctctctcgttgatgccgttttggaggtgaccggcgcggcggccgctctatggtggggccgcgttagtggctgcggctccgcgggactccagggcgcggctgcgaggtggcggggcgccccgcctgcagaaccctgcttgcagctcaggtttcggggtgcttgaggaggccgccacggcagcgcgggagcggaagatgttggagctgaggcaccggggaagctgccccggccccagggaagcggtgtcgccgccacaccgcgagggagaggcggccggcggcgaccacgaaaccgagagcaccagcgacaaagaaacagatattgatgacagatatggagatttggattccagaacagattctgatattccggaaattccaccatcctcagatagaacccctgagattctcaaaaaagctctatctggtttatcttcaaggtggaaaaactggtggatacgtggaattctcactctaactatgatctcgttgtttttcctgatcatctatatgggatccttcatgctgatgcttcttgttctgggcatccaagtgaaatgcttccatgaaattatcactataggttatagagtctatcattcttatgatctaccatggtttagaacactaagttggtactttctattgtgtgtaaactactttttctatggagagactgtagctgattattttgctacatttgttcaaagagaagaacaacttcagttcctcattcgctaccatagatttatatcatttgccctctatctggcaggtttctgcatgtttgtactgagtttggtgaagaaacattatcgtctgcagttttatatgttcgcatggactcatgtcactttactgataactgtcactcagtcacaccttgtcatccaaaatctgtttgaaggcatgatatggttccttgttccaatatcaagtgttatctgcaatgacataactgcttacctttttggatttttttttgggagaactccattaattaagttgtctcctaaaaagacttgggaaggattcattggtggtttcttttccacagttgtgtttggattcattgctgcctatgtgttatccaaataccagtactttgtctgcccagtggaataccgaagtgatgtaaactccttcgtgacagaatgtgagccctcagaacttttccagcttcagacttactcacttccaccctttctaaaggcagtcttgagacaggaaagagtgagcttgtaccctttccagatccacagcattgcactgtcaacctttgcatctttaattggcccatttggaggcttctttgctagtggattcaaaagagccttcaaaatcaaggattttgcaaataccattcctggacatggtgggataatggacagatttgattgtcagtatttgatggcaacttttgtacatgtgtacatcacaagttttatccggggcccaaatcccagcaaagtgctacagcagttgttggtgcttcaacctgaacagcagttaaatatatataaaaccctgaagactcatctcattgagaaaggaatcctacaacccaccttgaaggtataactggatccagagagggaaggactgacaagaaggaattattcagaaaaacactgacagatgttttataaattgtacagaaaaatagttaaaaatgcaataggttgaagttttggagatatgtttctctctgaaattactgtgaatatttaacaaacacttacttgatctatgttatgaaataagtagcaaattgccagcaaaatgtcttgtaccttttctaaagtgtattttctgatgtgaacttccttccccttacttgctaggtttcataatttaaaagagtcaaacactataaaatgagtaagttgacgatgttttaagattgcacctggcagtgtgcctttttgcacaaatatttacttttgcacttggagctgcttttaattttagcaaaatgttttatgcaaggcacaataggaagtcagttctcctgcacttcctcctcatgtagtctggagtactttctaaagggcttagttggatttaaaaaaaaaaaaaaaaaa

SEQ ID NO: 1077 - protein, 444 aa, Homo sapien [sequence omitted]

SEQ ID NO: 1078 - DNA, 1411 bp, Homo sapien
cgggaaacggcaaacagcgagatatccgagcgagagtcccgccctgcatcagtttgcggaaccgccttggtagaaggagagaaggggagtggaggaagcacgggactggagggaccaaagttccccgatggcggcccaggggtgcgcggcatcgcggctgctccagctgctgctgcagcttctgcttctactgttgctgctggcggcgggcggggcgcgcgcgcggtggcgcgcggagggcaccagcgcacacttgcgggacatcttcctgggccgctgcgccgagtaccgcgcactgctgagtcccgagcagcggaacaagaactgcacagccatctgggaagcctttaaagtggcgctggacaaggatccctgctccgtgctgccctcagactatgacctttttattaacttgtccaggcactctattcccagagataagtccctgttctgggaaaatagccacctccttgttaacagctttgcagacaacacccgtcgttttatgcccctgagcgatgttctgtatggcagggttgcagatttcttgagctggtgtcgacagaaaaatgactctggactcgattaccaatcctgccctacatcagaagactgtgaaaataatcctgtggattccttttggaaaagggcatccatccagtattccaaggatagttctggggtgatccacgtcatgctgaatggttcagagccaacaggagcctatcccatcaaaggtttttttgcagattatgaaattccaaacctccagaaggaaaaaattacacgaatcgagatctgggttatgcatgaaattgggggacccaatgtggaatcctgcggggaaggcagcatgaaagtcctggaaaagaggctgaaggacatggggttccagtacagctgtattaatgattaccgaccagtgaagctcttacagtgcgtggaccacagcacccatcctgactgtgccttaaagtcggcagcagccgctactcaaagaaaagccccaagtctttatacagaacaaagggcgggtcttatcattcccctctttctggtgctggcttcccggactcaactgtaactggaaactgtgttgctctaaccctcctccagccctgcagcctccccttgcagtcatcattcgtgttctgtgtataccaaatgattctgttatctaaagaagctttttgctgggaaaacgatgtcctgaaaatggtatttcaatgaggcatatgttcaggatttcagaaacaagaagttagttctatttagcaggttaaaaaatgctgcattagaattaaagcaagttattttcttatttgtataatgacacaaagcattgggagtcagactgcttgtatattatcaaacattttaagagaattctaataaagctgtattttacatc

SEQ ID NO: 1079 - protein, 318 aa, Homo sapien
MAAQGCAASRLLQLLLQLLLLLLLLAAGGARARWRAEGTSAHLRDIFLGRCAEYRALLSPEQRNKNCTAIWEAFKVALDKDPCSVLPSDYDLFINLSRHSIPRDKSLFWENSHLLVNSFADNTRRFMPLSDVLYGRVADFLSWCRQKNDSGLDYQSCPTSEDCENNPVDSFWKRASIQYSKDSSGVIHVMLNGSEPTGAYPIKGFFADYEIPNLQKEKITRIEIWVMHEIGGPNVESCGEGSMKVLEKRLKDMGFQYSCINDYRPVKLLQCVDHSTHPDCALKSAAAATQRKAPSLYTEQRAGLIIPLFLVLASRTQL

SEQ ID NO: 1080 - DNA, 2963 bp, Homo sapien
gttcctccgggagcccaacaccgttcccgcgcggccacgatgatccctccgagcagcccccgcgaggacggcgtggacgggctgcccaaggaggcggtgggcgccgagcaaccgccctctcctgcatccaccagcagccaggaatccaagctccagaaactaaaacgatcactttctttcaagaccaagagtttacggagcaaaagtgctgacaacttcttccagcgaaccaacagcgaagacatgaaactgcaagcacacatggtggctgagatcagccccagctccagcccactccctgctccaggaagcctgacgtccacacccgccagggctggtctgcatccaggtggcaaggctcatgcctttcaggaatacatcttcaagaagcccactttctgtgatgtctgcaaccacatgatagtgggaacaaatgctaagcatggactgcgctgcaaagcctgtaagatgagcatccaccacaagtgcacagatggcctggcaccccagcggtgcatgggcaagctgccaaaggggtttcggcgttactacagctcccccttgctcattcatgaacagtttggctgcattaaagaagttatgcccattgcctgtggcaataaggtggaccctgtctacgagaccctccgcttcggcacctccctggcccagaggacaaagaagggcagctccggcagtggctctgactcacctcacagaacctctacttcagatcttgtggaggttcctgaggaagccaatgggccaggaggcgggtatgacctaaggaaacgcagcaacagcgtgtttacatatccagaaaatggcactgatgatttcagagatccagcgaagaacataaaccaccagggatctctttccaaagacccattacagatgaacacctatgttgccttgtacaaatttgtaccacaggagaatgaagatttggaaatgaggccaggagacataattactcttttagaggattccaatgaagactggtggaaagggaaaattcaagacagaattggcttctttccagccaactttgttcagagactacaacaaaatgagaagatttttagatgtgttagaaccttcattgggtgtaaggaacaggggcagataacactgaaagagaatcagatctgcgtgagttctgaagaagaacaagatggttttatcagagtcctcagtggaaaaaagaaaggcctcatcccccttgatgtactagaaaacatctgattgctggctcctcctccgtttgcagtaggcaagctctgctgcgatgcctctgcctcatctcacactgcgtcaacccaaaggagctgccgcactgacccagccccccaggaaacagtgagacaagaatcaagtatctgagactgtggagtaatagccacaaaacagagggcccactgcacagcatatccaggctgccacaggtggggacgaggctgagagagtcagcaggcagagccagatgccatgcttggcagcagcagtaggactataaaccacagctgtcccccaggatcccactcctttcctgtctgtgtggtgtaagttaacacactggagtgtgctccagtttgcagggtagcccagtgcaaggttcagatccatgtagctaagtattatcctgcttccagacctatgtcaccagtaccaatcagtcagtgtcatcacatttcaggccccaagcaatctctgtgcaaagcatcagaaagacctgcttcccagcccccagcattccagtgctctccaggcttcctctctttgtgattgtgctgtccagagtgtccagcttgttctttctttctcttcagtcctctgagtacatctggtggtgtgcattagatgtgagggctatgttgacatggcatcacctccaaagacctgacctgcctaaagactgatgacaggccatccttcctgctgttctaggtactggcctgggtgacagagcaggacatgagacatagatacagtggggaggagaagtggggaaaggtggagcagagagttcttacttattgaagattatacagccctttcggttatgaagtccctgcttgaaggcaatggacctggggaagagactatcacaaaaagtctccattttcattttacatcctctctattggaggcagcacttttccctcatgctgtcctataggactccactttgaaggttgtgcctacgttgcagggaactaggaacatggaggggaaccaacaacagcatcttagaagaaatgtagccaaattggagtccattcttctttagggcagtatatgaaatcctagcagatgtaaaatggaaaagaatcctaatgcttcttccttcagaaagtagaggaactaggggcccaattagcatcatctaggggaatctctattactctgtacttatactaatgtttacaagaatgcaatatactgtgatgccttcctactcaagcctcctagcattcaaacttccatcctattagtcattaacgtggttaaacttcaattcacaatcaccttggaatcaatgtcagtttgatttattttgttacagagcaataaaatcattagaacaatggtttttaaaagacttaagtggatgcatcctatgcatgtaagcattatttcccaaaccaaagcatcattcatctccatttatttcttttgttcccgctcagtgtgaagttgggaactgagaggggatggctgctggtttcacagaagtttggatgccttactcttatcttaaagccagcatccagaatttcctccctctctgatgccacatgcaaaaccaggtgtacgatgtcaagatggattctttgagagccagggtagatcatatgactgcctttctgtaaaattggatgcctagtacaaatgctctttgcctctaattcagtattccatttaataaaaacaatacagtggctggaaaggagcatcag

SEQ ID NO: 1081 - protein, 402 aa, Homo sapien
MIPPSSPREDGVDGLPKEAVGAEQPPSPASTSSQESKLQKLKRSLSFKTKSLRSKSADNFFQRTNSEDMKLQAHMVAEISPSSSPLPAPGSLTSTPARAGLHPGGKAHAFQEYIFKKPTFCDVCNHMIVGTNAKHGLRCKACKMSIHHKCTDGLAPQRCMGKLPKGFRRYYSSPLLIHEQFGCIKEVMPIACGNKVDPVYETLRFGTSLAQRTKKGSSGSGSDSPHRTSTSDLVEVPEEANGPGGGYDLRKRSNSVFTYPENGTDDFRDPAKNINHQGSLSKDPLQMNTYVALYKFVPQENEDLEMRPGDIITLLEDSNEDWWKGKIQDRIGFFPANFVQRLQQNEKIFRCVRTFIGCKEQGQITLKENQICVSSEEEQDGFIRVLSGKKKGLIPLDVLENI

SEQ ID NO: 1082 - DNA, 1618 bp, Homo sapien
gagcgccggcgcgggaccgagctggcggcgggcggcgcgcgcttccgaggcttcctgctgcttctgcccgagcccgcggcctcacgcgcgccctctcccgtgccatggcctgcaggcaggagccgcagccgcagggcccgccgcccgctgctggcgccgtggcctcctatgactacctggtgatcgggggcggctcgggcgggctggccagcgcgcgcagggcggccgagctgggtgccagggccgccgtggtggagagccacaagctgggtggcacttgcgtgaatgttggatgtgtacccaaaaaggtaatgtggaacacagctgtccactctgaattcatgcatgatcatgctgattatggctttccaagttgtgagggtaaattcaattggcgtgttattaaggaaaagcgggatgcctatgtgagccgcctgaatgccatctatcaaaacaatctcaccaagtcccatatagaaatcatccgtggccatgcagccttcacgagtgatcccaagcccacaatagaggtcagtgggaaaaagtacaccgccccacacatcctgatcgccacaggtggtatgccctccacccctcatgagagccagatccccggtgccagcttaggaataaccagcgatggattttttcagctggaagaattgcccggccgcagcgtcattgttggtgcaggttacattgctgtggagatggcagggatcctgtcagccctgggttctaagacatcactgatgatacggcatgataaggtacttagaagttttgattcaatgatcagcaccaactgcacggaggagctggagaacgctggcgtggaggtgctgaagttctcccaggtcaaggaggttaaaaagactttgtcgggcttggaagtcagcatggttactgcagttcccggtaggctaccagtcatgaccatgattccagatgttgactgcctgctctgggccattgggcgggtcccgaataccaaggacctgagtttaaacaaactggggattcaaaccgatgacaagggtcatatcatcgtagacgaattccagaataccaacgtcaaaggcatctatgcagttggggatgtatgtggaaaagctcttcttactccagttgcaatagctgctggccgaaaacttgcccatcgactttttgaatataaggaagattccaaattagattataacaacatcccaactgtggtcttcagccacccccctattgggacagtgggactcacggaagatgaagccattcataaatatggaatagaaaatgtgaagacctattcaacgagctttaccccgatgtatcacgcagttaccaaaaggaaaacaaaatgtgtgatgaaaatggtctgtgctaacaaggaagaaaaggtggttgggatccatatgcagggacttgggtgtgatgaaatgctgcagggttttgctgttgcagtgaagatgggagcaacgaaggcagactttgacaacacagtcgccattcaccctacctcttcagaagagctggtcacacttcgttgagaaccaggagacacgtgtggcgggcagtgggacccatagatcttctgaaatgaaacaaataatcacattgactt

SEQ ID NO: 1083 - protein, 479 aa, Homo sapien
MACRQEPQPQGPPPAAGAVASYDYLVIGGGSGGLASARRAAELGARAAVVESHKLGGTCVNVGCVPKKVMWNTAVHSEFMHDHADYGFPSCEGKFNWRVIKEKRDAYVSRLNAIYQNNLTKSHIEIIRGHAAFTSDPKPTIEVSGKKYTAPHILIATGGMPSTPHESQIPGASLGITSDGFFQLEELPGRSVIVGAGYIAVEMAGILSALGSKTSLMIRHDKVLRSFDSMISTNCTEELENAGVEVLKFSQVKEVKKTLSGLEVSMVTAVPGRLPVMTMIPDVDCLLWAIGRVPNTKDLSLNKLGIQTDDKGHIIVDEFQNTNVKGIYAVGDVCGKALLTPVAIAAGRKLAHRLFEYKEDSKLDYNNIPTVVFSHPPIGTVGLTEDEAIHKYGIENVKTYSTSFTPMYHAVTKRKTKCVMKMVCANKEEKVVGIHMQGLGCDEMLQGFAVAVKMGATKADFDNTVAIHPTSSEELVTLR

SEQ ID NO: 1084 - DNA, 1903 bp, Homo sapien
cagaagcagcaaaccgccggcaagcccagcgaggagggctgccggggtctgggcttgggaattggctggcacccagcggaaagggacgtgagctgagcgcgggggagaagagtgcgcaggtcagagggcggcgcgcagtccgcgaggtccccacgccgggcgatatggggtgcctgctgtttctgctgctctgggcgctcctccaggcttggggaagcgctgaagtcccgcaaaggcttttccccctccgctgcctccagatctcgtccttcgccaatagcagctggacgcgcaccgacggcttggcgtggctgggggagctgcagacgcacagctggagcaacgactcggacaccgtccgctctctgaagccttggtcccagggcacgttcagcgaccagcagtgggagacgctgcagcatatatttcgggtttatcgaagcagcttcaccagggacgtgaaggaattcgccaaaatgctacgcttatcctatcccttggagctccaggtgtccgctggctgtgaggtgcaccctgggaacgcctcaaataacttcttccatgtagcatttcaaggaaaagatatcctgagtttccaaggaacttcttgggagccaacccaagaggccccactttgggtaaacttggccattcaagtgctcaaccaggacaagtggacgagggaaacagtgcagtggctccttaatggcacctgcccccaatttgtcagtggcctccttgagtcagggaagtcggaactgaagaagcaagtgaagcccaaggcctggctgtcccgtggccccagtcctggccctggccgtctgctgctggtgtgccatgtctcaggattctacccaaagcctgtatgggtgaagtggatgcggggtgagcaggagcagcagggcactcagccaggggacatcctgcccaatgctgacgagacatggtatctccgagcaaccctggatgtggtggctggggaggcagctggcctgtcctgtcgggtgaagcacagcagtctagagggccaggacatcgtcctctactggggtgggagctacacctccatgggcttgattgccttggcagtcctggcgtgcttgctgttcctcctcattgtgggctttacctcccggtttaagaggcaaacttcctatcagggcgtcctgtgactcgccttgccacatctgtgtctctggaacccaggacctctggacctcaggttcccaagacttcagtcctggtctgctcaggaattgaagatgtaaggaattgaagataggagagataccttgaaaaagtagagaacagtcatgaggcagctttcatcacacccttttaacatttatctaaaagaatttaaattctttttcaaaaattacactacaagtttataagcccaaatggctctgtgaaatcagaagtgcaaaggtgtgcaaacttgtatctgaagacctaccagggacaagcaggtaagagctgatgtgagtgtgtgtgatgggatctgtaaggaactggaacacacatgtcctatccaaaggaatcagctgcagctgcttgttgtcaagtataaagtcaggacctggcttggctttaaccgtttttcaagaaaactggaaatctggattttcagcgaacatgcctgattttaaaaggttgactcaagtttttacaaaatactatgtgggacacctcaaatacatacctactgactgatgacaaacccaggagtttgtgtgtcttttataaaaagtttgccctggatgtcatattggcagttggaggacacagtttctattgtaaatttggatttacgactgaagaaggacattttctctttaaaagaaagttaggttataagaaacagaggcgtctcacatttttacttggtgtaattaataaa

SEQ ID NO: 1085 - protein, 335 aa, Homo sapien
MGCLLFLLLWALLQAWGSAEVPQRLFPLRCLQISSFANSSWTRTDGLAWLGELQTHSWSNDSDTVRSLKPWSQGTFSDQQWETLQHIFRVYRSSFTRDVKEFAKMLRLSYPLELQVSAGCEVHPGNASNNFFHVAFQGKDILSFQGTSWEPTQEAPLWVNLAIQVLNQDKWTRETVQWLLNGTCPQFVSGLLESGKSELKKQVKPKAWLSRGPSPGPGRLLLVCHVSGFYPKPVWVKWMRGEQEQQGTQPGDILPNADETWYLRATLDVVAGEAAGLSCRVKHSSLEGQDIVLYWGGSYTSMGLIALAVLACLLFLLIVGFTSRFKRQTSYQGVL

SEQ ID NO: 1086 - DNA, 1658 bp, Homo sapien
ctctctctctatctctctcagaatgacaattctaggtacaacttttggcatggttttttctttacttcaagtcgtttctggagaaagtggctatgctcaaaatggagacttggaagatgcagaactggatgactactcattctcatgctatagccagttggaagtgaatggatcgcagcattcactgacctgtgcttttgaggacccagatgtcaacaccaccaatctggaatttgaaatatgtggggccctcgtggaggtaaagtgcctgaatttcaggaaactacaagagatatatttcatcgagacaaagaaattcttactgattggaaagagcaatatatgtgtgaaggttggagaaaagagtctaacctgcaaaaaaatagacctaaccactatagttaaacctgaggctccttttgacctgagtgtcatctatcgggaaggagccaatgactttgtggtgacatttaatacatcacacttgcaaaagaagtatgtaaaagttttaatgcatgatgtagcttaccgccaggaaaaggatgaaaacaaatggacgcatgtgaatttatccagcacaaagctgacactcctgcagagaaagctccaaccggcagcaatgtatgagattaaagttcgatccatccctgatcactattttaaaggcttctggagtgaatggagtccaagttattacttcagaactccagagatcaataatagctcaggggagatggatcctatcttactaaccatcagcattttgagttttttctctgtcgctctgttggtcatcttggcctgtgtgttatggaaaaaaaggattaagcctatcgtatggcccagtctccccgatcataagaagactctggaacatctttgtaagaaaccaagaaaaaatttaaatgtgagtttcaatcctgaaagtttcctggactgccagattcatagggtggatgacattcaagctagagatgaagtggaaggttttctgcaagatacgtttcctcagcaactagaagaatctgagaagcagaggcttggaggggatgtgcagagccccaactgcccatctgaggatgtagtcgtcactccagaaagctttggaagagattcatccctcacatgcctggctgggaatgtcagtgcatgtgacgcccctattctctcctcttccaggtccctagactgcagggagagtggcaagaatgggcctcatgtgtaccaggacctcctgcttagccttgggactacaaacagcacgctgccccctccattttctctccaatctggaatcctgacattgaacccagttgctcagggtcagcccattcttacttccctgggatcaaatcaagaagaagcatatgtcaccatgtccagcttctaccaaaaccagtgaagtgtaagaaacccagactgaacttaccgtgagcgacaaagatgatttaaaagggaagtctagagttcctagtctccctcacagcacagagaagacaaaattagcaaaaccccactacacagtctgcaagattctgaaacattgctttgaccactcttcctgagttcagtggcactcaacatgagtcaagagcatcctgcttctaccatgtggatttggtcacaaggtttaaggtgacccaatgattcagctattt

SEQ ID NO: 1087 - protein, 459 aa, Homo sapien [sequence omitted]

SEQ ID NO: 1088 - DNA, 4204 bp, Homo sapien
gataccctttacactagattagcaggcaaaactatgatggtttgtgatatccatgcttgtagaagtaataagaagaaagggaacacagaagctttattttatagtggagtcctgactctaggccttaataattgcatggttttggagttttcttgaagtacaactaaggacaggtcaccactaggcactaacatcgctgacttgcatgattatggagatggtctatctgatgctgaaaatgtctctagttttttgacaacggctaaataaccatgggatcaagtggccttgggaaagcagcaacattagatgaactgctgtgcacttgcattgagatgtttgatgacaatggagagctggataatagttatttgccaagaatagttctactgatgcaccgatggtatttatcttccactgaattggcagaaaaacttctctgcatgtatcgaaatgccactggagaaagctgcaatgaatttcgattaaagatctgctacttcatgaggtactggattctgaagtttcctgcagagtttaatttggatcttggtttgattcgtatgactgaggaatttcgggaagtagctagtcaactaggatatgaaaaacacgtcagcctcatcgacatatccagcattccttcctatgactggatgagaagagtcacacagaggaaaaaagtatccaagaagggaaaagcctgtctgctgtttgaccatctggagcccattgaattggctgagcacctcacttttctggagcataaatcttttagaaggatctcattcactgattaccaaagctatgtcatccatggctgcctggagaataatccaaccttggaaagatcgattgctttatttaatggaatctctaagtgggtccagttgatggttcttagcaaaccaaccccccagcaaagggcagaagtcatcacaaagtttatcaatgttgcaaagaagctccttcagctcaaaaattttaacaccctgatggcagtggtgggaggcctcagtcatagttccatttcacgcctcaaagagacccattctcatctttcttcagaagttacaaagaactggaatgaaatgacagagttggtctcctccaacggcaattactgcaattaccgcaaggcctttgccgactgcgatggcttcaaaatccccatccttggagtacacttgaaagacttgatagctgtccatgtcattttcccagactggacagaggagaacaaagtgaacattgtgaaaatgcaccagctctccgttaccctgagtgaactagtctccctgcagaatgcctctcaccacttagaacccaacatggatttgatcaacctgctcacgctttccctggacctctatcacactgaagatgatatttacaaactgtcactggtgctggagcctagaaattctaaatcgcctacctcccctacgacgcccaacaagcctgtggtacccctggagtgggcattaggggtgatgccaaagccagaccccacggtcatcaacaagcacataaggaaattagtggagtctgtatttagaaactatgatcacgaccatgatgggtacatttcccaagaggactttgaaagtatagctgccaattttcccttcttggattccttctgtgttctggacaaagatcaggatggcctaattagtaaagatgaaatgatggcttacttcctgagagctaaatcccaactacactgtaaaatgggaccaggatttatccataattttcaggagatgacctatctcaagccaaccttctgcgaacactgtgcgggatttctctggggcataatcaagcaaggatacaaatgcaaagactgtggagccaattgtcacaaacagtgcaaagacctcctggttctggcctgcaggagatttgcccgggcgccctccttgagcagtggtcatgggtcactgcctggaagcccctcgctgcccccagcgcaggatgaggtgtttgagttccctggagtcactgctggacacagggatttagacagcagagccatcacactggttacaggctcttctcgcaagatctctgtgaggctacagagggccaccaccagccaggccacccagactgaacctgtctggtcagaggctggctggggggactcggggtcccacaccttccctaaaatgaaatccaagttccatgacaaagcagcaaaggacaaaggctttgccaaatgggaaaatgagaagcccagggtgcatgctggtgtggatgttgtagaccggggcacggagtttgaacttgaccaggatgaaggagaagagaccagacaggatggtgaggatggctgacttcaggctgcggaaactgaaggcaataatgttggcttttggaaggggcaagacgagaaactctgaagaaagctctgactctcaggaagttatctggaaagatacctggatgtttactgccttgggacactgtgggatctccatgtttggactatgggacagagaattgaccctaactaactatgaactatttatttcctcctcccctacccctagttaagtgccacaaagactgtgttatgtagtcagtacttttctcatgtatctttctctagaccatttatatacgggtgaaatgaaagcttttttgcatgtacttgatactcagtctgtaaactcagactttgctttttttgtgagactatcctttcaatatttttataaacttttgtgtgtgctgtggcagggaacagttaacaaggagtttatttagaggggtttttttcattttttgtttttcttgttttgttttgttttgttttgttcttcttggtgtgctttttggatgggaccagaacttaacattttcctgaggactaggaagctcatcagacactggaatgcagtgattcttctaatgatggtcaactgcaaggagaaactgtttacatccttcccactacacagttgctatgatatgtaacaagtcacacatgtatatatcacacaagtcttaccaattctgcgtcactaggaagctatagcatggtcgtgaaagctctcctaatacttacttaaatagccatggaagaaaattatgcttgtcccttctgactgggttaagccatctttcttaagattcctgaagtagaaatagcaattaagaaattaattcaagttttgacggttaacatttagcagaaaaacaaaccattgaataagctactaggtgaaatgcaaaacaaccatcaatttttttaaactcaataattttgtgaaaaaaaaaaccaccaccaaacttttggttgtaaaagagaacccttgttcccttcctaagaaactgccttccacaattaaagaatactcatagaaagaaaataatcataaatcatatttgattaacatttcatttaagcttttaaaatatcaattttttaaatagctcccatttacccaaaataactagttatgggtctatttcttccatgattagaggagagagaacttgattcaagatactgaaaaatagagctgggactgagcctgtgaatgacaggaatgatctattaccaggtgactagtcggaaactacacagaggtgcactggtctgcatttgggggctaaagtgtatatattccatttaaaatggaatttgtttgtatttggggcagtcttcagtaaagcctttctcctttcttttctccattgaggacagttctgctcagcaaaattgttgagtacctgttctgggcaggtcccacgctatatgcacaaagttaagaaaaacttggtcttagcccttgggagctgacagcccatgggcattaaggcaaagtagttccagtgatttaaaatacggttccaaatacgctaaaaccaacttgtgccaaccagatttacagattggaaatactgcagatgatgtgaagttatcagttggaggagctgtgattaagctggataataagagaacgtgccatctgtaaagcactcagaaggcagccatccctagatgttggtttcatgtatattacactatctactactatccataaatgcaatgatatgcatgttaacaacattaaaaacagcaaacagcaatctaagtacagaaaagctctttgtgtgtttaaaaaaattgaagaaaattcaggaagaaacgtgttaataaacattgtactgttcttttgcttctcaaagg

SEQ ID NO: 1089 - protein, 689 aa, Homo sapien
MGSSGLGKAATLDELLCTCIEMFDDNGELDNSYLPRIVLLMHRWYLSSTELAEKLLCMYRNATGESCNEFRLKICYFMRYWILKFPAEFNLDLGLIRMTEEFREVASQLGYEKHVSLIDISSIPSYDWMRRVTQRKKVSKKGKACLLFDHLEPIELAEHLTFLEHKSFRRISFTDYQSYVIHGCLENNPTLERSIALFNGISKWVQLMVLSKPTPQQRAEVITKFINVAKKLLQLKNFNTLMAVVGGLSHSSISRLKETHSHLSSEVTKNWNEMTELVSSNGNYCNYRKAFADCDGFKIPILGVHLKDLIAVHVIFPDWTEENKVNIVKMHQLSVTLSELVSLQNASHHLEPNMDLINLLTLSLDLYHTEDDIYKLSLVLEPRNSKSPTSPTTPNKPVVPLEWALGVMPKPDPTVINKHIRKLVESVFRNYDHDHDGYISQEDFESIAANFPFLDSFCVLDKDQDGLISKDEMMAYFLRAKSQLHCKMGPGFIHNFQEMTYLKPTFCEHCAGFLWGIIKQGYKCKDCGANCHKQCKDLLVLACRRFARAPSLSSGHGSLPGSPSLPPAQDEVFEFPGVTAGHRDLDSRAITLVTGSSRKISVRLQRATTSQATQTEPVWSEAGWGDSGSHTFPKMKSKFHDKAAKDKGFAKWENEKPRVHAGVDVVDRGTEFELDQDEGEETRQDGEDG

SEQ ID NO: 1090 - DNA, 2058 bp, Homo sapien
gcccagacctatggattgaaagcgtgtgctttacccatctgctgtcttgctccatctgagaccagagccaagatctgcccaggactggaatgctttcccgagtggcttgagttggagcctgggactaggagcagccttattgaggtacaattcatgtgcttgtgggtttggatggcacaatctgtgtctgggctaaggaaagcagacttggcaccaacattaaccctgacagatccaggcatctattccaggaactggaagccaagcgcaacaggtgcttggaggtcatcatgatcagcccagaccccaggccctcccctggcttggcccggtgggctgagagctatgaggccaagtgtgagcgcaggcaagagatccgtgaaagccgccgctgccgtcccaatgtgaccacttgccgccaggtggggaagacgctgaggatccaacagagagagcagctccagagagctcgactgcagcagttcttcaggaggaggaacctggagctagaggagaagggcaaagcgcagcatccccaggccagggagcaagggccctccaggcggccaggacaggtgacaggcaccagctctgaagtctttccagcccagcatcctcctccctcaggcatctgcagggatctgtctgaccacctctcctcacaggctgggggccttcctccacaggacactcccatcaagaagccacccaaacaccaccgtggtactcagacaaaggcagaaggaccaacaattaagaacgatgccagtcagcaaaccaattacggagttgcagttctggataaggaaatcatccagctttctgattacctcaaagaggccctacaaagggagctggtcctaaaacagaaaatggtgattctccaagacctactgtccactctgattcaggcctctgacagctcttggaagggacagcttaatgaagacaaactgaaggggaaactgagatccttagaaaaccagctatacacctgtacccagaaatactccccttggggaatgaaaaaagtactactggagatggaagaccagaaaaacagctatgagcagaaggccaaggagtcactgcagaaagtgctggaggagaaaatgaatgcagagcagcaactacagagcacacagcgatccctggccctggcagagcagaagtgtgaagagtggaggagccagtatgaggctctgaaggaggactggaggacccttgggacccagcacagggagctggagagccaactccacgtgcttcagtccaaactgcagggagcagatagcagggacttacagatgaaccaggccctgcgatttttggaaaatgagcaccagcaactgcaggccaagattgaatgcctgcaaggggacagagacctgtgcagcttggatacccaggacctacaagatcaactaaaaaggtcagaggcagagaaactcaccctggtgaccagagtacagcagttgcagggtttgcttcaaaatcaatccttacagcttcaagaacaggagaaactcttaacaaagaaagatcaggctttgcccgtgtggagtccaaagtccttccctaacgaagtggagcctgagggtacagggaaggagaaagactgggatctcagagaccagctgcaaaagaagactttgcagctccaggccaaggaaaaggagtgcagagaactgcattcagaattagacaacctcagtgacgagtatctctcctgcctgcgtaagctgcagcactgtcgagaagagctgaaccagagccagcagctgcctcccagaaggcaatgtgggcgatggctcccagtgctgatggtggtgattgctgcagcactggcagtgttcctggccaataaagacaacctgatgatctgaataatttgtgacaactgccttgggtgaaaatcagaagcaagcaactcagcgaaaaactcagaaggtttgggtacattacagcttgggttttccaactgacttaggatttctgactttttattaatttcttaacctactgtaaataaacttcacctgaccagattgttcctca

SEQ ID NO: 1091 - protein, 531 aa, Homo sapien
MISPDPRPSPGLARWAESYEAKCERRQEIRESRRCRPNVTTCRQVGKTLRIQQREQLQRARLQQFFRRRNLELEEKGKAQHPQAREQGPSRRPGQVTGTSSEVFPAQHPPPSGICRDLSDHLSSQAGGLPPQDTPIKKPPKHHRGTQTKAEGPTIKNDASQQTNYGVAVLDKEIIQLSDYLKEALQRELVLKQKMVILQDLLSTLIQASDSSWKGQLNEDKLKGKLRSLENQLYTCTQKYSPWGMKKVLLEMEDQKNSYEQKAKESLQKVLEEKMNAEQQLQSTQRSLALAEQKCEEWRSQYEALKEDWRTLGTQHRELESQLHVLQSKLQGADSRDLQMNQALRFLENEHQQLQAKIECLQGDRDLCSLDTQDLQDQLKRSEAEKLTLVTRVQQLQGLLQNQSLQLQEQEKLLTKKDQALPVWSPKSFPNEVEPEGTGKEKDWDLRDQLQKKTLQLQAKEKECRELHSELDNLSDEYLSCLRKLQHCREELNQSQQLPPRRQCGRWLPVLMVVIAAALAVFLANKDNLMI

SEQ ID NO: 1092 - DNA, 2452 bp, Homo sapien
agctgcccgcgtcgcgtgtgtacccccgcgcactgaaggaggtccaccagccctcaccagcccccgcggaccgtgcaatggcccagcgtaagaatgccaagagcagcggcaacagcagcagcagcggctccggcagcggtagcacgagtgcgggcagcagcagccccggggcccggagagagacaaagcatggaggacacaagaatgggaggaaaggcggactctcaggaacttcattcttcacgtggtttatggtgattgcattgctgggcgtctggacatctgtagctgtcgtttggtttgatcttgttgactatgaggaagttctaggaaaactaggaatctatgatgctgatggtgatggagattttgatgtggatgatgccaaagttttattaggacttaaagagagatctacttcagagccagcagtcccgccagaagaggctgagccacacactgagcccgaggagcaggttcctgtggaggcagaaccccagaatatcgaagatgaagcaaaagaacaaattcagtcccttctccatgaaatggtacacgcagaacatgttgagggagaagacttgcaacaagaagatggacccacaggagaaccacaacaagaggatgatgagtttcttatggcgactgatgtagatgatagatttgagaccctggaacctgaagtatctcatgaagaaaccgagcatagttaccacgtggaagagacagtttcacaagactgtaatcaggatatggaagagatgatgtctgagcaggaaaatccagattccagtgaaccagtagtagaagatgaaagattgcaccatgatacagatgatgtaacataccaagtctatgaggaacaagcagtatatgaacctctagaaaatgaagggatagaaatcacagaagtaactgctccccctgaggataatcctgtagaagattcacaggtaattgtagaagaagtaagcatttttcctgtggaagaacagcaggaagtaccaccagaaacaaatagaaaaacagatgatccagaacaaaaagcaaaagttaagaaaaagaagcctaaacttttaaataaatttgataagactattaaagctgaacttgatgctgcagaaaaactccgtaaaaggggaaaaattgaggaagcagtgaatgcatttaaagaactagtacgcaaataccctcagagtccacgagcaagatatgggaaggcgcagtgtgaggatgatttggctgagaagaggagaagtaatgaggtgctacgtggagccatcgagacctaccaagaggtggccagcctacctgatgtccctgcagacctgctgaagctgagtttgaagcgtcgctcagacaggcaacaatttctaggtcatatgagaggttccctgcttaccctgcagagattagttcaactatttcccaatgatacttccttaaaaaatgaccttggcgtgggatacctcttgataggagataatgacaatgcaaagaaagtttatgaagaggtgctgagtgtgacacctaatgatggctttgctaaagtccattatggcttcatcctgaaggcacagaacaaaattgctgagagcatcccatatttaaaggaaggaatagaatccggagatcctggcactgatgatgggagattttatttccacctgggggatgccatgcagagggttgggaacaaagaggcatataagtggtatgagcttgggcacaagagaggacactttgcatctgtctggcaacgctcactctacaatgtgaatggactgaaagcacagccttggtggaccccaaaagaaacgggctacacagagttagtaaagtctttagaaagaaactggaagttaatccgagatgaaggccttgcagtgatggataaagccaaaggtctcttcctgcctgaggatgaaaacctgagggaaaaaggggactggagccagttcacgctgtggcagcaaggaagaagaaatgaaaatgcctgcaaaggagctcctaaaacctgtaccttactagaaaagttccccgagacaacaggatgcagaagaggacagatcaaatattccatcatgcaccccgggactcacgtgtggccgcacacagggcccacaaactgcaggctccgaatgcacctgggcttggtgattcccaaggaaggctgcaagattcgatgtgccaacgagaccaagacctgggaggaaggcaaggtgctcatctttgatgactcctttgagcacgaggtatggcaggatgcctcatctttccggctgatattcatcgtggatgtgtggcatccggaactgacaccacagcagagacgcagccttccagcaatttagcatgaattcatgcaagcttgggaaactctggagagaggctgcctttctggttccatctccttgggtgtgaggatagaatttcgaacaccaagagtcaa

SEQ ID NO: 1093 - protein, 758 aa, Homo sapien
MAQRKNAKSSGNSSSSGSGSGSTSAGSSSPGARRETKHGGHKNGRKGGLSGTSFFTWFMVIALLGVWTSVAVVWFDLVDYEEVLGKLGIYDADGDGDFDVDDAKVLLGLKERSTSEPAVPPEEAEPHTEPEEQVPVEAEPQNIEDEAKEQIQSLLHEMVHAEHVEGEDLQQEDGPTGEPQQEDDEFLMATDVDDRFETLEPEVSHEETEHSYHVEETVSQDCNQDMEEMMSEQENPDSSEPVVEDERLHHDTDDVTYQVYEEQAVYEPLENEGIEITEVTAPPEDNPVEDSQVIVEEVSIFPVEEQQEVPPETNRKTDDPEQKAKVKKKKPKLLNKFDKTIKAELDAAEKLRKRGKIEEAVNAFKELVRKYPQSPRARYGKAQCEDDLAEKRRSNEVLRGAIETYQEVASLPDVPADLLKLSLKRRSDRQQFLGHMRGSLLTLQRLVQLFPNDTSLKNDLGVGYLLIGDNDNAKKVYEEVLSVTPNDGFAKVHYGFILKAQNKIAESIPYLKEGIESGDPGTDDGRFYFHLGDAMQRVGNKEAYKWYELGHKRGHFASVWQRSLYNVNGLKAQPWWTPKETGYTELVKSLERNWKLIRDEGLAVMDKAKGLFLPEDENLREKGDWSQFTLWQQGRRNENACKGAPKTCTLLEKFPETTGCRRGQIKYSIMHPGTHVWPHTGPTNCRLRMHLGLVIPKEGCKIRCANETKTWEEGKVLIFDDSFEHEVWQDASSFRLIFIVDVWHPELTPQQRRSLPAI

SEQ ID NO: 1094 - DNA, 1863 bp, Homo sapien
gggggccaaagggaagtgctgcgaggtttacaaccagctgcagtggttcgatgggaaggatctttctccaagtggttcctcttgaggggagcatttctgctggctccaggactttggccatctataaagcttggcaatgagaaataagaaaattctcaaggaggacgagctcttgagtgagacccaacaagctgcttttcaccaaattgcaatggagcctttcgaaatcaatgttccaaagcccaagaggagaaatggggtgaacttctccctagctgtggtggtcatctacctgatcctgctcaccgctggcgctgggctgctggtggtccaagttctgaatctgcaggcgcggctccgggtcctggagatgtatttcctcaatgacactctggcggctgaggacagcccgtccttctccttgctgcagtcagcacaccctggagaacacctggctcagggtgcatcgaggctgcaagtcctgcaggcccaactcacctgggtccgcgtcagccatgagcacttgctgcagcgggtagacaacttcactcagaacccagggatgttcagaatcaaaggtgaacaaggcgccccaggtcttcaaggccacaagggggccatgggcatgcctggtgcccctggcccgccgggaccacctgctgagaagggagccaagggggctatgggacgagatggagcaacaggcccctcgggaccccaaggcccaccgggagtcaagggagaggcgggcctccaaggaccccagggtgctccagggaagcaaggagccactggcaccccaggaccccaaggagagaagggcagcaaaggcgatgggggtctcattggcccaaaaggggaaactggaactaagggagagaaaggagacctgggtctcccaggaagcaaaggggacaggggcatgaaaggagatgcaggggtcatggggcctcctggagcccaggggagtaaaggtgacttcgggaggccaggcccaccaggtttggctggttttcctggagctaaaggagatcaaggacaacctggactgcagggtgttccgggccctcctggtgcagtgggacacccaggtgccaagggtgagcctggcagtgctggctcccctgggcgagcaggacttccagggagccccgggagtccaggagccacaggcctgaaaggaagcaaaggggacacaggacttcaaggacagcaaggaagaaaaggagaatcaggagttccaggccctgcaggtgtgaagggagaacaggggagcccagggctggcaggtcccaagggagcccctggacaagctggccagaagggagaccagggagtgaaaggatcttctggggagcaaggagtaaagggagaaaaaggtgaaagaggtgaaaactcagtgtccgtcaggattgtcggcagtagtaaccgaggccgggctgaagtttactacagtggtacctgggggacaatttgcgatgacgagtggcaaaattctgatgccattgtcttctgccgcatgctgggttactccaaaggaagggccctgtacaaagtgggagctggcactgggcagatctggctggataatgttcagtgtcggggcacggagagtaccctgtggagctgcaccaagaatagctggggccatcatgactgcagccacgaggaggacgcaggcgtggagtgcagcgtctgacccggaaaccctttcacttctctgctcccgaggtgtcctcgggctcatatgtgggaaggcagaggatctctgaggagttccctggggacaactgagcagcctctggagaggggccattaataaagctcaacatcaaaaaaaaaaaagaaaaaaaaaaaaaaaaa

SEQ ID NO: 1095 - protein, 520 aa, Homo sapien
MRNKKILKEDELLSETQQAAFHQIAMEPFEINVPKPKRRNGVNFSLAVVVIYLILLTAGAGLLVVQVLNLQARLRVLEMYFLNDTLAAEDSPSFSLLQSAHPGEHLAQGASRLQVLQAQLTWVRVSHEHLLQRVDNFTQNPGMFRIKGEQGAPGLQGHKGAMGMPGAPGPPGPPAEKGAKGAMGRDGATGPSGPQGPPGVKGEAGLQGPQGAPGKQGATGTPGPQGEKGSKGDGGLIGPKGETGTKGEKGDLGLPGSKGDRGMKGDAGVMGPPGAQGSKGDFGRPGPPGLAGFPGAKGDQGQPGLQGVPGPPGAVGHPGAKGEPGSAGSPGRAGLPGSPGSPGATGLKGSKGDTGLQGQQGRKGESGVPGPAGVKGEQGSPGLAGPKGAPGQAGQKGDQGVKGSSGEQGVKGEKGERGENSVSVRIVGSSNRGRAEVYYSGTWGTICDDEWQNSDAIVFCRMLGYSKGRALYKVGAGTGQIWLDNVQCRGTESTLWSCTKNSWGHHDCSHEEDAGVECSV

SEQ ID NO: 1096 - DNA, 5097 bp, Homo sapien
ctgcaggaaggagagaggaagaggagcagaagggggcagcagcggacgccgctaacggcctccctcggcgctgacaggctgggccggcgcccggctcgcttgggtgttcgcgtcgccacttcggcttctcggccggtcgggcccctcggcccgggcttgcggcgcgcgtcggggctgagggctgctgcggcgcagggagaggcctggtcctcgctgccgagggatgtgagtgggagctgagcccacactggagggcccccgagggcccagcctggaggtcgttcagagccgtgcccgccccggggcttcgcagaccttgacccgccgggtaggagccgcccctgcgggctcgagggcgcgctctggtcgcccgatctgtgtagccggtttcagaagcaggcaacaggaacaagatgtgaactgtttctcttctgcagaaaaagaggctcttcctcctcctcccgcgacggcaaatgttctgaaaaagactctgcatgggaatggcctgccttacgatgacagaaatggagggaacatccacctcttctatatatcagaatggtgatatttctggaaatgccaattctatgaagcaaatagatccagttcttcaggtgtatctttaccattcccttgggaaatctgaggcagattatctgacctttccatctggggagtatgttgcagaagaaatctgtattgctgcttctaaagcttgtggtatcacacctgtgtatcataatatgtttgctttaatgagtgaaacagaaaggatctggtatccacccaaccatgtcttccatatagatgagtcaaccaggcataatgtactctacagaataagattttactttcctcgttggtattgcagtggcagcaacagagcctatcggcatggaatatctcgaggtgctgaagctcctcttcttgatgactttgtcatgtcttacctctttgctcagtggcggcatgattttgtgcacggatggataaaagtacctgtgactcatgaaacacaggaagaatgtcttgggatggcagtgttagatatgatgagaatagccaaagaaaacgatcaaaccccactggccatctataactctatcagctacaagacattcttaccaaaatgtattcgagcaaagatccaagactatcatattttgacaaggaagcgaataaggtacagatttcgcagatttattcagcaattcagccaatgcaaagccactgccagaaacttgaaacttaagtatcttataaatctggaaactctgcagtctgccttctacacagagaaatttgaagtaaaagaacctggaagtggtccttcaggtgaggagatttttgcaaccattataataactggaaacggtggaattcagtggtcaagagggaaacataaagaaagtgagacactgacagaacaggatttacagttatattgcgattttcctaatattattgatgtcagtattaagcaagcaaaccaagagggttcaaatgaaagccgagttgtaactatccataagcaagatggtaaaaatctggaaattgaacttagctcattaagggaagctttgtctttcgtgtcattaattgatggatattatagattaactgcagatgcacatcattacctctgtaaagaagtagcacctccagccgtgcttgaaaatatacaaagcaactgtcatggcccaatttcgatggattttgccattagtaaactgaagaaagcaggtaatcagactggactgtatgtacttcgatgcagtcctaaggactttaataaatattttttgacttttgctgtcgagcgagaaaatgtcattgaatataaacactgtttgattacaaaaaatgagaatgaagagtacaacctcagtgggacaaagaagaacttcagcagtcttaaagatcttttgaattgttaccagatggaaactgttcgctcagacaatataattttccagtttactaaatgctgtcccccaaagccaaaagataaatcaaaccttctagtcttcagaacgaatggtgtttctgatgtaccaacctcaccaacattacagaggcctactcatatgaaccaaatggtgtttcacaaaatcagaaatgaagatttgatatttaatgaaagccttggccaaggcacttttacaaagatttttaaaggcgtacgaagagaagtaggagactacggtcaactgcatgaaacagaagttcttttaaaagttctggataaagcacacagaaactattcagagtctttctttgaagcagcaagtatgatgagcaagctttctcacaagcatttggttttaaattatggagtatgtgtctgtggagacgagaatattctggttcaggagtttgtaaaatttggatcactagatacatatctgaaaaagaataaaaattgtataaatatattatggaaacttgaagttgctaaacagttggcatgggccatgcattttctagaagaaaacacccttattcatgggaatgtatgtgccaaaaatattctgcttatcagagaagaagacaggaagacaggaaatcctcctttcatcaaacttagtgatcctggcattagtattacagttttgccaaaggacattcttcaggagagaataccatgggtaccacctgaatgcattgaaaatcctaaaaatttaaatttggcaacagacaaatggagttttggtaccactttgtgggaaatctgcagtggaggagataaacctctaagtgctctggattctcaaagaaagctacaattttatgaagataggcatcagcttcctgcaccaaagtgggcagaattagcaaaccttataaataattgtatggattatgaaccagatttcaggccttctttcagagccatcatacgagatcttaacagtttgtttactccagattatgaactattaacagaaaatgacatgttaccaaatatgaggataggtgccctagggttttctggtgcctttgaagaccgggatcctacacagtttgaagagagacatttgaaatttctacagcaacttggcaagggtaattttgggagtgtggagatgtgccggtatgaccctctacaggacaacactggggaggtggtcgctgtaaaaaagcttcagcatagtactgaagagcacctaagagactttgaaagggaaattgaaatcctgaaatccctacagcatgacaacattgtaaagtacaagggagtgtgctacagtgctggtcggcgtaatctaaaattaattatggaatatttaccatatggaagtttacgagactatcttcaaaaacataaagaacggatagatcacataaaacttctgcagtacacatctcagatatgcaagggtatggagtatcttggtacaaaaaggtatatccacagggatctggcaacgagaaatatattggtggagaacgagaacagagttaaaattggagattttgggttaaccaaagtcttgccacaagacaaagaatactataaagtaaaagaacctggtgaaagtcccatattctggtatgctccagaatcactgacagagagcaagttttctgtggcctcagatgtttggagctttggagtggttctgtatgaacttttcacatacattgagaagagtaaaagtccaccagcggaatttatgcgtatgattggcaatgacaaacaaggacagatgatcgtgttccatttgatagaacttttgaagaataatggaagattaccaagaccagatggatgcccagatgagatctatatgatcatgacagaatgctggaacaataatgtaaatcaacgcccctcctttagggatctagctcttcgagtggatcaaataagggataacatggctggatgaaagaaatgaccttcattctgagaccaaagtagatttacagaacaaagttttatatttcacattgctgtggactattattacatatatcattattatataaatcatgatgctagccagcaaagatgtgaaaatatctgctcaaaactttcaaagtttagtaagtttttcttcatgaggccaccagtaaaagacattaatgagaattccttagcaaggattttgtaagaagtttcttaaacattgtctgttaacatcactcttgtctggcaaaagaaaaaaaatagactttttcaactcagctttttgagacctgaaaaaattattatgtaaattttgcaatgttaaagatgcacagaatatgtatgtatagtttttaccacagtggatgtataataccttggcatcttgtgtgatgttttacacacatgagggctggtgttcattaatactgttttctaatttttccatagttaatctataattaattacttcactatacaaacaaattaagatgttcagataattgaataagtacctttgtgtccttgttcatttatatcgctggccagcattataagcaggtgtatacttttagcttgtagttccatgtactgtaaatatttttcacataaagggaacaaatgtctagttttatttgtataggaaatttccctgaccctaaataatacattttgaaatgaaacaagcttacaaagatataatctattttattatggtttcccttgtatctatttgtggtgaatgtgttttttaaatggaactatctccaaatttttctaagactactatgaacagttttcttttaaaattttgagattaagaatgccaggaatattgtcatcctttgagctgctgactgccaataacattcttcgatctctgggatttatgctcatgaactaaatttaagcttaagccataaaatagattagattgttttttaaaaatggatagctcattaagaagtgcagcaggttaagaattttttcctaaagactgtatatttgaggggtttcagaattttgcattgcagtcatagaagagatttatttcctttttagaggggaaatgaggtaaataagtaaaaaagtatgcttgttaattttattcaagaatgccagtagaaaattcataacgtgtatctttaagaaaaatgagcatacatcttaaatcttttcaatta

SEQ ID NO: 1097 - protein, 1132 aa, Homo sapien
MGMACLTMTEMEGTSTSSIYQNGDISGNANSMKQIDPVLQVYLYHSLGKSEADYLTFPSGEYVAEEICIAASKACGITPVYHNMFALMSETERIWYPPNHVFHIDESTRHNVLYRIRFYFPRWYCSGSNRAYRHGISRGAEAPLLDDFVMSYLFAQWRHDFVHGWIKVPVTHETQEECLGMAVLDMMRIAKENDQTPLAIYNSISYKTFLPKCIRAKIQDYHILTRKRIRYRFRRFIQQFSQCKATARNLKLKYLINLETLQSAFYTEKFEVKEPGSGPSGEEIFATIIITGNGGIQWSRGKHKESETLTEQDLQLYCDFPNIIDVSIKQANQEGSNESRVVTIHKQDGKNLEIELSSLREALSFVSLIDGYYRLTADAHHYLCKEVAPPAVLENIQSNCHGPISMDFAISKLKKAGNQTGLYVLRCSPKDFNKYFLTFAVERENVIEYKHCLITKNENEEYNLSGTKKNFSSLKDLLNCYQMETVRSDNIIFQFTKCCPPKPKDKSNLLVFRTNGVSDVPTSPTLQRPTHMNQMVFHKIRNEDLIFNESLGQGTFTKIFKGVRREVGDYGQLHETEVLLKVLDKAHRNYSESFFEAASMMSKLSHKHLVLNYGVCVCGDENILVQEFVKFGSLDTYLKKNKNCINILWKLEVAKQLAWAMHFLEENTLIHGNVCAKNILLIREEDRKTGNPPFIKLSDPGISITVLPKDILQERIPWVPPECIENPKNLNLATDKWSFGTTLWEICSGGDKPLSALDSQRKLQFYEDRHQLPAPKWAELANLINNCMDYEPDFRPSFRAIIRDLNSLFTPDYELLTENDMLPNMRIGALGFSGAFEDRDPTQFEERHLKFLQQLGKGNFGSVEMCRYDPLQDNTGEVVAVKKLQHSTEEHLRDFEREIEILKSLQHDNIVKYKGVCYSAGRRNLKLIMEYLPYGSLRDYLQKHKERIDHIKLLQYTSQICKGMEYLGTKRYIHRDLATRNILVENENRVKIGDFGLTKVLPQDKEYYKVKEPGESPIFWYAPESLTESKFSVASDVWSFGVVLYELFTYIEKSKSPPAEFMRMIGNDKQGQMIVFHLIELLKNNGRLPRPDGCPDEIYMIMTECWNNNVNQRPSFRDLALRVDQIRDNMAG

SEQ ID NO: 1098 - DNA, 466 bp, Homo sapien
accactgctggctttttgctgtagctccacattcctgtgcattgaggggttaacattaggctgggaagatgacaaaacttgaagagcatctggagggaattgtcaatatcttccaccaatactcagttcggaaggggcattttgacaccctctctaagggtgagctgaagcagctgcttacaaaggagcttgcaaacaccatcaagaatatcaaagataaagctgtcattgatgaaatattccaaggcctggatgctaatcaagatgaacaggtcgactttcaagaattcatatccctggtagccattgcgctgaaggctgcccattaccacacccacaaagagtaggtagctctctgaaggctttttacccagcaatgtcctcaatgagggtcttttctttccctcaccaaaacccagccttgcccgtggggagtaagagttaataaacacactcacgaaaagtt

SEQ ID NO: 1099 - protein, 92 aa, Homo sapien
MTKLEEHLEGIVNIFHQYSVRKGHFDTLSKGELKQLLTKELANTIKNIKDKAVIDEIFQGLDANQDEQVDFQEFISLVAIALKAAHYHTHKE

SEQ ID NO: 1100 - DNA, 1717 bp, Homo sapien
agcgggaaaaaaaacttatctgaggttggaaataaagagaaggtgacattggagcggatagaaaggaagaaacggcgtgggatctgggaatgaggcagtgggtggagagagaatggggagacgacagaggatgaagggcagctgagtgtgtctgcgggagaaggaccaaagcaatctgggcggagcaggtggcagaggcagccgcggaggaggcccagggaactgacggggatgctcagccaggcccagaggatgcgccctggcagtcccggaagacaccaggaaaacaagcaggaaccgtagctaggactggggtggccaggcccaggaaatccatgaagggcacagacagcgggtcctgctgccgccgccgatgcgactttggctgctgctgtcgcgcgtcccgccgggctcactacacgccttaccggtccggggacgcgacgcgaacccctcagtccccacggcagaccccgagccgggaaagacggcgcccggagccagccgggagctgggcagcagcggccgaggaggaagaagcagctgcggcggccacaccctggatgagagattattttgcagaggatgatggggagatggtacccagaacgagtcacacagcagcttttcttagtgacactaaagatcgaggccctccagtgcagtcacagatctggagaagtggtgaaaaggtcccgtttgtgcagacatattccttgagagcatttgagaaaccccctcaggtacagacccaggctcttcgagactttgagaagcacctcaatgacctgaagaaggagaacttcagcctcaagctgcgcatctacttcctggaggagcgcatgcaacagaagtatgaggccagccgggaggacatctacaagcggaacactgagctgaaggttgaagtggagagcttgaaacgagaactccaggacaagaaacagcatctggataaaacatgggctgatgtggagaatctcaacagtcagaatgaagctgagctccgacgccagtttgaggagcgacagcaggagacggagcatgtttatgagctcttggagaataagatgcagcttctgcaggaggaatccaggctagcaaagaatgaagctgcgcggatggcagctctggtggaagcagagaaggagtgtaacctggagctctcagagaaactgaagggagtcaccaaaaactgggaagatgtaccaggagaccaggtcaagcccgaccaatacactgaggccctggcccagagggacaagtaggtgccttcggtgctctttttgtcgcttgtcttttgcccattctcaaggcatacagcagctgtcctgttccctttcaaggactgacagtaggagcttcactatttctaagactttatgggcccacaaccgaagacattcttttcagggttgaattttcagtggtatccattatgaaaactcacttcatggattcagtgggcaaatagcggcaagcaagagacatggattcacttattcagcaaacatttactgggcatgccacatgccagataccgggctaagtatctggcatgtgttacagaaacaaaagacctaaatcttgtcaccaagaaacatgttacatgattttaataagttccctgatagaagagcatggggtgctctggggaaatattggagggtcatccattccacattaaaagagcaagttgccaaaaaaaaaaaaaaaa

SEQ ID NO: 1101 - protein, 310 aa, Homo sapien
MKGTDSGSCCRRRCDFGCCCRASRRAHYTPYRSGDATRTPQSPRQTPSRERRRPEPAGSWAAAAEEEEAAAAATPWMRDYFAEDDGEMVPRTSHTAAFLSDTKDRGPPVQSQIWRSGEKVPFVQTYSLRAFEKPPQVQTQALRDFEKHLNDLKKENFSLKLRIYFLEERMQQKYEASREDIYKRNTELKVEVESLKRELQDKKQHLDKTWADVENLNSQNEAELRRQFEERQQETEHVYELLENKMQLLQEESRLAKNEAARMAALVEAEKECNLELSEKLKGVTKNWEDVPGDQVKPDQYTEALAQRDK

SEQ ID NO: 1102 - DNA, 4932 bp, Homo sapien
ggcagggcacacctggattgcattagaatgagactcactacccagttcaggtgtgttgcgttgtgggtctccggcacatttcagaggctgattaggaccctgaccccacactggggtttacacccctaaaagcaggtgtgtcccgtggcaactgagtgggtgcgtgaaaaggggggatcatcaattaccagctggagcaatcgaatcggttaaatgtgaatcaagtcacagtgcttccttaacccaacctctctgttggggtcagccacagcctaaaccgcctgccgttcagcctgagaggctgctgctagcctgctcacgcatgcagcccgggctgcagaggaagtgtggggaggaaggaagtgggtatagaagggtgctgagatgtgggtcttgaagagaatagccataacgtctttgtcactaaaatgttccccaggggccttcggcgagtctttttgtttggttttttgtttttaatctgtggctcttgataatttatctagtggttgcctacacctgaaaaacaagacacagtgtttaactatcaacgaaagaactggacggctccccgccgcagtcccactccccgagtttgtggctggcatttgggccacgccgggctgggcggctcacagcgaggggcgcgcagtttggggtcacacagctccgcttctaggccccaaccaccgttaaaaggggaagcccgtgccccatcaggtccgctcttgctgagcccagagccatcccgcgctctgcgggctgggaggcccgggccagacgcgagtcctgcgcagccgaggttccccagcgccccctgcagccgcgcgtaggcagagacggagcccggccctgcgcctccgcaccacgcccgggaccccacccagcggcccgtacccggagaagcagcgcgagcacccgaagctcccggctcggcggcagaaaccgggagtggggccgggcgagtgcgcggcatcccaggccggcccgaacgtccgcccgcggtgggccgacttcccctcctcttccctctctccttcctttagcccgctggcgccggacacgctgcgcctcatctcttggggcgttcttccccgttggccaaccgtcgcatcccgtgcaactttggggtagtggccgcttagtgttgaatgttccccaccgagagcgcatggcttgggaagcgaggcgcgaacccgggccccgaagccgccgtccgggagacggtgatgctgttgctgtgcctgggggtcccgaccggccgcccctacaacgtggacactgagagcgcgctgctttaccagggcccccacaacacgctgttcggctactcggtcgtgctgcacagccacggggcgaaccgatggctcctagtgggtgcgcccactgccaactggctcgccaacgcttcagtgatcaatcccggggcgatttacagatgcaggatcggaaagaatcccggccagacgtgcgaacagctccagctgggtagccctaatggagaaccttgtggaaagacttgtttggaagagagagacaatcagtggttgggggtcacactttccagacagccaggagaaaatggatccatcgtgacttgtgggcatagatggaaaaatatattttacataaagaatgaaaataagctccccactggtggttgctatggagtgccccctgatttacgaacagaactgagtaaaagaatagctccgtgttatcaagattatgtgaaaaaatttggagaaaattttgcatcatgtcaagctggaatatccagtttttacacaaaggatttaattgtgatgggggccccaggatcatcttactggactggctctctttttgtctacaatataactacaaataaatacaaggcttttttagacaaacaaaatcaagtaaaatttggaagttatttaggatattcagtcggagctggtcattttcggagccagcatactaccgaagtagtcggaggagctcctcaacatgagcagattggtaaggcatatatattcagcattgatgaaaaagaactaaatatcttacatgaaatgaaaggtaaaaagcttggatcgtactttggagcttctgtctgtgctgtggacctcaatgcagatggcttctcagatctgctcgtgggagcacccatgcagagcaccatcagagaggaaggaagagtgtttgtgtacatcaactctggctcgggagcagtaatgaatgcaatggaaacaaacctcgttggaagtgacaaatatgctgcaagatttggggaatctatagttaatcttggcgacattgacaatgatggctttgaagatgttgctatcggagctccacaagaagatgacttgcaaggtgctatttatatttacaatggccgtgcagatgggatctcgtcaaccttctcacagagaattgaaggacttcagatcagcaaatcgttaagtatgtttggacagtctatatcaggacaaattgatgcagataataatggctatgtagatgtagcagttggtgcttttcggtctgattctgctgtcttgctaaggacaagacctgtagtaattgttgacgcttctttaagccaccctgagtcagtaaatagaacgaaatttgactgtgttgaaaatggatggccttctgtgtgcatagatctaacactttgtttctcatataagggcaaggaagttccaggttacattgttttgttttataacatgagtttggatgtgaacagaaaggcagagtctccaccaagattctatttctcttctaatggaacttctgacgtgattacaggaagcatacaggtgtccagcagagaagctaactgtagaacacatcaagcatttatgcggaaagatgtgcgggacatcctcaccccaattcagattgaagctgcttaccaccttggtcctcatgtcatcagtaaacgaagtacagaggaattcccaccacttcagccaattcttcagcagaagaaagaaaaagacataatgaaaaaaacaataaactttgcaaggttttgtgcccatgaaaattgttctgctgatttacaggtttctgcaaagattgggtttttgaagccccatgaaaataaaacatatcttgctgttgggagtatgaagacattgatgttgaatgtgtccttgtttaatgctggagatgatgcatatgaaacgactctacatgtcaaactacccgtgggtctttatttcattaagattttagagctggaagagaagcaaataaactgtgaagtcacagataactctggcgtggtacaacttgactgcagtattggctatatatatgtagatcatctctcaaggatagatattagctttctcctggatgtgagctcactcagcagagcggaagaggacctcagtatcacagtgcatgctacctgtgaaaatgaagaggaaatggacaatctaaagcacagcagagtgactgtagcaatacctttaaaatatgaggttaagctgactgttcatgggtttgtaaacccaacttcatttgtgtatggatcaaatgatgaaaatgagcctgaaacgtgcatggtggagaaaatgaacttaactttccatgttatcaacactggcaatagtatggctcccaatgttagtgtggaaataatggtaccaaattcttttagcccccaaactgataagctgttcaacattttggatgtccagactactactggagaatgccactttgaaaattatcaaagagtgtgtgcattagagcagcaaaagagtgcaatgcagaccttgaaaggcatagtccggttcttgtccaagactgataagaggctattgtactgcataaaagctgatccacattgtttaaatttcttgtgtaattttgggaaaatggaaagtggaaaagaagccagtgttcatatccaactggaaggccggccatccattttagaaatggatgagacttcagcactcaagtttgaaataagagcaacaggttttccagagccaaatccaagagtaattgaactaaacaaggatgagaatgttgcgcatgttctactggaaggactacatcatcaaagacccaaacgttatttcaccatagtgattatttcaagtagcttgctacttggacttattgtacttctgttgatctcatatgttatgtggaaggctggcttctttaaaagacaatacaaatctatcctacaagaagaaaacagaagagacagttggagttatatcaacagtaaaagcaatgatgattaaggacttctttcaaattgagagaatggaaaacagactcaggttgtagtaaagaaatttaaaagacactgtttacaagaaaaaatgaattttgtttggacttcttttactcatgatcttgtgacatattatgtcttcatgcaaggggaaaatctcagcaatgattactctttgagatagaagaactgcaaaggtaataatacagccaaagataatctctcagcttttaaatgggtagagaaacactaaagcattcaatttattcaagaaaagtaagcccttgaagatatcttgaaatgaaagtataactgagttaaattatactggagaagtcttagacttgaaatactacttaccatatgtgcttgcctcagtaaaatgaaccccactgggtgggcagaggttcatttcaaatacatctttgatacttgttcaaaatatgttctttaaaaatataattttttagagagctgttcccaaattttctaacgagtggaccattatcactttaaagccctttatttataatacatttcctacgggctgtgttccaacaaccattttttttcagcagactatgaatattatagtattataggccaaactggcaaacttcagactgaacatgtacactggtttgagcttagtgaaatgacttccggaatct

SEQ ID NO: 1103 - protein, 1038 aa, Homo sapien
MFPTESAWLGKRGANPGPEAAVRETVMLLLCLGVPTGRPYNVDTESALLYQGPHNTLFGYSVVLHSHGANRWLLVGAPTANWLANASVINPGAIYRCRIGKNPGQTCEQLQLGSPNGEPCGKTCLEERDNQWLGVTLSRQPGENGSIVTCGHRWKNIFYIKNENKLPTGGCYGVPPDLRTELSKRIAPCYQDYVKKFGENFASCQAGISSFYTKDLIVMGAPGSSYWTGSLFVYNITTNKYKAFLDKQNQVKFGSYLGYSVGAGHFRSQHTTEVVGGAPQHEQIGKAYIFSIDEKELNILHEMKGKKLGSYFGASVCAVDLNADGFSDLLVGAPMQSTIREEGRVFVYINSGSGAVMNAMETNLVGSDKYAARFGESIVNLGDIDNDGFEDVAIGAPQEDDLQGAIYIYNGRADGISSTFSQRIEGLQISKSLSMFGQSISGQIDADNNGYVDVAVGAFRSDSAVLLRTRPVVIVDASLSHPESVNRTKFDCVENGWPSVCIDLTLCFSYKGKEVPGYIVLFYNMSLDVNRKAESPPRFYFSSNGTSDVITGSIQVSSREANCRTHQAFMRKDVRDILTPIQIEAAYHLGPHVISKRSTEEFPPLQPILQQKKEKDIMKKTINFARFCAHENCSADLQVSAKIGFLKPHENKTYLAVGSMKTLMLNVSLFNAGDDAYETTLHVKLPVGLYFIKILELEEKQINCEVTDNSGVVQLDCSIGYIYVDHLSRIDISFLLDVSSLSRAEEDLSITVHATCENEEEMDNLKHSRVTVAIPLKYEVKLTVHGFVNPTSFVYGSNDENEPETCMVEKMNLTFHVINTGNSMAPNVSVEIMVPNSFSPQTDKLFNILDVQTTTGECHFENYQRVCALEQQKSAMQTLKGIVRFLSKTDKRLLYCIKADPHCLNFLCNFGKMESGKEASVHIQLEGRPSILEMDETSALKFEIRATGFPEPNPRVIELNKDENVAHVLLEGLHHQRPKRYFTIVIISSSLLLGLIVLLLISYVMWKAGFFKRQYKSILQEENRRDSWSYINSKSNDD

SEQ ID NO: 1104 - DNA, 5913 bp, Homo sapien
ggaggctgcatccgactcggtcacaaggaaaatggattcagtttgcatctctccctcctttaaacagcttctccgggtctcagcatgggcttccagggcagcgattgaggagaccttaccaaggagcaccacacagtagatgctgagacatcgtactccaggataagaaacagtaacatggcagcacctgcttgaaagaaattaaaaaccaacagactccatttagaaaggaacaatgtccaagaaagggcgaaataagggcgagaagcccgaggcactcattgttgcccttcaagctgccaatgaagacctcaggaccaagctcacagacattcagatagagctgcatcaagagaagtccaaggtatcaaagcttgaaagagagaagactcaagaagcgaagaggattcgtgagctggagcagcgcaagcacacggtgctggtgacagaactcaaagccaagctccatgaggagaagatgaaggagctgcaggctgtgagggagaaccttatcaagcagcacgagcaggaaatgtcaaggacggtgaaggtacgtgatggagagatccagaggctcaagtctgctctctgtgctctccgcgacggcagcagtgacaaagtaaggacagcgctcaccattgaggcccgggaggaggcccggaaactgtttgacacagagcgccttaagctcttacaggaaattgcggacctgaaaacggccaagaagcaggtggacgaggctctgagcaatatgatccaagcagataaaatcaaggctggggaccttcggagtgagcatcagtcccaccaagaagccatctcgaagatcaagtgggagtcggagcgggatattcggaggctgatggatgaaatcaaagccaaggacaggatcatcttttccctggaaaaggaactggagacccagacaggctatgtacagaaactccaacttcagaaggaggctttggacgaacaactctttctggtcaaggaggctgagtgcaacatgagcagcccaaaacgagaaattccaggaagggcaggtgatggttccgaacactgcagcagtcctgatttgcgaagaaatcaaaagagaatagctgaattgaatgccactataagaaaattagaagacaggaataccttgcttggagatgaacgaaatgaactgttaaaacgtgtgcgggaaaccgaaaagcaatgtaaacctctcctggaaaggaacaagtgcctcgccaagagaaacgatgaactgatggtgtccttgcagcgcatggaagaaaaactaaaagccgttaccaaggaaaattcagaaatgagagaaaaaataacatcccatccacccctgaagaaattaaaatctctgaatgacctcgaccaagctaatgaagaacaagaaacagagtttctaaaacttcaggtcattgagcaacagaacattattgatgagctcacaagggaccgagaaaagctcatccgtagaagaaagcatagaagaagttccaagccaattaagaggcctgttttggacccgtttattggctatgatgaggactctatggattcagagacatcatccatggcctcatttagaacagacagaacaccagctactcctgatgatgacttggatgaaagtttagcagctgaagaatctgaactaagatttcgacaattaacaaaagaatatcaggccctccaaagagcatatgccctcctacaggagcagacgggaggcatcatcgacgctgaacgagaagccaaggctcaagaacagctccaagcagaggtgctaaggtataaagccaaaattgaagacctggaagcgactctggctcagaaagggcagatagaaaaacaggaggcagaaaatcaccggttacaacaagaactacaggacgccagagaccagaatgagctgctggagtttcgaaacctagagctagaagagagagagagacgatcccctccatttaatctccaaattcacccattctcagatggtgtgagtgctctacagatctactgtatgaaagaaggtgttaaggatgtgaacatccctgatctcataaagcagcttgatatcttgggtgataatgggaatttaagaaatgaagaacaagtggccataattcaggccagcactgtgctgtccctggcagagaagtggatccagcagattgaaggagctgaggctgccctacaccagaaaatgatggaattggaaagtgacatggaacagttctgcaaaataaaaggctatctggaggaagaactagactacagaaaacaagctcttgaccaagcatatatgagaatccaggaactagaagctactttgtacaatgctctacagcaagaaactgttatcaagtttggtgaattattaagtgaaaaacagcaagaggagctgaggacggcagtagaaaagttacggcggcaaatgctgaggaagagcagagagtatgactgtcagattcttcaggagagaatggagctcttacagcaagcccatcagagaattcgtgacttagaagataaaacagacatccagaaaagacaaataaaagacttagaagaaaagtttctgtttctattcttgttcttctctcttgcctttattctatggccttgatgtcaaggtgcctcttaaagagtaaccgaaaacatggataagatcccaggaagacaagtgcttctaaaccttcaaagatggcaaaattgtttacaccagtgagagggagatcaaaagctaagaactaccctgtagccaggactacaactgtgtattttaaagccattattcaaggtttcttacttgacagttcctacacaaccctgttgaaaatctacaatatatgctgcatttaatgaaacatgtatatgtcaaatcagaagagaagaactataaacatatattgtgtaaagaaaaagttcagcaatggaactagtttctgcagatcaagcaaagatgtgtcttgggcatggaaccaaagttacaatgaaatattcaacccctgctgtgcaggggggtcattttaatgtaacaccacaccccatggaaacactagtcctgataataaacatcattttaaaagatcaaaacaaacaaacaaaaaaaacaagggtgggtggggagtgaagcacgaggaatacctatgaagagctatttacaataaaatgtttcatttgaaaagtctggtttcttactacagggatttgcttttctgtctttatgattgttttaaactcaggaacagagacatccgcatcgtaaatgggaagaaaaacactctctgttttgtttttctgcaaaaggtggagcttgtggaattcattccacagacgacagatgagaagtggatcacagtgaccataacaaaactggtaacgaagtcaaaggacccgagcgaatgtgacatgtgaaataaaagcagattcgatgcttccttgtcctactctcacatctgcattcctctatcaacaatggactgatctcattcatattgaaaactaagaagatgatactgtaaatcacatgctccctgacttagttctgtttagaacgccaacatctatagggaacatgggccagagagcatctctgaatctttcatttccaaaatactgtttttcaaatggctgcttaaaattgcctgcaaatgaatatgctatatgatttgggcaaaaacacagcagaatcaatgagtaaatttctaccaagagtcgggtttgccacagagatgtgaatattaaactaaactattattttttaaagaatcctcacatgcctagagcattctgacctcttcttgtttagagtgataacattttttcccagacagatgacagcaacaagatagctctacttttttatatggaaataacattatgttactgacaaggtcattttctaccagagacaattagaggactggtacttttcctaagttgtgtattactgagtcttggagtcatctctgagagcaaatgtatgttcctgaaaagctaattttacacctcatttactgtagataacagaacaacctcaatttttcaaatttttgaagttttatttatggggctagaattcccatgcatagagaatatgtgtagggagccagaaattctttctatgaaatgctatacaaatctttccatatgtgggttcactatcatccttcagttttagcactggcatttgcaaagccagaacaataactgaagaatgtacaataaaaactagaatgctggggtcccactttttgttcttacatttactgctgacccaggtatctttggcccagtcacttaacctctctgtgcctcagtttcctcatctgcaaaatggggttaaaatgctttttcataaagttttatttgcaattttagaacaagaggtgcttaaagtagcacaatgtgctttgtaattattacaagtgctgtattatttgactttcttgtgttgttgacaaaaagattccctcatgtaataaaatagtgcttcagtttggttaaatttaagcactatagcactgaagcttgcttatcaagctacttgggacattattagcaataaaaattgagagattcaaaaccaggatctttaataatctataggaaatagatcatctcatgctattgaacaagatagaagagtgtgtcatttctatgataagcatctcccagctctcttgattgcatatgcatgccatcatacagaaccccacttttaccacaggagagccagtcattaaacaaaggcttggagcaaactgacagtatcacataattagcttgattatcttttattctggaggaaagtcaggtggtatgccctactgggaagatacaaaacagactatcctgctgtattcttttttttttttttttgagatggagtcttgctctgttgcccatgctggagtgcattggcacaatctcggctcatggcaagctccgcctcctggattcaagtgattctcctgcctcaacctccctagtagctgggattacaggtgcacaccaccacacctggctaatttttgtatttttagtagagacagggtttcactatgctggtcaggctggtctcgaactcctgacctcaagtgatctgcctgcctcagcctcccaaagtgctaggattacaggtgtaagccactgtgcccggcctcctgctggattctttattcaactaggtaggttccagattaaatatgagccatatgctcattaggcaagaaatgtgaaagagggtgcctctacagtgttggtgacccaacactagccaacttgagtcagaaaatatggaagaagataaattactctcacatatctaagacttttccatttttcttcactttctgttgcagggcccatatgagtaaatctatattccgtctgctccaacacacaccttccttctcttaattttgctttcccacccaccaagaaatttgtaagtcaaaatttatttccatgagtaactatttctaaatgattggaaatttttgaaaaagtggtatggtttatatacctaatctgcttatctgctataagtcatatgagaacaacagctaggatgattgtccaagcagctttagatgtgtttagggccaggcaaaaggtttgcttgttttttctttttgcttaagatctgggagattagcaaatttctcaagactatagactgaactgtaatttttaccaactcttgctcatgagcctcaaaatgaatatatccttgaataaagtataaatatttcaatagatacatctctctattatccattttcacaattataaaagcatcagcaaaattgtggatatgtgttccagtcactcatggatccatggaaatggaccgtgtttaaatgaatgcttcccttggatgggatgttcagcaatagc

SEQ ID NO: 1105 - protein, 799 aa, Homo sapien
MSKKGRNKGEKPEALIVALQAANEDLRTKLTDIQIELHQEKSKVSKLEREKTQEAKRIRELEQRKHTVLVTELKAKLHEEKMKELQAVRENLIKQHEQEMSRTVKVRDGEIQRLKSALCALRDGSSDKVRTALTIEAREEARKLFDTERLKLLQEIADLKTAKKQVDEALSNMIQADKIKAGDLRSEHQSHQEAISKIKWESERDIRRLMDEIKAKDRIIFSLEKELETQTGYVQKLQLQKEALDEQLFLVKEAECNMSSPKREIPGRAGDGSEHCSSPDLRRNQKRIAELNATIRKLEDRNTLLGDERNELLKRVRETEKQCKPLLERNKCLAKRNDELMVSLQRMEEKLKAVTKENSEMREKITSHPPLKKLKSLNDLDQANEEQETEFLKLQVIEQQNIIDELTRDREKLIRRRKHRRSSKPIKRPVLDPFIGYDEDSMDSETSSMASFRTDRTPATPDDDLDESLAAEESELRFRQLTKEYQALQRAYALLQEQTGGIIDAEREAKAQEQLQAEVLRYKAKIEDLEATLAQKGQIEKQEAENHRLQQELQDARDQNELLEFRNLELEERERRSPPFNLQIHPFSDGVSALQIYCMKEGVKDVNIPDLIKQLDILGDNGNLRNEEQVAIIQASTVLSLAEKWIQQIEGAEAALHQKMMELESDMEQFCKIKGYLEEELDYRKQALDQAYMRIQELEATLYNALQQETVIKFGELLSEKQQEELRTAVEKLRRQMLRKSREYDCQILQERMELLQQAHQRIRDLEDKTDIQKRQIKDLEEKFLFLFLFFSLAFILWP

SEQ ID NO: 1106 - DNA, 1733 bp, Homo sapien
gggcaatttgttagttatccgccgccaccaagacgcggcacggcgcctggaccggaggggccccgcgcgggcgcgaactttgggctcgggcgagtgggtggtgctccgcccagcccgagacgggcgggcgcgcgggccaatgggtgccgcctcttggccgcggggggccccgacccgtgggtcccggccaccagcgccccagccccgaggctcagaagcggcaggcggaggcgcggtccgggcgctatggccatgcccggcgggtctcacgcggctgcccctcgcccggcgcgccttcggtagggggcgcccggggcccagctggcccggccatgctgctggagacacaggacgcgctgtacgtggcgctggagctggtcatcgccgcgctttcggtggcgggcaacgtgctggtgtgcgccgcggtgggcacggcgaacactctgcagacgcccaccaactacttcctggtgtccctggctgcggccgacgtggccgtggggctcttcgccatcccctttgccatcaccatcagcctgggcttctgcactgacttctacggctgcctcttcctcgcctgcttcgtgctggtgctcacgcagagctccatcttcagccttctggccgtggcagtcgacagatacctggccatctgtgtcccgctcaggtataaaagtttggtcacggggacccgagcaagaggggtcattgctgtcctctgggtccttgcctttggcatcggattgactccattcctggggtggaacagtaaagacagtgccaccaacaactgcacagaaccctgggatggaaccacgaatgaaagctgctgccttgtgaagtgtctctttgagaatgtggtccccatgagctacatggtatatttcaatttctttgggtgtgttctgcccccactgcttataatgctggtgatctacattaagatcttcctggtggcctgcaggcagcttcagcgcactgagctgatggaccactcgaggaccaccctccagcgggagatccatgcagccaagtcactggccatgattgtggggatttttgccctgtgctggttacctgtgcatgctgttaactgtgtcactcttttccagccagctcagggtaaaaataagcccaagtgggcaatgaatatggccattcttctgtcacatgccaattcagttgtcaatcccattgtctatgcttaccggaaccgagacttccgctacacttttcacaaaattatctccaggtatcttctctgccaagcagatgtcaagagtgggaatggtcaggctggggtacagcctgctctcggtgtgggcctatgatctaggctctcgcctcttccaggagaagatacaaatccacaagaaacaaagaggacacggctggttttcattgtgaaagatagctacacctcacaaggaaatggactgcctctcttgagcacttccctggagctaccacgtatctagctaatatgtatgtgtcagtagtaggctccaaggattgacaaatatatttatgatctattcagctgcttttactgtgtggattatgccaacagcttgaatggattctaacagactcttttgtttttaaaagtctgccttgtttatggtggaaaattactgaaactattttactgtgaaacagtgtgaactattataatgcaaatactttttaacttagaggcaatggaaaaataaaagttgactgtactaaaaatg

SEQ ID NO: 1107 - protein, 332 aa, Homo sapien
MLLETQDALYVALELVIAALSVAGNVLVCAAVGTANTLQTPTNYFLVSLAAADVAVGLFAIPFAITISLGFCTDFYGCLFLACFVLVLTQSSIFSLLAVAVDRYLAICVPLRYKSLVTGTRARGVIAVLWVLAFGIGLTPFLGWNSKDSATNNCTEPWDGTTNESCCLVKCLFENVVPMSYMVYFNFFGCVLPPLLIMLVIYIKIFLVACRQLQRTELMDHSRTTLQREIHAAKSLAMIVGIFALCWLPVHAVNCVTLFQPAQGKNKPKWAMNMAILLSHANSVVNPIVYAYRNRDFRYTFHKIISRYLLCQADVKSGNGQAGVQPALGVGL

SEQ ID NO: 1108 - DNA, 3100 bp, Homo sapien
actcgtctctggtaaagtctgagcaggacagggtggctgactggcagatccagaggttcccttggcagtccacgccaggccttcaccatggatcagttccctgaatcagtgacagaaaactttgagtacgatgatttggctgaggcctgttatattggggacatcgtggtctttgggactgtgttcctgtccatattctactccgtcatctttgccattggcctggtgggaaatttgttggtagtgtttgccctcaccaacagcaagaagcccaagagtgtcaccgacatttacctcctgaacctggccttgtctgatctgctgtttgtagccactttgcccttctggactcactatttgataaatgaaaagggcctccacaatgccatgtgcaaattcactaccgccttcttcttcatcggcttttttggaagcatattcttcatcaccgtcatcagcattgataggtacctggccatcgtcctggccgccaactccatgaacaaccggaccgtgcagcatggcgtcaccatcagcctaggcgtctgggcagcagccattttggtggcagcaccccagttcatgttcacaaagcagaaagaaaatgaatgccttggtgactaccccgaggtcctccaggaaatctggcccgtgctccgcaatgtggaaacaaattttcttggcttcctactccccctgctcattatgagttattgctacttcagaatcatccagacgctgttttcctgcaagaaccacaagaaagccaaagccattaaactgatccttctggtggtcatcgtgtttttcctcttctggacaccctacaacgttatgattttcctggagacgcttaagctctatgacttctttcccagttgtgacatgaggaaggatctgaggctggccctcagtgtgactgagacggttgcatttagccattgttgcctgaatcctctcatctatgcatttgctggggagaagttcagaagatacctttaccacctgtatgggaaatgcctggctgtcctgtgtgggcgctcagtccacgttgatttctcctcatctgaatcacaaaggagcaggcatggaagtgttctgagcagcaattttacttaccacacgagtgatggagatgcattgctccttctctgaagggaatcccaaagccttgtgtctacagagaacctggagttcctgaacctgatgctgactagtgaggaaagatttttgttgttatttcttacaggcacaaaatgatggacccaatgcacacaaaacaaccctagagtgttgttgagaattgtgctcaaaatttgaagaatgaacaaattgaactctttgaatgacaaagagtagacatttctcttactgcaaatgtcatcagaactttttggtttgcagatgacaaaaattcaactcagactagtttagttaaatgagggtggtgaatattgttcatattgtggcacaagcaaaagggtgtctgagccctcaaagtgaggggaaaccagggcctgagccaagctagaattccctctctctgactctcaaatcttttagtcattatagatcccccagactttacatgacacagctttatcaccagagagggactgacacccatgtttctctggccccaagggaaaattcccagggaagtgctctgataggccaagtttgtatcaggtgcccatccctggaaggtgctgttatccatggggaagggatatataagatggaagcttccagtccaatctcatggagaagcagaaatacatatttccaagaagttggatgggtgggtactattctgattacacaaaacaaatgccacacatcacccttaccatgtgcctgatccagcctctcccctgattacaccagcctcgtcttcattaagccctcttccatcatgtccccaaacctgcaagggctccccactgcctactgcatcgagtcaaaactcaaatgcttggcttctcatacgtccaccatggggtcctaccaatagattccccattgcctcctccttcccaaaggactccacccatcctatcagcctgtctcttccatatgacctcatgcatctccacctgctcccaggccagtaagggaaatagaaaaaccctgcccccaaataagaagggatggattccaaccccaactccagtagcttgggacaaatcaagcttcagtttcctggtctgtagaagagggataaggtacctttcacatagagatcatcctttccagcatgaggaactagccaccaactcttgcaggtctcaacccttttgtctgcctcttagacttctgctttccacacctgcactgctgtgctgtgcccaagttgtggtgctgacaaagcttggaagagcctgcaggtgccttggccgcgtgcatagcccagacacagaagaggctggttcttacgatggcacccagtgagcactcccaagtctacagagtgatagccttccgtaacccaactctcctggactgccttgaatatcccctcccagtcaccttgtgcaagcccctgcccatctgggaaaataccccatcattcatgctactgccaacctggggagccagggctatgggagcagcttttttttcccccctagaaacgtttggaacaatgtaaaactttaaagctcgaaaacaattgtaataatgctaaagaaaaagtcatccaatctaaccacatcaatattgtcattcctgtattcacccgtccagaccttgttcacactctcacatgtttagagttgcaatcgtaatgtacagatggttttataatctgatttgttttcctcttaacgttagaccacaaatagtgctcgctttctatgtagtttggtaattatcattttagaagactctaccagactgtgtattcattgaagtcagatgtggtaactgttaaattgctgtgtatctgatagctctttggcagtctatatgtttgtataatgaatgagagaataagtcatgttccttcaagatcatgtaccccaatttacttgccattactcaattgataaacatttaacttgtttccaatgtttagcaaatacatattttatagaacttc

SEQ ID NO: 1109 - protein, 355 aa, Homo sapien
MDQFPESVTENFEYDDLAEACYIGDIVVFGTVFLSIFYSVIFAIGLVGNLLVVFALTNSKKPKSVTDIYLLNLALSDLLFVATLPFWTHYLINEKGLHNAMCKFTTAFFFIGFFGSIFFITVISIDRYLAIVLAANSMNNRTVQHGVTISLGVWAAAILVAAPQFMFTKQKENECLGDYPEVLQEIWPVLRNVETNFLGFLLPLLIMSYCYFRIIQTLFSCKNHKKAKAIKLILLVVIVFFLFWTPYNVMIFLETLKLYDFFPSCDMRKDLRLALSVTETVAFSHCCLNPLIYAFAGEKFRRYLYHLYGKCLAVLCGRSVHVDFSSSESQRSRHGSVLSSNFTYHTSDGDALLLL

SEQ ID NO: 1110 - DNA, 1743 bp, Homo sapien
ggtgttgttccggacacatagaaagataacgacgggaagagcggggcccgctttggggtccaggcaggttttggggcctcctgtctggtgggaggaggccgcagcgcagcaccctgctcgtcacttgggatggagaccggctttcccgcaatcatgtaccctggatcttttattgggggctggggagaagagtatctcagctgggaaggaccggggctcccagatttcgtcttccagcagcagcccgtggagtctgaagcaatgcactgcagcaaccccaagagtggagttgtgctggctacagtggcccgaggtcccgatgcttgtcagatactcaccagagccccgctgggccaggatcccccgcagaggacagtgctagggctgctaactgcaaatgggcagtacaggaggacctgtggccaggggatcacaagaatcaggtgttattctggatcagaaaatgccttccctccagctggaaagaaagcactccctgactgtggggtccaagagccccccaagcaagggtttgacatctacatggatgaactagagcagggggacagagacagctgctcggtcagagaggggatggcatttgaggatgtgtatgaagtagacaccggcacactcaagtcagacctgcacttcctgctggatttcaacacagtttcccctatgctggtagattcatctctcctctcccagtctgaagatatatccagtcttggcacagatgtgataaatgtgactgaatatgctgaagaaatttatcagtaccttagggaagctgaaataaggcacagacccaaagcacactacatgaagaagcagccagacatcacggaaggcatgcgcacgattctggtggactggctggtggaggttggggaagaatataaacttcgagcagagaccctgtatctggctgtcaacttcctggacaggttcctttcatgtatgtctgttctgagagggaaactgcagctcgtaggaacagcagctatgcttttggcttcgaaatatgaagagatatatcctcctgaagtagacgagtttgtctatatcaccgatgatacatacacaaaacgacaactgttaaaaatggaacacttgcttctgaaagttctagcttttgatctgacagtaccaaccaccaaccagtttctccttcagtacttgaggcgacaaggagtgtgcgtcaggactgagaacctggctaagtacgtagcagagctgagtctacttgaagcagatccattcttgaaatatcttccttcactgatagctgcagcagctttttgcctggcaaactatactgtgaacaagcacttttggccagaaacccttgctgcatttacagggtattcattaagtgaaattgtgccttgcctgagtgagcttcataaagcgtaccttgatataccccatcgacctcagcaagcaattagggagaagtacaaggcttcaaagtacctgtgtgtgtccctcatggagccacctgcagttcttcttctacaataagtttctgaatggaagcacttccagaacttcacctccatatcagaagtgccaataatcgtcataggcttctgcacgttggatcaactaatgttgtttacaatatagatgacattttaaaaatgtaaatgaatttagtttcccttagactttagtagtttgtaatatagtccaacattttttaaacaataaactgcttgtcttatgacaaaaaaaaaa

SEQ ID NO: 1111 - protein, 465 aa, Homo sapien
METGFPAIMYPGSFIGGWGEEYLSWEGPGLPDFVFQQQPVESEAMHCSNPKSGVVLATVARGPDACQILTRAPLGQDPPQRTVLGLLTANGQYRRTCGQGITRIRCYSGSENAFPPAGKKALPDCGVQEPPKQGFDIYMDELEQGDRDSCSVREGMAFEDVYEVDTGTLKSDLHFLLDFNTVSPMLVDSSLLSQSEDISSLGTDVINVTEYAEEIYQYLREAEIRHRPKAHYMKKQPDITEGMRTILVDWLVEVGEEYKLRAETLYLAVNFLDRFLSCMSVLRGKLQLVGTAAMLLASKYEEIYPPEVDEFVYITDDTYTKRQLLKMEHLLLKVLAFDLTVPTTNQFLLQYLRRQGVCVRTENLAKYVAELSLLEADPFLKYLPSLIAAAAFCLANYTVNKHFWPETLAAFTGYSLSEIVPCLSELHKAYLDIPHRPQQAIREKYKASKYLCVSLMEPPAVLLLQ

SEQ ID NO: 1112 - DNA, 3969 bp, Homo sapien
gaattccgaaagcaaggagatggccaccaaggagaagctgcagtgtctgaaagatttccacaaggacatggtgaagccctcaccagggaagagcccaggcacgcggcctgaggacgaggctgagggaaaacctccgcagagggagaagtggtctagcaagatcgactttgtgctctctgtggctggcggcttcgtgggcttgggcaacgtctggcgcttcccgtacctctgctacaagaatggtggaggtgcgtttctcataccgtattttattttcctgtttgggagcggcctgcctgtgtttttcttggagatcatcataggccagtacacctctgaagggggcatcacctgctgggaaaagatctgccccttgttctctggtatcggctatgcctccgttgtaattgtgtccctcctgaatgtctactacatcgtcatcctggcctgggccacatactacctgttccagtccttccagaaggagctgccctgggcacactgcaaccacagctggaacacacctcactgcatggaggacaccatgcgcaagaacaagagtgtctggatcaccatcagctccaccaacttcacctcccctgtcatcgagttctgggagcgcaacgtgctgagcttgtcccctggaatcgaccacccaggctctctgaaatgggacctcgctctctgccttcttttagtctggctagtgtgtttcttctgcatctgcaagggcgtcaggtccactgggaaggtcgtctacttcacagccacttttccattcgccatgctcctggtgctgctggtccgagggctgacgctgccgggcgcgggccgaggcatcaagttctatctgtatcctgacatcacccgccttgaggacccacaggtgtggattgacgctgggactcagatattcttctcttatgccatctgcctgggggctatgacctcgctggggagctacaacaagtacaagtataactcgtacagggactgtatgctgctgggatgcctgaacagtggtaccagttttgtgtctggcttcgcaattttttccatcctgggcttcatggcacaagagcaaggggtggacattgctgatgtggctgagtcaggtcctggcctggccttcattgcctacccaaaagctgtgacaatgatgccgctgcccacattttggtccattcttttttttattatgcttctcttgcttggactggatagccagtttgttgaagttgaaggacagatcacatccttggttgatctttacccatccttcctaaggaagggttatcgtcgggaaatcttcatcgccttcgtgtgtagcatcagctacctgctggggctgacgatggtgacggagggtggcatgtatgtgtttcagctctttgactactatgcagctagcggtgtatgccttttgtgggttgcattctttgaatgttttgttattgcctggatatatggaggtgataacctttatgatggtattgaggacatgattggctatcggcccgggccctggatgaagtacagctgggtgatcactccagttctctgtgttggatgtttcatcttctcgctcgtcaagtacgtacccctgacctacaacaaaacatacgtgtccccaacttgggccattgggctgggctggagcctggccctttcctccatgctctgcgttcccttggtcatcgtcatccgcctctgccagactgaggggccgttccttgtgagagtcaagtacctgctgaccccaagggaacccaaccgctgggctgtggagcgcgagggagccacaccttacaactctcgcaccgtcatgaacggcgctctcgtgaaaccgacccacatcattgtggagaccatgatgtgagctctctcgggtcgacggggccggcggctttcctgctgtttactaacattagattcacataggaccaggtttacagagctttatatttgcactaggatttttttttttttgtaattgtcacagaaaatgtaattgtgggtatgtgtgcgtgcgtgtgtgtgtgtgtgtgtgtgtatcgtgtgtgtgtgttttgttttgatttgggggatattttgtacaaaaagaaaacccacgggaagatgtccgtggagaggcagagctttcatactgaattagatgtattttatgggaatttggtaaatttttctttgtatttttttttttacatataagtatatatacacttagagattgtcatatacttttaccacttgaattgatcttcttgccagcaatagatctcattttcaaaagcaattcttcggtgctgtgtagctggcagaaagttctgtccagtaaacgcaggatggaattttcctgggactctacacccatcttaaggtggtataccttccaaatcctggttcagatggaagaaatagcaggagagaggacccattagctggcagacccaggggaagaaaggagggctgtgaggagatacctcattaaacttggcttagtgaagaagagagatgccaaaggaatgaaccaacccttcacataaaggagactggctgaagctgaatgaggaggccctatagcagaagtctgattctaagagcagtagaaacttgtaccagaagcaaaatcccacttttaattttgagatggtgagtggatagtcagtagaccgtcagaaccactggccagagagggagctgctagagatccaagaaggctggcaggaatgaggctcacaactcagcctcgcaagaggtggcagaggcacaggaggccacagtccttcctggggcattccaggcagagaaggagcagaggctctcccggcaggagctggggtctcagggctcagatgagtctgttgcatttgaatggggtcatagcaggttctggtcattccccaagcaacatctcagcatctcttaaagttgcctgcaggaatgaagcatgacatacctgttgagggactaggggagtggtggggaggtgagtggaccaaaggatataggccccaggcatgcagatgggcccggtgtcggggaggggtgctttctttcctcatctccccactccccactctcagcctgggagactcctgccaagccctcattaaagatgccaccctgggctgccctggcacctagcaaggcacaccaagaacagcttttgagtcgtatcctccactggggaagtgctcccagttcagaacaagggcagcccgtggtgctgacctaggatataacaaagctcttcacttcaaaacccctgcaatagctgggtttacagacatttaccacctggggacccaaaagagaaggcctaggagagttttctagaaggttgggattgtcagggtcctggccccccagaactggcttgatcaagggccttatgtggagcagaggttgtctctgaaccaggagagaaggtactatacctttcaaatccccagggcagacacacccccacccagcccctatttggacctaaactgtgccatttgaacagtcacttccaagctcagtctaaatgaaaccgaaacgtgaccacgcacaaaggcagtcactgctcgaggggtgcagaccgcagaattttcacagcaggggctcttggaactctggaaacccccttcttaaatttgggaggaggagtatgcctttggtgtccccctcccaagggcaattctgaaccccatctttggcaggcatacatatttcactgtttccaaagctatctactctgccaaacaacacccagtcctattccaaactctcaacgattctatcttgttcctgtttttctatgtatttatggttgccgtttgtgtctgatttgattttactgttttttccctgattttatggagtagcattgtgacctgttttcctttgtcttatataactttagtaaactaaccactgtcaatgattgagggcaggtggcacgtggggaagagggcggaattc

SEQ ID NO: 1113 - protein, 619 aa, Homo sapien
MATKEKLQCLKDFHKDMVKPSPGKSPGTRPEDEAEGKPPQREKWSSKIDFVLSVAGGFVGLGNVWRFPYLCYKNGGGAFLIPYFIFLFGSGLPVFFLEIIIGQYTSEGGITCWEKICPLFSGIGYASVVIVSLLNVYYIVILAWATYYLFQSFQKELPWAHCNHSWNTPHCMEDTMRKNKSVWITISSTNFTSPVIEFWERNVLSLSPGIDHPGSLKWDLALCLLLVWLVCFFCICKGVRSTGKVVYFTATFPFAMLLVLLVRGLTLPGAGRGIKFYLYPDITRLEDPQVWIDAGTQIFFSYAICLGAMTSLGSYNKYKYNSYRDCMLLGCLNSGTSFVSGFAIFSILGFMAQEQGVDIADVAESGPGLAFIAYPKAVTMMPLPTFWSILFFIMLLLLGLDSQFVEVEGQITSLVDLYPSFLRKGYRREIFIAFVCSISYLLGLTMVTEGGMYVFQLFDYYAASGVCLLWVAFFECFVIAWIYGGDNLYDGIEDMIGYRPGPWMKYSWVITPVLCVGCFIFSLVKYVPLTYNKTYVSPTWAIGLGWSLALSSMLCVPLVIVIRLCQTEGPFLVRVKYLLTPREPNRWAVEREGATPYNSRTVMNGALVKPTHIIVETMM

SEQ ID NO: 1114 - DNA, 2034 bp, Homo sapien
aaaccttggccatggtcacttcctcttttccaatctctgtggcagtttttgccctaataaccctgcaggttggtactcaggacagttttatagctgcagtgtatgaacatgctgtcattttgccaaataaaacagaaacaccagtttctcaggaggatgccttgaatctcatgaacgagaatatagacattctggagacagcgatcaagcaggcagctgagcagggtgctcgaatcattgtgactccagaagatgcactttatggatggaaatttaccagggaaactgttttcccttatctggaggatatcccagaccctcaggtgaactggattccgtgtcaagacccccacagatttggtcacacaccagtacaagcaagactcagctgcctggccaaggacaactctatctatgtcttggcaaatttgggggacaaaaagccatgtaattcccgtgactccacatgtcctcctaatggctactttcaatacaataccaatgtggtgtataatacagaaggaaaactcgtggcacgttaccataagtaccacctgtactctgagcctcagtttaatgtccctgaaaagccggagttggtgactttcaacaccgcatttggaaggtttggcattttcacgtgctttgatatattcttctatgatcctggtgttaccctggtgaaagatttccatgtggacaccatactgtttcccacagcttggatgaacgttttgccccttttgacagctattgaattccattcagcttgggcaatgggaatgggagttaatcttcttgtggccaacacacatcatgtcagcctaaatatgacaggaagtggtatttatgcaccaaatggtcccaaagtgtatcattatgacatgaagacagagttgggaaaacttctcctttcagaggtggattcacatcccctatcctcgcttgcctacccaacagctgttaattggaatgcctacgccaccaccatcaaaccatttccagtacagaaaaacactttcaggggatttatttccagggatgggttcaacttcacagaactttttgaaaatgcaggaaaccttacagtctgtcaaaaggagctttgctgtcatttaagctacagaatgttacaaaaagaagagaatgaagtatacgttctaggagcttttacaggattacatggccgaaggagaagagagtactggcaggtctgcacaatgctgaagtgcaaaactactaatttgacaacttgtggacggccagtagaaactgcttctacaagatttgaaatgttctccctcagtggcacatttggaacagagtatgtttttcctgaagtgctacttaccgaaattcatctgtcacctggaaaatttgaggtgctgaaagatgggcgtttggtaaacaagaatggatcatctgggcctatactaacagtgtcactctttgggaggtggtacacaaaggactcactttacagctcatgtgggaccagcaattcagcaataacttacctgctaatattcatattattaatgatcatagctttgcaaaatattgtaatgttatagggcgtctctttatcactcagcttctgcatcatatgcttggctgaatgtgtttatcggcttcccaagtttactaagaaactttgaagggctatttcagtagtatagaccagtgagtcctaaatattttttctcatcaataattattttttaagtattatgataatgttgtccatttttttggctactctgaaatgttgcagtgtggaacaatggaaagagcctgggtgtttgggtcagataaatgaagatcaaactccagctccagcctcatttgcttgagactttgtgtgtatgggggacttgtatgtatgggagtgaggagtttcagggccattgcaaacatagctgtgcccttgaagagaatagtaatgatgggaatttagaggtttatgactgaattccctttgacattaaagactatttgaattcaaaaaaaaaaaaaaaaaaaaaaaaaaaaaaa

SEQ ID NO: 1115 - protein, 520 aa, Homo sapien
MVTSSFPISVAVFALITLQVGTQDSFIAAVYEHAVILPNKTETPVSQEDALNLMNENIDILETAIKQAAEQGARIIVTPEDALYGWKFTRETVFPYLEDIPDPQVNWIPCQDPHRFGHTPVQARLSCLAKDNSIYVLANLGDKKPCNSRDSTCPPNGYFQYNTNVVYNTEGKLVARYHKYHLYSEPQFNVPEKPELVTFNTAFGRFGIFTCFDIFFYDPGVTLVKDFHVDTILFPTAWMNVLPLLTAIEFHSAWAMGMGVNLLVANTHHVSLNMTGSGIYAPNGPKVYHYDMKTELGKLLLSEVDSHPLSSLAYPTAVNWNAYATTIKPFPVQKNTFRGFISRDGFNFTELFENAGNLTVCQKELCCHLSYRMLQKEENEVYVLGAFTGLHGRRRREYWQVCTMLKCKTTNLTTCGRPVETASTRFEMFSLSGTFGTEYVFPEVLLTEIHLSPGKFEVLKDGRLVNKNGSSGPILTVSLFGRWYTKDSLYSSCGTSNSAITYLLIFILLMIIALQNIVML

SEQ ID NO: 1116 - DNA, 4565 bp, Homo sapien
gaattccgggcagcatcatcaaggcacatagattctctctttgaacaatgcagctgctgcaggggatggggaagggatggcactggcaattcaagactgcctttcctacttcttcagtgcctctttcaccaatatgaagttaaaaccaggatccttcaaaccaaaaatgtggtggaagaaagaaaaccgtgtctttcagcagcatgccatcggaaaagaaaattagcagtgcaaatgactgcatcagcttcatgcaagctggctgtgagttgaagaaagtccggccaaattctcgcatttacaaccgttttttcactctggacacagaccttcaagctcttcgctgggaaccttcaaagaaagacctcgagaaagccaagcttgatatttctgccataaaagagatcagactggggaaaaacacggaaacatttacaaacaatggccttgctgaccagatctgtgaggactgtgccttttccatactccacggggaaaactatgagtctctggacctagttgccaattcagcagatgtggcaaacatctgggtgtctgggttacggtacctggtttctcgaagtaagcagcctcttgattttatggagggcaaccagaacacaccacggttcatgtggttgaaaacagtgtttgaagcagcagatgttgatgggaatgggattatgttggaagacacctctgtagagttaataaaacaactcaaccctactctgaaggaagccaagatcaggttaaagtttaaagaaatccagaagagcaaggaaaaactaaccacccgcgtgaccgaagaggaattttgtgaagctttttgtgaactttgcaccaggccagaagtgtatttcttacttgtacagatatctaaaaacaaagaatatttggatgccaatgatctcatgctctttttagaagctgagcaaggagtcacccatatcaccgaggatatatgcttagacatcataaggagatacgaactttctgaagagggacgtcaaaaagggtttcttgcaattgatggctttacccagtatttattgtcatcagaatgtgacatttttgatcctgagcaaaagaaggttgcccaagatatgacccagccattatctcactactatatcaatgcctctcataacacctatctaatagaagaccagttcagggggccagctgacatcaatgggtacattagagctttgaaaatgggctgtcgaagcgttgaactcgatgtaagtgatggttcagataatgaaccaatcctttgtaatcgaaataacatgacaacccatgtttcctttcgaagtgtcatagaggtaataaataaatttgcctttgttgcttctgaatacccactcattctttgcttgggaaatcactgctccttgccgcagcagaaggtaatggctcaacagatgaaaaaggtctttggcaataaactctatactgaagcacctttgccctcagaatcctacctcccatcaccagaaaaattaaaaagaatgatcattgtgaaaggaaagaagttgccttctgatccagatgtgttagaaggagaagtaacagatgaagatgaagaagctcaaatgtctcgaaggatgtcggtagattacaatggtgagcagaagcaaatccgactctgtagggagctctctgatttggtgtctatttgtaaatctgttcaatacagggattttgaactatctatgaaaagccaaaactattgggaaatgtgttcatttagtgaaacagaggccagccgcattgcaaatgagtacccagaggattttgttaattataataagaagttcttatcaagaatctatccaagtgccatgaggatcgattccagtaacttgaatccacaggacttttggaattgtggctgtcagattgtagcaatgaattttcagactccgggtccaatgatggaccttcacacgggctggtttcttcaaaacgggggatgtggttatgttctaaggccgtctataatgcgagatgaagtttcttacttcagcgcaaatacaaagggcattctacctggggtgtctcctctagctcttcatatcaagatcatcagtggtcagaatttcccaaagcccaagggagcttgtgccaaaggggatgtcatagatccctatgtttgtatagagatacacggaattccagcggattgttcggaacaaagaactaaaactgtacagcaaaacagtgataatcctatttttgatgaaacttttgagttccaagtaaacctacctgagctggccatgatccgttttgttgttctggatgatgactacattggggatgagtttatagggcaatatacgataccatttgaatgtttgcagcctggatatcggcatgttcccctgcgttcttttgtgggtgacatcatggagcacgtaaccctttttgtccacatagcaataactaatcgaagtggaggaggaaaggcacagaagcgcagtctttcagtgagaatggggaagaaagttcgggaatataccatgctcaggaatatcggtcttaaaaccattgatgacatctttaaaatagcggttcatccattacgagaagccatagatatgagagaaaatatgcagaatgcaatcgtgtctattaaggaactatgtggactccctccaattgccagtctgaagcagtgcctgttaactctgtcatctcggctcatcaccagtgacaatactccttcagtctcacttgtgatgaaagacagctttccttacctggagcctctgggtgcaattccagatgtgcagaaaaagatgctgactgcttatgatctgatgattcaagagagccggtttctcatagaaatggcggacacagtccaggaaaagattgtacagtgtcagaaagcagggatggagttccatgaagaacttcataatttgggggcaaaagaaggcttgaagggaagaaaactcaacaaagcaactgagagctttgcttggaacattacagtattgaagggccaaggagatctgttgaagaatgccaagaatgaagctatagaaaacatgaagcagatccagctggcatgcctgtcctgtggactgagtaaagcccccagcagcagtgctgaggccaagagcaagcgcagcctggaagccatagaggagaaggaaagtagtgaggagaatgggaagctgtgactctgggcattatcgacacgttcacccatcttatcaaggactctggtttctcattcttgttttctttctttaaatgttttataagttcacaaaatggtgccctatatggggtattggacatagatattttcacaatgtcagtatttcagtgtagttaatttatctaaattaaagcctttagtatcagtgttttaaattctgagacatgtgtcaacacccctgtgtggatgcctgtggaagagtgtgtgtgtgtgtgtgtgtgtgtgtgtgtgtgtgtgtggcagagagagagaaagagagagagagaaattctgttaaaatctattctgtgttgcattattcatttagtgagttattccttgatcattttgggacaattgttttaatctgaaattctaaagagcacttactgtaacctgttgctgtgtttaatttgacttctctgcctttgacatttaatttagtgatcttagcatagcttattattgaaggaagccaaatttatcaaagcatacatgttttggtagattaaatatagattagaaaaattcctaagaatcagagtagaaataaaagtgaatgaaagattaaacagatgatgagaatttctaaaaagattagcaaggtcatttcttcagtcagaaaactttaaaaaatatttattaaataaaatcaatttttaggaagttttctgtagtcatttactaaacatatgatttcactagaaaagctgatcataagtgaatttatacctacctgtgtggctactctgaaacacactgaaagctctgttgcaattaggatttgatgtgacataatattgttgtataatttcgagatttgtaggaaggtctcattcttccaagctgagagtctagcactcattttctataacagatatggcagcttagaggtgttggctttgtttggatgtaattttaggggtactaaaatttaaaatttaaagataattgttcaacaatatcatatcatcacattgagctgatataaattctgtgggtccgataatatctttgtgataatttaagagctaaccagttaccacacatctatgatataaccctaacacacacagaaagcatacatgcaaaaagaaatgactaattagggtacatttataattgcatctaggtaatttttaccctaatgtcttcataaagtacttgagtgtaatgtttgttacctccaacagaactaaatgttctatggttatgaaagaatatatttatttaaagcattgcttttattttgaaaagcttcttaattaatttgattaacaaatatgctaatttggggaaacctagagaagataattgttgaaattttgcaaatataaacatctcctat

SEQ ID NO: 1117 - protein, 997 aa, Homo sapien
MPSEKKISSANDCISFMQAGCELKKVRPNSRIYNRFFTLDTDLQALRWEPSKKDLEKAKLDISAIKEIRLGKNTETFTNNGLADQICEDCAFSILHGENYESLDLVANSADVANIWVSGLRYLVSRSKQPLDFMEGNQNTPRFMWLKTVFEAADVDGNGIMLEDTSVELIKQLNPTLKEAKIRLKFKEIQKSKEKLTTRVTEEEFCEAFCELCTRPEVYFLLVQISKNKEYLDANDLMLFLEAEQGVTHITEDICLDIIRRYELSEEGRQKGFLAIDGFTQYLLSSECDIFDPEQKKVAQDMTQPLSHYYINASHNTYLIEDQFRGPADINGYIRALKMGCRSVELDVSDGSDNEPILCNRNNMTTHVSFRSVIEVINKFAFVASEYPLILCLGNHCSLPQQKVMAQQMKKVFGNKLYTEAPLPSESYLPSPEKLKRMIIVKGKKLPSDPDVLEGEVTDEDEEAQMSRRMSVDYNGEQKQIRLCRELSDLVSICKSVQYRDFELSMKSQNYWEMCSFSETEASRIANEYPEDFVNYNKKFLSRIYPSAMRIDSSNLNPQDFWNCGCQIVAMNFQTPGPMMDLHTGWFLQNGGCGYVLRPSIMRDEVSYFSANTKGILPGVSPLALHIKIISGQNFPKPKGACAKGDVIDPYVCIEIHGIPADCSEQRTKTVQQNSDNPIFDETFEFQVNLPELAMIRFVVLDDDYIGDEFIGQYTIPFECLQPGYRHVPLRSFVGDIMEHVTLFVHIAITNRSGGGKAQKRSLSVRMGKKVREYTMLRNIGLKTIDDIFKIAVHPLREAIDMRENMQNAIVSIKELCGLPPIASLKQCLLTLSSRLITSDNTPSVSLVMKDSFPYLEPLGAIPDVQKKMLTAYDLMIQESRFLIEMADTVQEKIVQCQKAGMEFHEELHNLGAKEGLKGRKLNKATESFAWNITVLKGQGDLLKNAKNEAIENMKQIQLACLSCGLSKAPSSSAEAKSKRSLEAIEEKESSEENGKL

SEQ ID NO: 1118 - DNA, 3319 bp, Homo sapien
ggcggtcccctgttctccccgctcaggtgcggcgctgtggcaggaagccaccccctcggtcggccggtgcgcggggctgttgcgccatccgctccggctttcgtaaccgcaccctgggacggcccagagacgctccagcgcgagttcctcaaatgttttcctgcgttgccaggaccgtccgccgctctgagtcatgtgcgagtgggaagtcgcactgacactgagccgggccagagggagaggagccgagcgcggcgcggggccgagggactcgcagtgtgtgtagagagccgggctcctgcggatgggggctgcccccggggcctgagcccgcctgcccgcccaccgccccgccccgcccctgccacccctgccgcccggttcccattagcctgtccgcctctgcgggaccatggagtggtagccgaggaggaagcatgctggccgtcggctgcgcgctgctggctgccctgctggccgcgccgggagcggcgctggccccaaggcgctgccctgcgcaggaggtggcaagaggcgtgctgaccagtctgccaggagacagcgtgactctgacctgcccgggggtagagccggaagacaatgccactgttcactgggtgctcaggaagccggctgcaggctcccaccccagcagatgggctggcatgggaaggaggctgctgctgaggtcggtgcagctccacgactctggaaactattcatgctaccgggccggccgcccagctgggactgtgcacttgctggtggatgttccccccgaggagccccagctctcctgcttccggaagagccccctcagcaatgttgtttgtgagtggggtcctcggagcaccccatccctgacgacaaaggctgtgctcttggtgaggaagtttcagaacagtccggccgaagacttccaggagccgtgccagtattcccaggagtcccagaagttctcctgccagttagcagtcccggagggagacagctctttctacatagtgtccatgtgcgtcgccagtagtgtcgggagcaagttcagcaaaactcaaacctttcagggttgtggaatcttgcagcctgatccgcctgccaacatcacagtcactgccgtggccagaaacccccgctggctcagtgtcacctggcaagacccccactcctggaactcatctttctacagactacggtttgagctcagatatcgggctgaacggtcaaagacattcacaacatggatggtcaaggacctccagcatcactgtgtcatccacgacgcctggagcggcctgaggcacgtggtgcagcttcgtgcccaggaggagttcgggcaaggcgagtggagcgagtggagcccggaggccatgggcacgccttggacagaatccaggagtcctccagctgagaacgaggtgtccacccccatgcaggcacttactactaataaagacgatgataatattctcttcagagattctgcaaatgcgacaagcctcccagtgcaagattcttcttcagtaccactgcccacattcctggttgctggagggagcctggccttcggaacgctcctctgcattgccattgttctgaggttcaagaagacgtggaagctgcgggctctgaaggaaggcaagacaagcatgcatccgccgtactctttggggcagctggtcccggagaggcctcgacccaccccagtgcttgttcctctcatctccccaccggtgtcccccagcagcctggggtctgacaatacctcgagccacaaccgaccagatgccagggacccacggagcccttatgacatcagcaatacagactacttcttccccagatagctggctgggtggcaccagcagcctggaccctgtggatgacaaaacacaaacgggctcagcaaaagatgcttctcactgccatgccagcttatctcaggggtgtgcggcctttggcttcacggaagagccttgcggaaggttctacgccaggggaaaatcagcctgctccagctgttcagctggttgaggtttcaaacctccctttccaaatgcccagcttaaaggggttagagtgaacttgggccactgtgaagagaaccatatcaagactctttggacactcacacggacactcaaaagctgggcaggttggtgggggcctcggtgtggagaagcggctggcagcccacccctcaacacctctgcacaagctgcaccctcaggcaggtgggatggatttccagccaaagcctcctccagccgccatgctcctggcccactgcatcgtttcatcttccaactcaaactcttaaaacccaagtgcccttagcaaattctgtttttctaggcctggggacggcttttacttaaacgccaaggcctgggggaagaagctctctcctccctttcttccctacagttcaaaaacagctgagggtgagtgggtgaataatacagtatgtcagggcctggtcgttttcaacagaattataattagttcctcattagcagttttgcctaaatgtgaatgatgatcctaggcatttgctgaatacagaggcaactgcattggctttgggttgcaggacctcaggtgagaagcagaggaaggagaggagaggggcacagggtctctaccatcccctgtagagtgggagctgagtgggggatcacagcctctgaaaaccaatgttctctcttctccacctcccacaaaggagagctagcagcagggagggcttctgccatttctgagatcaaaacggttttactgcagctttgtttgttgtcagctgaacctgggtaactagggaagataatattaaggaagacaatgtgaaaagaaaaatgagcctggcaagaatgcgtttaaacttggtttttaaaaaactgctgactgttttctcttgagagggtggaatatccaatattcgctgtgtcagcatagaagtaacttacttaggtgtgggggaagcaccataactttgtttagcccaaaaccaagtcaagtgaaaaaggaggaagagaaaaaatattttcctgccaggcatggaggcccacgcacttcgggaggtcgaggcaggaggatcacttgagtccagaagtttgagatcagcctgggcaatgtgataaaaccccatctctacaaaaagcataaaaattagccaagtgtggtagagtgtgcctgaagtcccagatacttggggggctgaggtgggaggatctcttgagcctgggaggtcaaggctgcagtgagccgagattgcaccactgcactccagcctggggtgacagagcaagtgagaccctgtctc

SEQ ID NO: 1119 - protein, 468 aa, Homo sapien
MLAVGCALLAALLAAPGAALAPRRCPAQEVARGVLTSLPGDSVTLTCPGVEPEDNATVHWVLRKPAAGSHPSRWAGMGRRLLLRSVQLHDSGNYSCYRAGRPAGTVHLLVDVPPEEPQLSCFRKSPLSNVVCEWGPRSTPSLTTKAVLLVRKFQNSPAEDFQEPCQYSQESQKFSCQLAVPEGDSSFYIVSMCVASSVGSKFSKTQTFQGCGILQPDPPANITVTAVARNPRWLSVTWQDPHSWNSSFYRLRFELRYRAERSKTFTTWMVKDLQHHCVIHDAWSGLRHVVQLRAQEEFGQGEWSEWSPEAMGTPWTESRSPPAENEVSTPMQALTTNKDDDNILFRDSANATSLPVQDSSSVPLPTFLVAGGSLAFGTLLCIAIVLRFKKTWKLRALKEGKTSMHPPYSLGQLVPERPRPTPVLVPLISPPVSPSSLGSDNTSSHNRPDARDPRSPYDISNTDYFFPR

SEQ ID NO: 1120 - DNA, 3299 bp, Homo sapien
ccacgcgtccgtgcttttccacagaaggttagaccctgaaagagatggctcagcaccacctatggatcttgctcctttgcctgcaaacctggccggaagcagctggaaaagactcagaaatcttcacagtgaatgggattctgggagagtcagtcactttccctgtaaatatccaagaaccacggcaagttaaaatcattgcttggacttctaaaacatctgttgcttatgtaacaccaggagactcagaaacagcacccgtagttactgtgacccacagaaattattatgaacggatacatgccttaggtccgaactacaatctggtcattagcgatctgaggatggaagacgcaggagactacaaagcagacataaatacacaggctgatccctacaccaccaccaagcgctacaacctgcaaatctatcgtcggcttgggaaaccaaaaattacacagagtttaatggcatctgtgaacagcacctgtaatgtcacactgacatgctctgtagagaaagaagaaaagaatgtgacatacaattggagtcccctgggagaagagggtaatgtccttcaaatcttccagactcctgaggaccaagagctgacttacacgtgtacagcccagaaccctgtcagcaacaattctgactccatctctgcccggcagctctgtgcagacatcgcaatgggcttccgtactcaccacaccgggttgctgagcgtgctggctatgttctttctgcttgttctcattctgtcttcagtgtttttgttccgtttgttcaagagaagacaagatgctgcctcaaagaaaaccatatacacatatatcatggcttcaaggaacacccagccagcagagtccagaatctatgatgaaatcctgcagtccaaggtgcttccctccaaggaagagccagtgaacacagtttattccgaagtgcagtttgctgataagatggggaaagccagcacacaggacagtaaacctcctgggacttcaagctatgaaattgtgatctaggctgctgggctgaattctccctctggaaactgagttacaaccaccaatactggcaggttccctggatccagatcttctctgcccaactcttactgggagattgcaaactgccacatctcagcctgtaagcaaagcaggaaaccttctgctgggcatagcttgtgcctaaatggacaaatggatgcatacccttcctgaaatgactcccttctgaatgaatgacaaagcaggttacctagtatagttttcccaaacttcttcccatcatagcacatgtagaaaataatatttttatggcacactgggataaacaagcaagattgctcacttctggaagctgcatatgactagaggcctcttgtgactggaggtaacaaccctgcccagtaactgtgggagaaggggatcaatattttgcacacctgtaataggccatggcacaccagccaagatgctctgctcacagtcagtatgtgtgaagatccctggtgcgtggccttcaccacgcatcttgagcaaattaggaaaatgtacccttcgcttgaggcagatgcagcccttcccccgagtgcatggcttggagagcagaatgtgggctgcatataagcacactcatccctttgtctgggaatctttgtgcagggcataacaggcttagtaagtccaaacacagatgacagtgctgtgtgggtctctgtcagagttgtggctctcagccatgtagacacactctccaaatggagtgttggaaaatgttctttctgcagggtctagagactgctgggacacttttcttggagtgctacttcagaagccttataggattttctttctggccaagatttccttctgtatcactccaagcagcctcagcagaagaagcagccatgcccagtattcccactctccaaaaggaactgaccagcttatatttctcacacttctggggaactgggtataatccaaccatcaaaatagaagaccttgcaagaagcagagtcattctccagaaggaacttgggagatgatggtgcagatgatgaaactgggttcatcccagttccaaagactcagagaactagagtttaagctgaggcagagtgccgccaccctggcatgccccacaaacagatcaccagccagcttacacaggcattaactctcctcaatgaggaagaatcattcacaactgagcaagacattcatatgatcatttaaggaagtgtttcccttatgtgttagcaagtataatcggctaactcctaaatcccaatgaatagtcctaggctggacagcaatgggctgcaattaggcagataaagacatcagtcccagtaaatgaatccatagactcatctagcaccaactaccattagcactatgttaggagctgcaaggccccaaagtagaagatgtgcataatgtctgctcttgtgtagctcaggagacaattccagcacagacactacagttaacgctgaactgcagctgcaagtaatagcatgaacagtcagaaaaataccttatgagggggcagggctgaagctgggccttgaaggatggatgaaatttggatagagaatgaggaagacagagggcctccaagtgagagaagcatgaaaaatgagcaggggcctggatcagtggggtgtattcagagcacctctccagatgcaccatgcatgctcacagtcccttgcctatgtgtggcagagtgtcccagccagatgtgtgcccccaccccatgtccatttacatgtccttcaatgcccacctcaaaaggtacctcttctgtaaagctttccctggtatcaggaatcaaaattaatcagggatcttttcacactgctgttttttcctctttggtccttctatcactaaaactcatctcattcagccttacagcataactaattatttgttttcctcactacattgtacatgtgggaattacagataaacggaagccggctggggtggtggctcacgcctgtaaccccaacactttgggaggccaaggcaggcggatcacctgaggtcaggagttcgagattagtctggccaacatggtgaaaccccatctctactaaaaatacgaaattagccaggtgtggtggcacacatctgtagtcccagctactctggaggctgagacaggagaatcgcttgaacccaggaagtggaggttgcagtgagctgagatcacaccactgcactccagcctgggagagagagagtgagtctccatctcaaaaaaaaaaaaaaaaa

SEQ ID NO: 1121 - protein, 328 aa, Homo sapien
MAQHHLWILLLCLQTWPEAAGKDSEIFTVNGILGESVTFPVNIQEPRQVKIIAWTSKTSVAYVTPGDSETAPVVTVTHRNYYERIHALGPNYNLVISDLRMEDAGDYKADINTQADPYTTTKRYNLQIYRRLGKPKITQSLMASVNSTCNVTLTCSVEKEEKNVTYNWSPLGEEGNVLQIFQTPEDQELTYTCTAQNPVSNNSDSISARQLCADIAMGFRTHHTGLLSVLAMFFLLVLILSSVFLFRLFKRRQDAASKKTIYTYIMASRNTQPAESRIYDEILQSKVLPSKEEPVNTVYSEVQFADKMGKASTQDSKPPGTSSYEIVI

SEQ ID NO: 1122 - DNA, 1202 bp, Homo sapien
tgtccggcgccccccgggagggaactgggtggccgcaccctcccggctgcggtggctgtcgccccccaccctgcagccaggactcgatggagaatccattccaatatatggccatgtggctctttggagcaatgttccatcatgttccatgctgctgctgacgtcacatggagcacagaaatcaatgttagcagatagccagcccatacaagatcgtattgtattgtaggaggcatcgtggatggatggctgctggaaaccccttgccatagccagctcttcttcaatacttaaggatttaccgtggctttgagtaatgagaatttcgaaaccacatttgagaagtatttccatccagtgctacttgtgtttacttctaaacagtcattttctaactgaagctggcattcatgtcttcattttgggctgtttcagtgcagggcttcctaaaacagaagccaactgggtgaatgtaataagtgatttgaaaaaaattgaagatcttattcaatctatgcatattgatgctactttatatacggaaagtgatgttcaccccagttgcaaagtaacagcaatgaagtgctttctcttggagttacaagttatttcacttgagtccggagatgcaagtattcatgatacagtagaaaatctgatcatcctagcaaacaacagtttgtcttctaatgggaatgtaacagaatctggatgcaaagaatgtgaggaactggaggaaaaaaatattaaagaatttttgcagagttttgtacatattgtccaaatgttcatcaacacttcttgattgcaattgattctttttaaagtgtttctgttattaacaaacatcactctgctgcttagacataacaaaacactcggcatttaaaatgtgctgtcaaaacaagtttttctgtcaagaagatgatcagaccttggatcagatgaactcttagaaatgaaggcagaaaaatgtcattgagtaatatagtgactatgaacttctctcagacttactttactcatttttttaatttattattgaaattgtacatatttgtggaataatgtaaaatgttgaataaaaatatgtacaagtgttgttttttaagttgcactgatattttacctcttattgcaaaatagcatttgtttaagggtgatagtcaaattatgtattggtggggctgggtaccaatgct

SEQ ID NO: 1123 - protein, 162 aa, Homo sapien
MRISKPHLRSISIQCYLCLLLNSHFLTEAGIHVFILGCFSAGLPKTEANWVNVISDLKKIEDLIQSMHIDATLYTESDVHPSCKVTAMKCFLLELQVISLESGDASIHDTVENLIILANNSLSSNGNVTESGCKECEELEEKNIKEFLQSFVHIVQMFINTS

SEQ ID NO: 1124 - DNA, 2650 bp, Homo sapien
ggagaaggcgagcgcggcagtcgcgccggcgctgggcgaggaagcggagccgggccgcctccggaaaatggctccaaaggttaaatgaagcaggaaaaatacatagatgcagccttgcagcctctccagatgtttggggataatattccagatagaaatattgatcccttggattaggtaactagtcataatgaagaaaattagtcttaaaaccttacggaaatcttttaacttgaataaaagtaaagaagaaactgatttcatggtagtacaacaaccatcgctagccagtgactttggaaaagatgattccttatttggtagctgctatggtaaagatatggccagctgcgatatcaacggtgaagatgaaaaaggcggaaaaaacagatcaaaaagcgagagcctgatgggtacgctaaaaaggcggctttctgcaaaacagaagtcaaaaggcaaggcgggcacaccctctgggagctctgccgacgaggacaccttctcctcctcctcagcacccatagtctttaaagacgtgagagctcagaggccgataaggtccacgtcgctccgcagccatcactacagtcccgcgccgtggcctctgcggcccacaaactccgaggagacctgcatcaagatggaggtgagagtcaaggccttggttcactcttccagcccgagtccagccctgaatggcgtccggaaggatttccacgacctccagtctgagaccacgtgccaggagcaagccaattcactgaagagctcggcttctcataatggagacctgcatcttcacctggatgaacatgtgcctgtcgttattggacttatgcctcaggactacattcagtatactgtgcctttagatgaggggatgtatcctttggaaggatcacggagctattgtctggacagctcttctcccatggaagtctctgcggttcctcctcaagtgggagggcgcgctttccccgaggatgagagtcaggtagaccaggacctagttgtcgccccagagatcttcgtggatcagtccgtgaatggcttgttgattggcaccacgggagtcatgttgcagagcccgagagcgggtcacgatgatgtccctccactctcaccattgctacctccaatgcagaataatcaaatccaaaggaacttcagtggactcactggcacagaagcccacgtggctgaaagtatgcgctgtcatttgaattttgatccgaactctgctcctggggttgcaagagtttatgactcagtgcaaagtagtggtcccatggttgtgacaagccttacagaggagctgaaaaaacttgcaaagcaaggatggtactggggaccaatcacacgttgggaggcagaagggaagctagcaaacgtgccagatggttcttttcttgttcgggacagttctgacgaccgttaccttttaagcttgagctttcgctcccatggtaaaacacttcacactagaattgagcactcaaatggtaggtttagcttttatgaacagccagatgtggaaggacatacgtccatagttgatctaattgagcattcaatcagggactctgaaaatggagctttttgttattcaaggtctcggctgcctggatctgcaacttaccccgtcagactgaccaacccagtgtcccggttcatgcaggtgcgctcgttgcagtacctgtgtcgttttgttatacgtcagtataccagaatagacttaattcagaaactgcctttgccaaacaaaatgaaggattatttacaggagaagcactactgaaagattgagaaccctgcatcttgcactttgggaataagaacaagagattgaaatacagtttacaaactttcattgccatcaaaatcttttgctgccataactatttcagttttatgtgtaaaagagtcatcagtttgtttaggggtggggaagtgtcagcaaggtgtcttgggtttattttggttctttaaaaaagggaagtcttgaggttttagaggtgtgaattatgtttcatcaatgtgcagaataatcacaatgtgaattatcaaattctcctcaatgccccccccgcccagtcctttgctgctatccactgtgatttttatgcattaaaagcacatttcatgtgtattcaaccctaagtaaagttgaatgaaacttaacagaatggaaattgctatgtctttttaaatggtccattttcaaaagacagtgttgaataaacatacctgtgtgataaaacacagaatttacatatacactgaagatgagtttttaatctcttactttaaaaagatttatttagaatcgtgaattgacataatcttgggtaatggaacggagatctgcaacatatcttttaacaacacttttttctaaattatttctaaggttgtgctaattcttttggttgtgaaaagttgaatttttctgttgccttcgttttcatcttctagtttgtctattttaataaatggccttacattaaaaaattgtaaagaaatgtataccaccaatttagaaattgttgccttttctgtaattaaactcgggtacaaattggcataacatgaaaacctatggaactagaattattattaaagaaatattagatgaaaaaaaaaaaaaaaa

SEQ ID NO: 1125 - protein, 535 aa, Homo sapien
MKKISLKTLRKSFNLNKSKEETDFMVVQQPSLASDFGKDDSLFGSCYGKDMASCDINGEDEKGGKNRSKSESLMGTLKRRLSAKQKSKGKAGTPSGSSADEDTFSSSSAPIVFKDVRAQRPIRSTSLRSHHYSPAPWPLRPTNSEETCIKMEVRVKALVHSSSPSPALNGVRKDFHDLQSETTCQEQANSLKSSASHNGDLHLHLDEHVPVVIGLMPQDYIQYTVPLDEGMYPLEGSRSYCLDSSSPMEVSAVPPQVGGRAFPEDESQVDQDLVVAPEIFVDQSVNGLLIGTTGVMLQSPRAGHDDVPPLSPLLPPMQNNQIQRNFSGLTGTEAHVAESMRCHLNFDPNSAPGVARVYDSVQSSGPMVVTSLTEELKKLAKQGWYWGPITRWEAEGKLANVPDGSFLVRDSSDDRYLLSLSFRSHGKTLHTRIEHSNGRFSFYEQPDVEGHTSIVDLIEHSIRDSENGAFCYSRSRLPGSATYPVRLTNPVSRFMQVRSLQYLCRFVIRQYTRIDLIQKLPLPNKMKDYLQEKHY

SEQ ID NO: 1126 - DNA, 3410 bp, Homo sapien
gtaccggttcggaattcccgggtcgacccacgcgtccggaaggctacagagagagccaggttttggtgccatgcacacagggaaacttagagttcagagagggggtgtgatttgcctgacctcacacagcaagttagagacccagctccacgactcattgtcttgctgcccagagctgctggctcccctgtttactctgagctgatcgatcaccttagcacacagctggctaggagagaaccatgcagtcacttcggccacacctgcccgttgacccttgctacctcggcaggctttgatcccttctgacctggaggccagaggctaggctgaggtcactcagcagacatcaaggacctgggcagatgggccggctgggatggtggcgagctgtacagataaaaagggacatgaaaatgaaaagcccgagcctgagttttcatcacggttccactcctgagtggtcttgggtgaatcacttcatctgccaaggcctggatttcctcatctgcaaactcagaaaactaaggctttggccctcgtcatcctgcccacccagcggggcttcccaacccaccacacagccatggacgggaaggtggcagtgcaagagcgtgggcctcctgcggtctcctgggtccccgaggagggagagaagttggaccaggaagacgaggaccaggtgaaggatcggggccaatggaccaacaagatggagtttgtgctgtcagtggccggggagatcattgggctgggcaatgtctggaggtttccctatctctgctacaaaaacggaggtggagccttcttcatcccctacttcatcttcttctttgtctgcggcatcccggtgttcttcctggaggtggcgttgggccaatacaccagccaagggagtgtcacagcctggaggaagatctgccccctcttccagggcattggtctggcatctgtggtcatcgagtcatatttgaatgtctactacatcatcatccttgcctgggctctcttctacctgttcagctccttcacttctgagctgccctggacgacctgcaacaacttttggaacacagagcattgcacggactttctgaaccactcaggagccggcacagtgaccccatttgagaattttacctcacctgtcatggaattctgggagagacgagttctgggcatcacctcgggcatccatgacctgggctccctgcgctgggagctggccctgtgcctcctgctcgcctgggtcatctgctatttctgcatctggaagggggtcaagtccacaggcaaggtggtttatttcacagccacgtttccgtacctgatgcttgtcattttgctgatcagaggtgtcacccttcccggagcctaccagggcatcatctactacttgaagccagatttgttccgcctcaaggaccctcaggtgtggatggatgcgggcacccagatcttcttctcctttgccatctgccaggggtgcctgacagccctgggcagctacaacaagtatcacaacaactgctacaaggactgcatcgccctctgcttcctgaacagtgccaccagctttgtggctgggtttgttgtcttctccatcctgggcttcatgtcccaagagcaaggggtgcccatttctgaagtggccgagtcaggtcctgggctggccttcatcgccttccccaaggctgtgactatgatgcccttatcccagctgtggtcctgcctgttctttatcatgctcatattcctagggctggacagccagtttgtctgtgtggagtgcctggtgacagcctccatagacatgttccccaggcagctccggaagagcgggcggcgcgagctcctcatcctcaccatcgccgtcatgtgctacctgatagggcttttcctggtcaccgagggcgggatgtacatcttccagctgtttgactactatgcttccagtggcatatgcctgctgttcctgtcattgtttgaagtggtctgcataagctgggtgtatggggcggaccgtttctatgacaacattgaggacatgattggctaccggccatggcccctggtgaagatctcctggctcttcctgacccctggactttgcctggccactttcctcttctccttgagcaagtacacccccctcaagtacaacaacgtctatgtgtacccgccctggggatactccattggctggttcctggctctgtcctccatggtctgtgtcccactcttcgtcgtcatcaccctcctgaagactcggggtcctttcaggaagcgtctgcgtcacgtcatcacccctgactccagtctgccacagcccaagcaacatccctgcttggatggcagtgctggccggaactttgggccctccccaacaagggaaggactgatagccggggagaaggagacccatttgtagggtgtggccagagcgaggcggctcctaagccgggaacctaggtcagggccaccctccattctcagcggacagcctctgcctctgtctcctgccacaatcctgctgggaactctggagagccacaggcacccccagctggaggccagactcctctcttgtgctagctggagcagctccttcccctttgctgataacaccaccactgggacgtgccatgttgggacgccactccctgtggaaggcaccatcgtttttataaaggggggtctttttggaggccgccatctgattgcaacacctcgagttatgaggattccactgtggggatgcctcttgttagagcgtactgcatttgtacacggggagaggagctataattggaacgcacactgccgtccaatgtggagagcctgatgggacaataccctgttggaagtgacaactgaacacactgtgttggatcggaggttccgttaggggatccttccttaggcttaacgacagaggcaagcctttgcatgccgtcagtctggagtttcctccgagtctctcatggcatctccagctcctgccctagttccgcactgttcttgcagtgtttcatcaactcctggagcattggaatggaaggggcttgggagatgattcctagacttcacaaacactcggcatgcctccctgcactgtccgttcctctgcccaaggccgatattgctaactgatcacagattctttcccacctcacaatcctccgaatgtgctccaggcgacaccatttgccatcctgcttctaacgcaaacccctgacttcatggatgaggaacctggagaccaaagagacaaagggactttttcaagttcacatggggacccccttcttgggggccagagatatgactaaaaccttatctccttgtgctcaggccagtgtcttcccattaaccccctgccttagttaacaagtgtgtatggattgcca

SEQ ID NO: 1127 - protein, 614 aa, Homo sapien
MDGKVAVQERGPPAVSWVPEEGEKLDQEDEDQVKDRGQWTNKMEFVLSVAGEIIGLGNVWRFPYLCYKNGGGAFFIPYFIFFFVCGIPVFFLEVALGQYTSQGSVTAWRKICPLFQGIGLASVVIESYLNVYYIIILAWALFYLFSSFTSELPWTTCNNFWNTEHCTDFLNHSGAGTVTPFENFTSPVMEFWERRVLGITSGIHDLGSLRWELALCLLLAWVICYFCIWKGVKSTGKVVYFTATFPYLMLVILLIRGVTLPGAYQGIIYYLKPDLFRLKDPQVWMDAGTQIFFSFAICQGCLTALGSYNKYHNNCYKDCIALCFLNSATSFVAGFVVFSILGFMSQEQGVPISEVAESGPGLAFIAFPKAVTMMPLSQLWSCLFFIMLIFLGLDSQFVCVECLVTASIDMFPRQLRKSGRRELLILTIAVMCYLIGLFLVTEGGMYIFQLFDYYASSGICLLFLSLFEVVCISWVYGADRFYDNIEDMIGYRPWPLVKISWLFLTPGLCLATFLFSLSKYTPLKYNNVYVYPPWGYSIGWFLALSSMVCVPLFVVITLLKTRGPFRKRLRHVITPDSSLPQPKQHPCLDGSAGRNFGPSPTREGLIAGEKETHL

SEQ ID NO: 1128 - DNA, 1887 bp, Homo sapien
ctttttaagctcccctgagccggtgctgcgctcctctaattgggactccgagccggggctatttctggcgctggcgcggctccaagaaggcatccgcatttgctaccagcggcggccgcggcggagccaggccggtcctcagcgcccagcaccgccgctcccggcaacccggagcgcgcaccgcaggccggcggccgagctcgcgcatcccagccatcactcttccacctgctccttagagaagggaagatgagtgagtcgagctcgaagtccagccagcccttggcctccaagcaggaaaaggacggcactgagaagcggggccggggcaggccgcgcaagcagcctccgaaggagcccagcgaagtgccaacacctaagagacctcggggccgaccaaagggaagcaaaaacaagggtgctgccaagacccggaaaaccaccacaactccaggaaggaaaccaaggggcagacccaaaaaactggagaaggaggaagaggagggcatctcgcaggagtcctcggaggaggagcagtgacccatgcgtgccgcctgctcctcactggaggagcagcttccttctgggactggacagctttgctccgctcccaccgcccccgccccttccccaggcccaccatcaccaccgcctctggccgccacccccatcttccacctgtgccctcaccaccacactacacagcacaccagccgctgcagggctcccatgggctgagtggggagcagttttcccctggcctcagttcccagctccccccgcccacccacgcatacacacatgccctcctggacaaggctaacatcccacttagccgcaccctgcacctgctgcgtccccactcccttggtggtggggacattgctctctgggcttttggtttgggggcgccctctctgctccttcactgttccctctggcttcccatagtggggcctgggagggttcccctggccttaaaaggggcccaagccccatctcatcctggcacgccctactccactgccctggcagcagcaggtgtggccaatggaggggggtgctggcccccaggattcccccagccaaactgtctttgtcaccacgtggggctcacttttcatccttccccaacttccctagtccccgtactaggttggacagcccccttcggctacaggaaggcaggaggggtgagtcccctactccctcttcactgtggccacagcccccttgccctccgcctgggatctgagtacatattgtggtgatggagatgcagtcacttattgtccaggtgaggcccaagagccctgtggccgccacctgaggtgggctggggctgctcccctaaccctactttgcttccgccactcagccatttccccctcctcagatggggcaccaataacaaggagctcaccctgcccgctcccaacccccctcctgctcctccctgccccccaaggttctggttccatttttcctctgttcacaaactacctctggacagttgtgttgttttttgttcaatgttccattcttcgacatccgtcattgctgctgctaccagcgccaaatgttcatcctcattgcctcctgttctgcccacgatcccctcccccaagatactctttgtggggaagaggggctggggcatggcaggctgggtgaccgactaccccagtcccagggaaggtggggccctgcccctaggatgctgcagcagagtgagcaagggggcccgaatcgaccataaagggtgtaggggccacctcctccccctgttctgttggggaggggtagccatgatttgtcccagcctggggctccctctctggtttcctatttgcagttacttgaataaaaaaaatatccttttctgga

SEQ ID NO: 1129 - protein, 96 aa, Homo sapien
MSESSSKSSQPLASKQEKDGTEKRGRGRPRKQPPKEPSEVPTPKRPRGRPKGSKNKGAAKTRKTTTTPGRKPRGRPKKLEKEEEEGISQESSEEEQ

SEQ ID NO: 1130 - DNA, 2085 bp, Homo sapien
gcatttcttccttctgcgtatgggacaggaccctttctggaatgggggtcttatgacctacaatcaaacaagaacatggacttcccgtgcctctggctagggctgttgctgcctttggtagctgcgctggatttcaactaccaccgccaggaagggatggaagcgtttttgaagactgttgcccaaaactacagttctgtcactcacttacacagtattgggaaatctgtgaaaggtagaaacctgtgggttcttgttgtggggcggtttccaaaggaacacagaattgggattccagagttcaaatacgtggcaaatatgcatggagatgagactgttgggcgggagctgctgctccatctgattgactatctcgtaaccagtgatggcaaagaccctgaaatcacaaatctgatcaatagtacccggatacacatcatgccttccatgaacccagatggatttgaagccgtcaaaaagcctgactgttactacagcatcggaagggaaaattataaccagtatgacttgaatcgaaatttccccgatgcttttgaatataataatgtctcaaggcagcctgaaactgtggcagtcatgaagtggctgaaaacagagacgtttgtcctctctgcaaacctccatggtggtgccctcgtggccagttacccatttgataatggtgttcaagcaactggggcattatactcccgaagcttaacgcctgatgatgatgtttttcaatatcttgcacatacctatgcttcaagaaatcccaacatgaagaaaggagacgagtgtaaaaacaaaatgaactttcctaatggtgttacaaatggatactcttggtatccactccaaggtggaatgcaagattacaactacatctgggcccagtgttttgaaattacgttggagctgtcatgctgtaaatatcctcgtgaggagaagcttccatccttttggaataataacaaagcctcattaattgaatatataaagcaggtgcacctaggtgtaaagggtcaagtttttgatcagaatggaaatccattacccaatgtaattgtggaagtccaagacagaaaacatatctgcccctatagaaccaacaaatatggagagtattatctccttctcttgcctgggtcttatattataaatgttacagtccctggacatgatccacacatcacaaaggtgattattccggagaaatcccagaacttcagtgctcttaaaaaggatattctacttccattccaagggcaattggattctatcccagtatcaaatccttcatgcccaatgattcctctatacagaaatttgccagaccactcagctgcaacaaagcctagtttgttcttatttttagtgagtcttttgcacatattcttcaaataaagtaaaatgtgaaactcaacccacatcaccacctggaatcagggattgctcactccaggttactgcaaccctaactcactctagtgggaccttgactggagaaactccacgatcttcctgaagaagagaaatggatgtttccaaattccacaataagcaatatgtggtgataatgaaaagaatgattcagtcttgacggtgaatggaagacacttacctaacaagtactgctcatttacactcaaattaatcttgaagtagtcttaaaatgtgtaagaagttaaaacttgagaagcaaaaaatgcctgcaaaaagaagatcattttgtatacagagaaccggatgaatataagcaatgaagatgaacatttattgatcttctacatacaagacttcaccataaggccaggagcagtgctcacgccttgtaatcccagcactttgggaggccaaggtgggcggatcaccttgaggtcaggagttcaagaccagcctgaccaacatggtgaaaccctgtctctactaaatattagcggggtgtggtggcgggcacctgtagtcgcagcctttcgggaggctgagacaggagaatcgcttgaaccctagaggcggagtttgcagtgagccgagatagtgccattgtactccagcttgggcaacagagtaagactctgtctc

SEQ ID NO: 1131 - protein, 443 aa, Homo sapien
MDFPCLWLGLLLPLVAALDFNYHRQEGMEAFLKTVAQNYSSVTHLHSIGKSVKGRNLWVLVVGRFPKEHRIGIPEFKYVANMHGDETVGRELLLHLIDYLVTSDGKDPEITNLINSTRIHIMPSMNPDGFEAVKKPDCYYSIGRENYNQYDLNRNFPDAFEYNNVSRQPETVAVMKWLKTETFVLSANLHGGALVASYPFDNGVQATGALYSRSLTPDDDVFQYLAHTYASRNPNMKKGDECKNKMNFPNGVTNGYSWYPLQGGMQDYNYIWAQCFEITLELSCCKYPREEKLPSFWNNNKASLIEYIKQVHLGVKGQVFDQNGNPLPNVIVEVQDRKHICPYRTNKYGEYYLLLLPGSYIINVTVPGHDPHITKVIIPEKSQNFSALKKDILLPFQGQLDSIPVSNPSCPMIPLYRNLPDHSAATKPSLFLFLVSLLHIFFK

SEQ ID NO: 1132 - DNA, 735 bp, Homo sapien
gctgcccctgaaccccagaacaaccagctggatcagttctcacaggagctacaggccggagactgggaaacatggttccaaaactgttcacttcccaaatttgtctgcttcttctgttggggcttctggctgtggagggctcactccatgtcaaacctccacagtttacctgggctcaatggtttgaaacccagcacatcaatatgacctcccagcaatgcaccaatgcaatgcaggtcattaacaattatcaacggcgatgcaaaaaccaaaatactttccttcttacaacttttgctaacgtagttaatgtttgtggtaacccaaatatgacctgtcctagtaacaaaactcgcaaaaattgtcaccacagtggaagccaggtgcctttaatccactgtaacctcacaactccaagtccacagaatatttcaaactgcaggtatgcgcagacaccagcaaacatgttctatatagttgcatgtgacaacagagatcaacgacgagaccctccacagtatccggtggttccagttcacctggatagaatcatctaagctcctgtatcagcactcctcatcatcactcatctgccaagctcctcaatcatagccaagatcccatctctccatatactttgggtatcagcatctgtcctcatcagtctccataccccttcagctttcctgagctgaagtgccttgtgaaccctgcaataaactgctttgcaaattc

SEQ ID NO: 1133 - protein, 161 aa, Homo sapien
MVPKLFTSQICLLLLLGLLAVEGSLHVKPPQFTWAQWFETQHINMTSQQCTNAMQVINNYQRRCKNQNTFLLTTFANVVNVCGNPNMTCPSNKTRKNCHHSGSQVPLIHCNLTTPSPQNISNCRYAQTPANMFYIVACDNRDQRRDPPQYPVVPVHLDRII

SEQ ID NO: 1134 - DNA, 2779 bp, Homo sapien
catggatttcgacattgctggacctgccacaggctgggctcttgtgctagaaatgacttgctagctagacatcatggttcaggatctgagtcagaggtttaaccatttataagcttttttcttatgaaaaattggcactaattataatgtctaactgtcagagttgttgcaggctttacaggagacgcgggctgtgaagatgctttgtaaattgtgaagcgttattaaagaacacatctttttttttaggaaaccacggtgcaaatttaattgccggggaagataacgggccttggtgccctccaagcgtcagctgagtttccaagaagccgggcagcgggcgcccgcgggttcgtctctggctcctcctccgccacagcagccgggggcccgggtcggaggcggcgggggccgagcgcccggcctcgcaagcccacggcccgctgggggtgccgtcccgcgccggggcggagcaggccccggcagcccagttcctcattctatcagcggtacaaggggctggtggcgccacaggcgctgggaccgcgggcggacaaggatgggtccgcgcggcgcggcgagcttgccccgaggccccggacctcggcggctgctcctccccgtcgtcctcccgctgctgctgctgctgttgttggcgccgccgggctcgggcgccggggccagccggccgccccacctggtcttcttgctggcagacgacctaggctggaacgacgtcggcttccacggctcccgcatccgcacgccgcacctggacgcgctggcggccggcggggtgctcctggacaactactacacgcagccgctgtgcacgccgtcgcggagccagctgctcactggccgctaccagatccgtacaggtttacagcaccaaataatctggccctgtcagcccagctgtgttcctctggatgaaaaactcctgccccagctcctaaaagaagcaggttatactacccatatggtcggaaaatggcacctgggaatgtaccggaaagaatgccttccaacccgccgaggatttgatacctactttggatatctcctgggtagtgaagattattattcccatgaacgctgtacattaattgacgctctgaatgtcacacgatgtgctcttgattttcgagatggcgaagaagttgcaacaggatataaaaatatgtattcaacaaacatattcaccaaaagggctatagccctcataactaaccatccaccagagaagcctctgtttctctaccttgctctccagtctgtgcatgagccccttcaggtccctgaggaatacttgaagccatatgactttatccaagacaagaacaggcatcactatgcaggaatggtgtcccttatggatgaagcagtaggaaatgtcactgcagctttaaaaagcagtgggctctggaacaacacggtgttcatcttttctacagataacggagggcagactttggcagggggtaataactggccccttcgaggaagaaaatggagcctgtgggaaggaggcgtccgaggggtgggctttgtggcaagccccttgctgaagcagaagggcgtgaagaaccgggagctcatccacatctctgactggctgccaacactcgtgaagctggccaggggacacaccaatggcacaaagcctctggatggcttcgacatgtggaaaaccatcagtgaaggaagcccatcccccagaattgagctgctgcataatattgacccgaacttcgtggactcttcaccgtgtcccaggaacagcatggctccagcaaaggatgactcttctcttccagaatattcagcctttaacacatctgtccatgctgcaattagacatggaaattggaaactcctcacgggctacccaggctgtggttactggttccctccaccgtctcaatacaatgtttctgagataccctcatcagacccaccaaccaagaccctctggctctttgatattgatcgggaccctgaagaaagacatgacctgtccagagaatatcctcacatcgtcacaaagctcctgtcccgcctacagttctaccataaacactcagtccccgtgtacttccctgcacaggacccccgctgtgatcccaaggccactggggtgtggggcccttggatgtaggatttcagggaggctagaaaacctttcaattggaagttggacctcaggccttttctcacgactcttgtctcatttgttatcccaacctgggttcacttggcccttctcttgctcttaaaccacaccgaggtgtctaatttcaacccctaatgcatttaagaagctgataaaatctgcaacactcctgctgttggctggagcatgtgtctagaggtgggggtggctgggtttatccccctttcctaagccttgggacagctgggaacttaacttgaaataggaagttctcactgaatcctggaggctggaacagctggctcttttagactcacaagtcagacgttcgattcccctctgccaatagccagttttattggagtgaatcacatttcttacgcaaatgaagggagcagacagtgattaatggttctgttggcaaggcttctccctgtcggtgaaggatcatgttcaggcactccaagtgaaccacccctcttggttcaccccttactcacttatctcatcacagagcataaggcccattttgttgttcaggtcaacagcaaaatgcctgcaccatgactgtggcttttaaaataaagaaatgtgtttttatcg

SEQ ID NO: 1135 - protein, 533 aa, Homo sapien
MGPRGAASLPRGPGPRRLLLPVVLPLLLLLLLAPPGSGAGASRPPHLVFLLADDLGWNDVGFHGSRIRTPHLDALAAGGVLLDNYYTQPLCTPSRSQLLTGRYQIRTGLQHQIIWPCQPSCVPLDEKLLPQLLKEAGYTTHMVGKWHLGMYRKECLPTRRGFDTYFGYLLGSEDYYSHERCTLIDALNVTRCALDFRDGEEVATGYKNMYSTNIFTKRAIALITNHPPEKPLFLYLALQSVHEPLQVPEEYLKPYDFIQDKNRHHYAGMVSLMDEAVGNVTAALKSSGLWNNTVFIFSTDNGGQTLAGGNNWPLRGRKWSLWEGGVRGVGFVASPLLKQKGVKNRELIHISDWLPTLVKLARGHTNGTKPLDGFDMWKTISEGSPSPRIELLHNIDPNFVDSSPCPRNSMAPAKDDSSLPEYSAFNTSVHAAIRHGNWKLLTGYPGCGYWFPPPSQYNVSEIPSSDPPTKTLWLFDIDRDPEERHDLSREYPHIVTKLLSRLQFYHKHSVPVYFPAQDPRCDPKATGVWGPWM

SEQ ID NO: 1136 - DNA, 1493 bp, Homo sapien
gcaggccttgcccggaccagcccctcctccactctcctctcccctgtgagctccacctgccccagttctcctggctttaacccctccttggccaaggccagggttgcctgcgggagccaggcgtccgctctccacacctttcacagatcctacccaggccaccaccccgaacccctccgaccctgcgttccatcccaccatcaacctccacgtgaatctgcacctctgccccagccccagccctcagagcaacctcagcccagcccagcccagctccagctccagctccagcccgggccccatcatggccaaggactttcaagatatccagcagctgagctcggaggaaaatgaccatcctttccatcaaggtgaggggccaggcactcgcaggctgaatcccaggagaggaaatccatttttgaaagggccacctcctgcccagcccctggcacagcgtctctgctccatggtctgcttcagtctgcttgccctgagcttcaacatcctgctgctggtggtcatctgtgtgactgggtcccaaagtgagggtcacagaggtgcacagctgcaagccgagctgcggagcctgaaggaagctttcagcaacttctcctcgagcaccctgacggaggtccaggcaatcagcacccacggaggcagcgtgggtgacaagatcacatccctaggagccaagctggagaaacagcagcaggacctgaaagcagatcacgatgccctgctcttccatctgaagcacttccccgtggacctgcgcttcgtggcctgccagatggagctcctccacagcaacggctcccaaaggacctgctgccccgtcaactgggtggagcaccaaggcagctgctactggttctctcactccgggaaggcctgggctgaggcggagaagtactgccagctggagaacgcacacctggtggtcatcaactcctgggaggagcagaaattcattgtacaacacacgaaccccttcaatacctggataggtctcacggacagtgatggctcttggaaatgggtggatggcacagactataggcacaactacaagaactgggctgtcactcagccagataattggcacgggcacgagctgggtggaagtgaagactgtgttgaagtccagccggatggccgctggaacgatgacttctgcctgcaggtgtaccgctgggtgtgtgagaaaaggcggaatgccaccggcgaggtggcctgaccccagcacacctctggctaacccataccccacacctgcccagctctggcttctctgttgaggattttgaggaaaggaagaaacactgagacaggggtatggggaagagctgagcaaagagagaaaggaggtagtttaagagtccctgaccctggaggactgagatcccacctccttctgtaattcattgtaattattataatcgtcagcctcttcaatggcgtaggaaagaagaaacaaatgcttgaatctc

SEQ ID NO: 1137 - protein, 292 aa, Homo sapien
MAKDFQDIQQLSSEENDHPFHQGPPPAQPLAQRLCSMVCFSLLALSFNILLLVVICVTGSQSEGHRGAQLQAELRSLKEAFSNFSSSTLTEVQAISTHGGSVGDKITSLGAKLEKQQQDLKADHDALLFHLKHFPVDLRFVACQMELLHSNGSQRTCCPVNWVEHQGSCYWFSHSGKAWAEAEKYCQLENAHLVVINSWEEQKFIVQHTNPFNTWIGLTDSDGSWKWVDGTDYRHNYKNWAVTQPDNWHGHELGGSEDCVEVQPDGRWNDDFCLQVYRWVCEKRRNATGEVA

SEQ ID NO: 1138 - DNA, 2175 bp, Homo sapien
gagaaattggagaagataaaactggacactggggagaccacaacttcatgctgcgtgggatctcccagctacctgcagtggccaccatgtcttgggtcctgctgcctgtactttggctcattgttcaaactcaagcaatagccataaagcaaacacctgaattaacgctccatgaaatagtttgtcctaaaaaacttcacattttacacaaaagagagatcaagaacaaccagacagaaaagcatggcaaagaggaaaggtatgaacctgaagttcaatatcagatgatcttaaatggagaagaaatcattctctccctacaaaaaaccaagcacctcctggggccagactacactgaaacattgtactcacccagaggagaggaaattaccacgaaacctgagaacatggaacactgttactataaaggaaacatcctaaatgaaaagaattctgttgccagcatcagtacttgtgacgggttgagaggatacttcacacatcatcaccaaagataccagataaaacctctgaaaagcacagacgagaaagaacatgccgtctttacatctaaccaggaggaacaagacccagctaaccacacatgtggtgtgaagagcactgacgggaaacaaggcccaattcgaatctctagatcactcaaaagcccagagaaagaagactttcttcgggcacagaaatacattgatctctatttggtgctggataatgccttttataagaactataatgagaatctaactctgataagaagctttgtgtttgatgtgatgaacctactcaatgtgatatataacaccatagatgttcaagtggccttggtaggtatggaaatctggtctgatggggataagataaaggtggtgcccagcgcaagcaccacgtttgacaacttcctgagatggcacagttctaacctggggaaaaagatccacgaccatgctcagcttctcagcgggattagcttcaacaatcgacgtgtgggactggcagcttcaaattccttgtgttccccatcttcggttgctgttattgaggctaaaaaaaagaataatgtggctcttgtaggagtgatgtcacatgagctgggccatgtccttggtatgcctgatgttccattcaacaccaagtgtccctctggcagttgtgtgatgaatcagtatctgagttcaaaattcccaaaggatttcagtacatcttgccgtgcacattttgaaagataccttttatctcagaaaccaaagtgcctgctgcaagcacctattcctacaaatataatgacaacaccagtgtgtgggaaccaccttctagaagtgggagaagactgtgattgtggctctcctaaggagtgtaccaatctctgctgtgaagccctaacgtgtaaactgaagcctggaactgattgcggaggagatgctccaaaccataccacagagtgaatccaaaagtctgcttcactgagatgctaccttgccaggacaagaaccaagaactctaactgtcccaggaatcttgtgaattttcacccataatggtctttcacttgtcattctactttctatattgttatcagtccaggaaacaggtaaacagatgtaattagagacattggctctttgtttaggcctaatctttctttttacttttttttttcttttttctttttttttaaagatcatgaatttgtgacttagttctgccctttggagaacaaaagaaagcagtcttccatcaaatcaccttaaaatgcacggctaaactattcagagttaacactccagaattgttaaattacaagtactatgctttaatgcttctttcatcttactagtatggcctataaaaaaaataataccacttgatgggtgaaggctttggcaatagaaagaagaatagaattcaggttttatgttattcctctgtgttcacttcgccttgctcttgaaagtgcagtatttttctacatcatgtcgagaatgattcaatgtaaatatttttcattttatcatgtatatcctatacacacatctccttcatcatcatatatgaagtttattttgagaagtctacattgcttacattttaattgagccagcaaagaaggcttaatgatttattgaaccataatgtcaataaaaacacaacttttgaggc

SEQ ID NO: 1139 - protein, 470 aa, Homo sapien
MLRGISQLPAVATMSWVLLPVLWLIVQTQAIAIKQTPELTLHEIVCPKKLHILHKREIKNNQTEKHGKEERYEPEVQYQMILNGEEIILSLQKTKHLLGPDYTETLYSPRGEEITTKPENMEHCYYKGNILNEKNSVASISTCDGLRGYFTHHHQRYQIKPLKSTDEKEHAVFTSNQEEQDPANHTCGVKSTDGKQGPIRISRSLKSPEKEDFLRAQKYIDLYLVLDNAFYKNYNENLTLIRSFVFDVMNLLNVIYNTIDVQVALVGMEIWSDGDKIKVVPSASTTFDNFLRWHSSNLGKKIHDHAQLLSGISFNNRRVGLAASNSLCSPSSVAVIEAKKKNNVALVGVMSHELGHVLGMPDVPFNTKCPSGSCVMNQYLSSKFPKDFSTSCRAHFERYLLSQKPKCLLQAPIPTNIMTTPVCGNHLLEVGEDCDCGSPKECTNLCCEALTCKLKPGTDCGGDAPNHTTE

SEQ ID NO: 1140 - DNA, 6183 bp, Homo sapien
ctttttgtagggagaagggcaggatgtttttaactgaatgtgacctcaggggaatactagagaaaataataaaatttctgaatggggcagcgtggagaaatcctaagagaaatagcataagagcattttggaacacatccaggaaaagataactttcgacacacctgtagacgttcgccaggtaaaggagtgatggaaactctccagttcagatccagtagcttttagggaaggaactacagttgctgacttaagttgaagaagcatctatttaatgtctggtcaaatcctacaagaaacacagaaatctatgattaaaaagctgagcactttgatatactgcaaagggtagagaaggcaggacggtagaaattttctgcaagaaagaatgaatttcaggatttatcactaaataagacaaagtcatttatttagtccccctgacacagcagggcaaactgagttgacatacaagttacctggagaaaaagagagcaattccaggacttcctcttcagcctaaaagaaggtaccagatctgtgcactggggcgatgtggaagagacctgcttattgcccctgatgtaagctccagtaagaaaagacgtcaagtacaagtactaggaaatcactttatacatctgtttataggaatgacctcaggactttgtgttcatgttatagatggatgcagaggctgaagataaaacgctgcgtactcgctctaaaggaaccgaggtgccaatggattcactaatccaggagctcagtgttgcctatgattgctccatggcaaagaagagaacagctgaagatcaggctttgggggttccagtcaacaaaaggaaatccctgctaatgaagccccgacactacagcccaaaagcagactgccaagaagaccgcagtgacaggacagaggacgatggccccttggaaacacatggtcactctaccgcagaggaaatcatgataaaacctatggatgaaagtcttctttcaactgcacaagaaaactccagtaggaaggaagacagatactcttgttatcaagagctcatggtcaagtctttaatgcacttggggaaatttgaaaaaaatgtatctgttcagactgtaagtgaaaatttaaatgacagtggcatccagtctttaaaagcagagagcgatgaagcagacgagtgctttctgattcattctgatgatggaagagacaagattgatgattctcagccacccttctgctcctctgatgacaatgaaagtaactctgaaagtgcagaaaatggctgggacagtggctccaacttctcagaagaaaccaaaccacctagagtcccaaagtatgttttaacagatcataaaaaagacctattggaagttcctgaaataaaaactgaaggtgacaaatttatcccttgtgagaacaggtgtgattctgaaacagaaaggaaagacccgcagaatgctctcgcagaacccctggatggcaatgcccagccctcattccctgacgttgaggaggaagatagcgagagcctggcagtaatgacggaagagggtagtgacctggaaaaggccaaggggaatttaagtttgctggagcaggcaattgctctgcaggctgagcgaggttgtgttttccataacacctacaaagagctggataggttcctgctggagcacctagcaggggaaaggaggcaaaccaaagttatcgacatgggtggaagacaaatctttaacaataaacattcaccaaggcctgaaaagagggagaccaagtgcccgatccctggatgtgatggcacgggacacgtgacagggctctacccgcaccaccgcagcctttcggggtgcccccacaaagtgcgggttcccctggaaattcttgccatgcatgaaaatgtgctcaagtgtcccacgccgggatgcacaggaaggggtcatgtgaacagcaaccgcaacacccacaggagtctttctggttgtccaattgctgcagctgaaaaattggcaatgtcccaggataaaaatcagcttgattctccccaaactgggcagtgtcctgaccaggcccacaggacaagtttggtgaagcaaattgaattcaatttcccgtcacaagccatcacctctcccagagccacagtgtcaaaagaacaagagaagtttggaaaagtaccatttgattatgccagttttgatgcccaagttttcggtaaacgccctctcatacaaacagtgcaaggacgaaaaacaccaccatttcctgaatcaaagcattttccaaatccagtgaaatttcctaatcgactgcctagtgcaggcgcccacacccagagccctggccgtgccagctcttatagctacggtcaatgtagtgaagacacccacatagcagcagctgctgccatcctgaacctttccacccgctgcagggaagccacagacatcctctccaacaagccacagagtctgcatgccaagggagccgaaatagaagtggatgaaaatggcacattggacttaagcatgaaaaaaaatcgaatcctggacaagtctgcacccctaacttcctctaacacttctattccaactccttcctcttccccattcaaaacaagcagcattctggtcaatgcagcattctatcaggctctttgtgaccaagagggctgggacactcctatcaactatagcaaaactcacgggaagacagaggaggagaaagagaaagacccagtgagctctctagaaaatttagaggaaaaaaagtttcctggagaggcctctataccaagccctaaacccaagcttcatgcaagagatctcaaaaaggaactaatcacctgtccaacaccaggatgtgatggaagtggccacgtgacaggaaactatgcatctcatcgcagtgtttctggatgtcctttagcagataagactctaaaatccctcatggctgccaactctcaggagcttaagtgtccaaccccaggctgcgatggctcggggcacgtgactggaaactatgcttcccacagaagcttgtccggatgccctcgtgcaaggaaaggtggtgtcaaaatgacccctaccaaggaagaaaaagaagaccctgaactgaaatgtcctgtgatagggtgtgatggccaaggtcacatatcaggtaaatacacatcacaccgcacagcttctggctgtcctctggctgccaagagacagaaggagaatcctctcaatggagcctccctctcctggaaactgaacaaacaagagctaccacattgtcccttgccaggctgcaatgggctgggccatgtaaataatgtttttgtcacccaccgaagcttatctggatgtcctctcaatgcacaagttatcaaaaagggcaaggtttctgaagaactcatgaccatcaagctcaaagcaactgggggaatagagagtgatgaagaaattaggcatttggatgaagaaataaaggaactgaatgaatccaaccttaaaattgaagcagatatgatgaaacttcagacccagatcacatctatggagagcaacttaaagacgatagaggaggagaacaaactcatagaacagaacaatgaaagtctgctgaaagagctggcaggtctaagccaagctctcatttcaagccttgctgacatccagcttccacagatgggacctatcagtgagcagaattttgaagcatatgtaaatacactcacagatatgtacagcaatctggaacgggactattccccggaatgcaaagctctactggaaagtatcaaacaggcagtgaagggtatccatgtgtaggatcacagcgctgccgggcaacagaagttaccaacagcagtaaactccagatggatctgttagaggttcatgtactgctaaggcgtggaggttgccgtactgcatttacaatttgcaacattgcactaattttattttccccagctgatataaaaaggaaagaaaaactatgatagacttcttggattaaaagcaatgcagtcaattattagatcttatttattttcatatgtttttcttttatttcttcattgtactcttcttttgtaaagtatatgtaaaataaatgtgacatttttataatttatttattactaatcaaagagttttttatcttttaactgcattttgaagtctgccgtatttttacaagtgtgtttattaatttattttccaataggatttaaatagaaatgctattctcaagtcatctttcttgctgggttttaatgaggaaacaggaaagggtgaaggaaatccttgtctaaggactgcactatagttgagtttgatttttattgcacacttcttcccccacctttcactgatttttgtatttataaatgaatttgcggtaaggtgagctgcacggaaggaataagaagacaaatggcgcccactagtggggaatccgcactcacaaaagcacaggatgctggaaaacagcctgctcagaatttgttagcaataattaaatatagcaatcagcaaagtattcgacttggctggacggttttcgttaatatgaattatttatttgaaatgttttaaagaaacataagcctttttagtgatgcagatttgtctgtttgtttttcaagtcatatcagatcgttggcaactcgtatcccaagatgaaaaataagacttggtgtgaccagccaggctttcctgccatatgttggtacaatatacaagtgacaatattggtgtagatttgtacttagcaaatacaaacacatccaaatgaaaaattttgtagataccatatcccctgaaatagcatttatcttactgggttgactggaaaggaatggaaaatatagtaacacatgaaaaaatgctactccaatctgaatgattacttcaaacactggcaccttgggtctcacccaccataggaaacaagacaacattcaatttgatagaaatcttgccacaaaacttcaaatgctacaaaatatacacacacactcacacacacaggcatactcacacacagacacacacacacacacacacacagactcatccacacttcaaattgagcccacaatcttgaatttctgaacggatcagagtttcatagtttctatagtaaaggcaatgtctatttcagggattgtaaagtagttaagcattgtttcaaaagtttttttatatttattttttttaaggaaaaggtatagacaaccagctaaactgcctttttggtgtgcacacacatttcatgtgcagacgtgcctctgtgtaaatgtacacatgaacttcatgtgggcttaattttctgtgctataaacaaaagtgtttattttttattaacctcatggatatttagatggaaagtgatggcattcacaggcttgatgtattccactgttattactgttacctgcacaaatgaaaaacaatactcaacagtaattccactcccatgaaactttggtcattgttatgcattaagtggggcttatctttggtttggagttcatttgaactcttgaaccttagtttagtgaagatgaactgtctgttcttaggtagaaacggtgtttatttaaaaatcagttttaaaaaatgagctaccatatgtgctgtctattataaatgggacaccaaacaaaattttctattacagttgtgtacttgcaaacattttgctatacagtacttcatagatgcatacaaatgagctcacttattacaaagacaaacgtttaatttgctaaatattttaacaagtttgttatatattttatttaatttaaaagaaatctcttaccaacctacatatttattactataatttgctatgacttcaggttaatttatttgtgtttgcatagtttgagcaggatgttttgtgaagtatgtttgtatttatttgcctactttgtacttgatgtgttttgtaatgtgcactgaatttgttttcttttcaactatgttaatgatcaatactgtaaattgggtcttttgtaaacaaaaaggcaatgatgtatgcattttttttaatttgaggtagtttgtttgtatactgtttctccaaacacttaatatttcttacatcaaagcaacaaaattgtgttcagtgctgtacatttggtgtatggtaggaaataaaaattgataacg

SEQ ID NO: 1141 - protein, 1047 aa, Homo sapien
MDAEAEDKTLRTRSKGTEVPMDSLIQELSVAYDCSMAKKRTAEDQALGVPVNKRKSLLMKPRHYSPKADCQEDRSDRTEDDGPLETHGHSTAEEIMIKPMDESLLSTAQENSSRKEDRYSCYQELMVKSLMHLGKFEKNVSVQTVSENLNDSGIQSLKAESDEADECFLIHSDDGRDKIDDSQPPFCSSDDNESNSESAENGWDSGSNFSEETKPPRVPKYVLTDHKKDLLEVPEIKTEGDKFIPCENRCDSETERKDPQNALAEPLDGNAQPSFPDVEEEDSESLAVMTEEGSDLEKAKGNLSLLEQAIALQAERGCVFHNTYKELDRFLLEHLAGERRQTKVIDMGGRQIFNNKHSPRPEKRETKCPIPGCDGTGHVTGLYPHHRSLSGCPHKVRVPLEILAMHENVLKCPTPGCTGRGHVNSNRNTHRSLSGCPIAAAEKLAMSQDKNQLDSPQTGQCPDQAHRTSLVKQIEFNFPSQAITSPRATVSKEQEKFGKVPFDYASFDAQVFGKRPLIQTVQGRKTPPFPESKHFPNPVKFPNRLPSAGAHTQSPGRASSYSYGQCSEDTHIAAAAAILNLSTRCREATDILSNKPQSLHAKGAEIEVDENGTLDLSMKKNRILDKSAPLTSSNTSIPTPSSSPFKTSSILVNAAFYQALCDQEGWDTPINYSKTHGKTEEEKEKDPVSSLENLEEKKFPGEASIPSPKPKLHARDLKKELITCPTPGCDGSGHVTGNYASHRSVSGCPLADKTLKSLMAANSQELKCPTPGCDGSGHVTGNYASHRSLSGCPRARKGGVKMTPTKEEKEDPELKCPVIGCDGQGHISGKYTSHRTASGCPLAAKRQKENPLNGASLSWKLNKQELPHCPLPGCNGLGHVNNVFVTHRSLSGCPLNAQVIKKGKVSEELMTIKLKATGGIESDEEIRHLDEEIKELNESNLKIEADMMKLQTQITSMESNLKTIEEENKLIEQNNESLLKELAGLSQALISSLADIQLPQMGPISEQNFEAYVNTLTDMYSNLERDYSPECKALLESIKQAVKGIHV

SEQ ID NO: 1142 - DNA, 2486 bp, Homo sapien
gcactgcctctggcacctggggcagccgcgcccgcggagttttccgcccggcgctgacggctgctgcgcccgcggctccccagtgccccgagtgccccgcgggccccgcgagcgggagtgggacccagcccctaggcagaacccaggcgccgcgcccgggacgcccgcggagagagccactcccgcccacgtcccatttcgcccctcgcgtccggagtccccgtggccagatctaaccatgagctaccctggctatcccccgcccccaggtggctacccaccagctgcaccaggtggtggtccctggggaggtgctgcctaccctcctccgcccagcatgccccccatcgggctggataacgtggccacctatgcggggcagttcaaccaggactatctctcgggaatggcggccaacatgtctgggacatttggaggagccaacatgcccaacctgtaccctggggcccctggggctggctacccaccagtgccccctggcggctttgggcagcccccctctgcccagcagcctgttcctccctatgggatgtatccacccccaggaggaaacccaccctccaggatgccctcatatccgccatacccaggggcccctgtgccgggccagcccatgccaccccccggacagcagcccccaggggcctaccctgggcagccaccagtgacctaccctggtcagcctccagtgccactccctgggcagcagcagccagtgccgagctacccaggatacccggggtctgggactgtcacccccgctgtgcccccaacccagtttggaagccgaggcaccatcactgatgctcccggctttgaccccctgcgagatgccgaggtcctgcggaaggccatgaaaggcttcgggacggatgagcaggccatcattgactgcctggggagtcgctccaacaagcagcggcagcagatcctactttccttcaagacggcttacggcaaggatttgatcaaagatctgaaatctgaactgtcaggaaactttgagaagacaatcttggctctgatgaagaccccagtcctctttgacatttatgagataaaggaagccatcaagggggttggcactgatgaagcctgcctgattgagatcctcgcttcccgcagcaatgagcacatccgagaattaaacagagcctacaaagcagaattcaaaaagaccctggaagaggccattcgaagcgacacatcagggcacttccagcggctcctcatctctctctctcagggaaaccgtgatgaaagcacaaacgtggacatgtcactcgcccagagagatgcccaggagctgtatgcggccggggagaaccgcctgggaacagacgagtccaagttcaatgcggttctgtgctcccggagccgggcccacctggtagcagttttcaatgagtaccagagaatgacaggccgggacattgagaagagcatctgccgggagatgtccggggacctggaggagggcatgctggccgtggtgaaatgtctcaagaataccccagccttctttgcggagaggctcaacaaggccatgaggggggcaggaacaaaggaccggaccctgattcgcatcatggtgtctcgcagcgagaccgacctcctggacatcagatcagagtataagcggatgtacggcaagtcgctgtaccacgacatctcgggagatacttcaggggattaccggaagattctgctgaagatctgtggtggcaatgactgaacagtgactggtggctcacttctgcccacctgccggcaacaccagtgccaggaaaaggccaaaagaatgtctgtttctaacaaatccacaaatagccccgagattcaccgtcctagagcttaggcctgtcttccacccctcctgacccgtatagtgtgccacaggacctgggtcggtctagaactctctcaggatgccttttctaccccatccctcacagcctcttgctgctaaaatagatgtttcatttttctgactcatgcaatcattcccctttgcctgtggctaagacttggcttcatttcgtcatgtaattgtatatttttatttggaggcatattttcttttcttacagtcattgccagacagaggcatacaagtctgtttgctgcatacacatttctggtgagggcgactgggtgggtgaagcaccgtgtcctcgctgaggagagaaagggaggcgtgcctgagaaggtagcctgtgcatctggtgagtgtgtcacgagctttgttactgccaaactcactcctttttagaaaaaacaaaaaaaaagggccagaaagtcattccttccatcttccttgcagaaaccacgagaacaaagccagttccctgtcagtgacagggcttcttgtaatttgtggtatgtgccttaaacctgaatgtctgtagccaaaacttgtttccacattaagagtcagccagctctggaatggtctggaaatgtca

SEQ ID NO: 1143 - protein, 505 aa, Homo sapien
MSYPGYPPPPGGYPPAAPGGGPWGGAAYPPPPSMPPIGLDNVATYAGQFNQDYLSGMAANMSGTFGGANMPNLYPGAPGAGYPPVPPGGFGQPPSAQQPVPPYGMYPPPGGNPPSRMPSYPPYPGAPVPGQPMPPPGQQPPGAYPGQPPVTYPGQPPVPLPGQQQPVPSYPGYPGSGTVTPAVPPTQFGSRGTITDAPGFDPLRDAEVLRKAMKGFGTDEQAIIDCLGSRSNKQRQQILLSFKTAYGKDLIKDLKSELSGNFEKTILALMKTPVLFDIYEIKEAIKGVGTDEACLIEILASRSNEHIRELNRAYKAEFKKTLEEAIRSDTSGHFQRLLISLSQGNRDESTNVDMSLAQRDAQELYAAGENRLGTDESKFNAVLCSRSRAHLVAVFNEYQRMTGRDIEKSICREMSGDLEEGMLAVVKCLKNTPAFFAERLNKAMRGAGTKDRTLIRIMVSRSETDLLDIRSEYKRMYGKSLYHDISGDTSGDYRKILLKICGGND

SEQ ID NO: 1144 - DNA, 1505 bp, Homo sapien
gctggtcggaggctcgcagtgctgtcggcgagaagcagtcgggtttggagcgcttgggtcgcgttggtgcgcggtggaacgcgcccagggaccccagttcccgcgagcagctccgcgccgcgcctgagagactaagctgaaactgctgctcagctcccaagatggtgccacccaaattgcatgtgcttttctgcctctgcggctgcctggctgtggtttatccttttgactggcaatacataaatcctgttgcccatatgaaatcatcagcatgggtcaacaaaatacaagtactgatggctgctgcaagctttggccaaactaaaatcccccggggaaatgggccttattccgttggttgtacagacttaatgtttgatcacactaataagggcaccttcttgcgtttatattatccatcccaagataatgatcgccttgacaccctttggatcccaaataaagaatatttttggggtcttagcaaatttcttggaacacactggcttatgggcaacattttgaggttactctttggttcaatgacaactcctgcaaactggaattcccctctgaggcctggtgaaaaatatccacttgttgttttttctcatggtcttggggcattcaggacactttattctgctattggcattgacctggcatctcatgggtttatagttgctgctgtagaacacagagatagatctgcatctgcaacttactatttcaaggaccaatctgctgcagaaataggggacaagtcttggctctaccttagaaccctgaaacaagaggaggagacacatatacgaaatgagcaggtacggcaaagagcaaaagaatgttcccaagctctcagtctgattcttgacattgatcatggaaagccagtgaagaatgcattagatttaaagtttgatatggaacaactgaaggactctattgatagggaaaaaatagcagtaattggacattcttttggtggagcaacggttattcagactcttagtgaagatcagagattcagatgtggtattgccctggatgcatggatgtttccactgggtgatgaagtatattccagaattcctcagcccctcttttttatcaactctgaatatttccaatatcctgctaatatcataaaaatgaaaaaatgctactcacctgataaagaaagaaagatgattacaatcaggggttcagtccaccagaattttgctgacttcacttttgcaactggcaaaataattggacacatgctcaaattaaagggagacatagattcaaatgtagctattgatcttagcaacaaagcttcattagcattcttacaaaagcatttaggacttcataaagattttgatcagtgggactgcttgattgaaggagatgatgagaatcttattccagggaccaacattaacacaaccaatcaacacatcatgttacagaactcttcaggaatagagaaatacaattaggattaaaataggtttttt

SEQ ID NO: 1145 - protein, 441 aa, Homo sapien
MVPPKLHVLFCLCGCLAVVYPFDWQYINPVAHMKSSAWVNKIQVLMAAASFGQTKIPRGNGPYSVGCTDLMFDHTNKGTFLRLYYPSQDNDRLDTLWIPNKEYFWGLSKFLGTHWLMGNILRLLFGSMTTPANWNSPLRPGEKYPLVVFSHGLGAFRTLYSAIGIDLASHGFIVAAVEHRDRSASATYYFKDQSAAEIGDKSWLYLRTLKQEEETHIRNEQVRQRAKECSQALSLILDIDHGKPVKNALDLKFDMEQLKDSIDREKIAVIGHSFGGATVIQTLSEDQRFRCGIALDAWMFPLGDEVYSRIPQPLFFINSEYFQYPANIIKMKKCYSPDKERKMITIRGSVHQNFADFTFATGKIIGHMLKLKGDIDSNVAIDLSNKASLAFLQKHLGLHKDFDQWDCLIEGDDENLIPGTNINTTNQHIMLQNSSGIEKYN

SEQ ID NO: 1146 - DNA, 1365 bp, Homo sapien
gaattcggcacgagggagtttgaccagagatgcaaggggtgaaggagcgcttcctaccgttagggaactctggggacagagcgccccggccgcctgatggccgaggcagggtgcgacccaggacccaggacggcgtcgggaaccataccatggcccggatccccaagaccctaaagttcgtcgtcgtcatcgtcgcggtcctgctgccagtcctagcttactctgccaccactgcccggcaggaggaagttccccagcagacagtggccccacagcaacagaggcacagcttcaagggggaggagtgtccagcaggatctcatagatcagaacatactggagcctgtaacccgtgcacagagggtgtggattacaccaacgcttccaacaatgaaccttcttgcttcccatgtacagtttgtaaatcagatcaaaaacataaaagttcctgcaccatgaccagagacacagtgtgtcagtgtaaagaaggcaccttccggaatgaaaactccccagagatgtgccggaagtgtagcaggtgccctagtggggaagtccaagtcagtaattgtacgtcctgggatgatatccagtgtgttgaagaatttggtgccaatgccactgtggaaaccccagctgctgaagagacaatgaacaccagcccggggactcctgccccagctgctgaagagacaatgaacaccagcccagggactcctgccccagctgctgaagagacaatgaccaccagcccggggactcctgccccagctgctgaagagacaatgaccaccagcccggggactcctgccccagctgctgaagagacaatgaccaccagcccggggactcctgcctcttctcattacctctcatgcaccatcgtagggatcatagttctaattgtgcttctgattgtgtttgtttgaaagacttcactgtggaagaaattccttccttacctgaaaggttcaggtaggcgctggctgagggcggggggcgctggacactctctgccctgcctccctctgctgtgttcccacagacagaaacgcctgcccctgccccaagtcctggtgtctccagcctggctctatcttcctccttgtgatcgtcccatccccacatcccgtgcaccccccaggaccctggtctcatcagtccctctcctggagctgggggtccacacatctcccagccaagtccaagagggcagggccagttcctcccatcttcaggcccagccaggcagggggcagtcggctcctcaactgggtgacaagggtgaggatgagaagtggtcacgggatttattcagccttggtcagagcagaaaaaaaaaaaaaaaaaaaagatctttaatta

SEQ ID NO: 1147 - protein, 299 aa, Homo sapien [sequence omitted]

SEQ ID NO: 1148 - DNA, 7370 bp, Homo sapien
ctttcccacaaccacagagggagttagggatcaaactaaccactagaactattttcctgacagaatctttgccttgcatgtttcaggcccacctggctcctttcacctttcttacacaggtgacattcccagaacctggaggccaggctatgacacagagtcaatcaataaccagggagatctgtgatatagcccagtaggtggggccttgctgccatctgccatatgacccttccagtcccaggcttctgaagagacgtggtaagtgcggtgcagttttcaactgacctctggacgcagaacttcagccatgaaggtaacaggcatctttcttctcagtgccttggccctgttgagtctatctggtaagtgttgcatatttttcaaatttaaataaaactgttttgacctgttgctttgtgaagcacattatcttctagacttttgatgtagtctagtcttcgagagatgttttggacctaatgagatgaaataaaatcaacaggtaagaattattttttaagaggaatttttaacctactataaggaaaacaattctactagtaagaaattcccagaaataaaatggttttcctctattgatgtggctgaccctttgttgggatatggtagagaaaaaagggtaaaaatattttaactttaagtatacttctcattctgtaaatgtgtaaggccaaattacaaattttaaattctcatgggattgcataaaatagataaatggcttccagttattcagtataaaaggcataatttgactgattaaaaatttatttttttattgtataggtttcagtgtacttgaatcatgtatagtttgtcagatttatccctgaatagctaatatatgtgatataaagggaattttttattttcaattcctggtatttcttattagtatctggaaatacaaaaattgcattttgtgtatttacattacacattttgaatgttttgaaagaaaatattctgcttgaatagatggtgcacatatacctccaactgcatcttgacaatgttgacagacaactctgaacccgcagagccaagatcagtttcctttttatcactggaaatggttaacattttcaacttcacctctcatgtagtgaaggatcctgtggagagccaaatcagcactttgctaagaagaggaagaatattgtttgttttatttgctgaatatttatggcaacagtcagtgttccctttccccctcctcatgcatgttaattaatacaaatagatgcctgtgatgagcacctgctcttcagtttttagactcaactagattctaaaagccagtgggcccccaacaacatcaagttctgactatcccgggggaaattctccaagctcatagatgcctcactaattttcattacatttagatacaaagaactacctctttgctcagatcacctcaaagattgatgatattaaaattaattttcaggaatgtttccttatttgattgctatcatattagttccctttcccttccatgaacttatccacagttatcatttcctatatgttgtcagcaaaacctctgctattttctgggggaatagagattagctattttgactacctgtaaattcaacaaatgtgagttagacccatagtccatatgatgcaattgttggaaatagctctttgggaactgatagtgagttggcaaaagaactctattttttcaacaatacttacaaaagggaatttaaatgtaattgaaaaagctaactttgcatcagaagacctggttactgcttatgataactgtttcacagctagttataaaaactctccatactttcatctgtaaactgagataaaaattatacttcactaattgtgagattaaagatctagtaactggttttgagaatgtttgtgagtattcaaaagataatttgctcagtgcctgattcatttccagcagtaagtgcataatttctgttttcaaggaaatagatcaacttcctaaaacatcaaatcgagatactttggtcataatcaaagttttactcaaactttttaaggttttgccaaggaaggggtacaggaaaatcagtcagatacttttggaagattagagaaatcagaaagggtggggaatgaaagagcctagtaaagaagtcacagtctgcaatgaaagcagagaattctgatgaagaatagatctgacttctttcatttaggacccaactaccatatctgatttatttctaggtaacactggagctgactccctgggaagagaggtaaagagatatttgtaatttcttatttctcagactggaacagtttgatccaacaaaaatgcagccttgctgtcacctttcagtttagcctgaagttaagaggagtatgaatgctagggagggttaacgtgagaaatgcaaatggtagtagtagttccaacccacaggcgtatattgaaggacaatttcactgatgtataagcaagttccatatagtcctacagtgcttgctgtgaaggggtttttatatagactagtgatagctgtagacaagtatttggggtggaagccttctcaacttcactccaagtagcccttcctccttacagccagtttgaccatgttggcatgcagctctcccaatcaccaaggtgtggctctaatttataatgaatgacagaaaataataaactaggttctccttctagaaaaatattctaactctaaccttttcatatttttttgtttaagaggtaatttcagtaaatttggagaccagaggaagaagtgtccctgttctcagtacatttatatctagtcagagacagctgatagaccaaaagttcatgaatgaatgcaatattacatttgtgataagtgttatgaaaaagttctgctgccgttaggaacttagcctagttagaaaaatcagggagggtgctccgaagtaactgaggggttattttgagccaaaaaaaaaaatgagtgttagtaaaacaaaactggtggggagatgtagtagaataaagtacttaagagctaaagctcaggaactctgactaggtttgaattctgaatttaggaattccttagctgggtggccttggctaattttattgctttgtgcctcattatcttcacctgaagaagaatataatacttagttcacaggatagttaggaggtttaaacagaataatatataaaaagcactagaacaatgtctaggacaatgacaatcatttgatgattataaactcttactggagtagaatgcaaagacttccaacacccgacaatgcctagtgcctttaagtgcctaatagaagaccagtgtgtgtggactacagtgtacaaggaagaacgtgccccaagatgtggccaacctgagagatgccagcacccgcagtaattgcaaacttgaacattatctcacccatccatgtaaatctcacaacaacactatgagataggtgggaaatggtaatatcatcactgttttgcagatgaactgactgagtttcagaagggccataggacttactaatgtcacacagcttagaaatagcagaggcatgacttaaaacaaggttttctgtctccagatagtaggttatttctcttacaacacacagtatcattctcccaatcacagttattccccagagaaataaaaccatttcagagattttgctatgaactcaagaatggagaataatgggaaatgattctgtttaattccatttttaggccaaatgttacaatgaacttaatggatgcaccaagatatatgaccctgtctgtgggactgatggaaatacttatcccaatgaatgcgtgttatgttttgaaaatcggtgagtacaaacttgagtttcttttaaactatatattttaagttagttatcttcaagtgtactgataatatgaatctcaccccgagaaaagcaaactatttactttttccaaaaacagttatctctttcttattctcccttttatatatttagcattaaatattattttttagaagtcacttgtatgataaaagcctatattttttacagcaaaatagtcgatagcttggatttttataaagtacacacaaaatacctttaattaaaaaaattattagtggttgcaatgattgtgttttttaaagccctcagttatgcaaatataaattgtatagattatataaccaaaaatatatttttacttatggatatgaagccagtttcagtaaagcttcatttcctcagtgaccataagtggtgatgtgatacagagaaatagattcaacacagatttcctatctcactcagcaactgaaaccttagcatgtctcaagcatcatgctaatattccctgtcttacttgtgcttatgactaagaaaacatcatgagcatgtataggatggcttcttataacttggggcaaatgccagaagatgaggtgtaaataaagtgcaacaggagtgaagcagagatacatattttttattaaaaggggccaagaaaggatccatgaaaagaatagaatgcccaaccgggtgcagtggctcactcctgaatcccagcactttgggaggccgatgcaggtggatcacctgagaccgcctggccaacatggtgaaaccccatggtggcgggcgcctataataccagctactcaggaggctgaggcagaagaatcgcttcaatctgggaggcagaggttgcagtgagctgagattgtgccactgcactccaacctgggtgacaagagtgagactccatcttaaaaaaaaggaaaaaaaaagaatagaatgccatttaaatagagttctgaattttggcaatatcaaaagagcatgccaggttaaataaaggtgtggaatgaacaaagcaaataaaagggattccacgagtgactttagtttttctgagattgacttgatattaaagactttgactcaggctcaaatgactgtgtaaatttccattatattctactgcataaattcccttttctgtaatgcaaaccttcttcttgggctgttttaaaccattttggaaaattctcagagtttagcaagtattgtggaaataggacctctggatgagaggtctaatatcctgaagttttagacccaaaacattaggtattctactttgtaataaatctgtttccataattaagacttgtaaaaagaatttgaagccacctgttagttttctcatgacccatgttcttgacattaagctcaaacatcatatttccatccaatgggaggagaaagcaagagaacaacagctttgagacttgggaaatttccagtgccgctcaacatttacagtgaaacattagaaaaatattagtagagggctggaacaccctatctgcttagcctctgaaacctccgagtttctgcttattctttctatttgttcaaaactatgtaaatatgggaggcacatttgtatgctagaaaacatgacctctcttcctatatttctcagataagaaaatttaggtctagagacaaaatgttgctttctcaaatacaacatatttcctaatgtatgacattgcctttttcactgttgattaaaagtcccaaacttattacctagtaactaaagccagacgctgaccctagtttgagacaagtagataataccaaacaagggcttgcaaatcagtctttttggtgattatgtgcttggcaaatatattcaataaacactttttctattccttctacgtcttcatagggaatctgtaccggcaaattcttttccataaacctgcatctccaatagaaccttctataatgatggaaatgttctatgtttatgctgtctaatacatagccactagccacaaaacagtagccttaatgtggctaacactaacttaaatgtggctagtaaaactgatcagctgaatatttaatattatctaaactaatttacatttacatagctatatgtggatagtgaatatatgaaactagagtgaacagcatagcaactcttgtttattctgtttaggtgtgtgtgcttatgtatgctaactgatttggaaatcagtattaatgagcagttaatgattgtgggacaagaaagcattaaaaaatcttaaagagtttggctgggcatggtggctcatgcctgtaatcccagcactttggaagtcccaggcaggtggatcacttttgttaggagtttgagaccagcctggccaacatggtaaaaccccgtctctactaaaaatacaaatattagccaggcatggtggcattcacctgtaatcccagctacttgggaggctgaggcaggagaatcacttgaacccgggaggtggaggctgcagtgagccaaggtcacaccactgcactccagcctgggcaacagagtgagactctgtcttaaaaaaagaaaaaaaagaaaaaaagaaaagaaaaaaaaaagaaaaaaaagtatatggaagtcagatgtccttcagtaatagagaagtagaagaatttttgtaagcccgtacattcaaagaaaaaatggttagaaaaattaaagacctggaaacagtcttctagggaacaattataaaatttagagatatttagtttagggaagagaaaactagtttggtaatggtagtgtggggcgaacagagaggttttatctggaggggaggatgtttagaactggcaggaatcatgtggaataaatatgtgatttacttttgtgagacctcacagatacgaatccccagagctctaagatgaaaggtcaatcaattagaaggtccaacaatagctcaggcatcagctgagatggaaacctggtggcgaaggcagaggcatcaggagcaaaagatgcaacaatagttttgagtttaatttcaggggttcactgtaacaccccacgagatctgtaaaaactgtaaggacagatatttttcctttctgttgtatccttagtgattcaacagtaatcaataaatatttgatgaattaatgactaagtgaatgtataaatgaatgaaagacagagaaaagattataaatctcaaacctctccaactttaaatgaagctgttatttttccccctgtttttctcccatagtcacttttcatcagtgaagtttaagctgatatattttttttaatctctactgcaggaaacgccagacttctatcctcattcaaaaatctgggccttgctgagaaccaaggttttgaaatcccatcaggtcaccgcgaggcctgactggccttattgttgaataaatgtatctgaatatcccctgttgtttccatttgctttttcctcaaaggtatgtttgattataccagggtcaggggactttggtaagac

SEQ ID NO: 1149 - DNA, 2104 bp, Homo sapien
agcaaaatcaagcagttggttagcgaagggattcggtgcagatggatggaccgtctgggctgcggagtccacgggcctgaaacgcggtcgctcctgacccgtcctccgcaaccctcgtcccaccaggccgcggtccccggagcaggccggcgggtggcaggaagacaccaggctgcagggggctggagaagcaacacccctctccctccccgccagagaactggagcgcggggacctcggttgcggatgctggcggcgagccgggttgctaggcgacatcgagagaggaagaggagaaagtcttcatggggtgctagagcatcttaaatgtccctctcatgcagggacatttccctgctgaacgaagagaaggcagacctcggcgagggacccgtggtcagcagcagcttctggtgagcccccgcttcctccgagcctggcacccccctcccgtctcagccaggatgccaacgaggcgctgggccccgggcacccagtgtatcaccaaatgcgagcacacccgccccaagccaggggagctggccttccgcaagggcgacgtggtcaccatcctggaggcctgcgagaacaagagctggtaccgcgtcaagcaccacaccagtggacaggaggggctgctggcagctggggcgctgcgggagcgggaggccctctccgcagaccccaagctcagcctcatgccgtggttccacgggaagatctcgggccaggaggctgtccagcagctgcagcctcccgaggatgggctgttcctggtgcgggagtccgcgcgccaccccggcgactacgtcctgtgcgtgagctttggccgcgacgtcatccactaccgcgtgctgcaccgcgacggccacctcacaatcgatgaggccgtgttcttctgcaacctcatggacatggtggagcattacagcaaggacaagggcgctatctgcaccaagctggtgagaccaaagcggaaacacgggaccaagtcggccgaggaggagctggccagggcgggctggttactgaacctgcagcatttgacattgggagcacagatcggagagggagagtttggagctgtcctgcagggtgagtacctggggcaaaaggtggccgtgaagaatatcaagtgtgatgtgacagcccaggccttcctggacgagacggccgtcatgacgaagatgcaacacgagaacctggtgcgtctcctgggcgtgatcctgcaccaggggctgtacattgtcatggagcacgtgagcaagggcaacctggtgaactttctgcggacccggggtcgagccctcgtgaacaccgctcagctcctgcagttttctctgcacgtggccgagggcatggagtacctggagagcaagaagcttgtgcaccgcgacctggccgcccgcaacatcctggtctcagaggacctggtggccaaggtcagcgactttggcctggccaaagccgagcggaaggggctagactcaagccggctgcccgtcaagtggacggcgcccgaggctctcaaacacgggaagttcaccagcaagtcggatgtctggagttttggggtgctgctctgggaggtcttctcatatggacgggctccgtaccctaaaatgtcactgaaagaggtgtcggaggccgtggagaaggggtaccgcatggaaccccccgagggctgtccaggccccgtgcacgtcctcatgagcagctgctgggaggcagagcccgcccgccggccacccttccgcaaactggccgagaagctggcccgggagctacgcagtgcaggtgccccagcctccgtctcagggcaggacgccgacggctccacctcgccccgaagccaggagccctgaccccacccggtggggcccttggccccagaggaccgagagagtggagagtgcggcgtgggggcactgaccaggcccaaggagggtccaggcgggcaagtcatcctcctggtgcccacagcaggggctggcccacgtagggggctctgggcggcccgtggacaccccagacctgcgaaggatgatcgcccgataaagacggattctaaggactctaaaaaaaaaaaaaaaaaaaaaaaaaa

SEQ ID NO: 1150 - protein, 508 aa, Homo sapien
MQGHFPAERREGRPRRGTRGQQQLLVSPRFLRAWHPPPVSARMPTRRWAPGTQCITKCEHTRPKPGELAFRKGDVVTILEACENKSWYRVKHHTSGQEGLLAAGALREREALSADPKLSLMPWFHGKISGQEAVQQLQPPEDGLFLVRESARHPGDYVLCVSFGRDVIHYRVLHRDGHLTIDEAVFFCNLMDMVEHYSKDKGAICTKLVRPKRKHGTKSAEEELARAGWLLNLQHLTLGAQIGEGEFGAVLQGEYLGQKVAVKNIKCDVTAQAFLDETAVMTKMQHENLVRLLGVILHQGLYIVMEHVSKGNLVNFLRTRGRALVNTAQLLQFSLHVAEGMEYLESKKLVHRDLAARNILVSEDLVAKVSDFGLAKAERKGLDSSRLPVKWTAPEALKHGKFTSKSDVWSFGVLLWEVFSYGRAPYPKMSLKEVSEAVEKGYRMEPPEGCPGPVHVLMSSCWEAEPARRPPFRKLAEKLARELRSAGAPASVSGQDADGSTSPRSQEP

SEQ ID NO: 1151 - DNA, 1701 bp, Homo sapien
gagcaccgcacactcacttcaccctggttcaacacccccacgaggttgaccccgtcattatgttagagattatgcattttccacatagggaaactgaggctcaggggtgttaagtgactcacccaaggtcacacggctaggaagttgctgcacgctcctatgctccatttcctctgggagcctatcaacccagataaagcgggacctcctctctggtagaggtgcagggggcagtactcaacatgatcacagagggagcgcaggcccctcgattgttgctgccgccgctgctcctgctgctcaccctgccagccacaggctcagaccccgtgctctgcttcacccagtatgaagaatcctccggcaagtgcaagggcctcctggggggtggtgtcagcgtggaagactgctgtctcaacactgcctttgcctaccagaaacgtagtggtgggctctgtcagccttgcaggtccccacgatggtccctgtggtccacatgggccccctgttcggtgacgtgctctgagggctcccagctgcggtaccggcgctgtgtgggctggaatgggcagtgctctggaaaggtggcacctgggaccctggagtggcagctccaggcctgtgaggaccagcagtgctgtcctgagatgggcggctggtctggctgggggccctgggagccttgctctgtcacctgctccaaagggacccggacccgcaggcgagcctgtaatcaccctgctcccaagtgtgggggccactgcccaggacaggcacaggaatcagaggcctgtgacacccagcaggtctgccccacacacggggcctgggccacctggggcccctggaccccctgctcagcctcctgccacggtggaccccacgaacctaaggagacacgaagccgcaagtgttctgcacctgagccctcccagaaacctcctgggaagccctgcccggggctagcctacgagcagcggaggtgcaccggcctgccaccctgcccagtggctgggggctgggggccttggggccctgtgagcccctgccctgtgacctgtggcctgggccagaccatggaacaacggacgtgcaatcaccctgtgccccagcatgggggccccttctgtgctggcgatgccacccggacccacatctgcaacacagctgtgccctgccctgtggatggggagtgggactcgtggggggagtggagcccctgtatccgacggaacatgaagtccatcagctgtcaagaaatcccgggccagcagtcacgcgggaggacctgcaggggccgcaagtttgacggacatcgatgtgccgggcaacagcaggatatccggcactgctacagcatccagcactgccccttgaaaggatcatggtcagagtggagtacctgggggctgtgcatgcccccctgtggacctaatcctacccgtgcccgccagcgcctctgcacacccttgctccccaagtacccgcccaccgtttccatggtcgaaggtcagggcgagaagaacgtgaccttctgggggagaccgctgccacggtgtgaggagctacaagggcagaagctggtggtggaggagaaacgaccatgtctacacgtgcctgcttgcaaagaccctgaggaagaggaactctaacacttctctcctccactctgagccccctgaccttccaaacctcaataaa

SEQ ID NO: 1152 - protein, 469 aa, Homo sapien
MITEGAQAPRLLLPPLLLLLTLPATGSDPVLCFTQYEESSGKCKGLLGGGVSVEDCCLNTAFAYQKRSGGLCQPCRSPRWSLWSTWAPCSVTCSEGSQLRYRRCVGWNGQCSGKVAPGTLEWQLQACEDQQCCPEMGGWSGWGPWEPCSVTCSKGTRTRRRACNHPAPKCGGHCPGQAQESEACDTQQVCPTHGAWATWGPWTPCSASCHGGPHEPKETRSRKCSAPEPSQKPPGKPCPGLAYEQRRCTGLPPCPVAGGWGPWGPVSPCPVTCGLGQTMEQRTCNHPVPQHGGPFCAGDATRTHICNTAVPCPVDGEWDSWGEWSPCIRRNMKSISCQEIPGQQSRGRTCRGRKFDGHRCAGQQQDIRHCYSIQHCPLKGSWSEWSTWGLCMPPCGPNPTRARQRLCTPLLPKYPPTVSMVEGQGEKNVTFWGRPLPRCEELQGQKLVVEEKRPCLHVPACKDPEEEEL

SEQ ID NO: 1153 - DNA, 1019 bp, Homo sapien
ttcctttcaaatacacaccccaacccgccccggcatacacagaaatggggactgcgagcagaagcaacatcgctcgccatctgcaaaccaatctcattctattttgtgtcggtgctgtgggcgcctgtactctctctgtcacacaaccgtggtacctagaagtggactacactcatgaggccgtcaccataaagtgtaccttctccgcaaccggatgcccttctgagcaaccaacatgcctgtggtttcgctacggtgctcaccagcctgagaacctgtgcttggacgggtgcaaaagtgaggcagacaagttcacagtgagggaggccctcaaagaaaaccaagtttccctcactgtaaacagagtgacttcaaatgacagtgcaatttacatctgtggaatagcattccccagtgtgccggaagcgagagctaaacagacaggaggagggaccacactggtggtaagagaaattaagctgctcagcaaggaactgcggagcttcctgacagctcttgtatcactgctctctgtctatgtgaccggtgtgtgcgtggccttcatactcctctccaaatcaaaatccaaccctctaagaaagaaagaaataaaagaagactcacaaaagaagaagagtgctcggcgtatttttcaggaaattgctcaagaactataccataagagacatgtggaaacaaatcagcaatctgagaaagataacaacacttatgaaaacagaagagtactttccaactatgaaaggccatagaaacgttttaattttcaatgaagtcactgaaaatccaactccaggagctatggcagtgttaatgaacatatatcatcaggtcttaaaaaaaaaataaaggtaaactgaaaagacaactggctacaaagaaggatgtcagaatgtaaggaaactataactaatagtcattaccaaaatactaaaacccaacaaaatgcaactgaaaaataccttccaaatttgccaagaaaaaaaattctattyyaaact

SEQ ID NO: 1154 - protein, 241 aa, Homo sapien
MGTASRSNIARHLQTNLILFCVGAVGACTLSVTQPWYLEVDYTHEAVTIKCTFSATGCPSEQPTCLWFRYGAHQPENLCLDGCKSEADKFTVREALKENQVSLTVNRVTSNDSAIYICGIAFPSVPEARAKQTGGGTTLVVREIKLLSKELRSFLTALVSLLSVYVTGVCVAFILLSKSKSNPLRKKEIKEDSQKKKSARRIFQEIAQELYHKRHVETNQQSEKDNNTYENRRVLSNYERP

SEQ ID NO: 1155 - DNA, 2130 bp, Homo sapien
gttagagaacgtcgcggaggaggtaagcgtcgcttggcgcctggccgccgcgggcaggatacaccgtgggcctgaggcgcgagcccggcggcgtgcggccctctctccgcgcggagccgagccggaactgcggcagtctctccctgccaggctcttcatccaaggtttctgtggatcccttctgaagttctatctgaaaattgcgcttaagtgaattttctgttagaagaacttggttgctactttcttgtcaagatgattgcaacacctttgaaacattcaagaatttacttacctccagaggcatcttctcaaaggagaaatctacccatggatgcaatcttttttgacagcattccttcaggcacacttactcctgtaaaagatttggtgaaatatcagaactcctccttaaaattgaatgaccataaaaagaatcagttcctaaaaatgacaacttttaacaataaaaatatatttcaatcaactatgctaacagaggctactacctctaacagttctcttgatatcagtgctataaagcccaacaaggatggattaaaaaataaagcaaactatgaatcaccaggaaaaatatttctaagaatgaaagaaaaagtactgcgtgacaagcaagaacagccatcaagaaacagtagtttgttggaaccacagaaaagtggaaataatgaaaccttcactcctaacagagttgaaaaaaaaaattgcagcatacctacctatgtgaagaaaaggaaaacaacaaatcattccagtcagatgacagttcactaagagcctcagtccaaggagttcctctagaatcatcaaataatgatattttcctcccggtcaaacaaaagattcagtgccagcaggaaaagaaagcaccactgcacaatttaacttacgaacttccaactctgaaccaagaacaggaaaattttttggctgtagaagcccgaaacaagacattaactagagctcagttggctaaacaaatttttcactcaaaggagagtatagttgcaaccactaaatccaaaaaggacacgtttgttttagaaagcgttgattctgctgatgaacaatttcaaaatactaatgctgagactctcagtactaattgtattcctattaaaaatggcagcctgttaatggtttctgatagtgagaggacaacagaagggacttcgcaacagaaagttaaggaaggaaatggaaaaacagtgcctggagagacaggtcttccaggttccatgaaagatacatgtaaaattgtacttgcaacaccaagacttcatataacaatacctcggaggtcaaaaagaaatatttcaaagctttctcctccaagaatatttcaaactgttacaaatggacttaaaaaaaatcaggtagttcagctacaggaatggatgatttaaagcatcaataataatactgctatatgtgtagaaggaaaattgatagacgtcactaacatatattggcacagtaatgtaattatagagcggattgagcacaacaaacttaggactatatcaggcaacgtttatatattaaaaggcatgatagaccaaatttccatgaaagaagcaggatatccaaattatctcataaggaaatttatgtttggatttccagaaaattggaaagagcacattgataactttctggaacaattaagagatggggtttcgtcatgttggccagactggtctcgaactcctggctacaagtgatccgcctgtctcagcctcccaaagtgttgggattacaggcatgagccactgtgcctggcctgagggctggtgaaaagaacagggaaaagaccaaacaaaaacagaaaactggaagatctgtccgtgacataaggaaatcaatgaaaaatgatgcacgagaaaaccaaacagatactgctcaaagagccaccaccacttacgattttgattgtgataatttggaactgaagagtaataagcacagtgagtcaccaggagctacagaattaaacatgtgccacagtaattgccaaaataaaccaacattaaggttcccagatgaccaagtaaataatactattcaaaatggaggaggagatgacttatctaatcaggaattaattgg

SEQ ID NO: 1156 - protein, 179 aa, Homo sapien
MIATPLKHSRIYLPPEASSQRRNLPMDAIFFDSIPSGTLTPVKDLVKYQNSSLKLNDHKKNQFLKMTTFNNKNIFQSTMLTEATTSNSSLDISAIKPNKDGLKNKANYESPGKIFLRMKEKVLRDKQEQPSRNSSLLEPQKSGNNETFTPNRVEKKNCSIPTYVKKRKTTNHSSQMTVH

SEQ ID NO: 1157 - DNA, 1485 bp, Homo sapien
tcagccaattagagctccagttgtcactcctacccacactgggcctgggggtgaagggaagtgtttattaggggtacatgtgaagccgtccagaagtgtcagagtctttgtagctttgaaagtcacctaggttatttgggcatgctctcctgagtcctctgctagttaagctctctgaaaagaaggtggcagacccggtttgctgatcgccccagggatcaggaggctgatcccaaagttgtcagatggagagtaaatacaaggagatactcttgctaacaggcctggataacatcactgatgaggaactggataggtttaagttctttctttcagacgagtttaatattgccacaggcaaactacatactgcaaacagaatacaagtagctaccttgatgattcaaaatgctggggcggtgtctgcagtgatgaagaccattcgtatttttcagaagttgaattatatgcttttggcaaaacgtcttcaggaggagaaggagaaagttgataagcaatacaaatcggtaacaaaaccaaagccactaagtcaagctgaaatgagtcctgctgcatctgcagccatcagaaatgatgtcgcaaagcaacgtgctgcaccaaaagtctctcctcatgttaagcctgaacagaaacagatggtggcccagcaggaatctatcagagaagggtttcagaagcgctgtttgccagttatggtactgaaagcaaagaagcccttcacgtttgagacccaagaaggcaagcaggagatgtttcatgctacagtggctacagaaaaggaattcttctttgtaaaagtttttaatacactgctgaaagataaattcattccaaagagaataattataatagcaagatattatcggcacagtggtttcttagaggtaaatagcgcctcacgtgtgttagatgctgaatctgaccaaaaggttaatgtcccgctgaacattatcagaaaagctggtgaaaccccgaagatcaacacgcttcaaactcagccccttggaacaattgtgaatggtttgtttgtagtccagaaggtaacagaaaagaagaaaaacatattatttgacctaagtgacaacactgggaaaatggaagtactgggggttagaaacgaggacacaatgaaatgtaaggaaggagataaggttcgacttacattcttcacactgtcaaaaaatggagaaaaactacagctgacatctggagttcatagcaccataaaggttattaaggccaaaaaaaaaacatagagaagtaaaaaggaccaattcaagccaactggtctaagcagcatttaattgaagaatatgtgatacagcctcttcaatcagattgtaagttacctgaaagctgcagttcacaggctcctctctccaccaaattaggatagaataattgctggataaacaaattcagaatatcaacagatgatcacaataaacatctgtttctcattcc

SEQ ID NO: 1158 - protein, 343 aa, Homo sapien
MESKYKEILLLTGLDNITDEELDRFKFFLSDEFNIATGKLHTANRIQVATLMIQNAGAVSAVMKTIRIFQKLNYMLLAKRLQEEKEKVDKQYKSVTKPKPLSQAEMSPAASAAIRNDVAKQRAAPKVSPHVKPEQKQMVAQQESIREGFQKRCLPVMVLKAKKPFTFETQEGKQEMFHATVATEKEFFFVKVFNTLLKDKFIPKRIIIIARYYRHSGFLEVNSASRVLDAESDQKVNVPLNIIRKAGETPKINTLQTQPLGTIVNGLFVVQKVTEKKKNILFDLSDNTGKMEVLGVRNEDTMKCKEGDKVRLTFFTLSKNGEKLQLTSGVHSTIKVIKAKKKT

SEQ ID NO: 1159 - DNA, 2540 bp, Homo sapien
gaaaaggtggacaagtcctattttcaagagaagatgacttttaacagttttgaaggatctaaaacttgtgtacctgcagacatcaataaggaagaagaatttgtagaagagtttaatagattaaaaacttttgctaattttccaagtggtagtcctgtttcagcatcaacactggcacgagcagggtttctttatactggtgaaggagataccgtgcggtgctttagttgtcatgcagctgtagatagatggcaatatggagactcagcagttggaagacacaggaaagtatccccaaattgcagatttatcaacggcttttatcttgaaaatagtgccacgcagtctacaaattctggtatccagaatggtcagtacaaagttgaaaactatctgggaagcagagatcattttgccttagacaggccatctgagacacatgcagactatcttttgagaactgggcaggttgtagatatatcagacaccatatacccgaggaaccctgccatgtattgtgaagaagctagattaaagtcctttcagaactggccagactatgctcacctaaccccaagagagttagcaagtgctggactctactacacaggtattggtgaccaagtgcagtgcttttgttgtggtggaaaactgaaaaattgggaaccttgtgatcgtgcctggtcagaacacaggcgacactttcctaattgcttctttgttttgggccggaatcttaatattcgaagtgaatctgatgctgtgagttctgataggaatttcccaaattcaacaaatcttccaagaaatccatccatggcagattatgaagcacggatctttacttttgggacatggatatactcagttaacaaggagcagcttgcaagagctggattttatgctttaggtgaaggtgataaagtaaagtgctttcactgtggaggagggctaactgattggaagcccagtgaagacccttgggaacaacatgctaaatggtatccagggtgcaaatatctgttagaacagaagggacaagaatatataaacaatattcatttaactcattcacttgaggagtgtctggtaagaactactgagaaaacaccatcactaactagaagaattgatgataccatcttccaaaatcctatggtacaagaagctatacgaatggggttcagtttcaaggacattaagaaaataatggaggaaaaaattcagatatctgggagcaactataaatcacttgaggttctggttgcagatctagtgaatgctcagaaagacagtatgcaagatgagtcaagtcagacttcattacagaaagagattagtactgaagagcagctaaggcgcctgcaagaggagaagctttgcaaaatctgtatggatagaaatattgctatcgtttttgttccttgtggacatctagtcacttgtaaacaatgtgctgaagcagttgacaagtgtcccatgtgctacacagtcattactttcaagcaaaaaatttttatgtcttaatctaactctatagtaggcatgttatgttgttcttattaccctgattgaatgtgtgatgtgaactgactttaagtaatcaggattgaattccattagcatttgctaccaagtaggaaaaaaaatgtacatggcagtgttttagttggcaatataatctttgaatttcttgatttttcagggtattagctgtattatccattttttttactgttatttaattgaaaccatagactaagaataagaagcatcatactataactgaacacaatgtgtattcatagtatactgatttaatttctaagtgtaagtgaattaatcatctggattttttattcttttcagataggcttaacaaatggagctttctgtatataaatgtggagattagagttaatctccccaatcacataatttgttttgtgtgaaaaaggaataaattgttccatgctggtggaaagatagagattgtttttagaggttggttgttgtgttttaggattctgtccattttcttgtaaagggataaacacggacgtgtgcgaaatatgtttgtaaagtgatttgccattgttgaaagcgtatttaatgatagaatactatcgagccaacatgtactgacatggaaagatgtcagagatatgttaagtgtaaaatgcaagtggcgggacactatgtatagtctgagccagatcaaagtatgtatgttgttaatatgcatagaacgagagatttggaaagatatacaccaaactgttaaatgtggtttctcttcggggagggggggattgggggaggggccccagaggggttttagaggggccttttcactttcgacttttttcattttgttctgttcggattttttataagtatgtagaccccgaagggttttatgggaactaacatcagtaacctaacccccgtgactatcctgtgctcttcctagggagctgtgttgtttcccacccaccacccttccctctgaacaaatgcctgagtgctggggcactttg

SEQ ID NO: 1160 - protein, 497 aa, Homo sapien [sequence omitted]

SEQ ID NO: 1161 - DNA, 1081 bp, Homo sapien
ggcggcggcgacgctgcctcctcaccggcgcaggctaggagggggcggcctgagtgccgtagccgagccggggctggagcgcgcggtctgacctacgagaaacatggcaaccagcgccgtccccagtgacaacctccccacatacaagctggtggtggtgggggatgggggtgtgggcaaaagtgccctcaccatccagtttttccagaagatctttgtgcctgactatgaccccaccattgaagactcctacctgaaacatacggagattgacaatcaatgggccatcttggacgttctggacacagctgggcaggaggaattcagcgccatgcgggagcaatacatgcgcacgggggatggcttcctcatcgtctactccgtcactgacaaggccagctttgagcacgtggaccgcttccaccagcttatcctgcgcgtcaaagacagggagtcattcccgatgatcctcgtggccaacaaggtcgatttgatgcacttgaggaagatcaccagggagcaaggaaaagaaatggcgaccaaacacaatattccgtacatagaaaccagtgccaaggacccacctctcaatgtcgacaaagccttccatgacctcgttagagtaattaggcaacagattccggaaaaaagccagaagaagaagaagaaaaccaaatggcggggagaccgggccacaggcacccacaaactgcaatgtgtgatcttgtgacaggcctgaaggcctcgggcacagtgacggtggcctggccagccctcgggacccctccccacctaactgcactgaaaccatttctaaccacaacccttggcccaaggacttggtacaggaagggagaagggcaggtgggcagggagcaagacagggtctggcttttgccaagaggaacggggctttttccaccttcttcaaaagagacaagggaaggccacctgttaaagcaggaagcagcatcaagttgccccttgggcccccccatgttgtttggatttcaaaccgggtttccttcccccttcttttcgggttgggtgttgttggttatttggttaactacatatggtt

SEQ ID NO: 1162 - protein, 208 aa, Homo sapien [sequence omitted]

SEQ ID NO: 1163 - DNA, 1327 bp, Homo sapien
ggtcgacgacgtggcagccgggatgcactaggcaaagccagctgggctcctgagtccggtgggtacttggagaacttactacgtctagctggaggattgtaaatgtaccaatcagcatgctgtgtctagctcaagaactcaagctccatgaggagatgtttcattgtcgagagcagtcatgatggcctgcactccacacaatgcaacagagtgaaagagcaggttctgcttctttggtgtagtcctgaagcttcctaagaaacttcacatcaggtgatggataggagcaaccctgtaaaaccagccttagactattttttaaacaggctggtgaattaccagatctccgtcaagtgcagtaaccagttcaagttggaagtgtgtcttttgaatgcagaaaacaaagtcgtggacaaccaggctgggacccagggccagctgaaggtgctgggtgccaacctctggtggccgtacctgatgcacgaacaccccgcctacctctactcgtgggaggatggtgattgctcacaccaaagccttggacccctcccagcctgtgacctttgtgaccaactccacctacgcagcagacaagggggctctgtatgtggatgtgatccgtgtgaacagctactactcttggtatcgcaactacgggcacctggagttgattcagctgcagctggccgcccagtttgagaattggtgtaagacatcacaatcccattattcagagcgcgtatggagtggaaacgcttgtagggtttcaccagtctttcccagggaactccgatgaagtgttccaacaaaatgagcgagtgaaccaagaagaggatgacattagatccaggagatacaacagaggagataatctccaggatgcctgtgaagaaagatccctggatcccaggatgattataggacaagttgttcataatccagcaggccagaagacttccagggaaactcattcaaggaggtgaaaatgatggatgactcctccaagatgaaaatggaccagccgcagtgctcacgcctgtaataccagcactttgggaggctgaggcaggcggatcacttgaggtcaggagtttgaaactagcctggccaacgtggcaaaactccatctctattaaaaatacaaaaattagccaggcatagtggtgcatgcctgtagtcccagctacttgggatgccgaggcaggaagaattgcttgaacctgggaggcagagtctgcagtgagccgagatcatgccactgcactccagcctgggtgacagagccactccgtctcaaaaaaaaaaaaaaaaaaaaaaaaaaaaaaaa

SEQ ID NO: 1164 - protein, 140 aa, Homo sapien [sequence omitted]

SEQ ID NO: 1165 - DNA, 3139 bp, Homo sapien
acagacagaaacgagggaagagagagaaattggggaccctgaagaaagggggccagcagcaggtaggtgccatcagggacaagaacagcacctcccagggtgggagaccccaggcctttctggcagcaggtctggatggaaagtggacaggaggctcacccgtctgcatcccctgctcctgcccctgctcggctacaaaaaccaaagggacagcagctgaccacaccccggtagccactcctgcataaagctctcccctcctgtgaccagctgaggacctcaggctgcagcggagccatgcccagatacacggtgcacgtacgtggggaatggctggcagtgccctgccaggacgcgcagctcactgtgggctggctgggccgggaggccgtgaggcgctatatcaagaataagcccgacaatggtggcttcacctccgtggatgacgcgcacttccttgtgcgccggtgcaagggcctgggcctgctggacaacgaggaccggctcgaggtggccctagagaacaacgagttcgtggaagtggttatagagggtgatgccatgtctcctgacttcattccatctcaaccagaaggagtttatctatacagcaagtaccgggagcctgaaaagtacatcgagttagatggagaccgtctgaccacggaggatctggtcaacttgggaaagggacgctacaaaataaagctcaccccaacagctgagaagagggtgcagaaatccagggaggtcatagatagcatcataaaagagaaaacagttgtttacggtattactacaggttttgggaaatttgccagaactgtaattcctatcaataagctacaggagcttcaggtcaacttagtacgctcacattcttcaggtgttgggaaaccactaagtcctgagaggtgtcggatgctcttggctttaaggatcaatgtcttagccaaaggatacagtggcatttccctggagaccctcaaacaagtcatagaaatgtttaatgcctcctgcctgccctatgtcccagagaaaggaaccgttggtgccagtggagaccttgccccactctctcatcttgctcttgggctagttggagaagggaagatgtggtctccgaagagtggctgggctgatgctaaatacgtgctagaagcccatggattgaaaccagttattttaaaaccaaaagagggcctggcactcatcaatgggacgcagatgatcacatccctgggctgtgaagctgtagagcgagccagtgctattgcacggcaggctgacattgtggcagccctgacccttgaggtgctgaagggcaccaccaaagcctttgacactgacattcatgctcttcgacctcaccgtgggcaaattgaagttgcttttcggtttcggtcactcttggactcagatcaccacccatcagaaatagcagagagtcacaggttctgtgatcgcgtccaggatgcatacaccttgcgctgctgtccacaggtccatggtgtggtgaatgatacaatagcatttgtgaagaacatcattaccacagaactgaacagcgcaacagataatcctatggtctttgccaataggggagagacagtttctggaggaaacttccatggtgaatacccagccaaagccctagactacttggccattggcatccatgaacttgctgcaatcagtgagagaagaatcgagcggctctgcaatccctccctcagtgagctgcctgccttcctggtggctgaaggtggtctgaactctgggttcatgatagctcactgcacggcagcagcccttgtttctgagaacaaggctctgtgccatccctcgtctgttgactccctctccaccagcgcagccacggaggaccacgtctccatgggaggatgggcagcaaggaaagccctcagggtcatcgagcatgtggagcaagtgctggccatcgagctccttgcagcctgccagggcatagagtttctacgtcccctgaaaacaaccactccgctggagaaggtctatgacctggtgcgctctgttgtaaggccctggataaaagatcgcttcatggccccggacatcgaggcagcccacaggctgctcctggagcagaaggtttgggaagtagctgctccatacattgaaaaatacagaatggagcatattccagaatcaagacctctttctccaacagccttttcactgcaatttctgcacaagaaatccaccaaaatcccggagtctgaggacctttaatgggctttgtcatgaagtagcagatgagagggcagtcagtttagcacaaagcaatactaggctgaaggagagacctgagaactttcctaggtagatcaatccattgtatcattcagttcttctaaagcctacgttggttaggctgatggcagtattatagttgctaaattcagcactgtgttcctgttgtcgtggttcaagacccaccaggtattttcagattataaaacttttctttctttcttaacagtttcaacaggccactcactcttaagggtgagaagaataaccacaattgtatgtgcctgttttttactcttagcattagatgaattcaaatttggaaacagattgatagcaattttttctaaaaacattagacttttgttaacctttttttttttttttaaatttgcttcaacaagctctccaccagttgactttctttggctaattttactttgcatgatatgccttaatatgccttcataaataaccattttaagtcataatttgtccttaagctgcttttttcttctattaattggatcatagtaaagagtagtcaatagggtcttcagctattaattgtagaggtgattaaaaccaacaaggagtttcatgtgcaaaggagataaggaatgaatataaagattgctatttgggtggctcttattaaactgtgtattttgtacttatcactacacgtatcccccaaatgcttacatgggagtttgaggttagtattttcacttccttggtgttagtactctattcacattcttattgtaaccttcctcatttcacagataaggaatctttggggattaaccaacctcctttctgtaatggtaatcattaaaataag

SEQ ID NO: 1166 - protein, 657 aa, Homo sapien
MPRYTVHVRGEWLAVPCQDAQLTVGWLGREAVRRYIKNKPDNGGFTSVDDAHFLVRRCKGLGLLDNEDRLEVALENNEFVEVVIEGDAMSPDFIPSQPEGVYLYSKYREPEKYIELDGDRLTTEDLVNLGKGRYKIKLTPTAEKRVQKSREVIDSIIKEKTVVYGITTGFGKFARTVIPINKLQELQVNLVRSHSSGVGKPLSPERCRMLLALRINVLAKGYSGISLETLKQVIEMFNASCLPYVPEKGTVGASGDLAPLSHLALGLVGEGKMWSPKSGWADAKYVLEAHGLKPVILKPKEGLALINGTQMITSLGCEAVERASAIARQADIVAALTLEVLKGTTKAFDTDIHALRPHRGQIEVAFRFRSLLDSDHHPSEIAESHRFCDRVQDAYTLRCCPQVHGVVNDTIAFVKNIITTELNSATDNPMVFANRGETVSGGNFHGEYPAKALDYLAIGIHELAAISERRIERLCNPSLSELPAFLVAEGGLNSGFMIAHCTAAALVSENKALCHPSSVDSLSTSAATEDHVSMGGWAARKALRVIEHVEQVLAIELLAACQGIEFLRPLKTTTPLEKVYDLVRSVVRPWIKDRFMAPDIEAAHRLLLEQKVWEVAAPYIEKYRMEHIPESRPLSPTAFSLQFLHKKSTKIPESEDL

SEQ ID NO: 1167 - DNA, 2386 bp, Homo sapien
ggaggaggaagcaagcgagggggctggttcctgagcttcgcaattcctgtgtcgccttctgggctcccagcctgccgggtcgcatgatccctccggccggagctggtttttttgccagccaccgcgaggccggctgagttaccggcatccccgcagccacctcctctcccgacctgtgatacaaaagatcttccgggggctgcacctgcctgcctttgcctaaggcggatttgaatctctttctctcccttcagaatcttatcttggctttggatcttagaagagaatcactaaccagagacgagactcagtgagtgagcaggtgttttggacaatggactggttgagcccatccctattataaaaatgtctcagagcaaccgggagctggtggttgactttctctcctacaagctttcccagaaaggatacagctggagtcagtttagtgatgtggaagagaacaggactgaggccccagaagggactgaatcggagatggagacccccagtgccatcaatggcaacccatcctggcacctggcagacagccccgcggtgaatggagccactggccacagcagcagtttggatgcccgggaggtgatccccatggcagcagtaaagcaagcgctgagggaggcaggcgacgagtttgaactgcggtaccggcgggcattcagtgacctgacatcccagctccacatcaccccagggacagcatatcagagctttgaacaggatacttttgtggaactctatgggaacaatgcagcagccgagagccgaaagggccaggaacgcttcaaccgctggttcctgacgggcatgactgtggccggcgtggttctgctgggctcactcttcagtcggaaatgaccagacactgaccatccactctaccctcccacccccttctctgctccaccacatcctccgtccagccgccattgccaccaggagaaccactacatgcagcccatgcccacctgcccatcacagggttgggcccagatctggtcccttgcagctagttttctagaatttatcacacttctgtgagacccccacacctcagttcccttggcctcagaattcacaaaatttccacaaaatctgtccaaaggaggctggcaggtatggaagggtttgtggctgggggcaggagggccctacctgattggtgcaacccttaccccttagcctccctgaaaatgtttttctgccagggagcttgaaagttttcagaacctcttccccagaaaggagactagattgcctttgttttgatgtttgtggcctcagaattgatcattttccccccactctccccacactaacctgggttccctttccttccatccctaccccctaagagccatttaggggccacttttgactagggattcaggctgcttgggataaagatgcaaggaccaggactccctcctcacctctggactggctagagtcctcactcccagtccaaatgtcctccagaagcctctggctagaggccagccccacccaggagggagggggctatagctacaggaagcaccccatgccaaagctagggtggcccttgcagttcagcaccaccctagtcccttcccctccctggctcccatgaccatactgagggaccaactgggcccaagacagatgccccagagctgtttatggcctcagctgcctcacttcctacaagagcagcctgtggcatctttgccttgggctgctcctcatggtgggttcaggggactcagccctgaggtgaaagggagctatcaggaacagctatgggagccccagggtcttccctacctcaggcaggaagggcaggaaggagagcctgctgcatggggtggggtagggctgactagaagggccagtcctgcctggccaggcagatctgtgccccatgcctgtccagcctgggcagccaggctgccaaggccagagtggcctggccaggagctcttcaggcctccctctctcttctgctccacccttggcctgtctcatccccaggggtcccagccaccccgggctctctgctgtacatatttgagactagtttttattccttgtgaagatgatatactatttttgttaagcgtgtctgtatttatgtgtgaggagctgctggcttgcagtgcgcgtgcacgtggagagctggtgcccggagattggacggcctgatgctccctcccctgccctggtccagggaagctggccgagggtcctggctcctgaggggcatctgcccctcccccaacccccaccccacacttgttccagctctttgaaatagtctgtgtgaaggtgaaagtgcagttcagtaataaactgtgtttactcagtgaaaaaaaaaaaaaaaaaa

SEQ ID NO: 1168 - protein, 233 aa, Homo sapien
MSQSNRELVVDFLSYKLSQKGYSWSQFSDVEENRTEAPEGTESEMETPSAINGNPSWHLADSPAVNGATGHSSSLDAREVIPMAAVKQALREAGDEFELRYRRAFSDLTSQLHITPGTAYQSFEQVVNELFRDGVNWGRIVAFFSFGGALCVESVDKEMQVLVSRIAAWMATYLNDHLEPWIQENGGWDTFVELYGNNAAAESRKGQERFNRWFLTGMTVAGVVLLGSLFSRK

SEQ ID NO: 1169 - DNA, 2452 bp, Homo sapien
cgcaagaatgcatacaaactccagggctgctctctcctggagagggagggaggggatttaaaaacctgcagcaacatgggggaggaggctgtttgtccttctctctctggggaagtaactcgctcaaactgccttccttgctgagctgcttcgcgtagctttgaggaaggtctagtgaaattggtctttccattacatctggatgtactaccagagagttctgctgctgttgttttttttagcttttctttctttgagtctttaaagggcaattgtcgacactctgcaaacataccgatttgttgtctgcccactttggagtcttcaatctgggcagtaactatttaccctttttcctgctagcctgtccccctctctggattgaagtcacctgctaagacaatggactaccgaccagactcccggaaatcatgttggtaggatcccagtctttttcgcctggagggcccaatgggatcattagaagccagtcctttgcgggtttcagcggcctccaggaaaggcgatccaggtgtaactccttcattgaaaattcctccgctctcaagaagcctcaggccaaactgaagaaaatgcacaatttaggccacaaaaacaacaatccccccaaagagcctcagcctaaaagggtggaagaagtctacagggccttgaaaaatggacttgatgaatatctggaggttcaccagacggagctggacaagttgacagctcagttaaaagatatgaaaagaaactctcgcctgggtgtactgtatgacctagacaagcaaattaaaacaattgaaagatacatgagacgcctggagtttcatataagtaaggtagatgaactctatgaagcttattgtatccagcgacgcctccaggatggtgccagcaaaatgaagcaagccttcgcaacatcccctgccagcaaagctgcccgggagagtctgacagagatcaatcggagcttcaaggagtacacagagaatatgtgcaccattgaagtggagctagagaatctgctgggagaattctccatcaagatgaaaggtctggctggctttgcacgcctctgtcctggagatcaatatgaaattttcatgaagtatggccggcagcggtggaaactgaaaggcaaaatagaagtaaatggcaagcagagctgggatggagaagaaacagtttttctgcccctgatagttgggttcatctccatcaaggtcacggagctcaaagggctagcaactcacatcctggtaggtagcgtgacctgtgagaccaaagagctgtttgcagcccgacctcaggtagtggctgtcgacatcaatgaccttggtaccatcaaactgaacctggaaatcacctggtatccatttgacgtggaggacatgaccgcatcctcaggcgctgggaacaaggcagcagcccttcagaggagaatgtccatgtacagccagggtaccccggaaacgcccaccttcaaagaccactccttcttttcaaatctacctgatgacatctttgaaaatggaaaggcagccgaggagaaaatgccactgtcgctcagcttcagtgacctgcccaacggggactgcgccctcacctcccactcaacaggctccccttccaactcaacaaatccagaaattaccatcacccctgcggagtttaacctcagcagcttggcctcccagaatgagggtatggatgacaccagctcagcatcttccaggaactccctgggagaaggccaagagccaaagtcacacctgaaggaggaagacccagaggagcccagaaaacctgcctcggccccatctgaggcttgccgccgacagtcctcaggtgctggggctgagcacctgttccttgagaatgatgttgcagaagcacttctgcaagagtctgaggaggcctctgagctcaagcctgtggaactggacacttcggaaggaaacatcacaaagcagctggtcaagaggctcacatctgcagaggtgccaatggccacagacaggctgctctctgagggttctgttggtggagaatctgaaggctgcagatcctttctagatggaagcttagaggatgcttttaatgggcttttacttgcattagaaccacataaagagcagtataaagagtttcaggatctgaaccaagaagtcatgaatttggatgatattctaaaaaagtagagaagatcctctaatggatcccagtgtgcccatccctcaacctcctcagtgatcaactcatggccaatcttgtttcctattcttcaacctgctgacttccctctggattcttctgcaaccagtcccagatattgtgccattttatccatggttgtacttcttttttggatataaagatttttaaatgcattttttaaatgctaacaaaaaataaaaacttgaaacaaaaaaaaaaaaaaaaaaaa

SEQ ID NO: 1170 - protein, 591 aa, Homo sapien
MLVGSQSFSPGGPNGIIRSQSFAGFSGLQERRSRCNSFIENSSALKKPQAKLKKMHNLGHKNNNPPKEPQPKRVEEVYRALKNGLDEYLEVHQTELDKLTAQLKDMKRNSRLGVLYDLDKQIKTIERYMRRLEFHISKVDELYEAYCIQRRLQDGASKMKQAFATSPASKAARESLTEINRSFKEYTENMCTIEVELENLLGEFSIKMKGLAGFARLCPGDQYEIFMKYGRQRWKLKGKIEVNGKQSWDGEETVFLPLIVGFISIKVTELKGLATHILVGSVTCETKELFAARPQVVAVDINDLGTIKLNLEITWYPFDVEDMTASSGAGNKAAALQRRMSMYSQGTPETPTFKDHSFFSNLPDDIFENGKAAEEKMPLSLSFSDLPNGDCALTSHSTGSPSNSTNPEITITPAEFNLSSLASQNEGMDDTSSASSRNSLGEGQEPKSHLKEEDPEEPRKPASAPSEACRRQSSGAGAEHLFLENDVAEALLQESEEASELKPVELDTSEGNITKQLVKRLTSAEVPMATDRLLSEGSVGGESEGCRSFLDGSLEDAFNGLLLALEPHKEQYKEFQDLNQEVMNLDDILKK

SEQ ID NO: 1171 - DNA, 3630 bp, Homo sapien
atacgggagaactaaggctgaaacctcggaggaacaaccacttttgaagtgacttcgcggcgtgcgttgggtgcggactaggtggccccggcgggagtgtgctggagcctgaagtccacgcgcgcggctgagaaccgccgggaccgcacgtgggcgccgcgcgcttcccccgcttcccaggtgggcgccggccgccaggccacctcacgtccggccccggggatgcgcgtcctcctcgccgcgctgggactgctgttcctgggggcgctacgagccttcccacaggatcgacccttcgaggacacctgtcatggaaaccccagccactactatgacaaggctgtcaggaggtgctgttaccgctgccccatggggctgttcccgacacagcagtgcccacagaggcctactgactgcaggaagcagtgtgagcctgactactacctggatgaggccgaccgctgtacagcctgcgtgacttgttctcgagatgacctcgtggagaagacgccgtgtgcatggaactcctcccgtgtctgcgaatgtcgacccggcatgttctgttccacgtctgccgtcaactcctgtgcccgctgcttcttccattctgtctgtccggcagggatgattgtcaagttcccaggcacggcgcagaagaacacggtctgtgagccggcttccccaggggtcagccctgcctgtgccagcccagagaactgcaaggaaccctccagtggcaccatcccccaggccaagcccaccccggtgtccccagcaacctccagtgccagcaccatgcctgtaagagggggcacccgcctcgcccaggaagctgcttctaaactgacgagggctcccgactctccctcctctgtgggaaggcctagttcagatccaggtctgtccccaacacagccatgcccagaggggtctggtgattgcagaaagcagtgtgagcccgactactacctggacgaggccggccgctgcacagcctgcgtgagctgttctcgagatgaccttgtggagaagacgccatgtgcatggaactcctcccgcacctgcgaatgtcgacctggcatgatctgtgccacatcagccaccaactcctgtgcccgctgtgtcccctacccaatctgtgcagcagagacggtcaccaagccccaggatatggctgagaaggacaccacctttgaggcgccacccctggggacccagccggactgcaaccccaccccagagaatggcgaggcgcctgccagcaccagccccactcagagcttgctggtggactcccaggccagtaagacgctgcccatcccaaccagcgctcccgtcgctctctcctccacggggaagcccgttctggatgcagggccagtgctcttctgggtgatcctggtgttggttgtggtggtcggctccagcgccttcctcctgtgccaccggagggcctgcaggaagcgaattcggcagaagctccacctgtgctacccggtccagacctcccagcccaagctagagcttgtggattccagacccaggaggagctcaacgcagctgaggagtggtgcgtcggtgacagaacccgtcgcggaagagcgagggttaatgagccagccactgatggagacctgccacagcgtgggggcagcctacctggagagcctgccgctgcaggatgccagcccggccgggggcccctcgtcccccagggaccttcctgagccccgggtgtccacggagcacaccaataacaagattgagaaaatctacatcatgaaggctgacaccgtgatcgtggggaccgtgaaggctgagctgccggagggccggggcctggcggggccagcagagcccgagttggaggaggagctggaggcggaccataccccccactaccccgagcaggagacagaaccgcctctgggcagctgcagcgatgtcatgctctcagtggaagaggaagggaaagaagaccccttgcccacagctgcctctggaaagtgaggcctgggctgggctggggctaggagggcagcagggtggcctctgggaggccaggatggcactgttggcaccgaggttgggggcagaggcccatctggcctgaactgaggctccagcatctagtggtggaccggccggtcactgcaggggtctggtggtctctgcttgcatccccaacttagctgtcccctgacccagagcctaggggatccggggcttgtacagaagagacagtccaaggggactggatcccagcagtgatgttggttgaggcagcaaacagatggcaggatgggcactgccgagaacagcattggtcccagagccctgggcatcagaccttaaccaccaggcccacagcccagcgagggagaggtcgtgaggccagctcccggggcccctgtaaccctactctcctctctccctggacctcagaggtgacacccattgggcccttccggcatgcccccagttactgtaaatgtggcccccagtgggcatggagccagtgcctgtggttgtttctccagagtcaaaagggaagtcgagggatggggcgtcgtcagctggcactgtctctgctgcagcggccacactgtactctgcactggtgtgagggcccctgcctggactgtgggaccctcctggtgctgcccaccttccctgtcctgtagccccctcggtgggcccagggcctaggggcccaggatcaagtcactcatctcagaatgtccccaccaatccccgccacagcaggcgcctcgggtcccagatgtctgcagccctcagcagctgcagaccgcccctcaccaacccagagaacctgctttactttgcccagggacttcctccccatgtgaacatggggaacttcgggccctgcctggagtccttgaccgctctctgtgggccccacccactctgtcctgggaaatgaagaagcatcttccttaggtctgccctgcttgcaaatccactagcaccgaccccaccacctggttccggctctgcacgctttggggtgtggatgtcgagaggcaccacggcctcacccaggcatctgctttactctggaccataggaaacaagaccgtttggaggtttcatcaggattttgggtttttcacatttcacgctaaggagtagtggccctgacttccggtcggctggccagctgactccctagggccttcagacgtgtatgcaaatgagtgatggataaggatgagtcttggagttgcgggcagcctggagactcgtggacttaccgcctggaggcaggcccgggaaggctgctgtttactcatcgggcagccacgtgctctctggaggaagtgatagtttctgaaaccgctcagatgttttggggaaagttggagaagccgtggccttgcgagaggtggttacaccagaacctggacattggccagaagaagcttaagtgggcagacactgtttgcccagtgtttgtgcaaggatggagtgggtgtctctgcatcacccacagccgcagctgtaaggcacgctggaaggcacacgcctgccaggcagggcagtctggcgcccatgatgggagggattgacatgtttcaacaaaataatgcacttccttaaaaaaaa

SEQ ID NO: 1172 - protein, 595 aa, Homo sapien
MRVLLAALGLLFLGALRAFPQDRPFEDTCHGNPSHYYDKAVRRCCYRCPMGLFPTQQCPQRPTDCRKQCEPDYYLDEADRCTACVTCSRDDLVEKTPCAWNSSRVCECRPGMFCSTSAVNSCARCFFHSVCPAGMIVKFPGTAQKNTVCEPASPGVSPACASPENCKEPSSGTIPQAKPTPVSPATSSASTMPVRGGTRLAQEAASKLTRAPDSPSSVGRPSSDPGLSPTQPCPEGSGDCRKQCEPDYYLDEAGRCTACVSCSRDDLVEKTPCAWNSSRTCECRPGMICATSATNSCARCVPYPICAAETVTKPQDMAEKDTTFEAPPLGTQPDCNPTPENGEAPASTSPTQSLLVDSQASKTLPIPTSAPVALSSTGKPVLDAGPVLFWVILVLVVVVGSSAFLLCHRRACRKRIRQKLHLCYPVQTSQPKLELVDSRPRRSSTQLRSGASVTEPVAEERGLMSQPLMETCHSVGAAYLESLPLQDASPAGGPSSPRDLPEPRVSTEHTNNKIEKIYIMKADTVIVGTVKAELPEGRGLAGPAEPELEEELEADHTPHYPEQETEPPLGSCSDVMLSVEEEGKEDPLPTAASGK

SEQ ID NO: 1173 - DNA, 3495 bp, Homo sapien
ccagtctgcggaccgttcggagcaacgtggcggcccttgcccgccagcaatgcctaggagcagccaagcagggacccgtcggaaacccttcatccagcctttctctggcgcatggagaacctgggggtcggcgaaggggcagaggcttgcagcaggttgagtcgctctcgcggccgccacagcatgaccagagccccgaagcacctgtggcggcaaccccggcgccccatccgcatccaacagcgcttctattcggatccggacaagtccgcgggctgccgcgagagggacctgagcccgcggccggagctcaggaagtcgcggctctcctggcccgtttcctcctgcaggcgctttgacctggaaaatgggctctcgtgtgggaggagggccctggaccctcagtccagccctggcctgggccggattatgcaggctccagtcccgcacagccagcggcgcgagtccttcctgtaccgctcagatagcgactatgaactctcgcccaaggccatgtctcggaactcctctgtggccagcgacctacatggagaggacatgattgtgacgccctttgcccaggtcctggccagtctgcggaccgttcggagcaacgtggcggcccttgcccgccagcaatgcctaggagcagccaagcagggacccgtcggaaacccttcatccagcaatcagctccctcctgcagaggacacggggcagaagctggcattggagacgctagacgagctggactggtgcctggatcagttggagacgctgcagacccggcactcggtgggggagatggcctccaacaagttcaagcggatcctgaaccgggagttgacccacctgtccgaaaccagccgctccgggaaccaggtgtccgagtacatctcccggaccttcctggaccagcagaccgaggtggagctgcccaaggtgaccgctgaggaggccccacagcccatgtcccggatcagtggcctacatgggctctgccacagtgccagcctctcctcagccactgtcccacgctttggggtccagactgaccaggaggagcaactggccaaggagctagaagacaccaacaagtggggacttgatgtgttcaaggtggcggacgtaagtgggaaccggcccctcacagctatcatattcagcatttttcaggagcgggacctgctgaagacattccagatcccagcagacacactggccacctacctgctgatgctggagggtcactaccacgccaatgtggcctaccacaacagcctacatgccgccgacgtggcccagtccacgcatgtgctgctggctacgcccgccctcgaggctgtgttcacagacttggaaatcctggctgccctctttgcaagcgccatccacgacgtggaccatcctggggtctccaaccagtttctgattaacaccaactcagacgtggcgcttatgtacaacgacgcctcggtgctggagaaccatcacctggctgtgggcttcaagctgctgcaggcagagaactgcgatatcttccagaacctcagcgccaagcagcgactgagtctgcgcaggatggtcattgacatggtgctggccacagacatgtccaaacacatgaacctcctggccgacctcaagaccatggtggagaccaagaaggtgacaagcctcggtgtcctcctcctggacaactattccgaccgaatccaggtcttgcagaacctggtgcactgtgctgatctgagcaaccccaccaagccgctgcccctgtaccgccagtggacggaccgcatcatggccgagttcttccagcagggagaccgcgagcgtgagtcgggcctggacatcagtcccatgtgtgacaagcatacggcctcagtggagaagtcccaggtgggtttcattgactacattgctcacccactgtgggagacttgggctgacctggtccacccagatgcacaggacctgctggacacgctggaggacaatcgagagtggtaccagagcaagatcccccgaagtccctcagacctcaccaaccccgagcgggacgggcctgacagattccagtttgaactgactctggaggaggcagaggaagaggatgaggaggaagaagaggagggggaagagacagctttagccaaagaggccttggagttgcctgacactgaactcctgtcccctgaagccggcccagaccctggggacttacccctcgacaaccagaggacttagggccagccctgcgtgaactgcaggggcaatggatggtaaagccctttggctcttggcaggcagactttccaggaagaggctccatgtggctcctgcttcactttcccacccatttagggagacaatcaagctcttagttataggtggctcccagggtctaattggaggcacctggctggggtccactctgaccctagacttgcctaaaagagctctctaaggggcagcctcttacgatgccctggtgtctttctcctgggcttctatccctgtgaggagaggtgctgtctgctggagcctctagtccaccctctccagtggtcactcttgagtcacatctgtcacttaattatttccttctttatcaaatatttattgctcatctacttcgggccagctttctgcctctgtagtagccctgcacaaagggtggggagtcaggagaccatcccaaaggcatctccctgtcttcctctaccaagcggctctctgcaagagcatggaaatgtgagtggggaaaattttcagcaccaaagcttcactcatacccagttttgtttctgaaactacggtagggggcaggaagaggagcagaaaagaagggctgggcaaggcatagtggcttatgcctgtaatcccggtactttgggaggctgaggtgggaggactgcttaagctcaggagtttgagaccagcctgggcaacatagcaagacccccaccatctctgaaaaaaaaaattagccaggcatggtggtgtgcacctgagaatcccagctactcagaaggttgagacaaaggggatcgcttgagcccaggagttggaggctgaagagagctatgactgcatcactgcactccagcctgggcaacacagcaagatcctgtctaaaaataaaaagaaaagagaaggaaaggaaagagacggggctctgaggccgagcacagtggcccatgcctataatcccagcactttgggaggctgaggcaggtggatcacctgaggttaggagttcgagaccagcctggccaacatggtgaaaccccatctctactaaaaatacaaaaattggctgggcatggtggcgggtgcctgtaatcccagctactggggaggctgaggcaggagaatcacttgaattcaggaggtggaggttgcagtgagccgacatcatgccactgcactccagcctggggctgacagagcaagacactgtctcaaaaaagaaaaaaaaaaaaaaaaaaa

SEQ ID NO: 1174 - protein, 712 aa, Homo sapien
MENLGVGEGAEACSRLSRSRGRHSMTRAPKHLWRQPRRPIRIQQRFYSDPDKSAGCRERDLSPRPELRKSRLSWPVSSCRRFDLENGLSCGRRALDPQSSPGLGRIMQAPVPHSQRRESFLYRSDSDYELSPKAMSRNSSVASDLHGEDMIVTPFAQVLASLRTVRSNVAALARQQCLGAAKQGPVGNPSSSNQLPPAEDTGQKLALETLDELDWCLDQLETLQTRHSVGEMASNKFKRILNRELTHLSETSRSGNQVSEYISRTFLDQQTEVELPKVTAEEAPQPMSRISGLHGLCHSASLSSATVPRFGVQTDQEEQLAKELEDTNKWGLDVFKVADVSGNRPLTAIIFSIFQERDLLKTFQIPADTLATYLLMLEGHYHANVAYHNSLHAADVAQSTHVLLATPALEAVFTDLEILAALFASAIHDVDHPGVSNQFLINTNSDVALMYNDASVLENHHLAVGFKLLQAENCDIFQNLSAKQRLSLRRMVIDMVLATDMSKHMNLLADLKTMVETKKVTSLGVLLLDNYSDRIQVLQNLVHCADLSNPTKPLPLYRQWTDRIMAEFFQQGDRERESGLDISPMCDKHTASVEKSQVGFIDYIAHPLWETWADLVHPDAQDLLDTLEDNREWYQSKIPRSPSDLTNPERDGPDRFQFELTLEEAEEEDEEEEEEGEETALAKEALELPDTELLSPEAGPDPGDLPLDNQRT

SEQ ID NO: 1175 - DNA, 1571 bp, Homo sapien
ctctgtcctgccagcaccgagggctcatccatccacagagcagtgcagtgggaggagacgccatgacctccatcctcacggtcctgatctgtctcgggctgagcctggaccccaggacccacgtgcaggcagggcccctccccaagcccaccctctgggctgagccaggctctgtgatcacccaagggagtcctgtgaccctcaggtgtcaggggagcctggagacgcaggagtaccatctatatagagaaaagaaaacagcactctggattacacggatcccacaggagcttgtgaagaagggccagttccccatcctatccatcacctgggaacatgcagggcggtattgctgtatctatggcagccacactgcaggcctctcagagagcagtgaccccctggagctggtggtgacaggagcctacagcaaacccaccctctcagctctgcccagccctgtggtgacctcaggagggaatgtgaccatccagtgtgactcacaggtggcatttgatggcttcattctgtgtaaggaaggagaagatgaacacccacaatgcctgaactcccattcccatgcccgtgggtcatcccgggccatcttctccgtgggccccgtgagcccaagtcgcaggtggtcgtacaggtgctatggttatgactcgcgcgctccctatgtgtggtctctacccagtgatctcctggggctcctggtcccaggtgtttctaagaagccatcactctcagtgcagccgggtcctgtcgtggcccctggggagaagctgaccttccagtgtggctctgatgccggctacgacagatttgttctgtacaaggagtggggacgtgacttcctccagcgccctggccggcagccccaggctgggctctcccaggccaacttcaccctgggccctgtgagccgctcctacgggggccagtacacatgctccggtgcatacaacctctcctccgagtggtcggcccccagcgaccccctggacatcctgatcacaggacagatccgtgccagacccttcctctccgtgcggccgggccccacagtggcctcaggagagaacgtgaccctgctgtgtcagtcacagggagggatgcacactttccttttgaccaaggagggggcagctgattccccgctgcgtctaaaatcaaagcgccaatctcataagtaccaggctgaattccccatgagtcctgtgacctcggcccacgcggggacctacaggtgctacggctcactcagctccaacccctacctgctgactcaccccagtgaccccctggagctcgtggtctcaggagcagctgagaccctcagcccaccacaaaacaagtccgactccaaggctggtgagtgaggagatgcttgccgtgatgacgctgggcacagagggtcaggtcctgtcaagaggagctgggtgtcctgggtggacatttgaagaattatattcattccaacttgaagaattattcaacacctttaacaatgtatatgtgaagtactttattctttcatattttaaaaataaaagataattatccatgaa

SEQ ID NO: 1176 - protein, 439 aa, Homo sapien
MTSILTVLICLGLSLDPRTHVQAGPLPKPTLWAEPGSVITQGSPVTLRCQGSLETQEYHLYREKKTALWITRIPQELVKKGQFPILSITWEHAGRYCCIYGSHTAGLSESSDPLELVVTGAYSKPTLSALPSPVVTSGGNVTIQCDSQVAFDGFILCKEGEDEHPQCLNSHSHARGSSRAIFSVGPVSPSRRWSYRCYGYDSRAPYVWSLPSDLLGLLVPGVSKKPSLSVQPGPVVAPGEKLTFQCGSDAGYDRFVLYKEWGRDFLQRPGRQPQAGLSQANFTLGPVSRSYGGQYTCSGAYNLSSEWSAPSDPLDILITGQIRARPFLSVRPGPTVASGENVTLLCQSQGGMHTFLLTKEGAADSPLRLKSKRQSHKYQAEFPMSPVTSAHAGTYRCYGSLSSNPYLLTHPSDPLELVVSGAAETLSPPQNKSDSKAGE

SEQ ID NO: 1177 - DNA, 2425 bp, Homo sapien
atgtggtggagagttctcagcttgctggcatggttccccttgcaagaggcctctctgactaaccacacagaaaccatcaccgtggaggaaggccagacgctcactctaaagtgtgtcacttctctgaggaagaactcctccctccagtggctgaccccctcagggttcaccatttttttaaatgagtatcctgctttaaaaaattccaaataccagcttcttcatcactcggccaatcagctctccatcactgtgcctaacgtaaccctgcaagatgaaggcgtgtacaagtgcttacattacagcgactctgtaagcacaaaggaagtgaaagtgattgtgctggcaactcctttcaagccaatcctggaagcttcagttatcagaaagcaaaatggagaagaacatgttgtactcatgtgctccaccatgagaagcaagccccctccgcagataacctggctacttgggaatagcatggaagtgtccggtggaacgctccatgaatttgaaactgatgggaagaaatgtaatactaccagcactctcataatccacacttatggcaaaaattcaacggtggactgcattatccgacacagaggcctgcaagggagaaaactagtagcacccttccggtttgaagatttggttactgatgaagagacagcttcagatgctctggagagaaactctctatcctctcaagacccacagcagcccaccagtactgtctcagtaacggaagattctagtacatcggagattgacaaggaagagaaagaacaaaccactcaagatcctgacttgaccaccgaagcaaatcctcagtatttaggactggcaagaaagaaaagtggcatcctgctgctcacgctggtgtccttcctcattttcatactcttcatcatagtccagctcttcatcatgaagctgaggaaagcacatgtgatatggaagagagaaaacgaagtttcagaacacacactagaaagttacagatcaaggtcaaataatgaagaaacatcatctgaagagaaaaatggccaatcttcccaccctatgcgttgcatgaactacatcacaaagttgtactcagaagcaaaaacaaagaggaaggaaaatgtacaacattcaaaattagaagaaaagcacatccaagtaccagagagtattgtgtagtgctctctgcaatggaacatgtgatttcagggttgccgcagtgtcacctcagtggaccagcctgggggaaggagcttaattgctgagacattaataatgacctcttagtgcaatgcaagatggtgtcctcggataatgatctgccccggagctagggcagcaacatgaggaccaaaccatgcacataaagcttgtagtttaaaaaagaaaagcaaaaaaataattatgcctgacactacttcagagcaggaggattctacgaagccttggggatcagggtcagtgtgagcagctaacatcctacctcaaatggaacaggattttttgatgctttgctctaatggaactgttttaaaaatttttttttctttttaatattttcttctggtcacaaaataaagaaatttgggatgcaaagtacctaaagatctctgatcctaagaagttacttctggccaggcgcggtggctcatgcctgtaatcctagcactttgggaggctgaggtaggcagatcacttgaggtcaggagttggagaccagcctggccaacatagtgaaaccccgtctctactaaaaatgcaaaaattagccaggcgtagtggtgcgcacctgtagtctcagatacttgggaggctgagggtggagaatcgcttgaacctgggaggtggagattgcagtgagtcaagatctcaccactgaactccagcctgggcgacagagggagactctgtctcaaaaaaaaagaagttacttccaagacagacttttaacatgtaaccagcacaaagcaatgtcagggaggagtgatacatgacaataaatgagtcagatgagcaagaaggccccagaacccatgccccaaggcacaaagaggagctcagggtaggcccaaagattcgaattccttagattactaaatcacatgagcggaccttgtctgtcagataagatttttacctggaaattccatgaccaatacatgtgcaaaagaaaatgatgggttgaatttactgattattgacctaatggatggctttttaaaatgttttaataaaaagcagaatagatgtttgtttttctagtggttataccaagctatacttcctgttttcacgtgtgaaagtaacatgggacatgcctttcttttccgatcagtttatttaagctatacagcaaactttggcatttatgtggagcatttctcattgttggaatctgaataaaccaattacaaaataaaaa

SEQ ID NO: 1178 - protein, 393 aa, Homo sapien
MWWRVLSLLAWFPLQEASLTNHTETITVEEGQTLTLKCVTSLRKNSSLQWLTPSGFTIFLNEYPALKNSKYQLLHHSANQLSITVPNVTLQDEGVYKCLHYSDSVSTKEVKVIVLATPFKPILEASVIRKQNGEEHVVLMCSTMRSKPPPQITWLLGNSMEVSGGTLHEFETDGKKCNTTSTLIIHTYGKNSTVDCIIRHRGLQGRKLVAPFRFEDLVTDEETASDALERNSLSSQDPQQPTSTVSVTEDSSTSEIDKEEKEQTTQDPDLTTEANPQYLGLARKKSGILLLTLVSFLIFILFIIVQLFIMKLRKAHVIWKRENEVSEHTLESYRSRSNNEETSSEEKNGQSSHPMRCMNYITKLYSEAKTKRKENVQHSKLEEKHIQVPESIV

SEQ ID NO: 1179 - DNA, 3448 bp, Homo sapien
gttcagcgccggcgccggtgtgcgagccgcggcagagtgaggcaggcaacccgaggtgcggagcgacctgcggaggctgagccccgctttctcccagggtttcttatcagccagccgccgctgtccccgggggagtaggaggctcctgacaggccgcggctgtctgtgtgtccttctgagtgtcagaggaacggccagaccccgcgggccggagcagaacgcggccagggcagaaagcggcggcaggagaagcaggcagggggccggaggacgcagaccgagacccgaggcggaggcggaccgcgagccggccatgtcggtggtggggttggacgtgggctcgcagagctgctacatcgcggtagcccgggccgggggcatcgagaccatcgccaatgagttcagcgaccggtgcaccccgtcagtcatatcatttggatcaaaaaatagaacaatcggagttgcagccaaaaatcagcaaatcactcatgcaaacaatacggtgtctaacttcaaaagatttcatggccgagcattcaacgaccccttcattcaaaaggagaaggaaaacttgagttacgatttggttccattgaaaaatggtggagttggaataaaggtaatgtacatgggtgaagaacatctatttagtgtggagcagataacagccatgttgttgactaagctgaaggaaactgctgaaaacagcctcaagaaaccagtaacagattgtgttatttcagtcccctccttctttacagatgctgagaggcgatctgtgttagatgctgcacagattgttggcctaaactgtttaagacttatgaatgacatgacagctgttgctttgaattacggaatttataagcaggatctcccaagcctggatgagaaacctcggatagtggtttttgttgatatgggacattcagcttttcaagtgtctgcttgtgcttttaacaagggaaaattgaaggtactgggaacagcttttgatcctttcttaggaggaaaaaacttcgatgaaaagttagtggaacatttctgtgcagaatttaaaactaagtacaagttggatgcaaaatccaaaatacgagcactcctacgtctgtatcaggaatgtgaaaaactgaaaaagctaatgagctctaacagcacagaccttccactgaatatcgaatgctttatgaatgataaagatgtttccggaaagatgaacaggtcacaatttgaagaactctgtgctgaacttctgcaaaagatagaagtacccctttattcactgttggaacaaactcatctcaaagtagaagatgtgagtgcagttgagattgttggaggcgctacacgaattccagctgtgaaggaaagaattgccaaattctttggaaaagatattagcacaacactcaatgcagatgaagcagtagccagaggatgtgcattacagtgtgcaatactttccccggcatttaaagttagagaattttccgtcacagatgcagttccttttccaatatctctgatctggaaccatgattcagaagatactgaaggtgttcatgaagtctttagtcgaaaccatgctgctcctttctccaaagttctcacctttctgagaagggggccttttgagctagaagctttctattctgatccccaaggagttccatatccagaagcaaaaataggccgctttgtagttcagaatgtttctgcacagaaagatggagaaaaatctagagtaaaagtcaaagtgcgagtcaacacccatggcattttcaccatctctacggcatctatggtggagaaagtcccaactgaggagaatgaaatgtcttctgaagctgacatggagtgtctgaatcagagaccaccagaaaacccagacactgatgcaaatgaaaaaaaagttgaccagcctccagaagctaaaaagcccaaaataaaggtggtgaatgttgagctgcctattgaagccaacttggtctggcagttagggaaagaccttcttaacatgtatattgagacagagggtaagatgataatgcaagataaattggaaaaagaaaggaatgatgctaaaaatgcagttgaggaatatgtgtatgagttcagagacaagctgtgtggaccatatgaaaaatttatatgtgagcaggatcatcaaaattttttgagactcctcacagaaactgaagactggctgtatgaagaaggagaggaccaagctaaacaagcatatgttgacaagttggaagaattaatgaaaattggcactccagttaaagttcggtttcaggaagctgaagaacggccaaaaatgtttgaagaactaggacagaggctgcagcattatgccaagatagcagctgacttcagaaataaggatgagaaatacaaccatattgatgagtctgaaatgaaaaaagtggagaagtctgttaatgaagtgatggaatggatgaataatgtcatgaatgctcaggctaaaaagagtcttgatcaggatccagttgtacgtgctcaggaaattaaaacaaaaatcaaggaattgaacaacacatgtgaacccgttgtaacacaaccgaaaccaaaaattgaatcacccaaactggaaagaactccaaatggcccaaatattgataaaaaggaagaagatttagaagacaaaaacaattttggtgctgaacctccacatcagaatggtgaatgttaccctaatgagaaaaattctgttaatatggacttggactagataaccttaaattggcctattccttcaattaataaaatatttttgccatagtatgtgactctacataacatactgaaactatttatattttcttttttaaggatatttagaaattttgtgtattatatggaaaaagaaaaaaagcttaagtctgtagtctttatgatcctaaaagggaaaattgccttggtaactttcagattcctgtggaattgtgaattcatactaagctttctgtgcagtctcaccatttgcatcactgaggatgaaactgacttttgtcttttggagaaaaaaaactgtactgttgttcaagagggctgtgattaaaatctttaagcatttgttcctgccaaggtagttttcttgcattttgctctccattcagcatgtgtgtgggtgtggatgtttataaacaagactaagtctgacttcataagggctttctaaaaccatttctgtccaagagaaaatgactttttgctttgatattaaaaattcaatgagtaaaacaaaagctagtcaaatgtgttagcagcatgcagaacaaaaactttaaactttctctctcactatacagtatattgtcaatgtgaaagtgtggaatggaagaaatgtcgatcctgttgtaactgattgtgaacacttttatgagctttaaaataaagttcatcttatggtgtcatttct

SEQ ID NO: 1180 - protein, 814 aa, Homo sapien
MSVVGLDVGSQSCYIAVARAGGIETIANEFSDRCTPSVISFGSKNRTIGVAAKNQQITHANNTVSNFKRFHGRAFNDPFIQKEKENLSYDLVPLKNGGVGIKVMYMGEEHLFSVEQITAMLLTKLKETAENSLKKPVTDCVISVPSFFTDAERRSVLDAAQIVGLNCLRLMNDMTAVALNYGIYKQDLPSLDEKPRIVVFVDMGHSAFQVSACAFNKGKLKVLGTAFDPFLGGKNFDEKLVEHFCAEFKTKYKLDAKSKIRALLRLYQECEKLKKLMSSNSTDLPLNIECFMNDKDVSGKMNRSQFEELCAELLQKIEVPLYSLLEQTHLKVEDVSAVEIVGGATRIPAVKERIAKFFGKDISTTLNADEAVARGCALQCAILSPAFKVREFSVTDAVPFPISLIWNHDSEDTEGVHEVFSRNHAAPFSKVLTFLRRGPFELEAFYSDPQGVPYPEAKIGRFVVQNVSAQKDGEKSRVKVKVRVNTHGIFTISTASMVEKVPTEENEMSSEADMECLNQRPPENPDTDANEKKVDQPPEAKKPKIKVVNVELPIEANLVWQLGKDLLNMYIETEGKMIMQDKLEKERNDAKNAVEEYVYEFRDKLCGPYEKFICEQDHQNFLRLLTETEDWLYEEGEDQAKQAYVDKLEELMKIGTPVKVRFQEAEERPKMFEELGQRLQHYAKIAADFRNKDEKYNHIDESEMKKVEKSVNEVMEWMNNVMNAQAKKSLDQDPVVRAQEIKTKIKELNNTCEPVVTQPKPKIESPKLERTPNGPNIDKKEEDLEDKNNFGAEPPHQNGECYPNEKNSVNMDLD

SEQ ID NO: 1181 - DNA, 3655 bp, Homo sapien
cttcagatagattatatctggagtgaaggatcctgccacctacgtatctggcatagtattctgtgtagtgggatgagcagagaacaaaaacaaaataatccagtgagaaaagcccgtaaataaaccttcagaccagagatctattctccagcttattttaagctcaacttaaaaagaagaactgttctctgattcttttcgccttcaatacacttaatgatttaactccaccctccttcaaaagaaacagcatttcctacttttatactgtctatatgattgatttgcacagctcatctggccagaagagctgagacatccgttcccctacaagaaactctccccgggtggaacaagatggattatcaagtgtcaagtccaatctatgacatcaattattatacatcggagccctgccaaaaaatcaatgtgaagcaaatcgcagcccgcctcctgcctccgctctactcactggtgttcatctttggttttgtgggcaacatgctggtcatcctcatcctgataaactgcaaaaggctgaagagcatgactgacatctacctgctcaacctggccatctctgacctgtttttccttcttactgtccccttctgggctcactatgctgccgcccagtgggactttggaaatacaatgtgtcaactcttgacagggctctattttataggcttcttctctggaatcttcttcatcatcctcctgacaatcgataggtacctggctgtcgtccatgctgtgtttgctttaaaagccaggacggtcacctttggggtggtgacaagtgtgatcacttgggtggtggctgtgtttgcgtctctcccaggaatcatctttaccagatctcaaaaagaaggtcttcattacacctgcagctctcattttccatacagtcagtatcaattctggaagaatttccagacattaaagatagtcatcttggggctggtcctgccgctgcttgtcatggtcatctgctactcgggaatcctaaaaactctgcttcggtgtcgaaatgagaagaagaggcacagggctgtgaggcttatcttcaccatcatgattgtttattttctcttctgggctccctacaacattgtccttctcctgaacaccttccaggaattctttggcctgaataattgcagtagctctaacaggttggaccaagctatgcaggtgacagagactcttgggatgacgcactgctgcatcaaccccatcatctatgcctttgtcggggagaagttcagaaactacctcttagtcttcttccaaaagcacattgccaaacgcttctgcaaatgctgttctattttccagcaagaggctcccgagcgagcaagctcagtttacacccgatccactggggagcaggaaatatctgtgggcttgtgacacggactcaagtgggctggtgacccagtcagagttgtgcacatggcttagttttcatacacagcctgggctgggggtggggtgggagaggtcttttttaaaaggaagttactgttatagagggtctaagattcatccatttatttggcatctgtttaaagtagattagatcttttaagcccatcaattatagaaagccaaatcaaaatatgttgatgaaaaatagcaacctttttatctccccttcacatgcatcaagttattgacaaactctcccttcactccgaaagttccttatgtatatttaaaagaaagcctcagagaattgctgattcttgagtttagtgatctgaacagaaataccaaaattatttcagaaatgtacaactttttacctagtacaaggcaacatataggttgtaaatgtgtttaaaacaggtctttgtcttgctatggggagaaaagacatgaatatgattagtaaagaaatgacacttttcatgtgtgatttcccctccaaggtatggttaataagtttcactgacttagaaccaggcgagagacttgtggcctgggagagctggggaagcttcttaaatgagaaggaatttgagttggatcatctattgctggcaaagacagaagcctcactgcaagcactgcatgggcaagcttggctgtagaaggagacagagctggttgggaagacatggggaggaaggacaaggctagatcatgaagaaccttgacggcattgctccgtctaagtcatgagctgagcagggagatcctggttggtgttgcagaaggtttactctgtggccaaaggagggtcaggaaggatgagcatttagggcaaggagaccaccaacagccctcaggtcagggtgaggatggcctctgctaagctcaaggcgtgaggatgggaaggagggaggtattcgtaaggatgggaaggagggaggtattcgtgcagcatatgaggatgcagagtcagcagaactggggtggatttggtttggaagtgagggtcagagaggagtcagagagaatccctagtcttcaagcagattggagaaacccttgaaaagacatcaagcacagaaggaggaggaggaggtttaggtcaagaagaagatggattggtgtaaaaggatgggtctggtttgcagagcttgaacacagtctcacccagactccaggctgtctttcactgaatgcttctgacttcatagatttccttcccatcccagctgaaatactgaggggtctccaggaggagactagatttatgaatacacgaggtatgaggtctaggaacatacttcagctcacacatgagatctaggtgaggattgattacctagtagtcatttcatgggttgttgggaggattctatgaggcaaccacaggcagcatttagcacatactacacattcaataagcatcaaactcttagttactcattcagggatagcactgagcaaagcattgagcaaaggggtcccatataggtgagggaagcctgaaaaactaagatgctgcctgcccagtgcacacaagtgtaggtatcattttctgcatttaaccgtcaataggcaaaggggggaagggacatattcatttggaaataagctgccttgagccttaaaacccacaaaagtacaatttaccagcctccgtatttcagactgaatgggggtggggggggcgccttaggtacttattccagatgccttctccagacaaaccagaagcaacagaaaaaatcgtctctccctccctttgaaatgaatataccccttagtgtttgggtatattcatttcaaagggagagagagaggtttttttctgttctttctcatatgattgtgcacatacttgagactgttttgaatttgggggatggctaaaaccatcatagtacaggtaaggtgagggaatagtaagtggtgagaactactcagggaatgaaggtgtcagaataataagaggtgctactgactttctcagcctctgaatatgaacggtgagcattgtggctgtcagcaggaagcaacgaagggaaatgtctttccttttgctcttaagttgtggagagtgcaacagtagcataggaccctaccctctgggccaagtcaaagacattctgacatcttagtatttgcatattcttatgtatgtgaaagttacaaattgcttgaaagaaaatatgcatctaataaaaaacaccttcta

SEQ ID NO: 1182 - protein, 352 aa, Homo sapien [sequence omitted]

SEQ ID NO: 1183 - DNA, 2856 bp, Homo sapien
cattcagagacagaaggtggatagacaaatctccaccttcagactggtaggctcctccagaagccatcagacaggaagatgtgaaaatccccagcactcatcccagaatcactaagtggcacctgtcctgggccaaagtcccaggacagacctcattgttcctctgtgggaatacctccccaggagggcatcctggatttcccccttgcaacccaggtcagaagtttcatcgtcaaggttgtttcatcttttttttcctgtctaacagctctgactaccacccaaccttgaggcacagtgaagacatcggtggccactccaataacagcaggtcacagctgctcttctggaggtgtcctacaggtgaaaagcccagcgacccagtcaggatttaagtttacctcaaaaatggaagattttaacatggagagtgacagctttgaagatttctggaaaggtgaagatcttagtaattacagttacagctctaccctgcccccttttctactagatgccgccccatgtgaaccagaatccctggaaatcaacaagtattttgtggtcattatctatgccctggtattcctgctgagcctgctgggaaactccctcgtgatgctggtcatcttatacagcagggtcggccgctccgtcactgatgtctacctgctgaacctagccttggccgacctactctttgccctgaccttgcccatctgggccgcctccaaggtgaatggctggatttttggcacattcctgtgcaaggtggtctcactcctgaaggaagtcaacttctatagtggcatcctgctactggcctgcatcagtgtggaccgttacctggccattgtccatgccacacgcacactgacccagaagcgctacttggtcaaattcatatgtctcagcatctggggtctgtccttgctcctggccctgcctgtcttacttttccgaaggaccgtctactcatccaatgttagcccagcctgctatgaggacatgggcaacaatacagcaaactggcggatgctgttacggatcctgccccagtcctttggcttcatcgtgccactgctgatcatgctgttctgctacggattcaccctgcgtacgctgtttaaggcccacatggggcagaagcaccgggccatgcgggtcatctttgctgtcgtcctcatcttcctgctctgctggctgccctacaacctggtcctgctggcagacaccctcatgaggacccaggtgatccaggagacctgtgagcgccgcaatcacatcgaccgggctctggatgccaccgagattctgggcatccttcacagctgcctcaaccccctcatctacgccttcattggccagaagtttcgccatggactcctcaagattctagctatacatggcttgatcagcaaggactccctgcccaaagacagcaggccttcctttgttggctcttcttcagggcacacttccactactctctaagacctcctgcctaagtgcagcccgtggggttcctcccttctcttcacagtcacattccaagcctcatgtccactggttcttcttggtctcagtgtcaatgcagcccccattgtggtcacaggaagtagaggaggccacgttcttactagtttcccttgcatggtttagaaagcttgccctggtgcctcaccccttgccataattactatgtcatttgctggagctctgcccatcctgcccctgagcccatggcactctatgttctaagaagtgaaaatctacactccagtgagacagctctgcatactcattaggatggctagtatcaaaagaaagaaaatcaggctggccaacggggtgaaacctgtctctactaaaaatacaaaaaaaaaaaaaaattagccgggcgtggtggtgagtgcctgtaatcacagctacttgggaggctgagatgggagaatcacttgaacccgggagcagaggttgcagtgagccgagattgtgcccctgccatccagcctgagcgacagtgagactctgtctcagtccatgaagatgtagaggagaaactggaactctcgagcgttgctgggggggattgtaaaatggtgtgaccactgcagaagacagtatggcagctttcctcaaaacttcagacatagaattaacacatgatcctgcaattccacttataggaattgacccacaagaaatgaaagcagggacttgaacccatatttgtacaccaatattcatagcagcttattcacaagacccaaaaggcagaagcaacccaaatgttcatcaatgaatgaatgaatggctaagcaaaatgtgatatgtacctaacgaagtatccttcagcctgaaagaggaatgaagtactcatacatgttacaacacggacgaaccttgaaaactttatgctaagtgaaataagccagacatcaacagataaatagtttatgattccacctacatgaggtactgagagtgaacaaatttacagagacagaaagcagaacagtgattaccagggactgaggggaggggagcatgggaagtgacggtttaatgggcacagggtttatgtttaggatgttgaaaaagttctgcagataaacagtagtgatagttgtaccgcaatgtgacttaatgccactaaattgacacttaaaaatggtttaaatggtcaattttgttatgtatattttatatcaatttaaaaaaaaacctgagccccaaaaggtattttaatcaccaaggctgattaaaccaaggctagaaccacctgcctatattttttgttaaatgatttcattcaatatcttttttttaataaaccatttttacttgggtgtttat

SEQ ID NO: 1184 - protein, 360 aa, Homo sapien
MEDFNMESDSFEDFWKGEDLSNYSYSSTLPPFLLDAAPCEPESLEINKYFVVIIYALVFLLSLLGNSLVMLVILYSRVGRSVTDVYLLNLALADLLFALTLPIWAASKVNGWIFGTFLCKVVSLLKEVNFYSGILLLACISVDRYLAIVHATRTLTQKRYLVKFICLSIWGLSLLLALPVLLFRRTVYSSNVSPACYEDMGNNTANWRMLLRILPQSFGFIVPLLIMLFCYGFTLRTLFKAHMGQKHRAMRVIFAVVLIFLLCWLPYNLVLLADTLMRTQVIQETCERRNHIDRALDATEILGILHSCLNPLIYAFIGQKFRHGLLKILAIHGLISKDSLPKDSRPSFVGSSSGHTSTTL

SEQ ID NO: 1185 - DNA, 3092 bp, Homo sapien
acaaagcagtgcaggcagcccgcctggctttctctcttggttcagtgtggagaaggatggatgcttcagaaaggggacgtctgttggataagcttgcagacttggtggaacgggacagggcagttcttgcaaccatggaatccctaaatggtggcaaaccattcctgcaagctttttatgtggatttgcagggcgtcatcaaaacctttcgatattacgcaggctgggctgataaaattcatgggatgaccattcctgtagatggagactattttacctttacaagacatgaacccattggagtgtgtggacagatcatcccatggaacttccccctgctgatgtttgcctggaaaatagctccagctttgtgctgtggcaatacagtagttattaagccagcagagcaaacaccactcagtgcactctacatgggagccctcatcaaggaggctggctttcctcccggggtcatcaatattttgccaggatatgggccaacggctggggcagcaatagcttctcacattggcatagacaagattgcattcacagggtctactgaggttggaaagcttatccaagaagcagctggaagaagtaatttgaagagagtaactctggaacttggaggcaaaagtcctaatattatttttgctgatgctgacttggactatgctgtggagcaggcccaccagggtgtgttcttcaatcaaggtcagtgctgcactgcaggctctcgcatcttcgtggaggagtccatctatgaggagtttgtgagaagaagcgtggagcgggccaagaggcgcatagtggggagtccctttgaccccaccactgagcagggtccccagattgataagaaacagtacaacaagatcttggaactcatccagagtggtgtggctgagggcgccaagctggaatgtggaggcaaaggactgggccgaaaggggtttttcattgagcccacagtgttttccaacgtcactgatgatatgcggattgccaaggaggagatctttggccctgttcaggaaattttgagatttaagacgatggatgaagttatcgaaagagccaataactcagactttggactcgtagcagctgtctttactaatgacatcaacaaggccctcacagtgtcttctgcaatgcaagctgggactgtttggatcaattgttacaatgccttaaatgcccagagcccctttgggggattcaagatgtctggaaatgggagagaaatgggagaatttggcttgcgggagtactcagaagttaagacggtgacagtaaagatcccccagaagaactcctaagaaggccaagaaggaggatgaagcccagcctgcacgtctgtccctctctgctttctctgtagggcccagctctcaggaatacaaagttgagccacggtccttacttaaagattgaaaagataacatgtaggccaggcaggtcactgcacaactaaagcaaaccagctgggtacagtttcttggcactctgtaaggggccaccttaatcataccaaatattggggaaagtgggataaagggaggaggaggagctagcagacacatccagtatctccttctggagcacaggatgaaataagggagctgtattatttcatgtctttgtcacaaagaactttcctctcaaggaaaggtgacctttctcctgtcttcattttcctccttccaggccctcctcgctcacccacccctccctctcttccaaggagatgtcagctgagctcattctggggcagatgtttgggccgggaacaatttttcaaggttgtaaagccaaattatcatttcatgttatccatttcttcaaagcaaaacatgaaatggttttagctagagtcagaccagaatgaaaatgccaggagctggtacactacagatgtagtaagaacctgggatattcctgacccaatctggttttcttttacccataaataacatgaatgaaaaaagattgggacaatagagactggaagtcatcatgtgcagttcaccgcttctgagcttgctgcagttttggggtgtgtgtgtattagattccttctcagttattctggaataaggcaaggagtgggttgtttttcatagctagataagatcttttccaaagtttttcttagaaccaaccaaaaaacaatccgagtaggcccaagaatttgataatgctggatgccttgcagacatcattcagtttctaatattgggcaacaattattattaaatgaattatttctgtagttggaatctgtaccttctgaacctctacaccaataactgctgcaggtgtgattttggtctgtcacactgtacatctatcataatgtgccctgtatctattggcagtgaccttggaaaatctggccaagcctaggggtttccttttccatttgccaagttccattgtgccaggactgccgtgctccactgagctcctctgtcacaccccattcttgcccctcactgggcaggccatggcctacagcttgcagggagtaaagcaggcccgcctccctttcttcccatccacatactcctcttctgctttccagtgactccaccagtttgatgtgggaagtgttagcttcctttccttcttccatcccttcttccatctttccagctgtcaaatccaatccagtctctaacctaaatgcagatcatttatttaaaagtaccaaacataacccagagtatgtggaatatgggcaacatatatatagccttctgtatttaacgatcttctgcttcttaaccgtaccagttttctatttataactcttatctatccatgatgttttaaagtctccacttgctgttatttacaaacgacagtgcattcagcagcccagtgccgtgagccctgacagatgccgtatttctgagtgcttccatgtgaatgctgccctcctgtagcatgtgtccaagtggacatagccactaaccaactagttacctttggactgcaacaaaaaatgtgaaaatgaagatttatttcttttaatttacttaaaaagaaacctctgtgctagcaataaagcatttatattgtgc

SEQ ID NO: 1186 - protein, 422 aa, Homo sapien [sequence omitted]

SEQ ID NO: 1187 - DNA, 2104 bp, Homo sapien
ggaaacttctgcctcaggtggggagaggagtccatagatcagggaaacttatgtcttggtgaaatggaagaccatgtttctaaacacctgtcgccaggttacttgaatttccactagaggagcagaaatgccaccaatgccaagtgccccacctgtgcatccacctccagatggaggatggggttggattgtggttggagcagcttttatctccattggattttcctatgcattccccaaagctgtcaccgtattcttcaaagaaattcagcaaatattccacactacctacagtgaaatagcatggatttcatccattatgctggctgttatgtacgcaggaggtcctgtaagtagtgttttggtgaataaatacggcagccggccggtggtgatagcaggaggcttattatgctgtcttggaatggtgttggcctcctttagtagcagcgtggtacagctgtacctcactatgggattcattacaggtttaggtttagccttcaacctgcaacccgccttaaccataattggcaaatacttctataggaagcgacccatggcaaatggattggccatggcaggaagtcctgttttcttaagttcattggctcctttcaatcagtacctttttaatacttttggctggaaaggaagcttcctgattttgggaagtctacttttgaatgcctgtgtggctggttccctcatgagaccccttggacccaatcaaaccacttctaagtctaaaaataagactggcaaaacagaagatgattcaagcccaaagaaaatcaaaacgaagaaatcaacttgggaaaaagttaataagtatttagatttctccctttttaagcatagaggatttctgatatatctgtctggaaatgtcattatgttcctaggtttttttgcccccattatattcttggctccatatgctaaagaccaaggaattgatgagtactcggcagcttttctgctatctgttatggctttcgttgatatgtttgctaggccttctgtaggattaattgcaaactccaaatatattcgacctcgaattcagtacttcttcagttttgcaatcatgttcaatggagtgtgtcacctcttgtgcccactggcacaggactacacaagcctggtattatatgctgtattttttggccttggatttgggagtgttagcagtgttctctttgaaactctcatggacctcgtgggtgcaccaagattttccagtgccgtcggacttgtcacaattgtggagtgtggcccagttcttcttggccctcctcttgcaggtaaattggtggatttaactggagaatataaatacatgtacatgtcctgtggggctattgtggtagcagcaagcgtgtggctgctcattggcaatgctatcaactatagattgcttgcaaaggaaaggaaggaggaaaatgcaaggcagaagtccagagaatctgaacccttgagcaaatctaaacattcggaagatgttaacgtcaaagtttcaaatgcacagagtgtaacctcagaaagagaaactaacatttaacaagaatcacatctctgatttcagtgtttatgactttatctaggagtttgtttttcattttgtttttttaaagtattagaaaaggttttagctgaaatgaggagtcacaattdaaggatggaggtgatattttcctcaatggcaaattttaaattagtttttaaaaacttacttatttgggtagttaaattttgagattatgcatagaaagaatccatgctataggtttatttccatacctgactctgggtgtggtggttaaaatactaattttaaagtcttccagtgactttcggtcttggttatatggagaattctgaatcccaaacccctggtttaagtaggtagaaggaggatgcctaatcctacaaagtgaccctttatacatttcattttttatttgatattaaagtatgagatagagttgagagacaattaattatcccctcttacacacaaacacacatactcccacatacttacccacatgtacacagagtatctggagaataaaacccaaattcaaaaaaaaaaaaaaaa

SEQ ID NO: 1188 - protein, 478 aa, Homo sapien
MPPMPSAPPVHPPPDGGWGWIVVGAAFISIGFSYAFPKAVTVFFKEIQQIFHTTYSEIAWISSIMLAVMYAGGPVSSVLVNKYGSRPVVIAGGLLCCLGMVLASFSSSVVQLYLTMGFITGLGLAFNLQPALTIIGKYFYRKRPMANGLAMAGSPVFLSSLAPFNQYLFNTFGWKGSFLILGSLLLNACVAGSLMRPLGPNQTTSKSKNKTGKTEDDSSPKKIKTKKSTWEKVNKYLDFSLFKHRGFLIYLSGNVIMFLGFFAPIIFLAPYAKDQGIDEYSAAFLLSVMAFVDMFARPSVGLIANSKYIRPRIQYFFSFAIMFNGVCHLLCPLAQDYTSLVLYAVFFGLGFGSVSSVLFETLMDLVGAPRFSSAVGLVTIVECGPVLLGPPLAGKLVDLTGEYKYMYMSCGAIVVAASVWLLIGNAINYRLLAKERKEENARQKSRESEPLSKSKHSEDVNVKVSNAQSVTSERETNI

SEQ ID NO: 1189 - DNA, 3498 bp, Homo sapien
gggctcgaacgcgcagcgcacgggaaccggtcccgctgcttgggtcaggttcgccggtcgcgggagccccgccgtgcagtcggaggaacacgtggccatcagtaatcatgagcaacccattcgcacaccttgctgagccattggatcctgtacaaccaggaaagaaattcttcaatttgaataaattggaggattcaagatatgggcgcttaccattttcgatcagagttcttctggaagcagccattcggaattgtgatgagtttttggtgaagaaacaggatattgaaaatattctacattggaatgtcactcagcacaagaacatagaagtgccatttaagcctgctcgtgtcatcctgcaggactttacgggtgtgcccgctgtggttgactttgctgcaatgcgtgatgctgtgaaaaagttaggaggagatccagagaaaataaaccctgtctgccctgctgatcttgtaatagatcattccatccaggttgatttcaacagaagggcagacagtttacagaagaatcaagacctggaatttgaaagaaatagagagcgatttgaatttttaaagtggggttcccaggcttttcacaacatgcggattattccccctggctcaggaatcatccaccaggtgaatttggaatatttggcaagagtggtatttgatcaggatggatattattacccagacagcctcgtgggcacagactcgcacactaccatgattgatggcttgggcattcttggttggggtgtcggtggtattgaagcagaagctgtcatgctgggtcagccaatcagtatggtgcttcctcaggtgattggctacaggctgatggggaagccccaccctctggtaacatccactgacatcgtgctcaccattaccaagcacctccgccaggttggggtagtgggcaaatttgtcgagttcttcgggcctggagtagcccagttgtccattgctgaccgagctacgattgctaacatgtgtccagagtacggagcaactgctgcctttttcccagttgatgaagttagtatcacgtacctggtgcaaacaggtcgtgatgaagaaaaattaaagtatattaaaaaatatcttcaggctgtaggaatgtttcgagatttcaatgacccttctcaagacccagacttcacccaggttgtggaattagatttgaaaacagtagtgccttgctgtagtggacccaaaaggcctcaggacaaagttgctgtgtccgacatgaaaaaggactttgagagctgccttggagccaagcaaggatttaaaggattccaagttgctcctgaacatcataatgaccataagacctttatctatgataacactgaattcacccttgctcatggttctgtggtcattgctgccattactagctgcacaaacaccagtaatccgtctgtgatgttaggggcaggattgttagcaaagaaagctgtggatgctggcctgaacgtgatgccttacatcaaaactagcctgtctcctgggagtggcgtggtcacctactacctacaagaaagcggagtcatgccttatctgtctcagcttgggtttgacgtggtgggctatggctgcatgacctgcattggcaacagtgggcctttacctgaacctgtggtagaagccatcacacagggagaccttgtagctgttggagtactatctggaaacaggaattttgaaggtcgagttcaccccaacacccgggccaactatttagcctctccccccttagtaatagcatatgcaattgctggaaccatcagaatcgactttgagaaagagccattgggagtaaatgcaaagggacagcaggtatttctgaaagatatctggccgactagagacgagatccaggcagtggagcgtcagtatgtcatcccggggatgtttaaggaagtctatcagaaaatagagactgtgaatgaaagctggaatgccttagcaaccccatcagataagctgtttttctggaattccaaatctacgtatatcaaatcaccaccattctttgaaaacctgactttggatcttcagccccctaaatctatagtggatgcctatgtgctgctaaatttgggagattcggtaacaactgaccacatctccccagctggaaatattgcaagaaacagtcctgctgctcgctacttaactaacagaggcctaactccacgagaattcaactcctatggctcccgccgaggtaatgacgccgtcatggcacggggaacatttgccaacattcgcttgttaaacagatttttgaacaagcaggcaccacagactatccatctgccttctggggaaatccttgatgtgtttgatgctgctgagcggtaccagcaggcaggccttcccctgatcgttctggctggcaaagagtacggtgcaggcagctcccgagactgggcagctaagggccctttcctgctgggaatcaaagccgtcctggccgagagctacgagcgcattcaccgcagtaacctggttgggatgggtgtgatcccacttgaatatctccctggtgagaatgcagatgccctggggctcacagggcaagaacgatacactatcattattccagaaaacctcaaaccacaaatgaaagtccaggtcaagctggatactggcaagaccttccaggctgtcatgaggtttgacactgatgtggagctcacttatttcctcaacgggggcatcctcaactacatgatccgcaagatggccaagtaggagacgtgcacttggtcgtgcgcccagggaggaagccgcaccaccagccagcgcaggccctggtggagaggcctccctggctgcctctgggaggggtgctgccttgtagatggagcaagtgagcactgagggtctggtgccaatcctgtaggcacaaaaccagaagtttctacattctctatttttgttaatcatcttctctttttccagaatttggaagctagaatggtgggaatgtcagtagtgccagaaagagagaaccaagcttgtctttaaagttactgatcacaggacgttgctttttcactgtttcctattaatcttcagctgaacacaagcaaaccttctcaggaggtgtctcctaccctcttattgttcctcttacgctctgctcaatgaaaccttcctcttgagggtcattttcctttctgtattaattataccagtgttaagtgacatagataagaactttgcacacttcaaatcagagcagtgattctctcttctctccccttttccttcagagtgaatcatccagactcctcatggataggtcgggtgttaaagttgttttgattatgtaccttttgatagatccacataaaaagaaatgtgaagttttcttttactatcttttcatttatcaagcagagacctttgttgggaggcggtttgggagaacacatttctaatttgaatgaaatgaaatctattttcagtg

SEQ ID NO: 1190 - protein, 889 aa, Homo sapien
MSNPFAHLAEPLDPVQPGKKFFNLNKLEDSRYGRLPFSIRVLLEAAIRNCDEFLVKKQDIENILHWNVTQHKNIEVPFKPARVILQDFTGVPAVVDFAAMRDAVKKLGGDPEKINPVCPADLVIDHSIQVDFNRRADSLQKNQDLEFERNRERFEFLKWGSQAFHNMRIIPPGSGIIHQVNLEYLARVVFDQDGYYYPDSLVGTDSHTTMIDGLGILGWGVGGIEAEAVMLGQPISMVLPQVIGYRLMGKPHPLVTSTDIVLTITKHLRQVGVVGKFVEFFGPGVAQLSIADRATIANMCPEYGATAAFFPVDEVSITYLVQTGRDEEKLKYIKKYLQAVGMFRDFNDPSQDPDFTQVVELDLKTVVPCCSGPKRPQDKVAVSDMKKDFESCLGAKQGFKGFQVAPEHHNDHKTFIYDNTEFTLAHGSVVIAAITSCTNTSNPSVMLGAGLLAKKAVDAGLNVMPYIKTSLSPGSGVVTYYLQESGVMPYLSQLGFDVVGYGCMTCIGNSGPLPEPVVEAITQGDLVAVGVLSGNRNFEGRVHPNTRANYLASPPLVIAYAIAGTIRIDFEKEPLGVNAKGQQVFLKDIWPTRDEIQAVERQYVIPGMFKEVYQKIETVNESWNALATPSDKLFFWNSKSTYIKSPPFFENLTLDLQPPKSIVDAYVLLNLGDSVTTDHISPAGNIARNSPAARYLTNRGLTPREFNSYGSRRGNDAVMARGTFANIRLLNRFLNKQAPQTIHLPSGEILDVFDAAERYQQAGLPLIVLAGKEYGAGSSRDWAAKGPFLLGIKAVLAESYERIHRSNLVGMGVIPLEYLPGENADALGLTGQERYTIIIPENLKPQMKVQVKLDTGKTFQAVMRFDTDVELTYFLNGGILNYMIRKMAK

SEQ ID NO: 1191 - DNA, 4170 bp, Homo sapien
gtagatgaggaaactgaagttgaggaatagtgaagagtttgtccaatgtcatagccccgtaatcaacgggacaaaaattttcttgctgatgggtcaagatggcatcgtgaagtggttgttcaccgtaaactgtaatacaatcctgtttatggatttgtttgcatatttttccccccatagggaaaccttttttccatggctcaggacacactcctggatcgagccaacaggagaactttctggtaagcatttggctaacttttttttttttgagatggagtcttgctgtgtcgcctaggctggagtgcagtggcgtgatcttggctcactgcagcctccacctcccgggttcaatcaattctcctacctcaacttcctgagtagctgggattacaggcgcccgccaccacacccggctcatttttgtacttttagtagagacacagttttgccatgttggccaggctggtcttgaattcctcagctcaggtgatatgcctgccttggcctctcaaagtgctgggattacaggcgtgagccactgtgcccggccttggctaacttttcaaaattaaagattttgacttgttacagtcatgtgacatttttttctttctgtttggtgagtttttgataatttatatctctcaaagtggagactttaaaaaagactcatctgtgtgccgtgttcactgcctggtatcttagtgtggaccgaagcctaaggaccctgaaaacagctgcagatgaagatggcaagcacccgctgcaagctggccaggtacctggaggacctggaggatgtggacttgaagaaatttaagatgcacttagaggactatcctccccagaagggctgcatccccctcccgaggggtcagacagagaaggcagaccatgtggatctagccacgctaatgatcgacttcaatggggaggagaaggcgtgggccatggccgtgtggatcttcgctgcgatcaacaggagagacctttatgagaaagcaaaaagagatgagccgaagtggggttcagataatgcacgtgtttcgaatcccactgtgatatgccaggaagacagcattgaagaggagtggatgggtttactggagtacctttcgagaatctctatttgtaaaatgaagaaagattaccgtaagaagtacagaaagtacgtgagaagcagattccagtgcattgaagacaggaatgcccgtctgggtgagagtgtgagcctcaacaaacgctacacacgactgcgtctcatcaaggagcaccggagccagcaggagagggagcaggagcttctggccatcggcaagaccaagacgtgtgagagccccgtgagtcccattaagatggagttgctgtttgaccccgatgatgagcattctgagcctgtgcacaccgtggtgttccagggggcggcagggattgggaaaacaatcctggccaggaagatgatgttggactgggcgtcggggacactctaccaagacaggtttgactatctgttctatatccactgtcgggaggtgagccttgtgacacagaggagcctgggggacctgatcatgagctgctgccccgacccaaacccacccatccacaagatcgtgagaaaaccctccagaatcctcttcctcatggacggcttcgatgagctgcaaggtgcctttgacgagcacataggaccgctctgcactgactggcagaaggccgagcggggagacattctcctgagcagcctcatcagaaagaagctgcttcccgaggcctctctgctcatcaccacgagacctgtggccctggagaaactgcagcacttgctggaccatcctcggcatgtggagatcctgggtttctccgaggccaaaaggaaagagtacttcttcaagtacttctctgatgaggcccaagccagggcagccttcagtctgattcaggagaacgaggtcctcttcaccatgtgcttcatccccctggtctgctggatcgtgtgcactggactgaaacagcagatggagagtggcaagagccttgcccagacatccaagaccaccaccgcggtgtacgtcttcttcctttccagtttgctgcagccccggggagggagccaggagcacggcctctgcgcccacctctgggggctctgctctttggctgcagatggaatctggaaccagaaaatcctgtttgaggagtccgacctcaggaatcatggactgcagaaggcggatgtgtctgctttcctgaggatgaacctgttccaaaaggaagtggactgcgagaagttctacagcttcatccacatgactttccaggagttctttgccgccatgtactacctgctggaagaggaaaaggaaggaaggacgaacgttccagggagtcgtttgaagcttcccagccgagacgtgacagtccttctggaaaactatggcaaattcgaaaaggggtatttgatttttgttgtacgtttcctctttggcctggtaaaccaggagaggacctcctacttggagaagaaattaagttgcaagatctctcagcaaatcaggctggagctgctgaaatggattgaagtgaaagccaaagctaaaaagctgcagatccagcccagccagctggaattgttctactgtttgtacgagatgcaggaggaggacttcgtgcaaagggccatggactatttccccaagattgagatcaatctctccaccagaatggaccacatggtttcttccttttgcattgagaactgtcatcgggtggagtcactgtccctggggtttctccataacatgcccaaggaggaagaggaggaggaaaaggaaggccgacaccttgatatggtgcagtgtgtcctcccaagctcctctcatgctgcctgttctcatggattggtgaacagccacctcacttccagtttttgccggggcctcttttcagttctgagcaccagccagagtctaactgaattggacctcagtgacaattctctgggggacccagggatgagagtgttgtgtgaaacgctccagcatcctggctgtaacattcggagattgtggttggggcgctgtggcctctcgcatgagtgctgcttcgacatctccttggtcctcagcagcaaccagaagctggtggagctggacctgagtgacaacgccctcggtgacttcggaatcagacttctgtgtgtgggactgaagcacctgttgtgcaatctgaagaagctctggttggtcagctgctgcctcacatcagcatgttgtcaggatcttgcatcagtattgagcaccagccattccctgaccagactctatgtgggggagaatgccttgggagactcaggagtcgcaattttatgtgaaaaagccaagaatccacagtgtaacctgcagaaactggggttggtgaattctggccttacgtcagtctgttgttcagctttgtcctcggtactcagcactaatcagaatctcacgcacctttacctgcgaggcaacactctcggagacaaggggatcaaactactctgtgagggactcttgcaccccgactgcaagcttcaggtgttggaattagacaactgcaacctcacgtcacactgctgctgggatctttccacacttctgacctccagccagagcctgcgaaagctgagcctgggcaacaatgacctgggcgacctgggggtcatgatgttctgtgaagtgctgaaacagcagagctgcctcctgcagaacctggggttgtctgaaatgtatttcaattatgagacaaaaagtgcgttagaaacacttcaagaagaaaagcctgagctgaccgtcgtctttgagccttcttggtaggagtggaaacggggctgccagacgccagtgttctccggtccctccagctgggggccctcaggtggagagagctgcgatccatccaggccaagaccacagctctgtgatccttccggtggagtgtcggagaagagagcttgccgacgatgccttcctgtgcagagcttgggcatctcctttacgccagggtgaggaagacaccaggacaatgacagcatcgggtgttgttgtcatcacagcgcctcagttagaggatgttcctcttggtgacctcatgtaattagctcattcaataaagcactttctttatttt

SEQ ID NO: 1192 - protein, 1034 aa, Homo sapien
MASTRCKLARYLEDLEDVDLKKFKMHLEDYPPQKGCIPLPRGQTEKADHVDLATLMIDFNGEEKAWAMAVWIFAAINRRDLYEKAKRDEPKWGSDNARVSNPTVICQEDSIEEEWMGLLEYLSRISICKMKKDYRKKYRKYVRSRFQCIEDRNARLGESVSLNKRYTRLRLIKEHRSQQEREQELLAIGKTKTCESPVSPIKMELLFDPDDEHSEPVHTVVFQGAAGIGKTILARKMMLDWASGTLYQDRFDYLFYIHCREVSLVTQRSLGDLIMSCCPDPNPPIHKIVRKPSRILFLMDGFDELQGAFDEHIGPLCTDWQKAERGDILLSSLIRKKLLPEASLLITTRPVALEKLQHLLDHPRHVEILGFSEAKRKEYFFKYFSDEAQARAAFSLIQENEVLFTMCFIPLVCWIVCTGLKQQMESGKSLAQTSKTTTAVYVFFLSSLLQPRGGSQEHGLCAHLWGLCSLAADGIWNQKILFEESDLRNHGLQKADVSAFLRMNLFQKEVDCEKFYSFIHMTFQEFFAAMYYLLEEEKEGRTNVPGSRLKLPSRDVTVLLENYGKFEKGYLIFVVRFLFGLVNQERTSYLEKKLSCKISQQIRLELLKWIEVKAKAKKLQIQPSQLELFYCLYEMQEEDFVQRAMDYFPKIEINLSTRMDHMVSSFCIENCHRVESLSLGFLHNMPKEEEEEEKEGRHLDMVQCVLPSSSHAACSHGLVNSHLTSSFCRGLFSVLSTSQSLTELDLSDNSLGDPGMRVLCETLQHPGCNIRRLWLGRCGLSHECCFDISLVLSSNQKLVELDLSDNALGDFGIRLLCVGLKHLLCNLKKLWLVSCCLTSACCQDLASVLSTSHSLTRLYVGENALGDSGVAILCEKAKNPQCNLQKLGLVNSGLTSVCCSALSSVLSTNQNLTHLYLRGNTLGDKGIKLLCEGLLHPDCKLQVLELDNCNLTSHCCWDLSTLLTSSQSLRKLSLGNNDLGDLGVMMFCEVLKQQSCLLQNLGLSEMYFNYETKSALETLQEEKPELTVVFEPSW

SEQ ID NO: 1193 - DNA, 3939 bp, Homo sapien
cctgggtcctctcggcgccagagccgctctccgcatcccaggacagcggtgcggccctcggccggggcgcccactccgcagcagccagcgagccagctgccccgtatgaccgcgccgggcgccgccgggcgctgccctcccacgacatggctgggctccctgctgttgttggtctgtctcctggcgagcaggagtatcaccgaggaggtgtcggagtactgtagccacatgattgggagtggacacctgcagtctctgcagcggctgattgacagtcagatggagacctcgtgccaaattacatttgagtttgtagaccaggaacagttgaaagatccagtgtgctaccttaagaaggcatttctcctggtacaagacataatggaggacaccatgcgcttcagagataacaccgccaatcccatcgccattgtgcagctgcaggaactctctttgaggctgaagagctgcttcaccaaggattatgaagagcatgacaaggcctgcgtccgaactttctatgagacacctctccagttgctggagaaggtcaagaatgtctttaatgaaacaaagaatctccttgacaaggactggaatattttcagcaagaactgcaacaacagctttgctgaatgctccagccaagatgtggtgaccaagcctgattgcaactgcctgtaccccaaagccatccctagcagtgacccggcctctgtctcccctcatcagcccctcgccccctccatggcccctgtggctggcttgacctgggaggactctgagggaactgagggcagctccctcttgcctggtgagcagcccctgcacacagtggatccaggcagtgccaagcagcggccacccaggagcacctgccagagctttgagccgccagagaccccagttgtcaaggacagcaccatcggtggctcaccacagcctcgcccctctgtcggggccttcaaccccgggatggaggatattcttgactctgcaatgggcactaattgggtcccagaagaagcctctggagaggccagtgagattcccgtaccccaagggacagagctttccccctccaggccaggagggggcagcatgcagacagagcccgccagacccagcaacttcctctcagcatcttctccactccctgcatcagcaaagggccaacagccggcagatgtaactgctacagccttgcccagggtgggccccgtgatgcccactggccaggactggaatcacaccccccagaagacagaccatccatctgccctgctcagagaccccccggagccaggctctcccaggatctcatcactgcgcccccaggccctcagcaacccctccaccctctctgctcagccacagctttccagaagccactcctcgggcagcgtgctgccccttggggagctggagggcaggaggagcaccagggatcggacgagccccgcagagccagaagcagcaccagcaagtgaaggggcagccaggcccctgccccgttttaactccgttcctttgactgacacaggccatgagaggcagtccgagggatcctccagcccgcagctccaggagtctgtcttccacctgctggtgcccagtgtcatcctggtcttgctggctgtcggaggcctcttgttctacaggtggaggcggcggagccatcaagagcctcagagagcggattctcccttggagcaaccagagggcagccccctgactcaggatgacagacaggtggaactgccagtgtagagggaattctaagctggacgcacagaacagtctcttcgtgggaggagacattatggggcgtccaccaccacccctccctggccatcctcctggaatgtggtctgccctccaccagagctcctgcctgccaggactggaccagagcagccaggctggggcccctctgtctcaacccgcagacccttgactgaatgagagaggccagaggatgctccccatgctgccactatttattgtgagccctggaggctcccatgtgcttgaggaaggctggtgagcccggctcaggaccctcttccctcaggggctgcagcctcctctcactcccttccatgccggaacccaggccagggacccaccggcctgtggtttgtgggaaagcagggtgcacgctgaggagtgaaacaaccctgcacccagagggcctgcctggtgccaaggtatcccagcctggacaggcatggacctgtctccagacagaggagcctgaagttcgtggggcgggacagcctcggcctgatttcccgtaaaggtgtgcagcctgagagacgggaagaggaggcctctgcacctgctggtctgcactgacagcctgaagggtctacaccctcggctcacctaagtccctgtgctggttgccaggcccagaggggaggccagccctgccctcaggacctgcctgacctgccagtgatgccaagagggggatcaagcactggcctctgcccctcctccttccagcacctgccagagcttctccagcaggccaagcagaggctcccctcatgaaggaagccattgcactgtgaacactgtacctgcctgctgaacagcctccccccgtccatccatgagccagcatccgtccgtcctccactctccagcctctccccagcctcctgcactgagctggcctcaccagtcgactgagggagcccctcagccctgaccttctcctgacctggcctttgactccccggagtggagtggggtgggagaacctcctgggccgccagccagagccgctctttaggctgtgttcttcgcccaggtttctgcatcttccactttgacattcccaagagggaagggactagtgggagagagcaagggaggggagggcacagacagagagcctacagggcgagctctgactgaagatgggcctttgaaatataggtatgcacctgaggttgggggagggtctgcactcccaaaccccagcgcagtgtcctttccctgctgccgacaggaacctggggctgagcaggttatccctgtcaggagccctggactgggctgcatctcagccccacctgcatggtatccagctcccatccacttctcacccttctttcctcctgaccttggtcagcagtgatgacctccaactctcacccaccccctctaccatcacctctaaccaggcaagccagggtgggagagcaatcaggagagccaggcctcagcttccaatgcctggagggcctccactttgtggccagcctgtggtgctggctctgaggcctaggcaacgagcgacagggctgccagttgcccctgggttcctttgtgctgctgtgtgcctcctctcctgccgccctttgtcctccgctaagagaccctgccctacctggccgctgggccccgtgactttcccttcctgcccaggaaagtgagggtcggctggccccaccttccctgtcctgatgccgacagcttagggaagggcactgaacttgcatatggggcttagccttctagtcacagcctctatatttgatgctagaaaacacatatttttaaatggaagaaaaataaaaaggcattcccccttcatccccctaccttaaacatataatattttaaaggtcaaaaaagcaatccaacccactgcagaagctctttttgagcacttggtggcatcagagcaggaggagccccagagccacctctggtgtcccccaggctacctgctcaggaaccccttctgttctctgagaactcaacagaggacattggctcacgcactgtgagattttgtttttatacttgcaactggtgaattattttttataaagtcatttaaatatctatttaaaagataggaagctgcttatatatttaataataaaagaagtgcacaagctgccgttgacgtagctcgag

SEQ ID NO: 1194 - protein, 554 aa, Homo sapien
MTAPGAAGRCPPTTWLGSLLLLVCLLASRSITEEVSEYCSHMIGSGHLQSLQRLIDSQMETSCQITFEFVDQEQLKDPVCYLKKAFLLVQDIMEDTMRFRDNTANPIAIVQLQELSLRLKSCFTKDYEEHDKACVRTFYETPLQLLEKVKNVFNETKNLLDKDWNIFSKNCNNSFAECSSQDVVTKPDCNCLYPKAIPSSDPASVSPHQPLAPSMAPVAGLTWEDSEGTEGSSLLPGEQPLHTVDPGSAKQRPPRSTCQSFEPPETPVVKDSTIGGSPQPRPSVGAFNPGMEDILDSAMGTNWVPEEASGEASEIPVPQGTELSPSRPGGGSMQTEPARPSNFLSASSPLPASAKGQQPADVTATALPRVGPVMPTGQDWNHTPQKTDHPSALLRDPPEPGSPRISSLRPQALSNPSTLSAQPQLSRSHSSGSVLPLGELEGRRSTRDRTSPAEPEAAPASEGAARPLPRFNSVPLTDTGHERQSEGSSSPQLQESVFHLLVPSVILVLLAVGGLLFYRWRRRSHQEPQRADSPLEQPEGSPLTQDDRQVELPV

SEQ ID NO: 1195 - DNA, 3149 bp, Homo sapien
ctaaagtttttttctttgaatgacagaactacagcataatgcgtggcttcaacctgctcctcttctggggatgttgtgttatgcacagctgggaagggcacataagacccacacggaaaccaaacacaaagggtaataactgtagagacagtaccttgtgcccagcttatgccacctgcaccaatacggtggacagttactattgcacttgcaaacaaggcttcctgtccagcaatgggcaaaatcacttcaaggatccaggagtgcgatgcaaagatattgatgaatgttctcaaagcccccagccctgtggtcctaactcatcctgcaaaaacctgtcagggaggtacaagtgcagctgtttagatggtttctcttctcccactggaaatgactgggtcccaggaaagccgggcaatttctcctgtactgatatcaatgagtgcctcaccagcagggtctgccctgagcattctgactgtgtcaactccatgggaagctacagttgcagctgtcaagttggattcatctctagaaactccacctgtgaagacgtgaatgaatgtgcagatccaagagcttgcccagagcatgcaacttgtaataacactgttggaaactactcttgtttctgcaacccaggatttgaatccagcagtggccacttgagttgccagggtctcaaagcatcgtgtgaagatattgatgaatgcactgaaatgtgccccatcaattcaacatgcaccaacactcctgggagctacttttgcacctgccaccctggctttgcaccaagcagtggacagttgaatttcacagaccaaggagtggaatgtagagatattgatgagtgccgccaagatccatcaacctgtggtcctaattctatctgcaccaatgccctgggctcctacagctgtggctgcattgtaggctttcatcccaatccagaaggctcccagaaagatggcaacttcagctgccaaagggttctcttcaaatgtaaggaagatgtgatacccgataataagcagatccagcaatgccaagagggaaccgcagtgaaacctgcatatgtctccttttgtgcacaaataaataacatcttcagcgttctggacaaagtgtgtgaaaataaaacgaccgtagtttctctgaagaatacaactgagagctttgtccctgtgcttaaacaaatatccatgtggactaaattcaccaaggaagagacgtcctccctggccacagtcttcctggagagtgtggaaagcatgacactggcatctttttggaaaccctcagcaaatgtcactccggctgttcgggcggaatacttagacattgagagcaaagttatcaacaaagaatgcagtgaagagaatgtgacgttggacttggtagccaagggggataagatgaagatcgggtgttccacaattgaggaatctgaatccacagagaccactggtgtggcttttgtctcctttgtgggcatggaatcggttttaaatgagcgcttcttccaagaccaccaggctcccttgaccacctctgagatcaagctgaagatgaattctcgagtcgttgggggcataatgactggagagaagaaagacggcttctcagatccaatcatctacactctggagaacgttcagccaaagcagaagtttgagaggcccatctgtgtttcctggagcactgatgtgaagggtggaagatggacatcctttggctgtgtgatcctggaagcttctgagacatataccatctgcagctgtaatcagatggcaaatcttgccgttatcatggcgtctggggagctcacgatggacttttccttgtacatcattagccatgtaggcattatcatctccttggtgtgcctcgtcttggccatcgccacctttctgctgtgtcgctccatccgaaatcacaacacctacctccacctgcacctctgcgtgtgtctcctcttggcgaagactctcttcctcgccggtatacacaagactgacaacaagacgggctgcgccatcatcgcgggcttcctgcactaccttttccttgcctgcttcttctggatgctggtggaggctgtgatactgttcttgatggtcagaaacctgaaggtggtgaattacttcagctctcgcaacatcaagatgctgcacatctgtgcctttggttatgggctgccgatgctggtggtggtgatctctgccagtgtgcagccacagggctatggaatgcataatcgctgctggctgaatacagagacagggttcatctggagtttcttggggccagtttgcacagttatagtgatcaactcccttctcctgacctggaccttgtggatcctgaggcagaggctttccagtgttaatgccgaagtctcaacgctaaaagacaccaggttactgaccttcaaggcctttgcccagctcttcatcctgggctgctcctgggtgctgggcatttttcagattggacctgtggcaggtgtcatggcttacctgttcaccatcatcaacagcctgcagggggccttcatcttcctcatccactgtctgctcaacggccaggtacgagaagaatacaagaggtggatcactgggaagacgaagcccagctcccagtcccagacctcaaggatcttgctgtcctccatgccatccgcttccaagacgggttaaagcctttcttgctttcaaatatgctatggagccacagttgaggacagtagtttcctgcaggagcctaccctgaaatctcttctcagcttaacatggaaatgaggatcccaccagccccagaaccctctggggaagaatgttgggggccgtcttcctgtggttgtatgcactgatgagaaatcagacgtttctgctccaaacgaccattttatcttcgtgctctgcaacttcttcaattccagagtttctgagaacagacccaaattcaatggcatgaccaagaacacctggctaccattttgttttctcctgcccttgttggtgcatggttctaagcgtgcccctccagcgcctatcatacgcctgacacagagaacctctcaataaatgatttgtcgcctgtctgactgatttaccctaaaaaaaaaaaaaaaaaaaaaaaaaaaaaaa

SEQ ID NO: 1196 - protein, 886 aa, Homo sapien
MRGFNLLLFWGCCVMHSWEGHIRPTRKPNTKGNNCRDSTLCPAYATCTNTVDSYYCTCKQGFLSSNGQNHFKDPGVRCKDIDECSQSPQPCGPNSSCKNLSGRYKCSCLDGFSSPTGNDWVPGKPGNFSCTDINECLTSRVCPEHSDCVNSMGSYSCSCQVGFISRNSTCEDVNECADPRACPEHATCNNTVGNYSCFCNPGFESSSGHLSCQGLKASCEDIDECTEMCPINSTCTNTPGSYFCTCHPGFAPSSGQLNFTDQGVECRDIDECRQDPSTCGPNSICTNALGSYSCGCIVGFHPNPEGSQKDGNFSCQRVLFKCKEDVIPDNKQIQQCQEGTAVKPAYVSFCAQINNIFSVLDKVCENKTTVVSLKNTTESFVPVLKQISMWTKFTKEETSSLATVFLESVESMTLASFWKPSANVTPAVRAEYLDIESKVINKECSEENVTLDLVAKGDKMKIGCSTIEESESTETTGVAFVSFVGMESVLNERFFQDHQAPLTTSEIKLKMNSRVVGGIMTGEKKDGFSDPIIYTLENVQPKQKFERPICVSWSTDVKGGRWTSFGCVILEASETYTICSCNQMANLAVIMASGELTMDFSLYIISHVGIIISLVCLVLAIATFLLCRSIRNHNTYLHLHLCVCLLLAKTLFLAGIHKTDNKTGCAIIAGFLHYLFLACFFWMLVEAVILFLMVRNLKVVNYFSSRNIKMLHICAFGYGLPMLVVVISASVQPQGYGMHNRCWLNTETGFIWSFLGPVCTVIVINSLLLTWTLWILRQRLSSVNAEVSTLKDTRLLTFKAFAQLFILGCSWVLGIFQIGPVAGVMAYLFTIINSLQGAFIFLIHCLLNGQVREEYKRWITGKTKPSSQSQTSRILLSSMPSASKTG

SEQ ID NO: 1197 - DNA, 4193 bp, Homo sapien
catggcggcgactgcggcaaagcgagagcctcggagacgccgctgccgccagcacagccggagatctgagccgacactgggggcagtccgcgagccccgcactctctcgatgagtcggagaagtcccgttgtatcagagtaagatggacggtagctttgattgtgattgtggtgagctggagccacctgatcactaacaaaagacatcttctgttaaccaacagccgccaggcttcctgttgaaataaatatatagcaacaaaggaaaaaaagaagcaaaacggaaatagtgcttaccagcaccttagaatgatgctgctcaggaccagtccaacactgaatgtatctgcactgtgaggagaatgttcatagaagcctgttgtgtgcatatttattcactttttgttaaatgttaaatcgtttagcacggtaatctgagtgcacagtatgtcatttcattccgtttgagtttcttgttttcgttaaatgtctgcagagttgctgcccctttcttgaactatgagtactgcaatctttttaattctcaatatgaatagagctttttgagctttaaatctaaggggaactcgacaggcctgtttggcatatgcaatgaacatcaagaaaccatcttgctgtggaagcataattatttttcttctccctttttgaaagatctttccttttgatgccagttttcttccttgtttacacaagttcaatttgaaaggaaaaggcaatagtaagggtttcaaaatggcagagaaatttgaaagtctcatgaacattcatggttttgatctgggttctaggtatatggacttaaaaccattgggttgtggaggcaatggcttggttttttctgctgtagacaatgactgtgacaaaagagtagccatcaagaaaattgtccttactgatccccagagtgtcaaacatgctctacgtgaaatcaaaattattagaagacttgaccatgataacattgtgaaagtgtttgagattcttggtcccagtggaagccaattaacagacgatgtgggctctcttacggaactgaacagtgtttacattgttcaggagtacatggagacagacttggctaatgtgctggagcagggccctttactggaagagcatgccaggcttttcatgtatcagctgctacgggggctcaagtatattcactctgcaaatgtactgcacagagatctcaaaccagctaatcttttcattaatacggaagacttggtgctgaagataggtgactttggtcttgcacggatcatggatcctcattattcccataagggtcatctttctgaaggattggttactaaatggtacagatctccacgtcttttactttctcctaataattatactaaagccattgacatgtgggctgcaggctgcatctttgctgaaatgctgactggtaaaaccctttttgcaggtgcacatgaacttgaacagatgcagctgattttagaatctattcctgttgtacatgaggaagatcgtcaggagcttctcagcgtaattccagtttacattagaaatgacatgactgagccacacaaacctttaactcagctgcttccaggaattagtcgagaagcactggatttcctggaacaaattttgacatttagccccatggatcggttaacagcagaagaagcactctcccatccttacatgagcatatattcttttccaatggatgagccaatttcaagccatccttttcatattgaagatgaagttgatgatattttgcttatggatgaaactcacagtcacatttataactgggaaaggtatcatgattgtcagttttcagagcatgattggcctgtacataacaactttgatattgatgaagttcagcttgatccaagagctctgtccgatgtcactgatgaagaagaagtacaagttgatccccgaaaatatttggatggagatcgggaaaagtatctggaggatcctgcttttgataccaattactctactgagccttgttggcaatactcagatcatcatgaaaacaaatattgtgatctggagtgtagccatacttgtaactacaaaacgaggtcatcatcatatttagataacttagtttggagagagagtgaagttaaccattactatgaacccaagcttattatagatctttccaattggaaagaacaaagcaaagaaaaatctgataagaaaggcaaatcaaaatgtgaaaggaatggattggttaaagcccagatagcgctagaggaagcatcacagcaactggctggaaaagaaagggaaaagaatcagggatttgattttgattcctttattgcaggaactattcagcttagttcccagcatgagcctactgatgttgttgataaattaaatgacttgaatagctcagtgtcccaactagaattgaaaagtttgatatcaaagtcagtaagccaagaaaaacaggaaaaaggaatggcaaatctggctcaattagaagccttgtaccagtcttcttgggacagccagtttgtgagtggtggggaggactgttttttcataaatcagttttgtgaggtaaggaaggatgaacaagttgagaaggaaaacacttacactagttacttggacaagttctttagcaggaaagaagatactgaaatgctagaaactgagccagtagaggatgggaagcttggggagagaggacatgaggaaggatttctgaacaacagtggggagttcctctttaacaagcagctcgagtccataggcatcccacagtttcacagtccagttgggtcaccacttaagtcaatacaggccacattaacaccttctgctatgaaatcttcccctcaaattcctcatcaaacatacagcagcattctgaaacatctgaactaaaacactcagcagacatttatctttgtattcttcatgaaatgtgttttgtctttttttattactagtgtttaagtcattttttacttgaatcagatggtgtcatttagtaaggattttatgagttcttgttttttaaaatccagactttctttttctacatgtgagatagttttcattttaactggcatgtcatttgcacacaaaaataaagactagagcaaaataatgcaacgcaggaggagaaaagaaatgcactaagacaagaacattctctcatagaacattgatctgttttacaggaaacaaaccttgccttgaaatttacacagtgagactgtacataattgcatgaaaatagctatttttttcctaagacatttttcattcatgaatattttcaagtttttcatactgtacacatttcttaaaacacatgataccagcagcaactgaaaatgaatgccgaatttggtacacatgtgttatctacctcaaggtaacaagagtatgtggcaaaacatataccacccatagtgcttcacaaaatgcacttctatttagccagcgtttattgtagtaaactattcttaataaaactcactcactgtttataaatgttctggtatgcattctttatagtgaagtgttaatacatcacatcttatttattttagcaaatcagtatattttctgtatttaattataaaaaattaacttagtttttaaaatttatttgcaaatatactttttccatttggcactatggtttgttgcctacctagctgcatctataatgtcagcttatcctaaggctgtccacgtacttaatttacttaagtgttcattttaagtaacgtgctcactgtgtataggaatttgtattttggaggtgcttgatctatctacaaagaaaaattaattaggaattactttattataaaatgctcctagaagtcttaattgtgtttattttttaaaaaaacaaatgttagacttgtgtgcatggaagtaattaaggtacatcattattgtagtttgaaagttgtacatgataagacattttgtttttactgtatgtttttactgaatgatctattccccatcccaaggcaagcatgaataaaattaggttaaacgtagcatgtggcatcgcagtctcttagaatttgtttcatctattttattttattgaatactgtctgtatctttggttatcctgtttgaagaaaaaggacaaataaaacatggccagcaaatacaaaaaaaaaaaa

SEQ ID NO: 1198 - protein, 721 aa, Homo sapien
MAEKFESLMNIHGFDLGSRYMDLKPLGCGGNGLVFSAVDNDCDKRVAIKKIVLTDPQSVKHALREIKIIRRLDHDNIVKVFEILGPSGSQLTDDVGSLTELNSVYIVQEYMETDLANVLEQGPLLEEHARLFMYQLLRGLKYIHSANVLHRDLKPANLFINTEDLVLKIGDFGLARIMDPHYSHKGHLSEGLVTKWYRSPRLLLSPNNYTKAIDMWAAGCIFAEMLTGKTLFAGAHELEQMQLILESIPVVHEEDRQELLSVIPVYIRNDMTEPHKPLTQLLPGISREALDFLEQILTFSPMDRLTAEEALSHPYMSIYSFPMDEPISSHPFHIEDEVDDILLMDETHSHIYNWERYHDCQFSEHDWPVHNNFDIDEVQLDPRALSDVTDEEEVQVDPRKYLDGDREKYLEDPAFDTNYSTEPCWQYSDHHENKYCDLECSHTCNYKTRSSSYLDNLVWRESEVNHYYEPKLIIDLSNWKEQSKEKSDKKGKSKCERNGLVKAQIALEEASQQLAGKEREKNQGFDFDSFIAGTIQLSSQHEPTDVVDKLNDLNSSVSQLELKSLISKSVSQEKQEKGMANLAQLEALYQSSWDSQFVSGGEDCFFINQFCEVRKDEQVEKENTYTSYLDKFFSRKEDTEMLETEPVEDGKLGERGHEEGFLNNSGEFLFNKQLESIGIPQFHSPVGSPLKSIQATLTPSAMKSSPQIPHQTYSSILKHLN

SEQ ID NO: 1199 - DNA, 1396 bp, Homo sapien
gcattccccacacaacacccacactcagccactgcgggcgaggagggcacgaggccaggttcccaagagctcaggtttgtcctggaacccagatggactgtggccgggcaagtggatcacaggcctggccagcctaggagttgccacatgtgaggggccgaggggctcaaggaggggaacatcggggagaggagcctactgggtggaggctgggggtcccagcaggaaatggtgagacaaagggcgctggctggcaggaagacagcacaggaaggtcctagaggttcctcagtgcagctggactctcctggagaccttcacacaccctgacatctgggccccgttccacgagggtgctttcactggtctgcaccatggcccaggccctgggattttgaacagctccgcaggtgaatgaaaggaacatggagctgatccaggacatctctcgcccgccactggagtacgtgaagggggtcccgctcatcaagtactttgcagaggcactggggcccctgcagagcttccaggcccggcctgatgacctgctcatcagcacctaccccaagtccggcaccacctgggtgagccagattctggacatgatctaccagggcggtgacctggaaaagtgtcaccgagctcccatcttcatgcgggtgcccttccttgagttcaaagtcccagggattccctcagggatggagactctgaaaaacacaccagccccacgactcctgaagacacacctgcccctggctctgctcccccagactctgttggatcagaaggtcaaggtggtctatgttgcccgcaacgcaaaggatgtggcggtttcctactaccacttctaccacatggccaaagtgtaccctcaccctgggacctgggaaagcttcctggagaagttcatggctggagaagtgtcctatgggtcctggtaccagcacgtgcaagagtggtgggagctgagccgcacccaccctgttctctacctcttctatgaagacatgaaggagaaccccaaaagggagattcaaaagatcctggagtttgtggggcgctccctgccagaggagactgtggacctcatggttgagcacacgtcgttcaaggagatgaagaagaaccctatgaccaactacaccaccgtccgccgggagttcatggaccacagcatctcccccttcatgaggaaaggcatggctggggactggaagaccaccttcaccgtggcgcagaatgagcgcttcgatgcggactatgcggagaagatggcaggctgcagcctcagcttccgctctgagctgtgagaggggttcctggagtcactgcagagggagtgtgcgaatcaagcctgaccaagaggctccagaataaagtatgatttgtgttc

SEQ ID NO: 1200 - protein, 295 aa, Homo sapien
MELIQDISRPPLEYVKGVPLIKYFAEALGPLQSFQARPDDLLISTYPKSGTTWVSQILDMIYQGGDLEKCHRAPIFMRVPFLEFKVPGIPSGMETLKNTPAPRLLKTHLPLALLPQTLLDQKVKVVYVARNAKDVAVSYYHFYHMAKVYPHPGTWESFLEKFMAGEVSYGSWYQHVQEWWELSRTHPVLYLFYEDMKENPKREIQKILEFVGRSLPEETVDLMVEHTSFKEMKKNPMTNYTTVRREFMDHSISPFMRKGMAGDWKTTFTVAQNERFDADYAEKMAGCSLSFRSEL

SEQ ID NO: 1201 - DNA, 1788 bp, Homo sapien
gggataccttgtttatagtaccttctctttgccagtccatcttcaaattggaattatagaaagtagagggagggatagtctaccgtctctcactggattggtgccacctaaaacattgttatgctggaaatgctagaatataatcactatcaggtgcagacccacctcgaaaaccccaccaagtaccacatacagcaagcccaacggcagcaggtaaagcagtacctttctaccactttagcaaataaacatgccaaccaagtcctgagcttgccatgtccaaaccagcctggcgatcatgtcatgccaccggtgccggggagcagcgcacccaacagccccatggctatgcttacgcttaactccaactgtgaaaaagagggattttataagtttgaagagcaaaacagggcagagagcgagtgcccaggcatgaacacacattcacgagcgtcctgtatgcagatggatgatgtaatcgatgacatcattagcctagaatcaagttataatgaggaaatcttgggcttgatggatcctgctttgcaaatggcaaatacgttgcctgtctcgggaaacttgattgatctttatggaaaccaaggtctgcccccaccaggcctcaccatcagcaactcctgtccagccaaccttcccaacataaaaagggagctcacagcgtgtatttttcccacagagtctgaagcaagagcactggccaaagagaggcagaaaaaggacaatcacaacctgattgaacgaagaagaagatttaacataaatgaccgcattaaagaactaggtactttgattcccaagtcaaatgatccagacatgcgctggaacaagggaaccatcttaaaagcatccgtggactatatccgaaagttgcaacgagaacagcaacgcgcaaaagaacttgaaaaccgacagaagaaactggagcacgccaaccggcatttgttgctcagaatacaggaacttgaaatgcaggctcgagctcatggactttcccttattccatccacgggtctctgctctccagatttggtgaatcggatcatcaagcaagaacccgttcttgagaactgcagccaagacctccttcagcatcatgcagacctaacctgtacaacaactctcgatctcacggatggcaccatcaccttcaacaacaacctcggaactgggactgaggccaaccaagcctatagtgtccccacaaaaatgggatccaaactggaagacatcctgatggacgacaccctttctcccgtcggtgtcactgatccactcctttcctcagtgtcccccggagcttccaaaacaagcagccggaggagcagtatgagcatggaagagacggagcacacttgttagcgaatcctccctgcactgcattcgcacaaactgcttcctttcttgattcgtagatttaataacttacctgaaggggttttcttgataattttcctttaatatgaaattttttttcatgctttatcaatagcccaggatatattttatttttagaattttgtgaaacagacttgtatattctattttacaactacaaatgcctccaaagtattgtacaaataagtgtgcagtatctgtgaactgaattcaccacagactttagctttctgagcaagaggattttgcgtcagagaaatgtctgtccatttttattcaggggaaacttgatttgagatttttatgcctgtgacttccttggaaatcaaatgtaaagtttaattgaaagaatgtaaagcaaccccccaaaaa

SEQ ID NO: 1202 - protein, 419 aa, Homo sapien
MLEMLEYNHYQVQTHLENPTKYHIQQAQRQQVKQYLSTTLANKHANQVLSLPCPNQPGDHVMPPVPGSSAPNSPMAMLTLNSNCEKEGFYKFEEQNRAESECPGMNTHSRASCMQMDDVIDDIISLESSYNEEILGLMDPALQMANTLPVSGNLIDLYGNQGLPPPGLTISNSCPANLPNIKRELTACIFPTESEARALAKERQKKDNHNLIERRRRFNINDRIKELGTLIPKSNDPDMRWNKGTILKASVDYIRKLQREQQRAKELENRQKKLEHANRHLLLRIQELEMQARAHGLSLIPSTGLCSPDLVNRIIKQEPVLENCSQDLLQHHADLTCTTTLDLTDGTITFNNNLGTGTEANQAYSVPTKMGSKLEDILMDDTLSPVGVTDPLLSSVSPGASKTSSRRSSMSMEETEHTC

SEQ ID NO: 1203 - DNA, 5010 bp, Homo sapien
ggcggctcgggacggaggacgcgctagtgtgagtgcgggcttctagaactacaccgaccctcgtgtcctcccttcatcctgcggggctggctggagcggccgctccggtgctgtccagcagccatagggagccgcacggggagcgggaaagcggtcgcggccccaggcggggcggccgggatggagcggggccgcgagcctgtggggaaggggctgtggcggcgcctcgagcggctgcaggttcttctgtgtggcagttcagaatgatggatcaagctagatcagcattctctaacttgtttggtggagaaccattgtcatatacccggttcagcctggctcggcaagtagatggcgataacagtcatgtggagatgaaacttgctgtagatgaagaagaaaatgctgacaataacacaaaggccaatgtcacaaaaccaaaaaggtgtagtggaagtatctgctatgggactattgctgtgatcgtctttttcttgattggatttatgattggctacttgggctattgtaaaggggtagaaccaaaaactgagtgtgagagactggcaggaaccgagtctccagtgagggaggagccaggagaggacttccctgcagcacgtcgcttatattgggatgacctgaagagaaagttgtcggagaaactggacagcacagacttcaccagcaccatcaagctgctgaatgaaaattcatatgtccctcgtgaggctggatctcaaaaagatgaaaatcttgcgttgtatgttgaaaatcaatttcgtgaatttaaactcagcaaagtctggcgtgatcaacattttgttaagattcaggtcaaagacagcgctcaaaactcggtgatcatagttgataagaacggtagacttgtttacctggtggagaatcctgggggttatgtggcgtatagtaaggctgcaacagttactggtaaactggtccatgctaattttggtactaaaaaagattttgaggatttatacactcctgtgaatggatctatagtgattgtcagagcagggaaaatcacctttgcagaaaaggttgcaaatgctgaaagcttaaatgcaattggtgtgttgatatacatggaccagactaaatttcccattgttaacgcagaactttcattctttggacatgctcatctggggacaggtgacccttacacacctggattcccttccttcaatcacactcagtttccaccatctcggtcatcaggattgcctaatatacctgtccagacaatctccagagctgctgcagaaaagctgtttgggaatatggaaggagactgtccctctgactggaaaacagactctacatgtaggatggtaacctcagaaagcaagaatgtgaagctcactgtgagcaatgtgctgaaagagataaaaattcttaacatctttggagttattaaaggctttgtagaaccagatcactatgttgtagttggggcccagagagatgcatggggccctggagctgcaaaatccggtgtaggcacagctctcctattgaaacttgcccagatgttctcagatatggtcttaaaagatgggtttcagcccagcagaagcattatctttgccagttggagtgctggagactttggatcggttggtgccactgaatggctagagggatacctttcgtccctgcatttaaaggctttcacttatattaatctggataaagcggttcttggtaccagcaacttcaaggtttctgccagcccactgttgtatacgcttattgagaaaacaatgcaaaatgtgaagcatccggttactgggcaatttctatatcaggacagcaactgggccagcaaagttgagaaactcactttagacaatgctgctttccctttccttgcatattctggaatcccagcagtttctttctgtttttgcgaggacacagattatccttatttgggtaccaccatggacacctataaggaactgattgagaggattcctgagttgaacaaagtggcacgagcagctgcagaggtcgctggtcagttcgtgattaaactaacccatgatgttgaattgaacctggactatgagaggtacaacagccaactgctttcatttgtgagggatctgaaccaatacagagcagacataaaggaaatgggcctgagtttacagtggctgtattctgctcgtggagacttcttccgtgctacttccagactaacaacagatttcgggaatgctgagaaaacagacagatttgtcatgaagaaactcaatgatcgtgtcatgagagtggagtatcacttcctctctccctacgtatctccaaaagagtctcctttccgacatgtcttctggggctccggctctcacacgctgccagctttactggagaacttgaaactgcgtaaacaaaataacggtgcttttaatgaaacgctgttcagaaaccagttggctctagctacttggactattcagggagctgcaaatgccctctctggtgacgtttgggacattgacaatgagttttaaatgtgatacccatagcttccatgagaacagcagggtagtctggtttctagacttgtgctgatcgtgctaaattttcagtagggctacaaaacctgatgttaaaattccatcccatcatcttggtactactagatgtctttaggcagcagcttttaatacagggtagataacctgtacttcaagttaaagtgaataaccacttaaaaaatgtccatgatggaatattcccctatctctagaattttaagtgctttgtaatgggaactgcctctttcctgttgttgttaatgaaaatgtcagaaaccagttatgtgaatgatctctctgaatcctaagggctggtctctgctgaaggttgtaagtggttcgcttactttgagtgatcctccaacttcatttgatgctaaataggagataccaggttgaaagacctctccaaatgagatctaagcctttccataaggaatgtagcaggtttcctcattcctgaaagaaacagttaactttcagaagagatgggcttgttttcttgccaatgaggtctgaaatggaggtccttctgctggataaaatgaggttcaactgttgattgcaggaataaggccttaatatgttaacctcagtgtcatttatgaaaagaggggaccagaagccaaagacttagtatattttcttttcctctgtcccttcccccataagcctccatttagttctttgttatttttgtttcttccaaagcacattgaaagagaaccagtttcaggtgtttagttgcagactcagtttgtcagactttaaagaataatatgctgccaaattttggccaaagtgttaatcttaggggagagctttctgtccttttggcactgagatatttattgtttatttatcagtgacagagttcactataaatggtgtttttttaatagaatataattatcggaagcagtgccttccataattatgacagttatactgtcggttttttttaaataaaagcagcatctgctaataaaacccaacagatactggaagttttgcatttatggtcaacacttaagggttttagaaaacagccgtcagccaaatgtaattgaataaagttgaagctaagatttagagatgaattaaatttaattaggggttgctaagaagcgagcactgaccagataagaatgctggttttcctaaatgcagtgaattgtgaccaagttataaatcaatgtcacttaaaggctgtggtagtactcctgcaaaattttatagctcagtttatccaaggtgtaactctaattcccatttgcaaaatttccagtacctttgtcacaatcctaacacattatcgggagcagtgtcttccataatgtataaagaacaaggtagtttttacctaccacagtgtctgtatcggagacagtgatctccatatgttacactaagggtgtaagtaattatcgggaacagtgtttcccataattttcttcatgcaatgacatcttcaaagcttgaagatcgttagtatctaacatgtatcccaactcctataattccctatcttttagttttagttgcagaaacattttgtggtcattaagcattgggtgggtaaattcaaccactgtaaaatgaaattactacaaaatttgaaatttagcttgggtttttgttacctttatggtttctccaggtcctctacttaatgagatagcagcatacatttataatgtttgctattgacaagtcattttaatttatcacattatttgcatgttacctcctataaacttagtgcggacaagttttaatccagaattgaccttttgacttaaagcagagggactttgtatagaaggtttgggggctgtggggaaggagagtcccctgaaggtctgacacgtctgcctacccattcgtggtgatcaattaaatgtaggtatgaataagttcgaagctccgtgagtgaaccatcatataaacgtgtagtacagctgtttgtcatagggcagttggaaacggcctcctagggaaaagttcatagggtctcttcaggttcttagtgtcacttacctagatttacagcctcacttgaatgtgtcactactcacagtctctttaatcttcagttttatctttaatctcctcttttatcttggactgacatttagcgtagctaagtgaaaaggtcatagctgagattcctggttcgggtgttacgcacacgtacttaaatgaaagcatgtggcatgttcatcgtataacacaatatgaatacagggcatgcattttgcagcagtgagtctcttcagaaaacccttttctacagttagggttgagttacttcctatcaagccagtacgtgctaacaggctcaatattcctgaatgaaatatcagactagtgacaagctcctggtcttgagatgtcttctcgttaaggagtagggccttttggaggtaaaggtata

SEQ ID NO: 1204 - protein, 760 aa, Homo sapien
MMDQARSAFSNLFGGEPLSYTRFSLARQVDGDNSHVEMKLAVDEEENADNNTKANVTKPKRCSGSICYGTIAVIVFFLIGFMIGYLGYCKGVEPKTECERLAGTESPVREEPGEDFPAARRLYWDDLKRKLSEKLDSTDFTSTIKLLNENSYVPREAGSQKDENLALYVENQFREFKLSKVWRDQHFVKIQVKDSAQNSVIIVDKNGRLVYLVENPGGYVAYSKAATVTGKLVHANFGTKKDFEDLYTPVNGSIVIVRAGKITFAEKVANAESLNAIGVLIYMDQTKFPIVNAELSFFGHAHLGTGDPYTPGFPSFNHTQFPPSRSSGLPNIPVQTISRAAAEKLFGNMEGDCPSDWKTDSTCRMVTSESKNVKLTVSNVLKEIKILNIFGVIKGFVEPDHYVVVGAQRDAWGPGAAKSGVGTALLLKLAQMFSDMVLKDGFQPSRSIIFASWSAGDFGSVGATEWLEGYLSSLHLKAFTYINLDKAVLGTSNFKVSASPLLYTLIEKTMQNVKHPVTGQFLYQDSNWASKVEKLTLDNAAFPFLAYSGIPAVSFCFCEDTDYPYLGTTMDTYKELIERIPELNKVARAAAEVAGQFVIKLTHDVELNLDYERYNSQLLSFVRDLNQYRADIKEMGLSLQWLYSARGDFFRATSRLTTDFGNAEKTDRFVMKKLNDRVMRVEYHFLSPYVSPKESPFRHVFWGSGSHTLPALLENLKLRKQNNGAFNETLFRNQLALATWTIQGAANALSGDVWDIDNEF

SEQ ID NO: 1205 - DNA, 2068 bp, Homo sapien
ttgaactcctggagcccgtcacccaggaaaccggccgcaatcgccggccgacctgaagctggtttcatggcagcctcaaagaaggcagttttggggccattggtgggggcggtggaccagggcaccagttcgacgcgctttttggttttcaattcaaaaacagctgaactacttagtcatcatcaagtagaaataaaacaagagttcccaagagaaggatgggtggaacaggaccctaaggaaattctacattctgtctatgagtgtatagagaaaacatgtgagaaacttggacagctcaatattgatatttccaacataaaagctattggtgtcagcaaccagagggaaaccactgtagtctgggacaagataactggagagcctctctacaatgctgtggtgtggcttgatctaagaacccagtctaccgttgagagtcttagtaaaagaattccaggaaataataactttgtcaagtccaagacaggccttccacttagcacttacttcagtgcagtgaaacttcgttggctccttgacaatgtgagaaaagttcaaaaggccgttgaagaaaaacgagctctttttgggactattgattcatggcttatttggagtttgacaggaggagtcaatggaggtgtccactgtacagatgtaacaaatgcaagtaggactatgcttttcaacattcattctttggaatgggataaacaactctgcgaattttttggaattccaatggaaattcttccaaatgtccggagttcttctgagatctatggcctaatgaaagctggggccttggaaggtgtgccaatatctgggtgtttaggggaccagtctgctgcattggtgggacaaatgtgcttccagattggacaagccaaaaatacgtatggaacaggatgtttcttactatgtaatacaggccataagtgtgtattttctgatcatggccttctcaccacagtggcttacaaacttggcagagacaaaccagtatattatgctttggaaggttctgtagctatagctggtgctgttattcgctggctaagagacaatcttggaattataaagacctcagaagaaattgaaaaacttgctaaagaagtaggtacttcttatggctgctacttcgtcccagcattttcggggttatatgcaccttattgggagcccagcgcaagagggataatctgtggactcactcagttcaccaataaatgccatattgcttttgctgcattagaagctgtttgtttccaaactcgagagattttggatgccatgaatcgagactgtggaattccactcagtcatttgcaggtagatggaggaatgaccagcaacaaaattcttatgcagctacaagcagacattctgtatataccagtagtgaagccctcaatgcccgaaaccactgcactgggtgcggctatggcggcaggggctgcagaaggagtcggcgtatggagtctcgaacccgaggatttgtctgccgtcacgatggagcggtttgaacctcagattaatgcggaggaaagtgaaattcgttattctacatggaagaaagctgtgatgaagtcaatgggttgggttacaactcaatctccagaaagtggtattccataaaacctaccaactcatggattcccaagatgtgagctttttacataatgaaagaacccagcaattctgtctcttaatgcaatgacactattcatagactttgattttatttataagccacttgctgcatgaccctccaagtagacctgtggcttaaaataaagaaaatgcagcaaaaagaatgctatagaaatatttggtggtttttttttttttaaacatccacagttaaggttgggccagctacctttgggggtgaccccccccattgccataacatcctgctccattccctctaagatgtaggaagaattcggatccttaccattggaatcttccatcgaacatactcaaacacttttgggccaggatttgagtctctgcatgacatatacttgattaaaaggttattactaacctgttaaaaatc

SEQ ID NO: 1206 - protein, 524 aa, Homo sapien
MAASKKAVLGPLVGAVDQGTSSTRFLVFNSKTAELLSHHQVEIKQEFPREGWVEQDPKEILHSVYECIEKTCEKLGQLNIDISNIKAIGVSNQRETTVVWDKITGEPLYNAVVWLDLRTQSTVESLSKRIPGNNNFVKSKTGLPLSTYFSAVKLRWLLDNVRKVQKAVEEKRALFGTIDSWLIWSLTGGVNGGVHCTDVTNASRTMLFNIHSLEWDKQLCEFFGIPMEILPNVRSSSEIYGLMKAGALEGVPISGCLGDQSAALVGQMCFQIGQAKNTYGTGCFLLCNTGHKCVFSDHGLLTTVAYKLGRDKPVYYALEGSVAIAGAVIRWLRDNLGIIKTSEEIEKLAKEVGTSYGCYFVPAFSGLYAPYWEPSARGIICGLTQFTNKCHIAFAALEAVCFQTREILDAMNRDCGIPLSHLQVDGGMTSNKILMQLQADILYIPVVKPSMPETTALGAAMAAGAAEGVGVWSLEPEDLSAVTMERFEPQINAEESEIRYSTWKKAVMKSMGWVTTQSPESGIP

SEQ ID NO: 1207 - DNA, 2058 bp, Homo sapien
cacagccggccgacaccacaccagccggggagccgccgccgccgccgccacctctgagcagccggctgggagcgagagccgacagctagtctgcaagccaccgctgtcgccatggggagccgcgtctcgcgggaagacttcgagtgggtctacaccgaccagccgcacgccgaccggcgccgggagatcctggcaaagtatccagagataaagtccttgatgaaacctgatcccaatttgatatggattataattatgatggttctcacccagttgggtgcattttacatagtaaaagacttggactggaaatgggtcatatttggggcctatgcgtttggcagttgcattaaccactcaatgactctggctattcatgagattgcccacaatgctgcctttggcaactgcaaagcaatgtggaatcgctggtttggaatgtttgctaatcttcctattgggattccatattcaatttcctttaagaggtatcacatggatcatcatcggtaccttggagctgatggcgtcgatgtagatattcctaccgattttgagggctggttcttctgtaccgctttcagaaagtttatatgggttattcttcagcctctcttttatgcctttcgacctctgttcatcaaccccaaaccaattacgtatctggaagttatcaataccgtggcacaggtcacttttgacattttaatttattactttttgggaattaaatccttagtctacatgttggcagcatctttacttggcctgggtttgcacccaatttctggacattttatagctgagcattacatgttcttaaagggtcatgaaacttactcatattatgggcctctgaatttacttaccttcaatgtgggttatcataatgaacatcatgatttccccaacattcctggaaaaagtcttccactggtgaggaaaatagcagctgaatactatgacaacctccctcactacaattcctggataaaagtactgtatgattttgtgatggatgatacaataagtccctactcaagaatgaagaggcaccaaaaaggagagatggtgctggagtaaatatcattagtgccaaagggattcttctccaaaactttagatgataaaatggaatttttgcattattaaacttgagaccagtgatgctcagaagctcccctggcacaatttcagagtaagagctcggtgataccaagaagtgaatctggcttttaaacagtcagcctgactctgtactgctcagtttcactcacaggaaacttgtgacttgtgtattatcgtcattgaggatgtttcactcatgtctgtcattttataagcatatcatttaaaaagcttctaaaaagctatttcgccaggcacggtggctcatgcctataatcccagcactttgggaggccaaggtgggtggatcacctgaggtcaggagttcgagaccagcctggccaacacggtgaaaccccatctctactaaaaatgcaaaaattagccgggcgtggcggcacatgcctgtaatcccagctacatgggaggctgaggtgggagaattgcttgaacccaggaggcggaggcagaggctgcagtgacccaagattgtgccactgcactccaccctgggcaacagagcaagaccccatctcaaaaataaataaatatatataaaaaataaaaagctatttctagtttatttcactataaagttttgctttattaaaaagctaataaacagctattaatcacagtgtattagtatttgttacatttttgtatttcactatctttatactatataatatggtaacttgggtaccgggggaactttaaaatttcatctcaaaaataatttttaaaaagcctgaggtatgatatagcataaaagattgagatgaaaatatatttccctgtaagctgaattactcatttaaaaattttaacttctatatgggacccgaattagacactgctgaatcctgtacagccttactcataaataaagtacttactgaatttccaccattcaaaaaaaaaaaaaaa

SEQ ID NO: 1208 - protein, 323 aa, Homo sapien
MGSRVSREDFEWVYTDQPHADRRREILAKYPEIKSLMKPDPNLIWIIIMMVLTQLGAFYIVKDLDWKWVIFGAYAFGSCINHSMTLAIHEIAHNAAFGNCKAMWNRWFGMFANLPIGIPYSISFKRYHMDHHRYLGADGVDVDIPTDFEGWFFCTAFRKFIWVILQPLFYAFRPLFINPKPITYLEVINTVAQVTFDILIYYFLGIKSLVYMLAASLLGLGLHPISGHFIAEHYMFLKGHETYSYYGPLNLLTFNVGYHNEHHDFPNIPGKSLPLVRKIAAEYYDNLPHYNSWIKVLYDFVMDDTISPYSRMKRHQKGEMVLE

SEQ ID NO: 1209 - DNA, 1318 bp, Homo sapien
ctcctctaggccgccggccgcgaagcgctgagtcacggtgaggcgactggacccacactctcttaacctgccctccctgcactcgctcccggcggctcttcgcgtcacccccgccgctaaggctccaggtgccgctaccgcagcgtgagtacctggggctcctgcaggggtccactagccctccatcctctacagctcagcatcagaacactctctttttagactccgatatggggtcctccaagaaagttactctctcagtgctcagccgggagcagtcggaaggggttggagcgagggtccggagaagcattggcagacccgagttaaaaaatctggatccgtttttactgtttgatgaatttaaaggaggtagaccaggaggatttcctgatcatccacatcgaggttttgaaacagtatcctacctcctggaagggggcagcatggcccatgaagacttctgtggacacactggtaaaatgaacccaggagatttgcagtggatgactgcgggccggggcattctgcacgctgagatgccttgctcagaggagccagcccatggcctacaactgtgggttaatttgaggagctcagagaagatggtggagcctcagtaccaggaactgaaaagtgaagaaatccctaaacccagtaaggatggtgtgacagttgctgtcatttctggagaagccctgggaataaagtccaaggtttacactcgcacaccaaccttatatttggacttcaaattggacccaggagccaaacattcccaacctatccctaaagggtggacaagcttcatttacacgatatctggagatgtgtatattgggcccgatgatgcacaacaaaaaatagaacctcatcacacagcagtgcttggagaaggtgacagtgtccaggtggagaacaaggatcccaagagaagccactttgtcttaattgctggggagccattaagagaaccagttatccaacatggtccatttgtgatgaacaccaatgaagagatttctcaagctattcttgatttcagaaacgcaaaaaatgggtttgaaagggccaaaacctggaaatcaaagattgggaactagtggaaagcggaagagcaggtcttgatgtgtcctagaattttgccatttctgagattgagccattgaaggcattccatttctaaagcttatttagccggtgcttctaaagaattccacactaacgtgataacatggtttttgtaacaataaatgtaggatatttcctggcacatgcaaataaacctaatcattgtttctttaaaaaaaaaaaaaaa

SEQ ID NO: 1210 - protein, 290 aa, Homo sapien
MGSSKKVTLSVLSREQSEGVGARVRRSIGRPELKNLDPFLLFDEFKGGRPGGFPDHPHRGFETVSYLLEGGSMAHEDFCGHTGKMNPGDLQWMTAGRGILHAEMPCSEEPAHGLQLWVNLRSSEKMVEPQYQELKSEEIPKPSKDGVTVAVISGEALGIKSKVYTRTPTLYLDFKLDPGAKHSQPIPKGWTSFIYTISGDVYIGPDDAQQKIEPHHTAVLGEGDSVQVENKDPKRSHFVLIAGEPLREPVIQHGPFVMNTNEEISQAILDFRNAKNGFERAKTWKSKIGN

SEQ ID NO: 1211 - DNA, 826 bp, Homo sapien
aattccggaattccccggcctggccagggcggagcggcgcccagtagggacccattcattgtgccggcgcctcactgggcacggggcccaagctgacggcgtgcacgggagcctgcggagcctgggtgggaagaacaggcccctggagggcacttgaccttaagcctcttttcctccgcagagaggaagcgggagaggagcccacgtcgcctgtcacccaatatctccagccgcgcagtcccgaagagtgtaagatgttcgcctgcgccaagctcgcctgcaccccctctctgatccgagctggatccagagttgcatacagaccaatttctgcatcagtgttatctcgaccagaggctagtaggactggagagggctctacggtatttaatggggcccagaatggtgtgtctcagctaatccaaagggagtttcagaccagtgcaatcagcagagacattgatactgctgccaaatttattggtgcaggtgctgcaacagtaggagtggctggttctggtgctggtattggaacagtctttggcagccttatcattggttatgccagaaacccttcgctgaagcagcagctgttctcatatgctatcctgggatttgccttgtctgaagctatgggtctcttttgtttgatggttgctttcttgattttgtttgccatgtaacaaattactgcttgacatgttggcattcatattaattacggatgtaattctgtgtatcttactgtgactccgaaaactgtagtattggtgtcatgggaatgtacgttatttccaaagtcatttcattaaagatgaaaacttta

SEQ ID NO: 1212 - protein, 142 aa, Homo sapien
MFACAKLACTPSLIRAGSRVAYRPISASVLSRPEASRTGEGSTVFNGAQNGVSQLIQREFQTSAISRDIDTAAKFIGAGAATVGVAGSGAGIGTVFGSLIIGYARNPSLKQQLFSYAILGFALSEAMGLFCLMVAFLILFAM

SEQ ID NO: 1213 - DNA, 3144 bp, Homo sapien
atggtcagaaagcctgttgtgtccaccatctccaaaggaggttacctgcagggaaatgttaacgggaggctgccttccctgggcaacaaggagccacctgggcaggagaaagtgcagctgaagaggaaagtcactttactgaggggagtctccattatcattggcaccatcattggagcaggaatcttcatctctcctaagggcgtgctccagaacacgggcagcgtgggcatgtctctgaccatctggacggtgtgtggggtcctgtcactatttggagctttgtcttatgctgaattgggaacaactataaagaaatctggaggtcattacacatatattttggaagtctttggtccattaccagcttttgtacgagtctgggtggaactcctcataatacgccctgcagctactgctgtgatatccctggcatttggacgctacattctggaaccattttttattcaatgtgaaatccctgaacttgcgatcaagctcattacagctgtgggcataactgtagtgatggtcctaaatagcatgagtgtcagctggagcgcccggatccagattttcttaaccttttgcaagctcacagcaattctgataattatagtccctggagttatgcagctaattaaaggtcaaacgcagaactttaaagacgcgttttcaggaagagattcaagtattacgcggttgccactggctttttattatggaatgtatgcatatgctggctggttttacctcaactttgttactgaagaagtagaaaaccctgaaaaaaccattccccttgcaatatgtatatccatggccattgtcaccattggctatgtgctgacaaatgtggcctactttacgaccattaatgctgaggagctgctgctttcaaatgcagtggcagtgaccttttctgagcggctactgggaaatttctcattagcagttccgatctttgttgccctctcctgctttggctccatgaacggtggtgtgtttgctgtctccaggttattctatgttgcgtctcgagagggtcaccttccagaaatcctctccatgattcatgtccgcaagcacactcctctaccagctgttattgttttgcaccctttgacaatgataatgctcttctctggagacctcgacagtcttttgaatttcctcagttttgccaggtggctttttattgggctggcagttgctgggctgatttatcttcgatacaaatgcccagatatgcatcgtcctttcaaggtgccactgttcatcccagctttgttttccttcacatgcctcttcatggttgccctttccctctattcggacccatttagtacagggattggcttcgtcatcactctgactggagtccctgcgtattatctctttattatatgggacaagaaacccaggtggtttagaataatgtcagagaaaataaccagaacattacaaataatactggaagttgtaccagaagaagataagttatgaactaatggacttgagatcttggcaatctgcccaaggggagacacaaaatagggatttttacttcattttctgaaagtctagagaattacaactttggtgataaacaaaaggagtcagttatttttattcatatattttagcatattcgaactaatttctaagaaatttagttataactctatgtagttatagaaagtgaatatgcagttattctatgagtcgcacaattcttgagtctctgatacctacctattggggttaggagaaaagactagacaattactatgtggtcattctctacaacatatgttagcacggcaaagaaccttcaaattgaagactgagatttttctgtatatatgggttttgtaaagatggttttacacactacagatgtctatactgtgaaaagtgttttcaattctgaaaaaaagcatacatcatgattatggcaaagaggagagaaagaaatttattttacattgacattgcattgcttccccttagataccaatttagataacaaacactcatgctttaatggattatacccagagcactttgaacaaaggtcagtggggattgttgaatacattaaagaagagtttctaggggctactgtttatgagacacatccaggagttatgtttaagtaaaaatccttgagaatttattatgtcagatgttttttcattcattatcaggaagttttagttatctgtcatttttttttttcacatcagtttgatcaggaaagtgtataacacatcttagagcaagagttagtttggtattaaatcctcattagaacaaccacctgtttcactaataacttacccctgatgagtctatctaaacatatgcattttaagccttcaaattacattatcaacatgagagaaataaccaacaaagaagatgttcaaaataatagtcccatatctgtaatcatatctacatgcaatgttagtaattctgaagttttttaaatttatggctatttttacacgatgatgaattttgacagtttgtgcattttctttatacattttatattcttctgttaaaatatctcttcagatgaaactgtccagattaattaggaaaaggcatatattaacataaaaattgcaaaagaaatgtcgctgtaaataagatttacaactgatgtttctagaaaatttccacttctatatctaggctttgtcagtaatttccacaccttaattatcattcaacttgcaaaagagacaactgataagaagaaaattgaaatgagaatctgtggataagtgtttgtgttcagaagatgttgttttgccagtattagaaaatactgtgagccgggcatggtggcttacatctgtaatcccagcactttgggaggctgagggggtggatcacctgaggtcgggagttctagaccagcctgaccaacatggagaaaccccatctctactaaaaatacaaaattagctgggcatggtggcacatgctggtaatctcagctattgaggaggctgaggcaggagaattgcttgaacccgggaggcggaggttgcagtgagccaagattgcaccactgtactccagcctgggtgacaaagtcagactccatctccaaaaaaaaaaaaaaaa

SEQ ID NO: 1214 - protein, 501 aa, Homo sapien
MVRKPVVSTISKGGYLQGNVNGRLPSLGNKEPPGQEKVQLKRKVTLLRGVSIIIGTIIGAGIFISPKGVLQNTGSVGMSLTIWTVCGVLSLFGALSYAELGTTIKKSGGHYTYILEVFGPLPAFVRVWVELLIIRPAATAVISLAFGRYILEPFFIQCEIPELAIKLITAVGITVVMVLNSMSVSWSARIQIFLTFCKLTAILIIIVPGVMQLIKGQTQNFKDAFSGRDSSITRLPLAFYYGMYAYAGWFYLNFVTEEVENPEKTIPLAICISMAIVTIGYVLTNVAYFTTINAEELLLSNAVAVTFSERLLGNFSLAVPIFVALSCFGSMNGGVFAVSRLFYVASREGHLPEILSMIHVRKHTPLPAVIVLHPLTMIMLFSGDLDSLLNFLSFARWLFIGLAVAGLIYLRYKCPDMHRPFKVPLFIPALFSFTCLFMVALSLYSDPFSTGIGFVITLTGVPAYYLFIIWDKKPRWFRIMSEKITRTLQIILEVVPEEDKL

SEQ ID NO: 1215 - DNA, 3001 bp, Homo sapien
actttcctgccccttccccggccaagcccaactccggatctcgctctccaccggatctcacccgccacacccggacaggcggctggaggaggcgggcgtctaaaattctgggaagcagaacctggccggagccactagacagagccgggcctagcccagagacatggagagttgctacaacccaggtctggatggtattattgaatatgatgatttcaaattgaactcctccattgtggaacccaaggagccagccccagaaacagctgatggcccctacctggtgatcgtggaacagcctaagcagagaggcttccgatttcgatatggctgtgaaggcccctcccatggaggactgcccggtgcctccagtgagaagggccgaaagacctatcccactgtcaagatctgtaactacgagggaccagccaagatcgaggtggacctggtaacacacagtgacccacctcgtgctcatgcccacagtctggtgggcaagcaatgctcggagctggggatctgcgccgtttctgtggggcccaaggacatgactgcccaatttaacaacctgggtgtcctgcatgtgactaagaagaacatgatggggactatgatacaaaaacttcagaggcagcggctccgctctaggccccagggccttacggaggccgagcagcgggagctggagcaagaggccaaagaactgaagaaggtgatggatctgagtatagtgcggctgcgcttctctgccttccttagagccagtgatggctccttctccctgcccctgaagccagtcacctcccagcccatccatgatagcaaatctccgggggcatcaaacctgaagatttctcgaatggacaagacagcaggctctgtgcggggtggagatgaagtttatctgctttgtgacaaggtgcagaaagatgacattgaggttcggttctatgaggatgatgagaatggatggcaggcctttggggacttctctcccacagatgtgcataaacagtatgccattgtgttccggacacccccctatcacaagatgaagattgagcggcctgtaacagtgtttctgcaactgaaacgcaagcgaggaggggacgtgtctgattccaaacagttcacctattaccctctggtggaagacaaggaagaggtgcagcggaagcggaggaaggccttgcccaccttctcccagcccttcgggggtggctcccacatgggtggaggctctgggggtgcagccgggggctacggaggagctggaggaggtggcagcctcggtttcttcccctcctccctggcctacagcccctaccagtccggcgcgggccccatgcggtgctacccgggaggcgggggcggggcgcagatggccgccacggtgcccagcagggactccggggaggaagccgcggagccgagcgccccctccaggaccccccagtgcgagccgcaggccccggagatgctgcagcgagctcgagagtacaacgcgcgcctgttcggcctggcgcacgcagccccgagccctactcgactactgcgtcaccgcggacgccgcgcgctgctggcgggacagcgccacctgctgacggcgcaggacgagaacggagacacaccactgcacctagccatcatccacgggcagaccagtgtcattgagcagatagtctatgtcatccaccacgcccaggacctcggcgttgtcaacctcaccaaccacctgcaccagacgcccctgcacctggcggtgatcacggggcagacgagtgtggtgagctttctgctgcgggtaggtgcagacccagctctgctggatcggcatggagactcagccatgcatctggcgctgcgggcaggcgctggtgctcctgagctgctgcgtgcactgcttcagagtggagctcctgctgtgccccagctgttgcatatgcctgactttgagggactgtatccagtacacctggcggtccgagcccgaagccctgagtgcctggatctgctggtggacagtggggctgaagtggaggccacagagcggcaggggggacgaacagccttgcatctagccacagagatggaggagctggggttggtcacccatctggtcaccaagctccgggccaacgtgaacgctcgcacctttgcgggaaacacacccctgcacctggcagctggactggggtacccgaccctcacccgcctccttctgaaggctggtgctgacatccatgctgaaaacgaggagcccctgtgcccactgccttcaccccctacctctgatagcgactcggactctgaagggcctgagaaggacacccgaagcagcttccggggccacacgcctcttgacctcacttgcagcaccttggtgaagaccttgctgctaaatgctgctcagaacaccatggagccacccctgaccccgcccagcccagcagggccgggactgtcacttggtgatacagctctgcagaacctggagcagctgctagacgggccagaagcccagggcagctgggcagagctggcagagcgtctggggctgcgcagcctggtagacacgtaccgacagacaacctcacccagtggcagcctcctgcgcagctacgagctggctggcggggacctggcaggtctactggaggccctgtctgacatgggcctagaggagggagtgaggctgctgaggggtccagaaacccgagacaagctgcccagcacagaggtgaaggaagacagtgcgtacgggagccagtcagtggagcaggaggcagagaagctgggcccaccccctgagccaccaggagggctctcgcacgggcacccccagcctcaggtgactgacctgctgcctgcccccagcccccttcccggaccccctgtacagcgtccccacctatttcaaatcttatttaacaccccacacccacccctcagttgggacaaataaaggattctcatgggaaggggaggaccccgaattcct

SEQ ID NO: 1216 - protein, 933 aa, Homo sapien
MESCYNPGLDGIIEYDDFKLNSSIVEPKEPAPETADGPYLVIVEQPKQRGFRFRYGCEGPSHGGLPGASSEKGRKTYPTVKICNYEGPAKIEVDLVTHSDPPRAHAHSLVGKQCSELGICAVSVGPKDMTAQFNNLGVLHVTKKNMMGTMIQKLQRQRLRSRPQGLTEAEQRELEQEAKELKKVMDLSIVRLRFSAFLRASDGSFSLPLKPVTSQPIHDSKSPGASNLKISRMDKTAGSVRGGDEVYLLCDKVQKDDIEVRFYEDDENGWQAFGDFSPTDVHKQYAIVFRTPPYHKMKIERPVTVFLQLKRKRGGDVSDSKQFTYYPLVEDKEEVQRKRRKALPTFSQPFGGGSHMGGGSGGAAGGYGGAGGGGSLGFFPSSLAYSPYQSGAGPMRCYPGGGGGAQMAATVPSRDSGEEAAEPSAPSRTPQCEPQAPEMLQRAREYNARLFGLAHAAPSPTRLLRHRGRRALLAGQRHLLTAQDENGDTPLHLAIIHGQTSVIEQIVYVIHHAQDLGVVNLTNHLHQTPLHLAVITGQTSVVSFLLRVGADPALLDRHGDSAMHLALRAGAGAPELLRALLQSGAPAVPQLLHMPDFEGLYPVHLAVRARSPECLDLLVDSGAEVEATERQGGRTALHLATEMEELGLVTHLVTKLRANVNARTFAGNTPLHLAAGLGYPTLTRLLLKAGADIHAENEEPLCPLPSPPTSDSDSDSEGPEKDTRSSFRGHTPLDLTCSTLVKTLLLNAAQNTMEPPLTPPSPAGPGLSLGDTALQNLEQLLDGPEAQGSWAELAERLGLRSLVDTYRQTTSPSGSLLRSYELAGGDLAGLLEALSDMGLEEGVRLLRGPETRDKLPSTEVKEDSAYGSQSVEQEAEKLGPPPEPPGGLSHGHPQPQVTDLLPAPSPLPGPPVQRPHLFQILFNTPHPPLSWDK

SEQ ID NO: 1217 - DNA, 2366 bp, Homo sapien
gaccacgcgtatcgatgtcgacccacaggattgtcacagagggcagggtggtgactgaggaccagctcctcatgcttgaggctgtggtgatgcacctcgggatccgctctgcccgctgtgtcctgggcatggagggtcagcaggtcatcctgcacctgcccctatcccagaaggggcccttctggacatgggagcctagtgcccctcgaactctgctccaggtcctacaggatccagccctgaaagacctcgtcctcacctgccccaccctgccctggcattccctgatcctgcggccccagtatgagatccaagccatcatgcacatgcgcaggaccattgtcaagatcccttctaccctggaggtcgacgtggaggacgtcaccgcctcctcccggcacgtccactttatcaaaccgctgctgctgagcgaggtcctggcctgggaaggccctttccccctgtccatggagatcctggaggttcctgagggccgccccatcttcctcagcccgtgggtgggctccttgcaaaaaggccagaggctttgcgtctatggcctagcctcaccaccctggcgggtcctggcctcaagcaagggccgcaaggtgcccaggcacttcctggtgtcagggggctaccaaggcaagctgcggcggcggccaagggagttccccacggcctatgacctcctaggtgctttccagccaggccggccactccgggtggtggccacaaaggactgtgagggcgagagggaggagaatcccgagttcacgtccctggctgtgggtgaccggctggaggtgctggggcctggccaggcccatggggcccagggcagtgacgtggatgtcttggtttgtcagcggctgagtgaccaggctggggaagatgaggaggaagagtgcaaagaggaggcagagacccagagcgggtcctgctgcccttccacttccctggcagtttcgtggaggagatgagtgacagccggcgctacagcctggcagatctgactgcccagttttcaatgccttgtgaggtcaaggtggtggccaaggacaccagccaccccaatgaccctcagaacctccttcctgggcctgcggctggaggagaagatcacagagccattcttggtggtgagcctggactctgagctgggatgtgctttgagatccctccccggaggctggacctgactgtcgtggaggccaaggggcagccagacttgccagaggggtctctccccatagccacagtggaggaagctggaacagacaccttttattattgtcttcggaagttaccagcctgtgagatccaagcccccccacccaggccccctaaaaatcagggcctcagcaagcagaggagacacagcagtgagggaggcgtcaagtcttctcaagtcttaggattgcagcaacacgttcggctgcccaaacccaaggcgaagaccttgccagagttcatcaaggatggctccagtacgtacagcaagattcctgcccacaggaagggccacaggcccgctaagccccaaaggcaggatctagatgatgatgaacatgattatgaagaaatacttgagcaatttcagaaaaccatctaagtgctggaggaaccacgcttcctaactgctgcttctcagggaatccgacaccagccaaccattttaagcctctaaaagacctcgggcaagtctcacagaaactgagctgcagacggggagtagctttgtggaaactgatttgatggacactgcaccagcttccttcaggttctagattcttgctacttagggcgggctggtttggacctaacatctcgcacgtgactccctcagcctcagagccttgggatgcagagcagctggcagggttcctctcaatcctgcaaccccagctgtcccaccggtggatgcagaggggaatccgaggccatcaaccttggtgacagcagcgcagtgccaatgctgatcacactgcatgggagattttgttaacgtctgccacccccactctcacccccaagctctaagcccccgggaggcctggactgtcttcctcatctctgtagcaccaagcctgatagatctgtatatggtaaacaggggtttaaccacatgtggttaacatggattaatgtgggaatttggcttcaagaacacaaccttaggaccttgggccccaaaagctggtggtgaaatgagaggagccaatttaagaagacccttatggagacctgaggctgcagaaactggtaggtttcatcaggtggttaaagtcgtcaaagttgtaagtgactaaccaagattatttcattttaaaaccacagaataaaaatgacacctgagcttctcc

SEQ ID NO: 1218 - protein, 284 aa, Homo sapien
MEGQQVILHLPLSQKGPFWTWEPSAPRTLLQVLQDPALKDLVLTCPTLPWHSLILRPQYEIQAIMHMRRTIVKIPSTLEVDVEDVTASSRHVHFIKPLLLSEVLAWEGPFPLSMEILEVPEGRPIFLSPWVGSLQKGQRLCVYGLASPPWRVLASSKGRKVPRHFLVSGGYQGKLRRRPREFPTAYDLLGAFQPGRPLRVVATKDCEGEREENPEFTSLAVGDRLEVLGPGQAHGAQGSDVDVLVCQRLSDQAGEDEEEECKEEAETQSGSCCPSTSLAVSWRR

SEQ ID NO: 1219 - DNA, 1121 bp, Homo sapien
ctagctctgtgggaaggttttgggctctctggctcggattttgcaatttctccctggggactgccgtggagccgcatccactgtggattataattgcaacatgacgctggaagagctcgtggcgtgcgacaacgcggcgcagaagatgcagacggtgaccgccgcggtggaggagcttttggtggccgctcagcgccaggatcgcctcacagtgggggtgtacgagtcggccaagttgatgaatgtggacccagacagcgtggtcctctgcctcttggccattgacgaggaggaggaggatgacatcgccctgcaaatccacttcacgctcatccagtccttctgctgtgacaacgacatcaacatcgtgcgggtgtcgggcaatgcgcgcctggcgcagctcctgggagagccggccgagacccagggcaccaccgaggcccgagacctccactgtcttcccttcctacagaaccctcacacggacgcctggaagagccacggcttggtggaggtggccagctactgcgaagaaagccggggcaacaaccagtgggtcccctacatctctcttcaggaacgctgaggcccttcccagcagcagaatctgttgagttgctgccaacaaacaaaaaatacaataaatatttgaaccccctcccccccagcacaacccccccaaaacaacccaacccacgaggaccatcgggggcaggtcgttggagactgaagagaaagagagagaggagaagggagtgaggggccgctgccgccttccccatcacggagggtccagactgtccactcgggggtggagtgagactgactgcaagccccaccctccttgagactggagctgagcgtctgcatacgagagacttggttgaaacttggttggtccttgtctgcaccctcgacaagaccacactttgggacttgggagctggggctgaagttgctctgtacccatgaactcccagtttgcgaattaataagagacaatctattttgttacttgcacttgttattcgaaccactgagagcgagatgggaagcatagatatctatatttttatttctactatgagggccttgtaataaatttctaaagcctcaaaaaa

SEQ ID NO: 1220 - protein, 161 aa, Homo sapien
MTLEELVACDNAAQKMQTVTAAVEELLVAAQRQDRLTVGVYESAKLMNVDPDSVVLCLLAIDEEEEDDIALQIHFTLIQSFCCDNDINIVRVSGNARLAQLLGEPAETQGTTEARDLHCLPFLQNPHTDAWKSHGLVEVASYCEESRGNNQWVPYISLQER

SEQ ID NO: 1221 - DNA, 3054 bp, Homo sapien
agcatttcaggccccggacaggaggcagtgccgcttcggccgaaggccgagccgcccgagggctctgggatggtgtgggaccggcaaaccaagatggagtatgagtggaaacctgacgagcaagggcttcagcaaatcctgcagctgttgaaggagtcccagtccccagacaccaccatccagagaaccgtgcaacaaaaactggaacaacttaatcagtatccagactttaacaactacttgatttttgttcttacaaaattaaaatctgaagatgaacccacaagatcattgagtggtcttatcttgaagaataatgtgaaagcacactttcagaacttcccaaatggtgtaacagactttattaaaagtgaatgtttaaataatattggtgactcctctcctctgattagagccactgttggtattttgatcacaactatagcctccaagggagaattgcagaattggcctgacctcttaccaaaactctgtagcctgttggattctgaagattataatacctgtgagggagcatttggtgcccttcagaagatttgtgaagattctgctgagattttagacagtgatgttttagatcgtcctctcaacatcatgattcccaaatttttacagttcttcaagcatagtagtccaaaaataaggtctcacgctgttgcatgtgtcaatcagtttatcatcagtaggactcaagctctaatgttgcacattgattcttttactgagaatctctttgcattagctggtgatgaagaaccagaggtacggaaaaatgtgtgccgagcacttgtgatgttgctcgaagttcgaatggatcgcctgcttcctcacatgcataatatagttgagtacatgctacagaggactcaagatcaagatgaaaatgtggctttagaagcctgtgaattttggctaactttagctgaacagccaatatgcaaagatgtactcgtaaggcatcttcctaagttgattcctgtgttagtgaatggcatgaagtactcagacatagatattatcctacttaagggtgatgttgaagaagacgaaacgattcctgatagtgaacaggatatacggccacgttttcaccgatcgaggacggtggctcagcagcatgatgaagatggaattgaagaggaagacgatgatgatgatgaaattgatgatgatgatacaatttcagactggaatctaagaaaatgttctgctgctgccctggatgttcttgcaaatgtgtatcgtgatgaactgctgccacatattttgccccttttgaaagaattactttttcatcatgaatgggttgttaaagaatcaggcattttggttttaggagcaattgctgaaggttgcatgcagggcatgattccatacttgcctgagcttattcctcaccttattcagtgcctctctgataaaaaggctcttgtgcgttccataacatgctggactcttagccgctatgcacactgggtggtcagccagccgccagacacgtacctgaagccattaatgacagaattgctaaagcgcatcctggacagcaacaagagagtacaagaagctgcctgcagtgcctttgctaccctagaagaggaggcttgtacagaacttgttccttaccttgcttatatacttgataccctggtctttgcatttagtaaataccagcataagaacctgctcattctttacgatgccataggaacattagcagattcagtaggacatcatttaaacaaaccagaatatattcagatgctaatgcctccactgatccagaaatggaacatgttaaaggatgaagataaagatctcttccctttacttgagtgcctatcttcagttgccacagcactgcagtctggattccttccgtactgtgaacctgtgtatcagcgttgtgtaaacctagtacagaagactcttgcacaagccatgctaaacaatgctcaaccagatcaatatgaagctccagataaagattttatgatagtggctcttgatttactgagtggcctggctgaaggacttggaggcaacattgaacagctggtagcccgaagtaacatcctgacactaatgtatcagtgcatgcaggataaaatgccagaagttcgacagagttcttttgccctgttaggtgacctcacaaaagcttgctttcagcatgttaagccttgtatagctgatttcatgccaatattgggaaccaacctaaatccagaattcatttcagtctgcaacaatgccacatgggcaattggagaaatctccattcaaatgggtatagagatgcagccttatattcctatggtgttgcaccagcttgtagaaatcattaacagacccaacacaccaaagacgttgttagagaatacagcaataacaattggtcgtcttggttacgtttgtcctcaagaggtggcccccatgctacagcagtttataagaccctggtgcacctctctgagaaacataagagacaatgaggaaaaggattcagcattccgtggaatttgtaccatgatcagtgtgaatcccagtggcgtaatccaagattttatatttttttgtgatgccgttgcatcatggattaacccaaaagatgatctcagagacatgttctgtaagatccttcatggatttaaaaatcaagttggcgatgaaaattggaggcgtttctctgaccagtttcctcttcccttaaaagagcgtcttgcagctttttatggtgtttaatctaatacacttaagctgcagtcccaaaattaggggtccttcagtcttggagactataagggagcctctgcacccagggaaaatgttaccctttacaggggggaagggtaaaccagtagggaatacagtacaatcccaaccctactgggaggggcgggagggaggtgttgccgtcactgtattaagtcgatgttgggaaacgttttaacatctggagcctttgtgggtggaaatatgtctccagttacaactccgcagtggatgtgaagaagcaaaaaaaaaaaaaaa

SEQ ID NO: 1222 - protein, 890 aa, Homo sapien
MEYEWKPDEQGLQQILQLLKESQSPDTTIQRTVQQKLEQLNQYPDFNNYLIFVLTKLKSEDEPTRSLSGLILKNNVKAHFQNFPNGVTDFIKSECLNNIGDSSPLIRATVGILITTIASKGELQNWPDLLPKLCSLLDSEDYNTCEGAFGALQKICEDSAEILDSDVLDRPLNIMIPKFLQFFKHSSPKIRSHAVACVNQFIISRTQALMLHIDSFTENLFALAGDEEPEVRKNVCRALVMLLEVRMDRLLPHMHNIVEYMLQRTQDQDENVALEACEFWLTLAEQPICKDVLVRHLPKLIPVLVNGMKYSDIDIILLKGDVEEDETIPDSEQDIRPRFHRSRTVAQQHDEDGIEEEDDDDDEIDDDDTISDWNLRKCSAAALDVLANVYRDELLPHILPLLKELLFHHEWVVKESGILVLGAIAEGCMQGMIPYLPELIPHLIQCLSDKKALVRSITCWTLSRYAHWVVSQPPDTYLKPLMTELLKRILDSNKRVQEAACSAFATLEEEACTELVPYLAYILDTLVFAFSKYQHKNLLILYDAIGTLADSVGHHLNKPEYIQMLMPPLIQKWNMLKDEDKDLFPLLECLSSVATALQSGFLPYCEPVYQRCVNLVQKTLAQAMLNNAQPDQYEAPDKDFMIVALDLLSGLAEGLGGNIEQLVARSNILTLMYQCMQDKMPEVRQSSFALLGDLTKACFQHVKPCIADFMPILGTNLNPEFISVCNNATWAIGEISIQMGIEMQPYIPMVLHQLVEIINRPNTPKTLLENTAITIGRLGYVCPQEVAPMLQQFIRPWCTSLRNIRDNEEKDSAFRGICTMISVNPSGVIQDFIFFCDAVASWINPKDDLRDMFCKILHGFKNQVGDENWRRFSDQFPLPLKERLAAFYGV

SEQ ID NO: 1223 - DNA, 2221 bp, Homo sapien
gctcactgccacacgcagctcagcctgggcggcacagccagatgcgagatgcgtctctgctgatctgagtctgcctgcagcatggacctgggtcttccctgaagcatctccagggctggagggacgactgccatgcaccgagggctcatccatccgcagagcagggcagtgggaggagacgccatgacccccatcgtcacagtcctgatctgtctcgggctgagtctgggccccaggacccacgtgcagacagggaccatccccaagcccaccctgtgggctgagccagactctgtgatcacccaggggagtcccgtcaccctcagttgtcaggggagccttgaagcccaggagtaccgtctatatagggagaaaaaatcagcatcttggattacacggatacgaccagagcttgtgaagaacggccagttccacatcccatccatcacctgggaacacacagggcgatatggctgtcagtattacagccgcgctcggtggtctgagctcagtgaccccctggtgctggtgatgacaggagcctacccaaaacccaccctctcagcccagcccagccctgtggtgacctcaggaggaagggtgaccctccagtgtgagtcacaggtggcatttggcggcttcattctgtgtaaggaaggagaagatgaacacccacaatgcctgaactcccagccccatgcccgtgggtcgtcccgcgccatcttctccgtgggccccgtgagcccgaatcgcaggtggtcgcacaggtgctatggttatgacttgaactctccctatgtgtggtcttcacccagtgatctcctggagctcctggtcccaggtgtttctaagaagccatcactctcagtgcagccgggtcctgtcgtggcccctggggaaagcctgaccctccagtgtgtctctgatgtcggctatgacagatttgttctgtacaaggagggggaacgtgaccttcgccagctccctggccggcagccccaggctgggctctcccaggccaacttcaccctgggccctgtgagccgctcctacgggggccagtacagatgctacggtgcatacaacctctcctccgagtggtcggcccccagcgaccccctggacatcctgatcacaggacagatccatggcacacccttcatctcagtgcagccaggccccacagtggcctcaggagagaacgtgaccctgctgtgtcagtcatggcggcagttccacactttccttctgaccaaggcgggagcagctgatgccccactccgtctaagatcaatacacgaatatcctaagtaccaggctgaattccccatgagtcctgtgacctcagcccacgcggggacctacaggtgctacggctcactcaactccgacccctacctgctgtctcaccccagtgagcccctggagctcgtggtctcaggaccctccatgggttccagccccccacccaccggtcccatctccacacctgcaggccctgaggaccagcccctcacccccactgggtcggatccccaaagtggtctgggaaggcacctgggggttgtgatcggcatcttggtggccgtcgtcctactgctcctcctcctcctcctcctcttcctcatcctccgacatcgacgtcagggcaaacactggacatcgacccagagaaaggctgatttccaacatcctgcaggggctgtggggccagagcccacagacagaggcctgcagtggaggtccagcccagctgccgacgcccaggaagaaaacctctatgctgccgtgaaggacacacagcctgaagatggggtggagatggacactcgggctgctgcatctgaagccccccaggatgtgacctacgcccagctgcacagcttgaccctcagacggaaggcaactgagcctcctccatcccaggaaagggaacctccagctgagcccagcatctacgccaccctggccatccactagcccggagggtacgcagactccacactcagtagaaggagactcaggactgctgaaggcacgggagctgcccccagtggacaccaatgaaccccagtcagcctggacccctaacaaagaccatgaggagatgctgggaactttgggactcacttgattctgcagtcgaaataactaatatccctacattttttaattaaagcaacagacttctcaataaaagcaggtcgtctcgttccaatct

SEQ ID NO: 1224 - protein, 598 aa, Homo sapien
MTPIVTVLICLGLSLGPRTHVQTGTIPKPTLWAEPDSVITQGSPVTLSCQGSLEAQEYRLYREKKSASWITRIRPELVKNGQFHIPSITWEHTGRYGCQYYSRARWSELSDPLVLVMTGAYPKPTLSAQPSPVVTSGGRVTLQCESQVAFGGFILCKEGEDEHPQCLNSQPHARGSSRAIFSVGPVSPNRRWSHRCYGYDLNSPYVWSSPSDLLELLVPGVSKKPSLSVQPGPVVAPGESLTLQCVSDVGYDRFVLYKEGERDLRQLPGRQPQAGLSQANFTLGPVSRSYGGQYRCYGAYNLSSEWSAPSDPLDILITGQIHGTPFISVQPGPTVASGENVTLLCQSWRQFHTFLLTKAGAADAPLRLRSIHEYPKYQAEFPMSPVTSAHAGTYRCYGSLNSDPYLLSHPSEPLELVVSGPSMGSSPPPTGPISTPAGPEDQPLTPTGSDPQSGLGRHLGVVIGILVAVVLLLLLLLLLFLILRHRRQGKHWTSTQRKADFQHPAGAVGPEPTDRGLQWRSSPAADAQEENLYAAVKDTQPEDGVEMDTRAAASEAPQDVTYAQLHSLTLRRKATEPPPSQEREPPAEPSIYATLAIH

SEQ ID NO: 1225 - DNA, 641 bp, Homo sapien
gaattcccgtgatagacagactgtccaccatctgaaccttcattcaccaccattcgataacccttcttccgagcctctcctctggtcgcgcggggaggagaggcgagatggcagatgagattgccaaggctcaggtcgctcggcctggtggcgacacgatctttgggaagatcatccgcaaggaaataccagccaaaatcatttttgaggatgaccggtgccttgctttccatgacatttcccctcaagcaccaacacattttctggtgatacccaagaaacatatatcccagatttctgtggcagaagatgatgatgaaagtcttcttggacacttaatgattgttggcaagaaatgtgctgctgatctgggcctgaataagggttatcgaatggtggtgaatgaaggttcagatggtggacagtctgtctatcacgttcatctccatgttcttggaggtcggcaaatgcattggcctcctggttaagcacgttttggggataattttctcttctttagcatgataagttaggcaatttccagtatgttaagtaacacacttatttttcctgtgtatggagagattcaagaaataattttaaacccgctacataataaaagacattgttgcatggaattc

SEQ ID NO: 1226 - protein, 126 aa, Homo sapien
MADEIAKAQVARPGGDTIFGKIIRKEIPAKIIFEDDRCLAFHDISPQAPTHFLVIPKKHISQISVAEDDDESLLGHLMIVGKKCAADLGLNKGYRMVVNEGSDGGQSVYHVHLHVLGGRQMHWPPG

SEQ ID NO: 1227 - DNA, 1705 bp, Homo sapien
gtttttttcccttctgagcaatggagcttaccatctttatcctgagactggccatttacatcctgacatttcccttgtacctgctgaactttctgggcttgtggagctggatatgcaaaaaatggttcccctacttcttggtgaggttcactgtgatatacaacgaacagatggcaagcaagaagcgggagctcttcagtaacctgcaggagtttgcgggcccctccgggaaactctccctgctggaagtgggctgtggcacgggggccaacttcaagttctacccacctgggtgcagggtgacctgtattgaccccaaccccaactttgagaagtttttgatcaagagcattgcagagaaccgacacctgcagtttgagcgctttgtggtagctgccggggagaacatgcaccaggtggctgatggctctgtggatgtggtggtctgcaccctggtgctgtgctctgtgaagaaccaggagcggattctccgcgaggtgtgcagagtgctgagaccgggaggggctttctatttcatggagcatgtggcagctgagtgttcgacttggaattacttctggcaacaagtcctggatcctgcctggcaccttctgtttgatgggtgcaacctgaccagagagagctggaaggccctggagcgggccagcttctctaagctgaagctgcagcacatccaggccccactgtcctgggagttggtgcgccctcatatctatggatatgctgtgaaatagtgtgagctggcagttaagagctgaatggctcaaagaatttaaagcttcagttttacatttaaaatgctaagtgggagaagagaaaccttttttttggggggcggtttttttggtttgttgttggttttttttttttttttggcaagactccgtctcaaaaaaaaaaaaaaaaaaaaaaagaagtagagacagggagacagggtctcactgtgttgcctaggccggtcttgaactcctgggctcaagtgattctcccaccttgacctcctaaattgttgggattacaggtgtgagacagtgcacctggccgaaatagctcaagtttctgaaaaacaaatctgaatctatttgttattcttagcgtcactggtctggctttcagaattaacatacaaggttgccacacctagttctgcccagctttatgtcttttattccagtattccaccaaagtttgttttcctgcattccagttctcaagtcttaagataaagattgtacttgacagtttagtatatccataaaactatttgaggtggttaaggttcttgggttcattttccttaatactttgctgaatattgtagattgtaggcaatgaaaaagtctactaaattaggaaaaccttgaataattaggtatcctaggtaagagcccctaaacatcaagcaatctgtgagtctgtaaagaaataaatattttttggattattcttatctaattccacccctgttggaagatgatttctttgttctttgcaactatggaagctgtgaaaatcatcacaagtgcctctgaaagcgagtgttaggttggttagagggtttaatattttctgcaatggtttgtaggaattttaataaatgtagtatattttctgagatgattttgtaaaagtactattttaaatatcaaatcaaccaataaattcacatttgtgttaggaacag

SEQ ID NO: 1228 - protein, 244 aa, Homo sapien
MELTIFILRLAIYILTFPLYLLNFLGLWSWICKKWFPYFLVRFTVIYNEQMASKKRELFSNLQEFAGPSGKLSLLEVGCGTGANFKFYPPGCRVTCIDPNPNFEKFLIKSIAENRHLQFERFVVAAGENMHQVADGSVDVVVCTLVLCSVKNQERILREVCRVLRPGGAFYFMEHVAAECSTWNYFWQQVLDPAWHLLFDGCNLTRESWKALERASFSKLKLQHIQAPLSWELVRPHIYGYAVK

SEQ ID NO: 1229 - DNA, 723 bp, Homo sapien
gggcggcggtcggcagcaaggcggcggtgcgccgccgcagctgcagtgacatgtccagcatgaatcccgaatatgattatttattcaagttacttctgattggcgactcaggggttggaaagtcttgccttcttcttaggtttgcagatgatacatatacagaaagctacatcagcacaattggtgtggatttcaaaataagaactatagagttagacgggaaaacaatcaagcttcaaatatgggacacagcaggccaggaaagatttcgaacaatcacctccagttattacagaggagcccatggcatcatagttgtgtatgatgtgacagatcaggagtccttcaataatgttaaacagtggctgcaggaaatagatcgttatgccagtgaaaatgtcaacaaattgttggtagggaacaaatgtgatctgaccacaaagaaagtagtagactacacaacagcgaaggaatttgctgattcccttggaattccgtttttggaaaccagtgctaagaatgcaacgaacgtagaacagtctttcatgacgatggcagctgagattaaaaagcgaatgggtcccggagcaacagctggtggtgctgagaagtccaatgttaaaattcagagcactccagtcaagcagtcaggtggaggttgctgctaaatttgcctccatccttttctcacagcaatgaatttgcaatctgaacccaagtgaa

SEQ ID NO: 1230 - protein, 205 aa, Homo sapien
MSSMNPEYDYLFKLLLIGDSGVGKSCLLLRFADDTYTESYISTIGVDFKIRTIELDGKTIKLQIWDTAGQERFRTITSSYYRGAHGIIVVYDVTDQESFNNVKQWLQEIDRYASENVNKLLVGNKCDLTTKKVVDYTTAKEFADSLGIPFLETSAKNATNVEQSFMTMAAEIKKRMGPGATAGGAEKSNVKIQSTPVKQSGGGCC

SEQ ID NO: 1231 - DNA, 3309 bp, Homo sapien
ctgcagggggggggggggggggggggggggggggggggcgcagcacggctcagaccgaggcgcacaggctcgcagctccgggcgcctagcgcccggtccccgccgcgacgcgccaccgtccctgccggcgcctccgcgccttcgaaatgagggtcctgggtgggcgctgcggggcgccgctggcgtgtctcctcctagtgcttcccgtctcagaggcaaaccttctgtcaaagcaacaggcttcacaagtcctggttaggaagcgtcgtgcaaattctttacttgaagaaaccaaacagggtaatcttgaaagagaatgcatcgaagaactgtgcaataaagaagaagccagggaggtctttgaaaatgacccggaaacggattatttttatccaaaatacttagtttgtcttcgctcttttcaaactgggttattcactgctgcacgtcagtcaactaatgcttatcctgacctaagaagctgtgtcaatgccattccagaccagtgtagtcctctgccatgcaatgaagatggatatatgagctgcaaagatggaaaagcttcttttacttgcacttgtaaaccaggttggcaaggagaaaagtgtgaatttgacataaatgaatgcaaagatccctcaaatataaatggaggttgcagtcaaatttgtgataatacacctggaagttaccactgttcctgtaaaaatggttttgttatgctttcaaataagaaagattgtaaagatgtggatgaatgctctttgaagccaagcatttgtggcacagctgtgtgcaagaacatcccaggagattttgaatgtgaatgccccgaaggctacagatataatctcaaatcaaagtcttgtgaagatatagatgaatgctctgagaacatgtgtgctcagctttgtgtcaattaccctggaggttacacttgctattgtgatgggaagaaaggattcaaacttgcccaagatcagaagagttgtgaggttgtttcagtgtgccttcccttgaaccttgacacaaagtatgaattactttacttggcggagcagtttgcaggggttgttttatatttaaaatttcgtttgccagaaatcagcagattttcagcagaatttgatttccggacatatgattcagaaggcgtgatactgtacgcagaatctatcgatcactcagcgtggctcctgattgcacttcgtggtggaaagattgaagttcagcttaagaatgaacatacatccaaaatcacaactggaggtgatgttattaataatggtctatggaatatggtgtctgtggaagaattagaacatagtattagcattaaaatagctaaagaagctgtgatggatataaataaacctggacccctttttaagccggaaaatggattgctggaaaccaaagtatactttgcaggattccctcggaaagtggaaagtgaactcattaaaccgattaaccctcgtctagatggatgtatacgaagctggaatttgatgaagcaaggagcttctggaataaaggaaattattcaagaaaaacaaaataagcattgcctggttactgtggagaagggctcctactatcctggttctggaattgctcaatttcacatagattataataatgtatccagtgctgagggttggcatgtaaatgtgaccttgaatattcgtccatccacgggcactggtgttatgcttgccttggtttctggtaacaacacagtgccctttgctgtgtccttggtggactccacctctgaaaaatcacaggatattctgttatctgttgaaaatactgtaatatatcggatacaggccctaagtctatgttccgatcaacaatctcatctggaatttagagtcaacagaaacaatctggagttgtcgacaccacttaaaatagaaaccatctcccatgaagaccttcaaagacaacttgccgtcttggacaaagcaatgaaagcaaaagtggccacatacctgggtggccttccagatgttccattcagtgccacaccagtgaatgccttttataatggctgcatggaagtgaatattaatggtgtacagttggatctggatgaagccatttctaaacataatgatattagagctcactcatgtccatcagtttggaaaaagacaaagaattcttaaggcatcttttctctgcttataataccttttccttgtgtgtaattatacttatgtttcaataacagctgaagggttttatttacaatgtgcagtctttgattattttgtggtcctttcctgggatttttaaaaggtcctttgtcaaggaaaaaaattctgttgtgatataaatcacagtaaagaaattcttacttctcttgctatctaagaatagtgaaaaataacaattttaaatttgaatttttttcctacaaatgacagtttcaatttttgtttgtaaaactaaattttaattttatcatcatgaactagtgtctaaatacctatgtttttttcagaaagcaaggaagtaaactcaaacaaaagtgcgtgtaattaaatactattaatcataggcagatactattttgtttatgtttttgtttttttcctgatgaaggcagaagagatggtggtctattaaatatgaattgaatggagggtcctaatgccttatttcaaaacaattcctcagggggaccagctttggcttcatctttctcttgtgtggcttcacatttaaaccagtatctttattgaattagaaaacaagtgggacatattttcctgagagcagcacaggaatcttcttcttggcagctgcagtctgtcaggatgagatatcagattaggttggataggtggggaaatctgaagtgggtacattttttaaattttgctgtgtgggtcacacaaggtctacattacaaaagacagaattcagggatggaaaggagaatgaacaaatgtgggagttcatagttttccttgaatccaacttttaattaccagagtaagttgccaaaatgtgattgttgaagtacaaaaggaactatgaaaaccagaacaaattttaacaaaaggacaaccacagagggatatagtgaatatcgtatcattgtaatcaaagaagtaaggaggtaagattgccacgtgcctgctggtactgtgatgcatttcaagtggcagttttatcacgtttgaatctaccattcatagccagatgtgtatcagatgtttcactgacagtttttaacaataaattcttttcactgtattttatatcacttataataaatcggtgtataatttt

SEQ ID NO: 1232 - protein, 676 aa, Homo sapien
MRVLGGRCGAPLACLLLVLPVSEANLLSKQQASQVLVRKRRANSLLEETKQGNLERECIEELCNKEEAREVFENDPETDYFYPKYLVCLRSFQTGLFTAARQSTNAYPDLRSCVNAIPDQCSPLPCNEDGYMSCKDGKASFTCTCKPGWQGEKCEFDINECKDPSNINGGCSQICDNTPGSYHCSCKNGFVMLSNKKDCKDVDECSLKPSICGTAVCKNIPGDFECECPEGYRYNLKSKSCEDIDECSENMCAQLCVNYPGGYTCYCDGKKGFKLAQDQKSCEVVSVCLPLNLDTKYELLYLAEQFAGVVLYLKFRLPEISRFSAEFDFRTYDSEGVILYAESIDHSAWLLIALRGGKIEVQLKNEHTSKITTGGDVINNGLWNMVSVEELEHSISIKIAKEAVMDINKPGPLFKPENGLLETKVYFAGFPRKVESELIKPINPRLDGCIRSWNLMKQGASGIKEIIQEKQNKHCLVTVEKGSYYPGSGIAQFHIDYNNVSSAEGWHVNVTLNIRPSTGTGVMLALVSGNNTVPFAVSLVDSTSEKSQDILLSVENTVIYRIQALSLCSDQQSHLEFRVNRNNLELSTPLKIETISHEDLQRQLAVLDKAMKAKVATYLGGLPDVPFSATPVNAFYNGCMEVNINGVQLDLDEAISKHNDIRAHSCPSVWKKTKNS

SEQ ID NO: 1233 - DNA, 2064 bp, Homo sapien
ggcacgagggcagtggaggctgaggctatgatggcggccatggcgacggctcgagtgcggatggggccgcggtgcgcccaggcgctctggcgcatgccgtggctgccggtgtttttgtcgttggcggcggcggcggcggcggcagcggcggagcagcaggtcccgctggtgctgtggtcgagtgaccgggacttgtgggctcctgcggccgacactcatgaaggccacatcaccagcgacttgcagctctctacctacttagatcccgccctggagctgggtcccaggaatgtgctgctgttcctgcaggacaagctgagcattgaggatttcacagcatatggcggtgtgtttggaaacaagcaggacagcgccttttctaacctagagaatgccctggacctggccccctcctcactggtgcttcctgccgtcgactggtatgcagtcagcactctgaccacttacctgcaggagaagctcggggccagccccttgcatgtggacctggccaccctgcgggagctgaagctcaatgccagcctccctgctctgctgctcattcgcctgccctacacagccagctctggtctgatggcacccagggaagtcctcacaggcaacgatgaggtcatcgggcaggtcctgagcacactcaagtccgaagatgtcccatacacagcggccctcacagcggtccgcccttccagggtggcccgtgatgtagccgtggtggccggagggctaggtcgccagctgctacaaaaacagccagtatcacctgtgatccatcctcctgtgagttacaatgacaccgctccccggatcctgttctgggcccaaaacttctctgtggcgtacaaggaccagtgggaggacctgactcccctcacctttggggtgcaggaactcaacctgactggctccttctggaatgactcctttgccaggctctcactgacctatgaacgactctttggtaccacagtgacattcaagttcattctggccaaccgcctctacccagtgtctgcccggcactggtttaccatggagcgcctcgaagtccacagcaatggctccgtcgcctacttcaatgcttcccaggtcacagggcccagcatctactccttccactgcgagtatgtcagcagcctgagcaagaagggtagtctcctcgtggcccgcacgcagccctctccctggcagatgatgcttcaggacttccagatccaggctttcaacgtaatgggggagcagttctcctacgccagcgactgtgccagcttcttctcccccggcatctggatggggctgctcacctccctgttcatgctcttcatcttcacctatggcctgcacatgatcctcagcctcaagaccatggatcgctttgatgaccacaagggccccactatttctttgacccagattgtgtgaccctgtgccagtgggggggttgagggtgggacggtgtccgtgttgttgctttcccaccctgcagcgcactggactgaagagcttccctcttcctactgcagcatgaactgcaagctcccctcagcccatcttgctccctcttcagcccgctgaggagctttcttgggctgcccccatctctcccaacaaggtgtacatattctgcgtagatgctagaccaaccagcttcccagggttcgtcgctgtgaggcgtaagggacatgaattctagggtctcctttctccttatttattcttgtggctacatcatccctggctgtggatagtgcttttgtgtagcaaatgctccctccttaaggttatagggctccctgagtttgggagtgtggaagtactacttaactgtctgtcctgcttggctgtcgttatcgttttctggtgatgttgtgctaacaataagcagtacacgggtttatttctgtggcctgagaaggaagggacctccacgacaggtgggctgggtgcgatcgccggctgtttggcatgttcccaccgggagtgccgggcaggagcatggggtgcttggttgtttccttcctaataaaataaacgcgggtcgccatg

SEQ ID NO: 1234 - protein, 470 aa, Homo sapien
MMAAMATARVRMGPRCAQALWRMPWLPVFLSLAAAAAAAAAEQQVPLVLWSSDRDLWAPAADTHEGHITSDLQLSTYLDPALELGPRNVLLFLQDKLSIEDFTAYGGVFGNKQDSAFSNLENALDLAPSSLVLPAVDWYAVSTLTTYLQEKLGASPLHVDLATLRELKLNASLPALLLIRLPYTASSGLMAPREVLTGNDEVIGQVLSTLKSEDVPYTAALTAVRPSRVARDVAVVAGGLGRQLLQKQPVSPVIHPPVSYNDTAPRILFWAQNFSVAYKDQWEDLTPLTFGVQELNLTGSFWNDSFARLSLTYERLFGTTVTFKFILANRLYPVSARHWFTMERLEVHSNGSVAYFNASQVTGPSIYSFHCEYVSSLSKKGSLLVARTQPSPWQMMLQDFQIQAFNVMGEQFSYASDCASFFSPGIWMGLLTSLFMLFIFTYGLHMILSLKTMDRFDDHKGPTISLTQIV

SEQ ID NO: 1235 - DNA, 716 bp, Homo sapien
atggcagagcagtcggacgaggccgtgaagtactacaccctagaggagattcagaagcacaaccacagcaagagcacctggctgatcctgcaccacaaggtgtacgatttgaccaaatttctggaagagcatcctggtggggaagaagttttaagggaacaagctggaggtgacgctactgagaactttgaggatgtcgggcactctacagatgccagggaaatgtccaaaacattcatcattggggagctccatccagatgacagaccaaagttaaacaagcctccagaaccttaaaggcggtgtttcaaggaaactcttatcactactattgattctagttccagttggtggaccaactgggtgatccctgccatctctgcagtggccgtcgccttgatgtatcgcctatacatggcagaggactgaacacctcctcagaagtcagcgcaggaagagcctgctttggacacgggagaaaagaagccattgctaactacttcaactgacagaaaccttcacttgaaaacaatgattttaatatatctctttctttttcttccgacattagaaacaaaacaaaaagaactgtcctttctgcgctcaaatttttcgagtgtgcctttttattcatctactttattttgatgtttccttaatgtgtaatttacttattataagcatgatcttttaaaaatatatttggcttttaaagt

SEQ ID NO: 1236 - protein, 98 aa, Homo sapien
MAEQSDEAVKYYTLEEIQKHNHSKSTWLILHHKVYDLTKFLEEHPGGEEVLREQAGGDATENFEDVGHSTDAREMSKTFIIGELHPDDRPKLNKPPEP

SEQ ID NO: 1237 - DNA, 1064 bp, Homo sapien
  Unsure 27: Unknown base
  Unsure 766: Unknown base
cacagccgggtcgcaggcacctccccngccagctctcccgcattctgcacagcttcccgacgcgtctgctgagccccatggcccacgccacgctctccgccgcccccagcaatccccggctcctgcgggtggcgctgctgctcctgctcctggtgggcagccggcgcgcagcaggagcgtccgtggtcactgaactgcgctgccagtgcttgcagacactgcagggaattcacctcaagaacatccaaagtgtgaatgtaaggtcccccggaccccactgcgcccaaaccgaagtcatagccacactcaagaatgggaagaaagcttgtctcaaccccgcatcccccatggttcagaaaatcatcgaaaagatactgaacaaggggagcaccaactgacaggagagaagtaagaagcttatcagcgtatcattgacacttcctgcagggtggtccctgcccttaccagagctgaaaatgaaaaagagaacagcagctttctagggacagctggaaagggacttaatgtgtttgactatttcttacgagggttctacttatttatgtatttatttttgaaagcttgtattttaatattttacatgctgttatttaaagatgtgagtgtgtttcatcaaacatagctcagtcctgattatttaattggaatatgatgggttttaaatgtgtcattaaactaatatttagtgggagaccataatgtgtcagccaccttgataaatgacagggtggggaactggagggtngggggattgaaatgcaagcaattagtggatcactgttagggtaagggaatgtatgtacacatctattttttatacttttttttttaaaaaagaatgtcagttgttatttattcaaattatctcacattatgtgttcaacatttttatgctgaagtttcccttagacattttatgtcttgcttgtagggcataatgccttgtttaatgtccattctgcagcgtttctctttcccttggaaaagagaatttatcattactgttacatttgtacaaatgacatgataataaaagttttatg

SEQ ID NO: 1238 - protein, 106 aa, Homo sapien
MAHATLSAAPSNPRLLRVALLLLLLVGSRRAAGASVVTELRCQCLQTLQGIHLKNIQSVNVRSPGPHCAQTEVIATLKNGKKACLNPASPMVQKIIEKILNKGSTN

SEQ ID NO: 1239 - DNA, 932 bp, Homo sapien
atacaggacagagcatggctcgcctacagactgcactcctggttgtcctcgtcctccttgctgtggcgcttcaagcaactgaggcaggcccctacggcgccaacatggaagacagcgtctgctgccgtgattacgtccgttaccgtctgcccctgcgcgtggtgaaacacttctactggacctcagactcctgcccgaggcctggcgtggtgttgctaaccttcagggataaggagatctgtgccgatcccagagtgccctgggtgaagatgattctcaataagctgagccaatgaagagcctactctgatgaccgtggccttggctcctccaggaaggctcaggagccctacctccctgccattatagctgctccccgccagaagcctgtgccaactctctgcattccctgatctccatccctgtggctgtcacccttggtcacctccgtgctgtcactgccatctcccccctgacccctctaacccatcctctgcctccctccctgcagtcagagggtcctgttcccatcagcgattcccctgcttaaacccttccatgactccccactgccctaagctgaggtcagtctcccaagcctggcatgtggccctctggatctgggttccatctctgtctccagcctgcccacttcccttcatgaatgttgggttctagctccctgttctccaaacccatactacacatcccacttctgggtctttgcctgggatgttgctgacactcagaaagtcccaccacctgcacatgtgtagccccaccagccctccaaggcattgctcgcccaagcagctggtaattccatttcatgtattagatgtcccctggccctctgtcccctcttaataaccctagtcacagtctccgcagattcttgggatttgggggttttctcccccacctctccacta

SEQ ID NO: 1240 - protein, 93 aa, Homo sapien
MARLQTALLVVLVLLAVALQATEAGPYGANMEDSVCCRDYVRYRLPLRVVKHFYWTSDSCPRPGVVLLTFRDKEICADPRVPWVKMILNKLSQ

SEQ ID NO: 1241 - DNA, 2046 bp, Homo sapien
ttagcaataaggctggagaaggaaaagccggcgcgcccgcggcccgcgcgatttcccgccgagcccgcgtccccggcggcgggcgggctccgggggcgcccgggccgcggcggcgcggcggcgcgagctgcgcctccgggccggtgaatcatcccggcagacaccaagagccgcggcagcagagaggagcgctgaaacatggctgaagcggccacgggctttctggagcagctcaagtcctgcatagtttggtcttggacgtatctgtggaccgtgtggttcttcatcgtgctattcctggtctacatcctgcgggtgcctttgaaaatcaacgacaacttgagcacagtgagcatgtttttgaacacattaacaccgaagttctacgtggccctaacaggcacttcctcactaatatcagggcttattttgatatttgaatggtggtattttcgcaaatacggaacttcattcattgaacaagtctcagtaagccacttgcgcccccttctgggaggggttgacaacaactcttccaacaattctaattccagtaacggggactcagattccaataggcaaagtgtctcagaatgcaaagtatggcgaaatccactaaatttatttaggggtgctgaatacaatcggtatacttgggtgacaggacgagagcctcttacttactatgacatgaatctctctgcccaagaccaccagacattctttacttgtgactcggaccatctgcgtcccgcagatgcaataatgcagaaagcctggagagagagaaacccccaagctaggatttctgcagctcatgaagccttggagataaatgagtgtgcaactgcttatattctcttggctgaagaggaagcaacaaccattgctgaagcagaaaaattatttaagcaggccctgaaggctggagatggctgttaccgacgctctcagcagctacaacatcatggatcccagtatgaagcccaacatagacgagacaccaatgtcttggtgtacatcaaaagaaggctagcaatgtgtgccagaagactcgggaggaccagggaagcagtgaaaatgatgagagatttaatgaaggagttcccccttctgagtatgttcaatatccatgaaaaccttttagaagcccttctggaactacaagcatatgctgatgttcaggcagtcttagcaaagtatgatgatataagcttaccaaagtcagcaacaatatgctacacagctgctttgctcaaagcaagagctgtctctgacaaattctctcctgaggctgcatctcggcgggggctgagcacagcagagatgaatgcagtagaggccattcatagagctgtggaattcaatcctcatgtgccaaaatacctactagaaatgaaaagcttaatcctacccccagaacatatcctgaagagaggagacagtgaagcaatagcatatgcattctttcatcttgcacactggaagagagtggaaggggctttgaatcttttgcattgtacgtgggaaggcacttttcggatgatcccttatcccttggaaaaggggcacctattttatccttacccaatctgtacagaaacagcagaccgagagctgcttccatctttccatgaagtctcagtttacccaaagaaggagcttcccttctttattctctttactgctggattatgttccttcacagccatgctggccctcctgacacatcagttcccggaacttatgggggtcttcgcaaaagctttcctcagcactttgtttgcccccttaaactttgtcatggagaaagtggagagcatcctcccatccagtctgtggcaccagctaacacggatctgagagaagccctgtcctccactcacctcacccgccgctgccaccatctcctctgtgccaactccttgtggaccgcaagaaagcatgactttgaaaaagggaagccattccgagattttaaaatgttcatggactattccatattaaaagctgtttttgttgttgtacaaaaaaaaaaaaaaaaaa

SEQ ID NO: 1242 - protein, 859 aa, Homo sapien
MACRWSTKESPRWRSALLLLFLAGVYGNGALAEHSENVHISGVSTACGETPEQIRAPSGIITSPGWPSEYPAKINCSWFIRANPGEIITISFQDFDIQGSRRCNLDWLTIETYKNIESYRACGSTIPPPYISSQDHIWIRFHSDDNISRKGFRLAYFSGKSEEPNCACDQFRCGNGKCIPEAWKCNNMDECGDSSDEEICAKEANPPTAAAFQPCAYNQFQCLSRFTKVYTCLPESLKCDGNIDCLDLGDEIDCDVPTCGQWLKYFYGTFNSPNYPDFYPPGSNCTWLIDTGDHRKVILRFTDFKLDGTGYGDYVKIYDGLEENPHKLLRVLTAFDSHAPLTVVSSSGQIRVHFCADKVNAARGFNATYQVDGFCLPWEIPCGGNWGCYTEQQRCDGYWHCPNGRDETNCTMCQKEEFPCSRNGVCYPRSDRCNYQNHCPNGSDEKNCFFCQPGNFHCKNNRCVFESWVCDSQDDCGDGSDEENCPVIVPTRVITAAVIGSLICGLLLVIALGCTCKLYSLRMFERRSFETQLSRVEAELLRREAPPSYGQLIAQGLIPPVEDFPVCSPNQASVLENLRLAVRSQLGFTSVRLPMAGRSSNIWNRIFNFARSRHSGSLALVSADGDEVVPSQSTSREPERNHTHRSLFSVESDDTDTENERRDMAGASGGVAAPLPQKVPPTTAVEATVGACASSSTQSTRGGHADNGRDVTSVEPPSVSPARHQLTSALSRMTQGLRWVRFTLGRSSSLSQNQSPLRQLDNGVSGREDDDDVEMLIPISDGSSDFDVNDCSRPLLDLASDQGQGLRQPYNATNPGVRPSNRDGPCERCGIVHTAQIPDTCLEVTLKNETSDDEALLLC

SEQ ID NO: 1243 - DNA, 1910 bp, Homo sapien
ctcactgccacacgcagctcaacctgagctacacagccagatgcgagatgcttctctgctgatctgagtctgcctgcagcatggaccttggtcttccctgaagcatctccagggctggagggacgactgccatgcaccgagggctcatccatccgcagagcagggcagtgggaggagacgctatgacccccatcgtcacagtcctgatctgtctcaggctgagtctgggcccccggacccacgtgcaggcagggaccctccccaagcccacactctgggctgagccaggctctgtgatcacccaggggagtcccgtgaccctctggtgtcaggggatcctggagacccaggagtaccgtctgtatagagaaaagaaaacagcaccctggattacacggatcccacaggagattgtgaagaagggccagttccccatcccatccatcacctgggaacacacagggcggtatcgctgtttctacggtagccacactgcaggctggtcagagcccagtgaccccctggagctggtggtgacaggagcctacatcaaacccaccctctcagctctacccagccctgtggtgacctcaggagggaacgtgaccctccattgtgtctcacaggtggcatttggcagcttcattctgtgtaaggaaggagaagatgaacacccacaatgcctgaactcacagccccgtacccatgggtggtcccgggccatcttctctgtgggccccgtgagcccgagtcgcaggtggtcgtacaggtgctatgcttatgactcgaactctccccatgtgtggtctctacccagtgatctcctggagctcctggtcctaggtgtttctaagaagccatcactctcagtgcagccaggtcctatagtggcccctggggagagcctgaccctccagtgtgtttctgatgtcagctacgacagatttgttctgtataaggagggagaacgtgacttcctccagctccctggcccacagccccaggctgggctctcccaggccaacttcaccctgggccctgtgagccgctcctacgggggccagtacagatgctccggtgcatacaacctctcctccgagtggtcggcccccagcgaccccctggacatcctgatcgcaggacagttccgtggcagacccttcatctcggtgcatccgggccccacggtggcctcaggagagaacgtgaccctgctgtgtcagtcatgggggccgttccacactttccttctgaccaaggcgggagcagctgatgcccccctccgtctcagatcaatacacgaatatcctaagtaccaggctgaattccctatgagtcctgtgacctcagcccactcggggacctacaggtgctacggctcactcagctccaacccctacctgctgtctcaccccagtgactccctggagctcatggtctcaggagcagctgagaccctcagcccaccacaaaacaagtccgattccaaggctggagcagctaacaccctcagcccatcacaaaacaagactgcctcacacccccaggattacacagtggagaatctcatccgcatgggcatagctggcttggtcctggtggtcctcgggattctgctatttgaggctcagcacagccagagaagcctctgagatgcagccgggaggtgaacagcagagagaagaatgtacccttcagagtggtggagccttgggaacagatctgatgatgccaggaggttccgggagacaatttagggctgatgttatctggactgtctgccaatcatttttagagggaggaatcagtgttggattgcagagacattttctggagtgatccatgaaggaccattaacatgtgatacctttcctctctattaatgttgacttcccttggttggatcctct

SEQ ID NO: 1244 - protein, 489 aa, Homo sapien
MTPIVTVLICLRLSLGPRTHVQAGTLPKPTLWAEPGSVITQGSPVTLWCQGILETQEYRLYREKKTAPWITRIPQEIVKKGQFPIPSITWEHTGRYRCFYGSHTAGWSEPSDPLELVVTGAYIKPTLSALPSPVVTSGGNVTLHCVSQVAFGSFILCKEGEDEHPQCLNSQPRTHGWSRAIFSVGPVSPSRRWSYRCYAYDSNSPHVWSLPSDLLELLVLGVSKKPSLSVQPGPIVAPGESLTLQCVSDVSYDRFVLYKEGERDFLQLPGPQPQAGLSQANFTLGPVSRSYGGQYRCSGAYNLSSEWSAPSDPLDILIAGQFRGRPFISVHPGPTVASGENVTLLCQSWGPFHTFLLTKAGAADAPLRLRSIHEYPKYQAEFPMSPVTSAHSGTYRCYGSLSSNPYLLSHPSDSLELMVSGAAETLSPPQNKSDSKAGAANTLSPSQNKTASHPQDYTVENLIRMGIAGLVLVVLGILLFEAQHSQRSL

SEQ ID NO: 1245 - DNA, 1169 bp, Homo sapien
gaggttgaaggacccaggcgtgtcagccctgctccagagaccttgggcatggaggagagtgtcgtacggccctcagtgtttgtggtggatggacagaccgacatcccattcacgaggctgggacgaagccaccggagacagtcgtgcagtgtggcccgggtgggtctgggtctcttgctgttgctgatgggggctgggctggccgtccaaggctggttcctcctgcagctgcactggcgtctaggagagatggtcacccgcctgcctgacggacctgcaggctcctgggagcagctgatacaagagcgaaggtctcacgaggtcaacccagcagcgcatctcacaggggccaactccagcttgaccggcagcggggggccgctgttatgggagactcagctgggcctggccttcctgaggggcctcagctaccacgatggggcccttgtggtcaccaaagctggctactactacatctactccaaggtgcagctgggcggtgtgggctgcccgctgggcctggccagcaccatcacccacggcctctacaagcgcacaccccgctaccccgaggagctggagctgttggtcagccagcagtcaccctgcggacgggccaccagcagctcccgggtctggtgggacagcagcttcctgggtggtgtggtacacctggaggctggggaggaggtggtcgtccgtgtgctggatgaacgcctggttcgactgcgtgatggtacccggtcttacttcggggctttcatggtgtgaaggaaggagcgtggtgcattggacatgggtctgacacgtggagaactcagagggtgcctcaggggaaagaaaactcacgaagcagaggctgggcgtggtggctctcgcctgtaatcccagcactttgggaggccaaggcaggcggatcacctgaggtcaggagttcgagaccagcctggctaacatggcaaaaccccatctctactaaaaatacaaaaattagccggacgtggtggtgcctgcctgtaatccagctactcaggaggctgaggcaggataattttgcttaaacccgggaggcggaggttgcagtgagccgagatcacaccactgcactccaacctgggaaacgcagtgagactgtgcctcaaaaaaaaaaaaaaaaaaaaaaaaaaaaa

SEQ ID NO: 1246 - protein, 240 aa, Homo sapien
MEESVVRPSVFVVDGQTDIPFTRLGRSHRRQSCSVARVGLGLLLLLMGAGLAVQGWFLLQLHWRLGEMVTRLPDGPAGSWEQLIQERRSHEVNPAAHLTGANSSLTGSGGPLLWETQLGLAFLRGLSYHDGALVVTKAGYYYIYSKVQLGGVGCPLGLASTITHGLYKRTPRYPEELELLVSQQSPCGRATSSSRVWWDSSFLGGVVHLEAGEEVVVRVLDERLVRLRDGTRSYFGAFMV

SEQ ID NO: 1247 - DNA, 1492 bp, Homo sapien
tttttttttccagccaagcagcagctttattagtggtgctgggttcttcccataccctacagcgtgctcggaagcattccgcgccgggcctgccagacacctgcgcccttctgcagccgcccgccgcatccgccgccgcagcccccagcatgtcgggcccagacgtcgagacgccgtccgccatccagatctgccggatcatgcggccagatgatgccaacgtggccggcaatgtccacggggggaccatcctgaagatgatcgaggaggcaggcgccatcatcagcacccggcattgcaacagccagaacggggagcgctgtgtggcagccctggctcgtgtcgagcgcaccgacttcctgtctcccatgtgcatcggtgaggtggcgcatgtcagcgcggagatcacctacacctccaagcactctgtggaggtgcaggtcaacgtgatgtccgaaaacatcctcacaggtgccaaaaagctgaccaataaggccaccctgtggtatgtgcccctgtcgctgaagaatgtggacaaggtcctcgaggtgcctcctgttgtgtattcccggcaggagcaggaggaggagggccggaagcggtatgaagcccagaagctggagcgcatggagaccaagtggaggaacggggacatcgtccagccagtcctcaacccagagccgaacactgtcagctacagccagtccagcttgatccacctggtggggccttcagactgcaccctgcacggctttgtgcacggaggtgtgaccatgaagctcatggatgaggtcgccgggatcgtggctgcacgccactgcaagaccaacatcgtcacagcttccgtggacgccattaattttcatgacaagatcagaaaaggctgcgtcatcaccatctcgggacgcatgaccttcacgagcaataagtccatggagatcgaggtgttggtggacgccgaccctgttgtggacagctctcagaagcgctaccgggccgccagtgccttcttcacctacgtgtcgctgagccaggaaggcaggtcgctgcctgtgccccagctggtgcccgagaccgaggacgagaagaagcgctttgaggaaggcaaagggcggtacctgcagatgaaggcgacgatcagggccacgcggacgctcagccctagactccctcctcctgccactggtgcctcgagtagccatggcaacgggcccagtgtccagtcacttagaagttccccccttggccaaaaacccaattcacattgagagctggtgttgtctgaagttttcgtatcacagtgttaacctgtactctctcctgcaaacctacacaccaaagctttatttatatcattccagtatcaatgctacacagtgttgtcccgagcgccgggaggcgttgggcagaaaccctcgggaatgcttccgagcacgctgtagggtatgggaagaacccagcaccactaataaagctgctgcttggctggaaa

SEQ ID NO: 1248 - protein, 372 aa, Homo sapien [sequence omitted]

SEQ ID NO: 1249 - DNA, 4221 bp, Homo sapien
ggagggcctcggctttccagggacagaggcccaactccaggacgccccagctggcccagcccctcctctttccctcaaggctgcaggaggtcgggaaaggcagtcctggtagaggcctgtcctgggctccaggttggcccctgagggtggccctcctcatgccggcttcaagactgagggacagggcagccagttcagcctcgggatccacctgtggctccatgtcccagacgcaccctgtgctggagagcggcctcctggcatctgccggctgctccgcaccccggggtcccaggaagggcggcccagccccagtggacaggaaagctaaggcctcagcgatgccggactccccagcggaggtgaagacgcagccccggtccacaccccccagcatgccgcccccaccgcctgccgcatcccagggggccacacgccccccctccttcacgccacacacacatcgagaggacgggcctgcgacgctgccccacggccgttttcatggctgcttaaaatggtctatggtctgtctcttgatgaacggcagcagccactcaccaacagccatcaatggtgcaccgtgcacacccaacggcttcagcaatggcccggccacctcgtccacagcctccttgtccacacagcacctgcccccagcctgcggggcccggcagctcagcaagctcaagcgcttcctcaccacactgcagcagtttggcagcgacatctccccagagattggggagcgcgtgcgcacactggtgctgggcctggtgaactcgacattgacgatcgaggagtttcattccaagcttcaggaggccaccaacttccctctgcggccgtttgtcattcccttcctgaaggcaaacctgcccttgctgcagcgggagctcctgcactgtgcacgcctggccaagcagacgcccgcccagtacttggcccagcatgagcagctcctgctggacgccagcgcctcctcccccatcgactcctcagagctgctactggaagtcaacgagaacggcaagaggaggacgcccgacaggaccaaagagaacgggtcagaacgcgacccgctgcaccccgagcacctcagcaaacggccatgcaccctgaaccctgcccagcgctacagccccagcaacgggccaccgcagcccacaccgccgccgcactaccgcctggaggacatagccatggcccaccacttccgagatgcctaccgccacccagacccccgggagctacgagagcgccatcggccgcttgtggtgcctgggtcccggcaggaagaagtgatcgaccacaagctcacagagcgtgagtgggcagaagagtggaagcacctcaacaacctcctgaactgcatcatggacatggtggagaagacgcggcgctcgctcacggtgctgcgcaggtgccaggaggccgaccgcgaggagctcaaccactgggcgcggcgctacagcgacgccgaggacacaaagaagggccccgctcccgccgcggcccggccccgcagcagctccgccggtcccgaagggcctcagctagacgtgcctcgcgagttcctgccgaggaccctcaccggctacgtgcctgaggacatctggaggaaggctgaagaggccgtgaatgaggtgaagcggcaggccatgtcggagctgcagaaagccgtgtcggacgcggagcgcaaagcgcacgagctcatcaccacggagcgtgccaagatggagcgggccctggccgaggcgaagcggcaggcctccgaggacgccctgacggtcatcaaccagcaggaggactccagcgagagctgctggaactgcgggcggaaagccagtgagacgtgcagcggctgcaacgcggcacgctactgcgggtccttctgccagcatcgggactgggagaagcatcaccacgtgtgtggccagagcctgcagggccccacagccgtggtggccgacccggtgcctggaccgcccgaagccgcccacagcctgggcccctccctgcctgtgggtgctgccagccccagcgaagccggctctgcggggccttctcgccccggctcccccagcccacctggcccactggacaccgtgccccgctgaccccactggcccctggcctgccggacacagcaccgtgccaaccccacccagctccaggcccaccggatgctgtgcctggcctccgatgcctggcctgccagacactgcgccccgcctgacctgkgggagccgaccaattagtcactgctgctactgcccctctccgaaagaagacacagaaccaacaaaaccgcattcagtgcacctgcctcagctacctaatgattccgcgcggagacctcctgacaacgtctcttcaagcatcctcagaagcctcgactgagctttagacagcagagcagatgccgcaggcgcggcggctctgcccacctctcttttcctctctgtctgtctctccccctctgtcttctctatcctctctctctctatgactatcacacactttctcttcaatgaaaaaatcgaattggtggcttatattttcagcaaagaattttggggggttttgtgtgttggcaaaagagctactcagaaatggacaaagaaaacgggggggttctccccctcctgattaaaaagggagaaagaaaactgcgattttatagctggagatctgaacccagctgtgcccctcccccaggggcgtgaggctgatcagcgaagacgggaggaaagatttcgatttctgactcaagatgcatttttggtttcagatttttttttcctgtaatgttaaactctttggctttaagtaaaaatccaaaaagtttttttaaaaaagcaaaggaagcatacttgtgaactaccttgctagctagccagccaaggataccggacacacctctgctccaaaggaaatccaaaaaagcaaacacaagaaatcaaaatccaaaatttgtttgtcactgccaaagtatttttttcactgtttcacttgctcttgggtttgtttggatgtgggtctttttctcttctgttctgattttgtttgtgggtgtcgggatatttgggtgcagagggtttgtgcccagttagaagcgacttttgttctcttctgcgtaggcgttggtgcgtccgccgcgtgtgcgtggtccgtgtgccgttgctccggcctgcgtctccatatgtgtaggaaaggacacgccgtctgtcctcacgccccctgtgacttttcatatttccgttttccacttgtggaaaaaaagtgctaaagttttcttcccagagagagcataattccgaaacaaaactgtgacaatcttttgggttgattctcgactgcttttcgagcatgcggagccagcaggcctccctgaaacactgcttctcggccagcccgtcctcctctacctctctcctctccgcgccctccgacctctctcggccccctcaccccagctccgacctctctcagccccatcgccccaactccaacctctcggccccatcgccccaccgcagctactcccctttcttccaaacttttgcagaaaaaacaaaaaaactacaaacaaaagcagccctctgcctcctccccagggaagaccctgaccgtgtacatagccctggtgctcctgcccagccacccctcagatgcgttcgcctctggccctggggtgtgtctcggtgacgttttctatcagacgtgctccctcccatcctccagccctgcccaccctccctccactcctctcaactgcctcagcgatttcaagaaggaaataaagggataaagaaattcatgcttgcaccgagtacaaggacagacagcaggcacggcccgcagcctggcatctgtgcgtgtggcgtggcccgtggcttggcatctgtgtgcgtggtgtggcccgtggcctggcatctgtgtgcgtggcgtggcccgtggcctggcatctgtgtgtgtggcgtggcccgtggcctggcatctgtgtgcgtggcgtggcccgtggcctggcatctgtgtgcgtggctatcaggagttctaggaactcagtgcaatacgggagtgacccagctactgaaccagccacgaacagcccgccagaggcctgaagctgagcgtgtacgttaatgtgaatgtatatagtctttgcagaggtccaaatgatattcatgatggtaataaacgagatgtttgccaaat

SEQ ID NO: 1250 - protein, 653 aa, Homo sapien [sequence omitted]

SEQ ID NO: 1251 - DNA, 6207 bp, Homo sapien
gagagacacgaatatgtttcagccgcaacaggctgcgtttcagccggaagagtgaaagggcaccttgaaaacgcaagtttatgaatatgtttctgtactttcagaccatcatcaaagaggggatgctgaccaaacagaacaattcattccagcgatcaaaaaggagatactttaagcttcgagggcgaacgctttactatgccaaaacggcaaagtcaatcatatttgatgaggtggatctgacagatgccagcgtagctgaatccagtaccaaaaacgtcaacaacagttttacggtcataactccatgcaggaagctcatcttgtgtgctgataacagaaaagaaatggaagattggattgcagcattaaagactgtgcagaacagggagcactttgagcccacccagtacagcatggaccacttctcagggatgcacaattggtacgcctgttcccacgcgaggccgacctactgcaatgtgtgccgtgaggctctgtctggggtcacgtcgcacgggctgtcctgcgaggtgtgcaaatttaaggcccacaagcgctgtgctgtgcgtgcaaccaataactgcaagtggaccacactggcctcgatcgggaaggacatcattgaagatgcagatgggattgcaatgccccaccagtggttggaaggaaacctacctgtgagcgccaagtgcactgtgtgcgacaagacctgtggcagtgtgctgcgcctgcaggactggcgctgcctctggtgcaaggccatggttcacacatcgtgtaaagaatccttgctgaccaagtgcccacttggcctgtgcaaagtgtcagtcatcccacccacggctctcaacagcatcgactccgatgggttctggaaggccagctgtcctccttcttgcacaagcccactgttggtcttcgtcaattcaaaaagtggggacaaccagggtgtgaagttcctcagaagattcaaacagctactaaaccccgcccaggtcttcgacctcatgaacggaggcccacacctcggcttacggttattccagaagtttgacacattccggattctggtttgtggcggggatggaagtgttggctgggtcctctccgaaatcgacagcctcaaccttcataaacagtgtcagctgggagtgctgccgctcggcacagggaacgacttggcccgagtactgggctggggctcagcctgcgatgacgacacccagctcccccagatcttggagaagttggagagagccagcaccaagatgctggacaggtggagcgtcatggcatacgaggccaagctcccccggcaggcctcctcctctaccgtcaccgaagacttcagcgaggattccgaggtacagcagattctcttctatgaagactcggttgcagcccacctttctaaaatcctcacctcggaccagcactcggtggtcatctcctcggccaaagtgctctgtgagacgccgaaggacttcgtggcacgggtggggaaggcctatgagaagacgaccgagagctcggaggagtcagaggtcatggccaagaagtgctctgtcctgaaagagaagctggattcccttctcaagaccttggacgatgagtcccaggcctcgtcctctctgcccaacccgccccccaccattgccgaggaggctgaagatggagatgggtcgggcagcatctgcggttccaccggagaccgcttggtggcatcagcttgcccggcccggccgcagatattccggcctcgagaacagctcatgctgagagccaacagcctgaagaaagcaattcgtcagatcatagaacacacagaaaaagctgtcgatgagcagaatgcccagacccaggagcaggagggcttcgtcctgggcctctctgagtcagaggagaagatggaccacagagtgtgcccaccactgtcccacagcgagagcttcggggtccccaaggggaggagccagcgcaaagtgtcgaaatctccgtgtgaaaagctgatcagcaaagggagtctgtccctaggcagttctgcttcccttccgccccagccgggaagccgggacggcctgcctgcgctcaacaccaagatcctgtacccaaatgtccgggctggaatgtctggttccttacccggtggctcagtcatcagtcgcctgttaattaatgctgatcccttcaactctgaaccagaaaccctagagtattacacggagaaatgtgtcatgaacaactattttggcattggcctggatgcgaagatatccctggactttaacaacaagcgcgatgagcacccagagaagtgcaggagccgaaccaagaacatgatgtggtatggagttcttggaaccaaagagttgctgcacagaacctacaagaacctggagcaaaaggtcttgctggagtgtgacggcgacccatcccactccccagtccttcagggaattgctgtccttaacattcccagctatgccggaggaaccaacttctgggggggtaccaaggaagatgatactttcgcagctccatcattcgatgacaagattctggaggtggtcgccgtgttcggcagcatgcagatggccgtctctcgagtcatcaggctacagcatcatcggatcgcccagtgtcgcacggtgaagatctccatccttggggatgagggcgtgcctgtgcaggtggacggagaggcctgggtccagccgccagggtacattcggattgtccacaagaaccgggcacagacactgaccagagacagggcatttgagagcaccctgaagtcctgggaagacaagcagaagtgcgaggtgccccgccctccatcctgttccctgcacccggagatgctgtccgaggaggaggccacccagatggaccagtttgggcaggcagcaggggtcctcattcacagtatccgagaaatagctcagtctcaccgggacatggagcaggaactggcccacgccgtcaatgccagctccaagtccatggaccgtgtgtatggcaagcccagaaccacagaggggctcaactgcagcttcgtcctggaaatggtgaataacttcagagctctgcgcagtgagacggagctgctgtctgggaagatggccctgcagctggatccgcctcagaaggagcagctggggagtgctcttgccgagatggaccgacagctcaggaggctggcagacaccccgtggctctgccagtccgcagagcccggcgacgaagagagtgtgatgctggatcttgccaagcgcagtcgcagtggtaaattccgcctcgtgaccaagtttaaaaaggagaaaaacaacaagaacaaagaagctcacagtagcctgggagccccggttcacctctgggggacagaggaggttgctgcctggctggagcacctcagtctctgtgagtataaggacatcttcacacggcacgacatccggggctctgagctcctgcacctggagcggagggacctcaaggacctgggcgtgaccaaggtgggccacatgaagaggatcctgtgtggcatcaaggagctgagccgcagcgcccccgccgtcgaggcctagcctctgtcctctcagcctgtggcctccacatccccgccgccgaggcctagcctccgccctctcagcctgtggcctctgcgcctcctgccactgaggccctgggcagatgctgcagcccgcccccttctcatggtgctacttcctctgtcagctacagaaagcctccgtgacaccgtccaccagagctctggggtctcgaacataacaacacagctacctttgaaacaacactttctccagctcagagtcacctggggcacatgtgtcacggccactcagctctcgcccgcctgtgctgtgggccagggaatccagcggcgtctggcctcctgggcactgcttgcctggcctcgtgcttggattgtcccgggggctcctctccgtgtgtccttctgtggccgcaccgtgtggctccgctcctggcccccagccagttctcagaaacgtggctggggcccagcacagcagcctgcaagggcccctgtttgttgatgcagcttttgttgaacaaaaatcgtgctctttcctggtttgaaagtagcatggatgtttccagtcttgttgattgtaatttgacgtgaagagaaaaaaacattcctcctgcgtgagccaaggcagcgggtgcttgttcccaggcgggagccctccctgggtgtcacaggtcctgtgctcctccctcctccatcctctctcctcccgctcctccctccccccactgtgggctggggacgcctgccttctgtctccggacgctctaggcgagttcagcttggggtgtgagtgagacagcttgccagctgcatccctgcagacagaggatgtgtgtccacatgagtgtttctgtgtgggaaatgcttcctggctctgggaaactttttctgcccattctgtggttcccagggagcgtggccctggtgcaggggtggtttgacctcttcagcccgtccggtggcctggacggaggctctctgagtgtctgcccctgcgatggcttcttgtcgcctgctgctggggctgatgtcgctggaggtgctggcagggactctgatttggtggtccgcgctgcccctgccctgcctctgtcctggctctgaactagtagatgatggtgccagagggcagggagctcgcctggggagagggctgtgccccgtagggacagtgcccaggtgaaggatgcccctggtcctccagggcactgactttgcccttttttcccgttgatagtcatggctcagaggtgcttgtaaatgtcttgggaagaggtttctgtaacccctgccctggtgtgaggaggaaatggctctggcctggctgcctggcgtggcttctctttggctcccaaagagaaggacagtgttgggagtatctgccgtggcttctctttggctcccaaagagaaggacagtgttgggagtatctgccggcgctgtccaggtcctttagtcagcgtcactccatctgatgtgcagaagctgggctgcacctgcgggggtgggcatagaccgggctgggtctgcagcagcccctggtcctgagcaggcggcagtgaacagcactggcccacctcccactcacagcccctctgtcccctctgcagtgcacccaggtggcccctctgcgtgcctttgggtgctcccctctcgtggtcgttctggcccgaggcccttagagtatggaggctgagccaggccttgggtttccccagcacagcctcctgtcgctgcatgcacgtgttgggatttttggatgaagactctcccacgctctgttggtggacttagctgcctcactggagattgtgggtggaaggtggttgtatgttacctttaccacctctcattgttttccccagaacattgtagatgggggttggcagagggagaaatatgccagccacggcagtcgcttggtttcccaggtggaatgggctaacacaggagatgatgggaacctgtcccgcagtccctgcatgaccattggccctgctggcctggcgatgtgggcatcctggggttcttagggtcccagaacaagccccaggcaagctggaacttgggtggggaggggacatgaggaggataaacagctgactgtggcttcaaggacatcagggccaccccaagtcctcagtgtcctactcctggcaagattgggtttggatcaaaagtgtttaaaattaatatgttgtcagtgattagaacaacactgtttacataaaaaccatttttctaattctaacaagttagaatgtgaggaaggaatgaacatgagtgtttaggaacctgccctttggtgctgggctggcgtcccgcactggggtgtcctcgctgtctgggggctgctctgcttccccggcccaggtccccttgtggtgttgccagacgggcctcatggtctgctgtgcagagagaggcaggaaggatccctgaagagtcttggagaaaaggttctgtgccctcaggtggggcttaccccctcgtatttataatcttaatttatatagtgaccaccgtggaaacaaacgcctcttgtattgtcatgtacatagtccatacctgagtgctgtacataagttgttctgtgtataaataaaacaagcctgtttttgatcttc

SEQ ID NO: 1252 - protein, 1169 aa, Homo sapien [sequence omitted]

SEQ ID NO: 1253 - DNA, 667 bp, Homo sapien
cgtgcaccctgagccggagctgcccagtcgccgcgggaccggggccgctggggtctggacgggggtcgccatgatccgctttatcctcatccagaaccgggcaggcaagacgcgcctggccaagtggtacatgcagtttgatgatgatgagaaacagaagctgatcgaggaggtgcatgccgtggtcaccgtccgagacgccaaacacaccaactttgtggaggtcttaaacgaatatttccacaatgtctgtgaactggacctggtgttcaacttctacaaggtttacacggtcgtggacgagatgttcctggctggcgaaatccgagagaccagccagacgaaggtgctgaaacagctgctgatgctacagtccctggagtgagggcaggcgagcaccccaccccggccccggcccctcctggaatcgcctgctcgcttccccttcccaggcccgtggccaacccagcagtccttccctcaactgcctaggaggaagggacccagctgggtctgggccacaagggaggagacttcaccccacttcctctgggccctggctgtgggcagaggccaccgtgtgtgtcccgagtaaccgtgccgttgtcgtgtgattccataagcgtctgtgcgtggagtccccaataaacctgtggtcctgcctggc

SEQ ID NO: 1254 - protein, 104 aa, Homo sapien
MIRFILIQNRAGKTRLAKWYMQFDDDEKQKLIEEVHAVVTVRDAKHTNFVEVLNEYFHNVCELDLVFNFYKVYTVVDEMFLAGEIRETSQTKVLKQLLMLQSLE

SEQ ID NO: 1255 - DNA, 810 bp, Homo sapien
agcagaggggctgagaccaaaccagaaacctccaattctcatgtggaagcccatgccctcaccctccaacatgaaagcctctgcagcacttctgtgtctgctgctcacagcagctgctttcagcccccaggggcttgctcagccagttgggattaatacttcaactacctgctgctacagatttatcaataagaaaatccctaagcagaggctggagagctacagaaggaccaccagtagccactgtccccgggaagctgtaatcttcaagaccaaactggacaaggagatctgtgctgaccccacacagaagtgggtccaggactttatgaagcacctggacaagaaaacccaaactccaaagctttgaacattcatgactgaactaaaaacaagccatgacttgagaaacaaataatttgtataccctgtcctttctcagagtggttctgagattattttaatctaattctaaggaatatgagctttatgtaataatgtgaatcatggtttttcttagtagattttaaaagttattaatattttaatttaatcttccatggattttggtgggttttgaacataaagccttggatgtatatgtcatctcagtgctgtaaaaactgtgggatgctcctcccttctctacctcatgggggtattgtataagtccttgcaagaatcagtgcaaagatttgctttaattgttaagatatgatgtccctatggaagcatattgttattatataattacatatttgcatatgtatgactcccaaattttcacataaaatagatttttgtaaaaaa

SEQ ID NO: 1256 - protein, 99 aa, Homo sapien
MKASAALLCLLLTAAAFSPQGLAQPVGINTSTTCCYRFINKKIPKQRLESYRRTTSSHCPREAVIFKTKLDKEICADPTQKWVQDFMKHLDKKTQTPKL

SEQ ID NO: 1257 - DNA, 2789 bp, Homo sapien
gggggagccatgaggcgccagcctgcgaaggtggcggcgctgctgctcgggctgctcttggagtgcacagaagccaaaaagcattgctggtatttcgaaggactctatccaacctattatatatgccgctcctacgaggactgctgtggctccaggtgctgtgtgcgggccctctccatacagaggctgtggtacttctggttccttctgatgatgggcgtgcttttctgctgcggagccggcttcttcatccggaggcgcatgtaccccccgccgctgatcgaggagccagccttcaatgtgtcctacaccaggcagcccccaaatcccggcccaggagcccagcagccggggccgccctattacactgacccaggaggaccggggatgaaccctgtcgggaattccacggcaatggctttccaggtcccacccaactcaccccaggggagtgtggcctgcccgccccctccagcctactgcaacacgcctccgcccccgtacgaacaggtagtgaaggccaagtagtggggtgcccacgtgcaagaggagagacaggagagggcctttccctggcctttctgtcttcgttgatgttcacttccaggaacggtctcgtgggctgctaagggcagttcctctgatatcctcacagcaagcacagctctctttcaggctttccatggagtacaatatatgaactcacactttgtctcctctgttgcttctgtttctgacgcagtctgtgctctcacatggtagtgtggtgacagtccccgagggctgacgtccttacggtggcgtgaccagatctacaggagagagactgagaggaagaaggcagtgctggaggtgcaggtggcatgtagaggggccaggccgagcatcccaggcaagcatccttctgcccgggtattaataggaagccccatgccgggcggctcagccgatgaagcagcagccgactgagctgagcccagcaggtcatctgctccagcctgtcctctcgtcagccttcctcttccagaagctgttggagagacattcaggagagagcaagccccttgtcatgtttctgtctctgttcatatcctaaagatagacttctcctgcaccgccagggaaggatagcacgtgcagctctcaccgcaggatggggcctagaatcaggcttgccttggaggcctgacagtgatctgacatccactaagcaaatttatttaaattcatgggaaatcacttcctgccccaaactgagacattgcattttgtgagctcttggtctgatttggagaaaggactgttacccatttttttggtgtgtttatggaagtgcatgtagagcgtcctgccctttgaaatcagactgggtgtgtgtcttccctggacatcactgcctctccagggcattctcaggcccgggggtctccttccctcaggcagctccagtggtgggttctgaagggtgctttcaaaacggggcacatctggccgggaagtcacatggactcttccagggagagagaccagctgaggcgtctctctctgaggttgtgttgggtctaagcgggtgtgtgctgggctccaaggaggaggagcttgctgggaaaagacaggagaagtactgactcaactgcactgaccatgttgtcataattagaataaagaagaagtggtcggaaatgcacattcctggataggaatcacagctcaccccaggatctcacaggtagtctcctgagtagttgacggctagcggggagctagttccgccgcatagttatagtgttgatgtgtgaacgctgacctgtcctgtgtgctaagagctatgcagcttagctgaggcgcctagattactagatgtgctgtatcacggggaatgaggtgggggtgcttattttttaatgaactaatcagagcctcttgagaaattgttactcattgaactggagcatcaagacatctcatggaagtggatacggagtgatttggtgtccatgcttttcactctgaggacatttaatcggagaacctcctggggaattttgtgggagacacttgggaacaaaacagacaccctgggaatgcagttgcaagcacagatgctgccaccagtgtctctgaccaccctggtgtgactgctgactgccagcgtggtacctcccatgctgcaggcctccatctaaatgagacaacaaagcacaatgttcactgtttacaaccaagacaactgcgtgggtccaaacactcctcttcctccaggtcatttgttttgcatttttaatgtctttattttttgtaatgaaaaagcacactaagctgcccctggaatcgggtgcagctgaataggcacccaaaagtccgtgactaaattccgtttgtctttttgatagcaaattatgttaagagacagtgatggctagggctcaacaattttgtattcccatgtttgtgtgagacagagtttgttttcccttgaacttggttagaattgtgctactgtgaacgctgatcctgcatatggaagtcccactttggtgacatttcctggccattcttgtttccattgtgtggatggtgggttgtgcccacttcctggagtgagacagctcctggtgtgtagaattcccggagcgtccgtggttcagagtaaacttgaagcagatctgtgcatgcttttcctctgcagcaattggctcgtttctcttttttgttctcttttgataggatcctgtttcctatgtgtgcaaaataaaaataaatttgggcaaaaaaaaaaaaaaaaaaaa

SEQ ID NO: 1258 - protein, 172 aa, Homo sapien
MRRQPAKVAALLLGLLLECTEAKKHCWYFEGLYPTYYICRSYEDCCGSRCCVRALSIQRLWYFWFLLMMGVLFCCGAGFFIRRRMYPPPLIEEPAFNVSYTRQPPNPGPGAQQPGPPYYTDPGGPGMNPVGNSTAMAFQVPPNSPQGSVACPPPPAYCNTPPPPYEQVVKAK

SEQ ID NO: 1259 - DNA, 3250 bp, Homo sapien
ccaacttatttaaaacaaaacaattttgtaggtattattatacccatttcacagatgatgataaatgagaccaatagaagttaaataacttgccaaaggccacacagctggtgagtgatggagaacgaattaaaactcaagtgagcataattctaaaagccatcttctcgttagtgtttctcactatccaggtctgcctttgccttatttaactgaagttaagccatccttacctgtgatcacctagcctctcagtttggggggatcattacagcgggtttttaactcccaatgttctggtccagtttgctttacatgttcttatttatacattgtcaaggatgacctcaggacagtacagcaaggacacagtggcacttcacattttgttcccacgaaatgactggggcataatctcagatcatcttcctttagaatgtggaaacatcagcagaagaatattagtctttatacaagtcaaatccaaaatgacacatgtgaaaactaatagagctgactttcagccatgatagctttggcacacctcacatccctttgttcaacctctcttccctcaacggagagctgcattcctgggaatttctgttgtgcacttttcccacttgccctgctgtcatttaaaggtgaacattctagttttgctaagaaaaccctttccttcatttggaatgaacagcaattttattacttttgaccttaaaatgagtttgctgccttcaaatcttttcagcgccttcatcacgctctgcttcggggcgatcttcttcctgccagactcctccaagctgctcagcggggtcctgttccactccagccccgccttgcagccggccgccgaccacaagcccgggcccggggcgcgcgccgaggacgcggccgaggggcgagcccggcgccgcgaggagggggcacccggggacccggaggccgccctggaggacaacttggccaggatccgcgaaaaccacgagcgggctctcagggaagccaaggagaccctgcagaagctgcccgaggagatccaaagagacatcctactggagaagaagaaggtggcccaggaccagctgcgtgacaaggcgccgttcagaggcctgcccccggtggacttcgtgcccccaatcggggtggagagccgggagcccgccgacgccgccatccgcgagaaaagggcaaagatcaaagagatgatgaaacatgcttggaataattataaaggttatgcctggggattaaatgaactcaaacctatatcaaaaggaggccattcaagcagtttgtttggtaacatcaaaggagcaactatagtagatgccctggatacactttttattatggaaatgaaacatgaatttgaagaagcaaaatcatgggttgaagaaaatttagattttaatgtgaatgctgaaatttctgtctttgaagtaaatatacgctttgttggtggactactctcagcctactatctgtctggagaagagatttttcgaaagaaagcagtggaacttggggtaaaattgctacctgcatttcatactccctctggaataccttgggcattgctgaatatgaaaagtggtattggaaggaactggccctgggcctctggaggcagcagtattctggcagaatttggaaccctgcatttggagtttatgcacttgagccacttatcaggaaaccccatctttgctgaaaaggtaatgaatattcgaacagtactgaacaaactggaaaaaccacaaggcctttatcctaactatctgaatcccagtagtggacagtggggtcaacatcatgtatcagttggaggacttggagacagcttctatgagtatttgctgaaggcctggttaatgtctgacaagacagatctggaagctaagaagatgtattttgatgctgttcaggctatcgagactcatttgatccgcaagtctagcagcggactaacttatatcgcagagtggaaaaggggcctcctggagcacaagatgggccacctgacctgcttcgcggggggcatgttcgcactcggggctgatgcagctcccgaaggcatggcccaacactaccttgaactcggggctgaaattgcccgtacttgtcatgaatcatataatcgaacatttatgaaactgggaccagaagctttcagatttgatggtggtgttgaagccatcgctacaagacaaaatgaaaaatactacatcttacggccagaagttatggagacttacatgtatatgtggagactgactcatgatccaaagtacaggaaatgggcctgggaagccgtagaggccttggaaaaccattgcagagtgaatggaggctattcaggcctaagggatgtttaccttcttcatgagagttatgatgatgtgcagcagagtttcttcctggcagagacattgaaatatttgtacctaatattttctgacgacgatcttcttccactggagcattggatcttcaatagcgaggcacatcttctccctatcctccctaaagataaaaaggaagttgaaatcagagaggaataaaaaagacatttatattttattctgctccattcccttcactgtataccttaataattccttttctggtaatcaggcacatgatgaactttgattagtaggtctgtgattaagttcttaaattgttttgcagtcttttatgtttattatcataggtataggtggacctaaattccttatcatatctttattaattcagccagtgtatccaccagttttttgtttatgtttttaagtaacctattatctctggatttcatgaaggtgtaatatcgtttttgttaaactgaatagaattgtatagcgatgacctcttaattataatttgatttgactgcaaaactttttcctcctctaagaggagatgatgtctgctttaagctgtaatgttttgccatgttgcaaaaagccataataataagtataaaaaagctttttcctttacaatttcatgttaatctggtttgtctgtccaccagagacagatcttctgtgacagcctccttatgcaggtctatcattatttgatagaatgtcttctaaaatacttcactcacattgtaattcaaattagaaagtcattccaaaaggtcatgtcatgttgacctcatttcatcggaactgcagtatatttttgttggttaattatattagtgttttctattttgaaaaaaaaaaaaaaaaaa

SEQ ID NO: 1260 - protein, 625 aa, Homo sapien [sequence omitted]

SEQ ID NO: 1261 - DNA, 5153 bp, Homo sapien
gggcgcagaggaggaaagggagcaggcgcagggggactggaaaggcagcatgcgctcgccaggagcaacctcggcgcccagggtctgaggctgcagccccagttcgccattgtgagccgccgccgggggagtccgctagcgcagccgtgcccccgagtccccgtccgcgcagcgatggggcacctgcccacggggatacacggcgcccgccgcctcctgcctctgctctggctctttgtgctgttcaagaatgctacagctttccatgtaactgtccaagatgataataacatcgttgtctcattagaagcttcagacgtcatcagtccagcatctgtgtatgttgtgaagataactggtgaatccaaaaattatttcttcgaatttgaggaattcaacagcactttgcctcctcctgttattttcaaggccagttatcatggcctttattatataatcactctggtagtggtaaatggaaatgtggtgaccaagccatccagatcaatcactgtgttaacaaaacctctacctgtaaccagtgtttccatatatgactataaaccttctcctgaaacaggagtcctgtttgaaatacattatccagaaaaatataacgttttcacaagagtgaacattagctactgggaaggtaaagacttccggacaatgctatataaagatttctttaagggaaaaacagtatttaatcactggctgccaggaatgtgttatagtaatatcacctttcagctggtatctgaggcaacttttaataaaagtacccttgttgagtacagtggtgtcagtcacgaacccaaacagcacagaactgccccttatccacctcaaaatatttccgttcgtatcgtaaacttgaacaaaaacaactgggaagaacagagtggcaatttcccagaagaatccttcatgagatcacaagatacaataggaaaagaaaaactcttccattttacagaagaaacccctgaaattccctcgggcaacatttcttccggttggcctgattttaatagcagtgactatgaaactacgtctcagccatattggtgggacagtgcatctgcagctcctgaaagtgaagatgaatttgtcagcgtacttcccatggaatacgaaaataacagtacactcagtgagacagagaagtcaacatcaggctctttctcctttttccctgtgcaaatgatattgacctggttaccacccaaaccacccactgcttttgatgggttccatatccatattgaacgagaagagaactttactgaatatttgatggtggatgaagaagcacatgaatttgttgcagaactgaaggaacctgggaaatataagttatctgtgacaacctttagttcctcaggatcttgtgaaactcgaaaaagtcagtcagcaaaatcactcagcttttatatcagtccttcaggagagtggattgaagaactgaccgagaagccgcagcacgtgagtgtccacgttttaagctcaaccactgccttgatgtcctggacatcttcccaagagaactacaacagcaccattgtgtctgtggtgtcgctgacctgccagaaacaaaaggagagccagaggcttgaaaagcagtactgcactcaggtgaactcaagcaaacctattattgaaaatctggttcctggtgcccagtaccaggttgtaatatacctaaggaaaggccctttgattggaccaccttcagatcctgtgacatttgctattgttcccacaggaataaaggatttaatgctctatcctttgggtcctacggccgtggttctgagctggaccagaccttatttaggcgtgttcagaaaatacgtggttgaaatgttttatttcaaccctgctacaatgacatcagagtggaccacctactatgaaatagcagcaactgtttccttaactgcatccgtgagaatagctaatctgctgccagcatggtactacaacttccgggttaccatggtgacgtggggagatccagaattgagctgctgtgacagctctaccatcagcttcataacagccccagtggctccggaaatcacttctgtggaatatttcaacagtctgttatatatcagttggacatatggggatgatacaacggacttgtcccattctagaatgcttcactggatggtggttgcagaaggaaaaaagaaaattaaaaagagtgtaacacgcaatgtcatgactgcaattctcagcttgcctccaggcgacatctataacctctcagtaactgcttgtactgaaagaggaagtaatacctccatgctccgccttgtcaagctagaaccagctccacccaaatcactcttcgcagtgaacaaaacccagacttcagtgactttgctgtgggtggaagagggagtagctgatttctttgaagttttctgtcaacaagttggctccagtcagaaaaccaaacttcaggaaccagttgctgtttcttcccatgtcgtgaccatctccagccttcttcctgccactgcctacaattgtagtgtcaccagctttagccatgacagccccagtgtccctacgttcatagccgtctcaacaatggttacagagatgaatcccaatgtggtagtgatctccgtgctggccatccttagcacacttttaattggactgttgcttgttaccctcattattcttaggaaaaagcatctgcagatggctagggagtgtggagctggtacatttgtcaattttgcatccttagagagggatggaaagcttccatacaactggcgtaggagtatatttgctttcttaaccctgctaccctcatgtctttggactgattatcttttggcattttatattaatccttggagtaaaaatggtttaaagaagaggaaactgacaaacccggttcaactggatgactttgatgcctatattaaggatatggccaaagactctgactataaattttctcttcagtttgaggagttgaaattgattggactggatatcccacactttgctgcagatcttccactgaatcgatgtaaaaaccgttacacaaacatcctaccatatgacttcagccgtgtgagattagtctccatgaatgaagaggaaggtgcagactacatcaatgccaactatattcctggatacaactcaccccaggagtatattgccacccaggggccactgcctgaaaccagaaatgacttctggaagatggtcctgcaacaaaagtctcagattattgtcatgctcactcagtgtaatgagaaaaggagggtgaaatgtgaccattactggccattcacggaagaacctatagcctatggagacatcactgtggagatgatttcagaggaagagcaggacgactgggcctgtagacacttccggatcaactatgctgacgagatgcaggatgtgatgcattttaactacactgcatggcctgatcatggtgtgcccacagcaaatgctgcagaaagtatcctgcagtttgtacacatggtccgacagcaagctaccaagagcaaaggtcccatgatcattcactgcagtgctggcgtgggacggacaggaacattcattgccctggacaggctcttgcagcacattcgggatcatgagtttgttgacatcttagggctggtgtcagaaatgaggtcataccggatgtctatggtacagacagaggagcagtacatttttatccatcagtgtgtgcaactgatgtggatgaagaagaagcagcagttctgcatcagtgatgtcatatacgagaatgttagcaagtcctagttcagaatccggagcagagaggacatgatgtgcgcccatcctcccttgcttccagattgttttagtgggccctgatggtcatttttctaaacagaggccctgctttgtaatatgtggccaaggagataatttatctcacagaagcaccgggaagacttagccttaaagagcctacagtgtccttttggactctttcacttcgggacatttaataatggaccaaattcaacagaacaccaggaaggtcaagacgctctccaaagggcaggaagtacagcacttccgaagagtttagttggccctttgctggttgggctgagttttttatttttaagtgtttgtttttcagtgcaataatttttgtgtgtgtgtgattcttatcagaaagttgaattgttttctgcctacaccgttcatcagccccataacccaggaaggaacaggcattgttagcatcagattatacctcattattaaaaggaggcatggccacacatgaagaaatggtcattctacttcaaagaaattgagccagcactatctgtactccaacattaccggatctggattggggaggttggtcagggaagagaggggttctacccacagatcaactgtgtaatcttttactattcaagctataattcagcttcaaagtagagtagaaaaaaaattgtcttaactgttctagttcttgatggttttcttccttattaacagttggtgtttcttccttggcccttttggactaatgttactgtccaagttctttctcaagaaaccacatctggttcagaagagtgtcaagttggactctttgaactctgttgctgtctgagcaatcgtggtgcctagactttgcattccttgttctgttgacctgcatacatgtgagagctatttctttaagaactatataggctgtgaaaacgcactttctttcccccaaagagctgggaatttatgaagttatggcaatgaactgcagcatgctgggacaattatttgactacttttttttgtaatattgtcaaatgtctctatggattctgacagagatttctttttgttttgttattcttttggttgtcagtttcattttaacgagtgtaactagtaacattttattctttggattttgtataattacagtacatgattgtgtattgtgacatgaatgctgtcaaaatgacattgatggcattgtgaagcctgttactttgtgtcacttcctgataaataagaggtgatgacatggatatacaacagaaaacactttgagttgaaagtaaacacaagctggctgcttccctgtggcaactgtggct

SEQ ID NO: 1262 - protein, 1216 aa, Homo sapien
MGHLPTGIHGARRLLPLLWLFVLFKNATAFHVTVQDDNNIVVSLEASDVISPASVYVVKITGESKNYFFEFEEFNSTLPPPVIFKASYHGLYYIITLVVVNGNVVTKPSRSITVLTKPLPVTSVSIYDYKPSPETGVLFEIHYPEKYNVFTRVNISYWEGKDFRTMLYKDFFKGKTVFNHWLPGMCYSNITFQLVSEATFNKSTLVEYSGVSHEPKQHRTAPYPPQNISVRIVNLNKNNWEEQSGNFPEESFMRSQDTIGKEKLFHFTEETPEIPSGNISSGWPDFNSSDYETTSQPYWWDSASAAPESEDEFVSVLPMEYENNSTLSETEKSTSGSFSFFPVQMILTWLPPKPPTAFDGFHIHIEREENFTEYLMVDEEAHEFVAELKEPGKYKLSVTTFSSSGSCETRKSQSAKSLSFYISPSGEWIEELTEKPQHVSVHVLSSTTALMSWTSSQENYNSTIVSVVSLTCQKQKESQRLEKQYCTQVNSSKPIIENLVPGAQYQVVIYLRKGPLIGPPSDPVTFAIVPTGIKDLMLYPLGPTAVVLSWTRPYLGVFRKYVVEMFYFNPATMTSEWTTYYEIAATVSLTASVRIANLLPAWYYNFRVTMVTWGDPELSCCDSSTISFITAPVAPEITSVEYFNSLLYISWTYGDDTTDLSHSRMLHWMVVAEGKKKIKKSVTRNVMTAILSLPPGDIYNLSVTACTERGSNTSMLRLVKLEPAPPKSLFAVNKTQTSVTLLWVEEGVADFFEVFCQQVGSSQKTKLQEPVAVSSHVVTISSLLPATAYNCSVTSFSHDSPSVPTFIAVSTMVTEMNPNVVVISVLAILSTLLIGLLLVTLIILRKKHLQMARECGAGTFVNFASLERDGKLPYNWRRSIFAFLTLLPSCLWTDYLLAFYINPWSKNGLKKRKLTNPVQLDDFDAYIKDMAKDSDYKFSLQFEELKLIGLDIPHFAADLPLNRCKNRYTNILPYDFSRVRLVSMNEEEGADYINANYIPGYNSPQEYIATQGPLPETRNDFWKMVLQQKSQIIVMLTQCNEKRRVKCDHYWPFTEEPIAYGDITVEMISEEEQDDWACRHFRINYADEMQDVMHFNYTAWPDHGVPTANAAESILQFVHMVRQQATKSKGPMIIHCSAGVGRTGTFIALDRLLQHIRDHEFVDILGLVSEMRSYRMSMVQTEEQYIFIHQCVQLMWMKKKQQFCISDVIYENVSKS

SEQ ID NO: 1263 - DNA, 1638 bp, Homo sapien
ggacaaccggctggggtccttgcgcgccgcggctcagggaggagcaccgactgcgccgcaccctgagagatggttggtgccatgtggaaggtgattgtttcgctggtcctgttgatgcctggcccctgtgatgggctgtttcgctccctatacagaagtgtttccatgccacctaagggagactcaggacagccattatttctcaccccttacattgaagctgggaagatccaaaaaggaagagaattgagtttggtcggccctttcccaggactgaacatgaagagttatgccggcttcctcaccgtgaataagacttacaacagcaacctcttcttctggttcttcccagctcagatacagccagaagatgccccagtagttctctggctacagggtgggccgggaggttcatccatgtttggactctttgtggaacatgggccttatgttgtcacaagtaacatgaccttgcgtgacagagacttcccctggaccacaacgctctccatgctttacattgacaatccagtgggcacaggcttcagttttactgatgatacccacggatatgcagtcaatgaggacgatgtagcacgggatttatacagtgcactaattcagtttttccagatatttcctgaatataaaaataatgacttttatgtcactggggagtcttatgcagggaaatatgtgccagccattgcacacctcatccattccctcaaccctgtgagagaggtgaagatcaacctgaacggaattgctattggagatggatattctgatcccgaatcaattatagggggctatgcagaattcctgtaccaaattggcttgttggatgagaagcaaaaaaagtacttccagaagcagtgccatgaatgcatagaacacatcaggaagcagaactggtttgaggcctttgaaatactggataaactactagatggcgacttaacaagtgatccttcttacttccagaatgttacaggatgtagtaattactataactttttgcggtgcacggaacctgaggatcagctttactatgtgaaatttttgtcactcccagaggtgagacaagccatccacgtggggaatcagacttttaatgatggaactatagttgaaaagtacttgcgagaagatacagtacagtcagttaagccatggttaactgaaatcatgaataattataaggttctgatctacaatggccaactggacatcatcgtggcagctgccctgacagagcgctccttgatgggcatggactggaaaggatcccaggaatacaagaaggcagaaaaaaaagtttggaagatctttaaatctgacagtgaagtggctggttacatccggcaagtgggtgacttccatcaggtaattattcgaggtggaggacatattttaccctatgaccagcctctgagagcttttgacatgattaatcgattcatttatggaaaaggatgggatccttatgttggataaactaccttcccaaaagagaacatcagaggttttcattgctgaaaagaaaatcgtaaaaacagaaaatgtcataggaataaaaaaattatcttttcatatctgcaagatttttttcatcaataaaaattatccttgaaa

SEQ ID NO: 1264 - protein, 476 aa, Homo sapien [sequence omitted]

SEQ ID NO: 1265 - DNA, 5176 bp, Homo sapien
ctccggcgcccgctctgcccgccgctgggtccgaccgcgctcgccttccttgcagccgcgcctcggccccatggacgccctgtgcggttccggggagctcggctccaagttctgggactccaacctgtctgtgcacacagaaaacccggacctcactccctgcttccagaactccctgctggcctgggtgccctgcatctacctgtgggtcgccctgccctgctacttgctctacctgcggcaccattgtcgtggctacatcatcctctcccacctgtccaagctcaagatggtcctgggtgtcctgctgtggtgcgtctcctgggcggaccttttttactccttccatggcctggtccatggccgggcccctgcccctgttttctttgtcacccccttggtggtgggggtcaccatgctgctggccaccctgctgatacagtatgagcggctgcagggcgtacagtcttcgggggtcctcattatcttctggttcctgtgtgtggtctgcgccatcgtcccattccgctccaagatccttttagccaaggcagagggtgagatctcagaccccttccgcttcaccaccttctacatccactttgccctggtactctctgccctcatcttggcctgcttcagggagaaacctccatttttctccgcaaagaatgtcgaccctaacccctaccctgagaccagcgctggctttctctcccgcctgtttttctggtggttcacaaagatggccatctatggctaccggcatcccctggaggagaaggacctctggtccctaaaggaagaggacagatcccagatggtggtgcagcagctgctggaggcatggaggaagcaggaaaagcagacggcacgacacaaggcttcagcagcacctgggaaaaatgcctccggcgaggacgaggtgctgctgggtgcccggcccaggccccggaagccctccttcctgaaggccctgctggccaccttcggctccagcttcctcatcagtgcctgcttcaagcttatccaggacctgctctccttcatcaatccacagctgctcagcatcctgatcaggtttatctccaaccccatggccccctcctggtggggcttcctggtggctgggctgatgttcctgtgctccatgatgcagtcgctgatcttacaacactattaccactacatctttgtgactggggtgaagtttcgtactgggatcatgggtgtcatctacaggaaggctctggttatcaccaactcagtcaaacgtgcgtccactgtgggggaaattgtcaacctcatgtcagtggatgcccagcgcttcatggaccttgcccccttcctcaatctgctgtggtcagcacccctgcagatcatcctggcgatctacttcctctggcagaacctaggtccctctgtcctggctggagtcgctttcatggtcttgctgattccactcaacggagctgtggccgtgaagatgcgcgccttccaggtaaagcaaatgaaattgaaggactcgcgcatcaagctgatgagtgagatcctgaacggcatcaaggtgctgaagctgtacgcctgggagcccagcttcctgaagcaggtggagggcatcaggcagggtgagctccagctgctgcgcacggcggcctacctccacaccacaaccaccttcacctggatgtgcagccccttcctggtgaccctgatcaccctctgggtgtacgtgtacgtggacccaaacaatgtgctggacgccgagaaggcctttgtgtctgtgtccttgtttaatatcttaagacttcccctcaacatgctgccccagttaatcagcaacctgactcaggccagtgtgtctctgaaacggatccagcaattcctgagccaagaggaacttgacccccagagtgtggaaagaaagaccatctccccaggctatgccatcaccatacacagtggcaccttcacctgggcccaggacctgccccccactctgcacagcctagacatccaggtcccgaaaggggcactggtggccgtggtggggcctgtgggctgtgggaagtcctccctggtgtctgccctgctgggagagatggagaagctagaaggcaaagtgcacatgaagggctccgtggcctatgtgccccagcaggcatggatccagaactgcactcttcaggaaaacgtgcttttcggcaaagccctgaaccccaagcgctaccagcagactctggaggcctgtgccttgctagctgacctggagatgctgcctggtggggatcagacagagattggagagaagggcattaacctgtctgggggccagcggcagcgggtcagtctggctcgagctgtttacagtgatgccgatattttcttgctggatgacccactgtccgcggtggactctcatgtggccaagcacatctttgaccacgtcatcgggccagaaggcgtgctggcaggcaagacgcgagtgctggtgacgcacggcattagcttcctgccccagacagacttcatcattgtgctagctgatggacaggtgtctgagatgggcccgtacccagccctgctgcagcgcaacggctcctttgccaactttctctgcaactatgcccccgatgaggaccaagggcacctggaggacagctggaccgcgttggaaggtgcagaggataaggaggcactgctgattgaagacacactcagcaaccacacggatctgacagacaatgatccagtcacctatgtggtccagaagcagtttatgagacagctgagtgccctgtcctcagatggggagggacagggtcggcctgtaccccggaggcacctgggtccatcagagaaggtgcaggtgacagaggcgaaggcagatggggcactgacccaggaggagaaagcagccattggcactgtggagctcagtgtgttctgggattatgccaaggccgtggggctctgtaccacgctggccatctgtctcctgtatgtgggtcaaagtgcggctgccattggagccaatgtgtggctcagtgcctggacaaatgatgccatggcagacagtagacagaacaacacttccctgaggctgggcgtctatgctgctttaggaattctgcaagggttcttggtgatgctggcagccatggccatggcagcgggtggcatccaggctgcccgtgtgttgcaccaggcactgctgcacaacaagatacgctcgccacagtccttctttgacaccacaccatcaggccgcatcctgaactgcttctccaaggacatctatgtcgttgatgaggttctggcccctgtcatcctcatgctgctcaattccttcttcaacgccatctccactcttgtggtcatcatggccagcacgccgctcttcactgtggtcatcctgcccctggctgtgctctacaccttagtgcagcgcttctatgcagccacatcacggcaactgaagcggctggaatcagtcagccgctcacctatctactcccacttttcggagacagtgactggtgccagtgtcatccgggcctacaaccgcagccgggattttgagatcatcagtgatactaaggtggatgccaaccagagaagctgctacccctacatcatctccaaccggtggctgagcatcggagtggagttcgtggggaactgcgtggtgctctttgctgcactatttgccgtcatcgggaggagcagcctgaacccggggctggtgggcctttctgtgtcctactccttgcaggtgacatttgctctgaactggatgatacgaatgatgtcagatttggaatctaacatcgtggctgtggagagggtcaaggagtactccaagacagagacagaggcgccctgggtggtggaaggcagccgccctcccgaaggttggcccccacgtggggaggtggagttccggaattattctgtgcgctaccggccgggcctagacctggtgctgagagacctgagtctgcatgtgcacggtggcgagaaggtggggatcgtgggccgcactggggctggcaagtcttccatgaccctttgcctgttccgcatcctggaggcggcaaagggtgaaatccgcattgatggcctcaatgtggcagacatcggcctccatgacctgcgctctcagctgaccatcatcccgcaggaccccatcctgttctcggggaccctgcgcatgaacctggaccccttcggcagctactcagaggaggacatttggtgggctttggagctgtcccacctgcacacgtttgtgagctcccagccggcaggcctggacttccagtgctcagagggcggggagaatctcagcgtgggccagaggcagctcgtgtgcctggcccgagccctgctccgcaagagccgcatcctggttttagacgaggccacagctgccatcgacctggagactgacaacctcatccaggctaccatccgcacccagtttgatacctgcactgtcctgaccatcgcacaccggcttaacactatcatggactacaccagggtcctggtcctggacaaaggagtagtagctgaatttgattctccagccaacctcattgcagctagaggcatcttctacgggatggccagagatgctggacttgcctaaaatatattcctgagatttcctcctggcctttcctggttttcatcaggaaggaaatgacaccaaatatgtccgcagaatggacttgatagcaaacactgggggcaccttaagattttgcacctgtaaagtgccttacagggtaactgtgctgaatgctttagatgaggaaatgatccccaagtggtgaatgacacgcctaaggtcacagctagtttgagccagttagactagtcccccggtctcccgattcccaactgagtgttatttgcacactgcactgttttcaaataacgattttatgaaatgacctctgtcctccctctgatttttcatattttcctaaagtttcgtttctgttttttaataaaaagctttttcctcctggaacagaagacagctgctgggtcaggccacccctaggaactcagtcctgtactctggggtgctgcctgaatccattaaaaatgggagtactgatgaaataaaactacatggtcaacagtaaaaaaaaaaaaaaaaaaa

SEQ ID NO: 1266 - protein, 1527 aa, Homo sapien
MDALCGSGELGSKFWDSNLSVHTENPDLTPCFQNSLLAWVPCIYLWVALPCYLLYLRHHCRGYIILSHLSKLKMVLGVLLWCVSWADLFYSFHGLVHGRAPAPVFFVTPLVVGVTMLLATLLIQYERLQGVQSSGVLIIFWFLCVVCAIVPFRSKILLAKAEGEISDPFRFTTFYIHFALVLSALILACFREKPPFFSAKNVDPNPYPETSAGFLSRLFFWWFTKMAIYGYRHPLEEKDLWSLKEEDRSQMVVQQLLEAWRKQEKQTARHKASAAPGKNASGEDEVLLGARPRPRKPSFLKALLATFGSSFLISACFKLIQDLLSFINPQLLSILIRFISNPMAPSWWGFLVAGLMFLCSMMQSLILQHYYHYIFVTGVKFRTGIMGVIYRKALVITNSVKRASTVGEIVNLMSVDAQRFMDLAPFLNLLWSAPLQIILAIYFLWQNLGPSVLAGVAFMVLLIPLNGAVAVKMRAFQVKQMKLKDSRIKLMSEILNGIKVLKLYAWEPSFLKQVEGIRQGELQLLRTAAYLHTTTTFTWMCSPFLVTLITLWVYVYVDPNNVLDAEKAFVSVSLFNILRLPLNMLPQLISNLTQASVSLKRIQQFLSQEELDPQSVERKTISPGYAITIHSGTFTWAQDLPPTLHSLDIQVPKGALVAVVGPVGCGKSSLVSALLGEMEKLEGKVHMKGSVAYVPQQAWIQNCTLQENVLFGKALNPKRYQQTLEACALLADLEMLPGGDQTEIGEKGINLSGGQRQRVSLARAVYSDADIFLLDDPLSAVDSHVAKHIFDHVIGPEGVLAGKTRVLVTHGISFLPQTDFIIVLADGQVSEMGPYPALLQRNGSFANFLCNYAPDEDQGHLEDSWTALEGAEDKEALLIEDTLSNHTDLTDNDPVTYVVQKQFMRQLSALSSDGEGQGRPVPRRHLGPSEKVQVTEAKADGALTQEEKAAIGTVELSVFWDYAKAVGLCTTLAICLLYVGQSAAAIGANVWLSAWTNDAMADSRQNNTSLRLGVYAALGILQGFLVMLAAMAMAAGGIQAARVLHQALLHNKIRSPQSFFDTTPSGRILNCFSKDIYVVDEVLAPVILMLLNSFFNAISTLVVIMASTPLFTVVILPLAVLYTLVQRFYAATSRQLKRLESVSRSPIYSHFSETVTGASVIRAYNRSRDFEIISDTKVDANQRSCYPYIISNRWLSIGVEFVGNCVVLFAALFAVIGRSSLNPGLVGLSVSYSLQVTFALNWMIRMMSDLESNIVAVERVKEYSKTETEAPWVVEGSRPPEGWPPRGEVEFRNYSVRYRPGLDLVLRDLSLHVHGGEKVGIVGRTGAGKSSMTLCLFRILEAAKGEIRIDGLNVADIGLHDLRSQLTIIPQDPILFSGTLRMNLDPFGSYSEEDIWWALELSHLHTFVSSQPAGLDFQCSEGGENLSVGQRQLVCLARALLRKSRILVLDEATAAIDLETDNLIQATIRTQFDTCTVLTIAHRLNTIMDYTRVLVLDKGVVAEFDSPANLIAARGIFYGMARDAGLA

SEQ ID NO: 1267 - DNA, 2416 bp, Homo sapien
cgatttcattcctcgctccccacaggtccctctccccaaaatattcccatcttgtcctagcccatcccccagactatctcaaggaccagctgtccccacgcccccgacctccactaggcctgtgccacccgctgcctgcaggaagacgcccggtcccgggccgggttagccccatgggaacgcagcgcctgtgtggccgcgggactcaaggctggcctggctcaagtgaacagcacgtccaggaggcgacctcgtccgcgggtttgcattctggggtggacgagctgggggttcggtccgagcccggtgggaggctcccggagcgcagcctgggcccagcccaccccgcgccggcggccatggcaggcaccctggacctggacaagggctgcacggtggaggagctgctccgcgggtgcatcgaagccttcgatgactccgggaaggtgcgggacccgcagctggtgcgcatgttcctcatgatgcacccctggtacatcccctcctctcagctggcggccaagctgctccacatctaccaacaatcccggaaggacaactccaattccctgcaggtgaaaacgtgccacctggtcaggtactggatctccgccttcccagcggagtttgacttgaacccggagttggctgagcagatcaaggagctgaaggctctgctagaccaagaagggaaccgacggcacagcagcctaatcgacatagacagcgtccctacctacaagtggaagcggcaggtgactcagcggaaccctgtgggacagaaaaagcgcaagatgtccctgttgtttgaccacctggagcccatggagctggcggagcatctcacctacttggagtatcgctccttctgcaagatcctgtttcaggactatcacagtttcgtgactcatggctgcactgtggacaaccccgtcctggagcggttcatctccctcttcaacagcgtctcacagtgggtgcagctcatgatcctcagcaaacccacagccccgcagcgggccctggtcatcacacactttgtccacgtggcggagaagctgctacagctgcagaacttcaacacgctgatggcagtggtcgggggcctgagccacagctccatctcccgcctcaaggagacccacagccacgttagccctgagaccatcaagctctgggagggtctcacggaactagtgacggcgacaggcaactatggcaactaccggcgtcggctggcagcctgtgtgggcttccgcttcccgatcctgggtgtgcacctcaaggacctggtggccctgcagctggcactgcctgactggctggacccagcccggacccggctcaacggggccaagatgaagcagctctttagcatcctggaggagctggccatggtgaccagcctgcggccaccagtacaggccaaccccgacctgctgagcctgctcacggtgtctctggatcagtatcagacggaggatgagctgtaccagctgtccctgcagcgggagccgcgctccaagtcctcgccaaccagccccacgagttgcaccccaccaccccggcccccggtactggaggagtggacctcggctgccaaacccaagctggatcaggccctcgtggtggagcacatcgagaagatggtggagtctgtgttccggaactttgacgtcgatggggatggccacatctcacaggaagaattccagatcatccgtgggaacttcccttacctcagcgcctttggggacctcgaccagaaccaggatggctgcatcagcagggaggagatggtttcctatttcctgcgctccagctctgtgttgggggggcgcatgggcttcgtacacaacttccaggagagcaactccttgcgccccgtcgcctgccgccactgcaaagccctgatcctgggcatctacaagcagggcctcaaatgccgagcctgtggagtgaactgccacaagcagtgcaaggatcgcctgtcagttgagtgtcggcgcagggcccagagtgtgagcctggaggggtctgcaccctcaccctcacccatgcacagccaccatcaccgcgccttcagcttctctctgccccgccctggcaggcgaggctccaggcctccagagatccgtgaggaggaggtacagacggtggaggatggggtgtttgacatccacttgtaatagatgctgtggttggatcaaggactcattcctgccttggagaaaatacttcaaccagagcagggagcctgggggtgtcggggcaggaggctggggatgggggtgggatatgagggtggcatgcagctgagggcagggccagggctggtgtccctaaggttgtacagactcttgtgaatatttgtattttccagatggaataaaaaggcccgtgtaattaaccttca

SEQ ID NO: 1268 - protein, 671 aa, Homo sapien
MGTQRLCGRGTQGWPGSSEQHVQEATSSAGLHSGVDELGVRSEPGGRLPERSLGPAHPAPAAMAGTLDLDKGCTVEELLRGCIEAFDDSGKVRDPQLVRMFLMMHPWYIPSSQLAAKLLHIYQQSRKDNSNSLQVKTCHLVRYWISAFPAEFDLNPELAEQIKELKALLDQEGNRRHSSLIDIDSVPTYKWKRQVTQRNPVGQKKRKMSLLFDHLEPMELAEHLTYLEYRSFCKILFQDYHSFVTHGCTVDNPVLERFISLFNSVSQWVQLMILSKPTAPQRALVITHFVHVAEKLLQLQNFNTLMAVVGGLSHSSISRLKETHSHVSPETIKLWEGLTELVTATGNYGNYRRRLAACVGFRFPILGVHLKDLVALQLALPDWLDPARTRLNGAKMKQLFSILEELAMVTSLRPPVQANPDLLSLLTVSLDQYQTEDELYQLSLQREPRSKSSPTSPTSCTPPPRPPVLEEWTSAAKPKLDQALVVEHIEKMVESVFRNFDVDGDGHISQEEFQIIRGNFPYLSAFGDLDQNQDGCISREEMVSYFLRSSSVLGGRMGFVHNFQESNSLRPVACRHCKALILGIYKQGLKCRACGVNCHKQCKDRLSVECRRRAQSVSLEGSAPSPSPMHSHHHRAFSFSLPRPGRRGSRPPEIREEEVQTVEDGVFDIHL

SEQ ID NO: 1269 - DNA, 2075 bp, Homo sapien
gccataaaggccgccgcgcgcccacgcgcctcgcttgctgcgcgctgccggcgctccttcctcctcggctcgcgtctcactcagtgtaccttctagtcccgccatggccgctctcacccgggacccccagttccagaagctgcagcaatggtaccgcgagcaccgctccgagctgaacctgcgccgcctcttcgatgccaacaaggaccgcttcaaccacttcagcttgaccctcaacaccaaccatgggcatatcctggtggattactccaagaacctggtgacggaggacgtgatgcggatgctggtggacttggccaagtccaggggcgtggaggccgcccgggagcggatgttcaatggtgagaagatcaactacaccgagggtcgagccgtgctgcacgtggctctgcggaaccggtcaaacacacccatcctggtagacggcaaggatgtgatgccagaggtcaacaaggttctggacaagatgaagtctttctgccagcgtgtccggagcggtgactggaaggggtacacaggcaagaccatcacggacgtcatcaacattggcattggcggctccgacctgggacccctcatggtgactgaagcccttaagccatactcttcaggaggtccccgcgtctggtatgtctccaacattgatggaactcacattgccaaaaccctggcccagctgaaccccgagtcctccctgttcatcattgcctccaagacctttactacccaggagaccatcacgaatgcagagacggcgaaggagtggtttctccaggcggccaaggatccttctgcagtggcgaagcactttgttgccctgtctactaacacaaccaaagtgaaggagtttggaattgaccctcaaaacatgttcgagttctgggattgggtgggaggacgctactcgctgtggtcggccatcggactctccattgccctgcacgtgggttttgacaacttcgagcagctgctctcgggggctcactggatggaccagcacttccgcacgacgcccctggagaagaacgcccccgtcttgctggccctgctgggtatctggtacatcaactgctttgggtgtgagacacacgccatgctgccctatgaccagtacctgcaccgctttgctgcgtacttccagcagggcgacatggagtccaatgggaaatacatcaccaaatctggaacccgtgtggaccaccagacaggccccattgtgtggggggagccagggaccaatggccagcatgctttttaccagctcatccaccaaggcaccaagatgataccctgtgacttcctcatcccggtccagacccagcaccccatacggaagggtctgcatcacaagatcctcctggccaacttcttggcccagacagaggccctgatgaggggaaaatcgacggaggaggcccgaaaggagctccaggctgcgggcaagagtccagaggaccttgagaggctgctgccacataaggtctttgaaggaaatcgcccaaccaactctattgtgttcaccaagctcacaccattcatgcttggagccttggtcgccatgtatgagcacaagatcttcgttcagggcatcatctgggacatcaacagctttgaccagtggggagtggagctgggaaagcagctggctaagaaaatagagcctgagcttgatggcagtgctcaagtgacctctcacgacgcttctaccaatgggctcatcaacttcatcaagcagcagcgcgaggccagagtccaataaactcgtgctcatctgcagcctcctctgtgactcccctttctcttctcgtccctcctccccggagccggcactgcatgttcctggacaccacccagagcaccctctggttgtgggcttggaccacgagcccttagcagggaaggctggtctcccccagcctaacccccagcccctccatgtctatgctccctctgtgttagaattggctgaagtgtttttgtgcagctgacttttctgacccatgttcacgttgttcacatcccatgtagaaaaataaagatgccacggaggaggt

SEQ ID NO: 1270 - protein, 558 aa, Homo sapien
MAALTRDPQFQKLQQWYREHRSELNLRRLFDANKDRFNHFSLTLNTNHGHILVDYSKNLVTEDVMRMLVDLAKSRGVEAARERMFNGEKINYTEGRAVLHVALRNRSNTPILVDGKDVMPEVNKVLDKMKSFCQRVRSGDWKGYTGKTITDVINIGIGGSDLGPLMVTEALKPYSSGGPRVWYVSNIDGTHIAKTLAQLNPESSLFIIASKTFTTQETITNAETAKEWFLQAAKDPSAVAKHFVALSTNTTKVKEFGIDPQNMFEFWDWVGGRYSLWSAIGLSIALHVGFDNFEQLLSGAHWMDQHFRTTPLEKNAPVLLALLGIWYINCFGCETHAMLPYDQYLHRFAAYFQQGDMESNGKYITKSGTRVDHQTGPIVWGEPGTNGQHAFYQLIHQGTKMIPCDFLIPVQTQHPIRKGLHHKILLANFLAQTEALMRGKSTEEARKELQAAGKSPEDLERLLPHKVFEGNRPTNSIVFTKLTPFMLGALVAMYEHKIFVQGIIWDINSFDQWGVELGKQLAKKIEPELDGSAQVTSHDASTNGLINFIKQQREARVQ

SEQ ID NO: 1271 - DNA, 1556 bp, Homo sapien
ccaaattattgtatctcacagtgtggggaaaaggaagagagatcagattgttactgtgtctgtgtagaaagaagtagacataggagactccattttgttatgtactaagaaaaattcttctgccttgagattctgttaatctataaccttaccccccaaccccgtgctctctgaaacatgtgctgtgtcctctcagaattgcctgttttttgtgctcctccgagctcgctgttcgtccgggttttttacgttttaatttccaggacttgaactgccatgtcctctgaagaaggaaagctcttcgtgggagggctcaactttaacaccgacgagcaggcactggaagaccacttcagcagtttcggacctatctctgaggtggtcgttgtcaaggaccgggagactcagcggtccaggggttttggtttcatcaccttcaccaacccagagcatgcttcagttgccatgagagccatgaacggagagtctctggatggtcgtcagatccgtgtggatcatgcaggcaagtctgctcggggaaccagaggaggtggctttggggcccatgggcgtggtcgcagctactctagaggtggtggggaccagggctatgggagtggcaggtattatgacagtcgacctggagggtatggatatggatatggacgttccagagactataatggcagaaaccagggtggttatgaccgctactcaggaggaaattacagagacaattatgacaactgaaatgagacatgcacataatatagatacacaaggaataatttctgatccaggatcgtccttccaaatggctgtatttataaaggtttttggagctgcactgaagcatcttattttatagtatatcaaccttttgtttttaaattgacctgccaaggtagctgaagaccttttagacagttcccatctttttttttaaattttttctgcctatttaaagacaaattatgggacgtttgtagaacctgagtatttttctttttaccagttttttagtttgagctcttaggtttattggagctagcaataattggttctggcaagtttggccagactgacttcaaaaaattaatgtgtatccagggacattttaaaacctgtacacagtgtttattgtggttaggaagcaatttcccaatgtacctataagaaatgtgcatcaagccagcctgaccaacatggtgaaaccccatctgtactaaacataaaaaaattagcctggcatggtggtgtacgcctgtaatcccagtgacttgggaggctgaggcaggagaatcgcttgaacccgggaggcggaggttgcagtgagctaagatcgcgccactgtactccagcctggacaacagcgagagctccatctcaaaaaaaaaaggaaatgtgtatcaagaacatgattatccagcggtattttctaattcagatcatcaaactgattatatagaagagttggctttaaaatgtttgcaaatgtcgatgttgagaatggtatttcttcagttttattttaggatttctatagtttgatgatc

SEQ ID NO: 1272 - protein, 157 aa, Homo sapien
MSSEEGKLFVGGLNFNTDEQALEDHFSSFGPISEVVVVKDRETQRSRGFGFITFTNPEHASVAMRAMNGESLDGRQIRVDHAGKSARGTRGGGFGAHGRGRSYSRGGGDQGYGSGRYYDSRPGGYGYGYGRSRDYNGRNQGGYDRYSGGNYRDNYDN

SEQ ID NO: 1273 - DNA, 629 bp, Homo sapien
tgggagggagccatgaagcattacgaggtggagattctggacgcaaagacaagggagaagctgtgtttcttcgccgcgtggatggcctattacatcaatcaccctctctacactccccctacctacggagctcagcaggtgaaactggcgctcgccatctttgtgatctgccagctcggcaacttctccatccacatggccctgcgggacctgcggcccgctgggtccaagacgcggaagatcccataccccaccaagaaccccttcacgtggctcttcctgctggtgtcctgccccaactgcacctacgaggtggggtcctggatcggtttcgccatcatgacgcagtgtctcccagtggccctgttctccctggtgggcttcacccagatgaccatctgggccaagggcaagcaccgcagctacctgaaggagttccgggactacccgcccctgcgcatgcccatcatccccttcctgctctgagcagctcacccctgctgaggctcagcccctcaacccggtggcattctgggggaggagtggggcccacagctctccagcacccggaataaagcccgcctgtccccagtcggaacaaaaaaaaaaaaaaaaaaaaaaaaaaaaaa

SEQ ID NO: 1274 - protein, 157 aa, Homo sapien
MKHYEVEILDAKTREKLCFFAAWMAYYINHPLYTPPTYGAQQVKLALAIFVICQLGNFSIHMALRDLRPAGSKTRKIPYPTKNPFTWLFLLVSCPNCTYEVGSWIGFAIMTQCLPVALFSLVGFTQMTIWAKGKHRSYLKEFRDYPPLRMPIIPFLL

SEQ ID NO: 1275 - DNA, 1940 bp, Homo sapien
acccagggtccggcctgcgccttcccgccaggcctggacactggttcaacacctgtgacttcatgtgtgcgcgccggccacacctgcagtcacacctgtagccccctctgccaagagatccataccgaggcagcgtcggtggctacaagccctcagtccacacctgtggacacctgtgacacctggccacacgacctgtggccgcggcctggcgtctgctgcgacaggagcccttacctcccctgttataacacctgacagccacctaactgcccctgcagaaggagcaatggccttggctcctgagaggtaagagcccggcccaccctctccagatgccagtccccgagcgccctgcagccggccctgactctccgcggccgggcacccgcagggcagccccacgcgtgctgttcggagagtggctccttggagagatcagcagcggctgctatgaggggctgcagtggctggacgaggcccgcacctgtttccgcgtgccctggaagcacttcgcgcgcaaggacctgagcgaggccgacgcgcgcatcttcaaggcctgggctgtggcccgcggcaggtggccgcctagcagcaggggaggtggcccgccccccgaggctgagactgcggagcgcgccggctggaaaaccaacttccgctgcgcactgcgcagcacgcgtcgcttcgtgatgctgcgagataactcgggggacccggccgacccgcacaaggtgtacgcgctcagccgggagctgtgctggcgagaaggcccaggcacggaccagactgaggcagaggcccccgcagctgtcccaccaccacagggtgggcccccagggccattcctggcacacacacatgctggactccaagccccaggccccctccctgccccagctggtgacgagggggacctcctgctccaggcagtgcaacagagctgcctggcagaccatctgctgacagcgtcatggggggcagatccagtcccaaccaaggctcctggagagggacaagaagggcttcccctgactggggcctgtgctggaggcccagggctccctgctggggagctgtacgggtgggcagtagagacgacccccagccccgggccccagcccgcggcactaacgacaggcgaggccgcggccccagagtccccgcaccaggcagagccgtacctgtcaccctccccaagcgcctgcaccgcggtgcaagagcccagcccaggggcgctggacgtgaccatcatgtacaagggccgcacggtgctgcagaaggtggtgggacacccgagctgcacgttcctatacggccccccagacccagctgtccgggccacagacccccagcaggtagcattccccagccctgccgagctcccggaccagaagcagctgcgctacacggaggaactgctgcggcacgtggcccctgggttgcacctggagcttcgggggccacagctgtgggcccggcgcatgggcaagtgcaaggtgtactgggaggtgggcggccccccaggctccgccagcccctccaccccagcctgcctgctgcctcggaactgtgacacccccatcttcgacttcagagtcttcttccgagagctggtggaattccgggcacggcagcgccgtggctccccacgctataccatctacctgggcttcgggcaggacctgtcagctgggaggcccaaggagaagagcctggtcctggtgaagctggaaccctggctgtgccgagtgcacctagagggcacgcagcgtgagggtgtgtcttccctggatagcagcagcctcagcctctgcctgtccagcgccaacagcctctatgacgacatcgagtgcttccttatggagctggagcagcccgcctagaacccagtctaatgagaactccagaaagctggagcagcccacctagagctggcc

SEQ ID NO: 1276 - protein, 516 aa, Homo sapien
MPVPERPAAGPDSPRPGTRRAAPRVLFGEWLLGEISSGCYEGLQWLDEARTCFRVPWKHFARKDLSEADARIFKAWAVARGRWPPSSRGGGPPPEAETAERAGWKTNFRCALRSTRRFVMLRDNSGDPADPHKVYALSRELCWREGPGTDQTEAEAPAAVPPPQGGPPGPFLAHTHAGLQAPGPLPAPAGDEGDLLLQAVQQSCLADHLLTASWGADPVPTKAPGEGQEGLPLTGACAGGPGLPAGELYGWAVETTPSPGPQPAALTTGEAAAPESPHQAEPYLSPSPSACTAVQEPSPGALDVTIMYKGRTVLQKVVGHPSCTFLYGPPDPAVRATDPQQVAFPSPAELPDQKQLRYTEELLRHVAPGLHLELRGPQLWARRMGKCKVYWEVGGPPGSASPSTPACLLPRNCDTPIFDFRVFFRELVEFRARQRRGSPRYTIYLGFGQDLSAGRPKEKSLVLVKLEPWLCRVHLEGTQREGVSSLDSSSLSLCLSSANSLYDDIECFLMELEQPA

SEQ ID NO: 1277 - DNA, 1854 bp, Homo sapien
actgatgtcttgactcatgggtgtattcacaaattctgttacttcaagtctttttcttttaacggattgatcttttgctagatagagacaaaatatcagtgtgaattacagcaaacccctattccatgctgttatgggtgaaactctgggagattctcctattgacccagaaagcgattccttcactgatacactgtctgcaaacatatcacaagaaatgaccatggttgacacagagatgccattctggcccaccaactttgggatcagctccgtggatctctccgtaatggaagaccactcccactcctttgatatcaagcccttcactactgttgacttctccagcatttctactccacattacgaagacattccattcacaagaacagatccagtggttgcagattacaagtatgacctgaaacttcaagagtaccaaagtgcaatcaaagtggagcctgcatctccaccttattattctgagaagactcagctctacaataagcctcatgaagagccttccaactccctcatggcaattgaatgtcgtgtctgtggagataaagcttctggatttcactatggagttcatgcttgtgaaggatgcaagggtttcttccggagaacaatcagattgaagcttatctatgacagatgtgatcttaactgtcggatccacaaaaaaagtagaaataaatgtcagtactgtcggtttcagaaatgccttgcagtggggatgtctcataatgccatcaggtttgggcggatgccacaggccgagaaggagaagctgttggcggagatctccagtgatatcgaccagctgaatccagagtccgctgacctccgggccctggcaaaacatttgtatgactcatacataaagtccttcccgctgaccaaagcaaaggcgagggcgatcttgacaggaaagacaacagacaaatcaccattcgttatctatgacatgaattccttaatgatgggagaagataaaatcaagttcaaacacatcacccccctgcaggagcagagcaaagaggtggccatccgcatctttcagggctgccagtttcgctccgtggaggctgtgcaggagatcacagagtatgccaaaagcattcctggttttgtaaatcttgacttgaacgaccaagtaactctcctcaaatatggagtccacgagatcatttacacaatgctggcctccttgatgaataaagatggggttctcatatccgagggccaaggcttcatgacaagggagtttctaaagagcctgcgaaagccttttggtgactttatggagcccaagtttgagtttgctgtgaagttcaatgcactggaattagatgacagcgacttggcaatatttattgctgtcattattctcagtggagaccgcccaggtttgctgaatgtgaagcccattgaagacattcaagacaacctgctacaagccctggagctccagctgaagctgaaccaccctgagtcctcacagctgtttgccaagctgctccagaaaatgacagacctcagacagattgtcacggaacacgtgcagctactgcaggtgatcaagaagacggagacagacatgagtcttcacccgctcctgcaggagatctacaaggacttgtactagcagagagtcctgagccactgccaacatttcccttcttccagttgcactattctgagggaaaatctgacacctaagaaatttactgtgaaaaagcgttttaaaaagaaaaggatttagaatatgatctattttatgcatattgtttataaagacacatttacaatttacttttaatattaaaaattaccatattatgaaattgc

SEQ ID NO: 1278 - protein, 505 aa, Homo sapien
MGETLGDSPIDPESDSFTDTLSANISQEMTMVDTEMPFWPTNFGISSVDLSVMEDHSHSFDIKPFTTVDFSSISTPHYEDIPFTRTDPVVADYKYDLKLQEYQSAIKVEPASPPYYSEKTQLYNKPHEEPSNSLMAIECRVCGDKASGFHYGVHACEGCKGFFRRTIRLKLIYDRCDLNCRIHKKSRNKCQYCRFQKCLAVGMSHNAIRFGRMPQAEKEKLLAEISSDIDQLNPESADLRALAKHLYDSYIKSFPLTKAKARAILTGKTTDKSPFVIYDMNSLMMGEDKIKFKHITPLQEQSKEVAIRIFQGCQFRSVEAVQEITEYAKSIPGFVNLDLNDQVTLLKYGVHEIIYTMLASLMNKDGVLISEGQGFMTREFLKSLRKPFGDFMEPKFEFAVKFNALELDDSDLAIFIAVIILSGDRPGLLNVKPIEDIQDNLLQALELQLKLNHPESSQLFAKLLQKMTDLRQIVTEHVQLLQVIKKTETDMSLHPLLQEIYKDLY

SEQ ID NO: 1279 - DNA, 9027 bp, Homo sapien
gcggcccaggcggggtgcgagtggcgcagtcggagcccgttgcggcccctgaggaagcgaggaggcgtcggcgtcggctgaggcgggcggaccggcgaggcgaggcggcggccccaggcccgagggactcgggagctcgagcagcggcggcggcaagacctctccccctcggaggcggcgggcggaggcggcgggagcggtggtgccccccccgggcacggggccatgtacaacgggatcgggctgccgacgccccggggcagcggcaccaacggctacgtccagcgcaacctgtccctggtgcggggccgccggggtgagcggcctgactacaagggagaggaggaactgcggcgcctggaggctgccctggtgaagcggcctaatcctgacatcctggaccacgagcgcaagcggcgcgtcgagctgcgatgcctcgagctggaggagatgatggaagagcaggggtacgaggaacagcaaattcaggaaaaagtggcgacctttcgactcatgttgctggagaaggatgtgaaccctgggggcaaggaggagaccccagggcagaggccagcggtcacggagactcaccagttggcagaattaaatgagaagaagaatgaaagactccgtgctgcctttggcatcagtgattcttacgtagatggcagctcttttgatcctcagcgtcgtgcccgagaagctaaacaaccagctcctgagcctcccaaaccttacagccttgttcgggagtctagcagttctcgctcaccaaccccaaagcagaagaagaagaaaaagaagaaagatagaggacgcaggtcagagagcagctctcctcgacgggagagaaagaaaagctcaaagaagaagaagcacaggtcagaatctgagtccaagaaacgtaagcataggtctcccactccaaagagcaaacgtaaatctaaggacaaaaagcgaaagcggtctcgaagtacaacaccagcccccaagagccgccgggcccaccgttcaacttctgctgactctgcttcctcctccgatacttcccgcagtcggtctcgaagtgctgcagctaaaactcatacaactgccttggctgggcgaagtccttcccctgcttcagggcgacgcggggagggagatgcgcctttcagtgaaccaggtactaccagcacacaacggcctagtagcccggagactgctacgaaacagcctagcagcccttatgaagacaaagataaagacaagaaggagaaatctgcaactcgacctagcccctctccggaaaggagcagcacaggcccagaaccacctgctcccactccgctccttgctgagcgacatggcggctccccacaaccccttgcaaccacccccttaagccaggagccagtgaaccccccatctgaggcctctccaactcgggaccgttcaccacctaagtctcccgagaaacttccccagtcttcttcctcagagagcagcccaccatcccctcaacctaccaaagtttctcggcatgccagctcttccccagaaagtcctaaacctgctccagctccagggtcccaccgagagatttcttcttctcccacatctaagaatcgctcacatggccgagcaaaacgggataaatcacattctcataccccctcccgtaggatggggaggtcccgtagccctgccaccgctaagagagggcgatctcggtctcgaacccctaccaagagaggtcattctcgatcccgatctccccagtggcgtaggtccaggtctgcacagaggtggggaagatctagaagcccccagcgacgtggccgctctaggtctcctcagcgaccaggctggtctaggagcagaaatacccagagaagaggcaggtctaggtcagcaaggcgagggaggtcccactctagatccccagccactaggggtagatctcgttctagaacaccagcccgccggggcaggtcccgctctagaacacctgccaggcggagatcacgatccagaactcccaccaggcgtaggtctcggtctagaacaccagcccggaggggcaggtctcggtctagaacacctgctaggcgcagatctaggacccgatcaccagtacgacgcaggtctcgtagtagatcaccagccaggagaagtggcaggtcacgctctagaaccccagctagacgtggccgctcacgctccagaaccccagccagacgtggccgctcacgctctagaaccccagctagacgcagtggtcgctcacgctccagaacaccagccaggagagggaggtctcggtctaggacaccaagacgaggaagatcccgcagtagaagcttagttagacgtggaagatctcactctagaacacctcaaagaagaggcagatctggctcatcttcagagcggaaaaacaaatccagaacatctcaaagaagaagcaggtccaattcaagcccagaaatgaagaaatctcgcatttcttcaaggcggagcaggtctctctcttcaccacggtccaaagcaaaatctcgcttgtctttgaggcgcagcctttcagggtcttccccatgccctaagcaaaagtcacagacaccacccaggcgcagtcgctctggatcctcccaacctaaagctaaatctagaacgccacccagacgcagtcgctccagttcttctccgccacctaaacagaaatctaagacaccatcaagacaaagtcattccagttcatctcctcatcctaaagtgaaatctggaacaccaccgaggcaagggtccataacaagtccccaggccaatgagcaatctgtaacgccacagagacggagctgttttgaatcatcacctgaccctgagttgaaatctaggaccccttctagacatagctgctcagggtcctctcctcctagagtgaaatctagcacacctcccagacagagcccatctaggtcatcatctccacaacccaaagtgaaggcaataatatcaccaagacaaagaagccattctggctcctcttctccaagtcctagtagggtgacgtcgagaacaactccacggcgaagcagatcagtatctccctgctccaatgtggaatccagattgttgccaagatacagtcattctgggtcctcctcaccagataccaaagtgaaacctgaaacaccgccaagacaaagtcactcagggtctatttcaccataccccaaagtaaaggcccaaactccaccggggccaagtctttctggatcaaagtcaccatgtccccaagagaagtctaaagactcactagttcaaagttgccctggatccctctctctctgtgcaggagtaaaatctagcacaccaccaggcgagagctattttggtgtctcatctctgcaactgaaaggacaatctcaaacttcaccagaccacagatctgatacttcaagtccagaagtgagacagagtcattcagaatcaccatctctgcagagcaaatctcaaacatcacctaagggaggtcggtccaggtcttcatctccagtcactgagctggcatccagatctccaataagacaagatagaggtgagttctcagcgagtcctatgttgaaatctggaatgtctcctgagcagagcaggttccagtctgactcttcttcatatcctacagtggactcgaattctctcttggggcagagtagattggagactgctgaatcaaaagagaaaatggccttaccccctcaggaggatgctactgcatcacctcctagacagaaagacaaatttagtccctttccagtacaggataggcctgagtcttcactggtattcaaagacacacttagaaccccgccaagagaaagaagtggtgctgggtcatctccagaaacaaaagagcaaaatagtgcattgcctacgtcaagccaagatgaagagttaatggaggtggtagagaagtctgaagaacccgcaggccaaatcctgtctcatttgtcttcagaacttaaagaaatgtccacaagtaactttgaatcatctcctgaagtagaagaaaggcctgctgtgtctttgactcttgatcagagccagtcacaggcttctttggaagcagtagaagtcccttcaatggcctcatcttggggtgggccacatttttctccagaacataaagaactgtctaactccccactcagggagaacagctttggatcacctttagaatttagaaactcaggcccacttggtacagaaatgaatactggattttcttctgaggttaaagaagatttgaatggaccgtttcttaatcagctggaaacagatccatctctagacatgaaagaacaatcgacaagatcctctggacacagcagttctgagttatccccagatgcagtggaaaaggcagggatgtcttcaaatcagagcatctcttcacctgtgcttgatgctgtacccagaacaccctcgagagaaagaagtagttctgcatcttctcctgaaatgaaagatggtttacccagaactccatcaaggagaagcaggtctgggtcttctccaggacttagagatgggtctgggactccctcgaggcacagcctgtctgggtcctctcctggaatgaaagatatacctagaacgccatttagagggagaagcgaatgtgattcttccccagaaccgaaagctttgcctcagactcctaggccgaggagtcgttctccatcatccccagagctcaacaacaagtgtcttaccccccagagagaaagaagcgggtcagaatcatcagttgatcagaaaactgtggctcggactcccctggggcagagaagtcgttcgggatcctctcaagaacttgatgtgaaacccagtgcatcccctcaggaaagaagtgagtcagactcttctccagattctaaagccaagacacgaaccccacttcggcagaggagtcggtctggatcatctccagaggttgacagcaaatctcgactatcccctcggcgcagtaggtctggttcctcccctgaagtgaaagataagccaagagcagcacccagggcacagagtggttctgattcctctcctgaacctaaagctccagcccctcgggcccttcccagacgaagcagatcaggttcatcaagcaaaggcagaggcccttctcctgaaggaagcagcagtaccgagtcctctcctgaacatccgcccaaatccagaactgctcgcagaggttccaggtcatcaccagagcccaagaccaagtctcgtacaccacctcgacgtcgcagctctcgatcatctccggagctaacaaggaaggccagactgtcccgtagaagccgctctgcctcatcctcaccagaaactcgctctagaactcccccaaggcaccggagaagtccctcagtgtcttccccggagccagccgaaaaatcgaggtcttcacgccgacggcgctcagcttcatctccacgcactaagacaacctcaaggagaggccgctctccttcgccaaagcctcgtggactccagaggtcccgttcccgctcaaggagagagaaaacaagaacaacccgacgtcgagataggtctggatcttctcagtcaacctctcggcgaagacagcggagccggtcaaggtcgcgggttactcggcggcggaggggaggctctggttatcactcaaggtcacctgcccggcaggaaagttcccggacctcctctcgacgccgaagaggccgctctcggacacccccaaccagtcggaagcgttctcgctcacgcacatcaccagccccgtggaaacgctctagatctcgagcctctccagccactcaccggcgatccaggtccagaacccccctgataagccgacgtaggtccagatctcgaacttcaccagtcagccggagacggtcaaggtccaggacttcagtgactcgacgaagatcccggtcaagagcatccccagtgagcagaaggcgatccagatccagaacgccaccagtaacccgccgtcgttcaaggtctagaacgccaacaacacgccgccgctcccgttctagaactccaccagtgactcgcagaaggtccagatccaggactccaccagtaaccaggaggcgatctcgaagcagaacttcgcctatcactcgcagaagatcaagatccagaacatctccggtcacccgaaggagatctcgatctcgcacatctccagtaactcgaagaaggtcccgctctcgaacctcaccagtgacacgccgccgctctaggtcccggacacctccagctattcggcgccgctctagatctcgaacgccactgttaccacgcaaacgttctcgaagtcgctcaccacttgctatccgccgccgctccagatcccgtactccacgaacagctcggggtaaacggtccttaacaagatctcctccagccatccgcaggcgttctgcatctggaagtagttctgatcgttcacgatctgctactcctccagcaacaagaaatcattctggttcacggacacctccagtagcactcaacagttccagaatgagctgcttcagtcgtcctagcatgtccccaacacctcttgatcgctgcagatcacctggaatgcttgaaccccttggcagctctagaacacccatgtctgtcctgcagcaagccggcggctccatgatggatggtccaggtccccgaatacctgaccaccagagaacatctgtgccagaaaatcatgctcagtccaggattgcacttgccctgacagctatcagtcttggcaccgctcggcctcctccgtccatgtctgctgctggccttgctgcaagaatgtcccaggttccagccccggtgcctctcatgagtctcagaaccgcaccagcagccaaccttgccagcaggattcctgcagcctctgcggcagccatgaacctagccagcgccaggacacctgccattccaacagcagtgaacctggctgactctcgaacgccagctgcagcagcggccatgaacttggccagccccagaacagcggtggcaccttcggctgtgaacctggctgaccctcgcactcccacagccccagctgtgaacctagcaggggccagaaccccagctgccttggcagctctgagtctcacaggctctggcacaccaccaactgctgcaaactatccctccagctccagaacaccacaggctccagcctctgcaaacctggtgggtcctcggtctgcacatgccacagctcctgtgaatattgccggctccagaaccgccgcagccttggcccccgcgagcctcaccagtgctaggatggctccagcattgtctggtgcaaacctcaccagccccagggtgcccctttctgcctacgagcgtgtcagtggcagaacctcaccaccgctccttgaccgagctaggtccagaacaccaccgtctgccccaagccaatctaggatgacctctgaacgggctccctccccttcctctagaatgggccaggctccttcacagtctcttctccctccagcacaggatcagccgaggtctcctgtgccttctgctttttcagaccaatcccgttgtttgattgcccagaccacccctgtagcagggtctcagtccctttcctctggggcagtggcaacgaccacgtcctctgctggtgatcacaatggcatgctctctgtccctgcccctggggtgccccactctgatgtgggggagccacctgcctctactggggcccagcagccttctgcattagccgccctgcagccagcaaaggagcggcggagttcctcctcgtcgtcgtcgtcctctagctcctcctcctcttcatcatcgtcgtcgtcgtcctcctcctcctctggctccagttctagtgactcagagggctctagccttcctgtgcaacctgaggtggcactgaagagggtccccagccccaccccagccccaaaggaggctgttcgagagggacgtcctccggagccaaccccagccaaacggaagaggcgctctagcagttccagttccagctcctcctcttcatcttcctcctcctcctcctcctcctcttcttcctcctcctcttcctcttcttcttcttcctcctcatcttcctcctcctcgtcgtcttcctccccttcccctgctaagcctggccctcaggccttgcccaaacctgcaagccccaagaagccaccccctggcgagcggaggtcccgcagcccccggaagccaatagactccctcagggactctcggtccctcagctactcgcctgtggagcgtcgccgtccctcgccccagccctcaccacgggaccagcagagcagcagcagtgagcggggttcccggagaggccagcgtggggacagccgctcccccagccacaagcgcaggagggagacacctagccctcggcccatgagacaccgctcctccaggtctccataaattgtctttgggggattccaccacacccaatgctctggagccacaaggagtgtcccttcttccccagcagagccgtgggagggtccttgtctgctctcctttgaaccttggcagcccttggatggagggctccctttccctccccttttttttttctttgttcctgtgaaatgttaatctccgtgagttcttcctggttcatgtgttctggggggtttggggtgggagggaatgcagatgggagttgggggaggggaggatacagttcaggataccccagcctggagtcagggccagggaggcatggccccacttgtatccagaagttcccaggggtgattgtgatggtggttgggactggaggttgtataaggtgttcttggaaggaaggggcaggagttggaattagttggtccctactgtcccccatgaggttgtgaacccctccccccaacttttcatgtttcttaaaggcattttggttttttaaaatctgtacagcaagagcaactttttctgtcaaataaaaatgagaaatgcagg

SEQ ID NO: 1280 - protein, 2752 aa, Homo sapien
MYNGIGLPTPRGSGTNGYVQRNLSLVRGRRGERPDYKGEEELRRLEAALVKRPNPDILDHERKRRVELRCLELEEMMEEQGYEEQQIQEKVATFRLMLLEKDVNPGGKEETPGQRPAVTETHQLAELNEKKNERLRAAFGISDSYVDGSSFDPQRRAREAKQPAPEPPKPYSLVRESSSSRSPTPKQKKKKKKKDRGRRSESSSPRRERKKSSKKKKHRSESESKKRKHRSPTPKSKRKSKDKKRKRSRSTTPAPKSRRAHRSTSADSASSSDTSRSRSRSAAAKTHTTALAGRSPSPASGRRGEGDAPFSEPGTTSTQRPSSPETATKQPSSPYEDKDKDKKEKSATRPSPSPERSSTGPEPPAPTPLLAERHGGSPQPLATTPLSQEPVNPPSEASPTRDRSPPKSPEKLPQSSSSESSPPSPQPTKVSRHASSSPESPKPAPAPGSHREISSSPTSKNRSHGRAKRDKSHSHTPSRRMGRSRSPATAKRGRSRSRTPTKRGHSRSRSPQWRRSRSAQRWGRSRSPQRRGRSRSPQRPGWSRSRNTQRRGRSRSARRGRSHSRSPATRGRSRSRTPARRGRSRSRTPARRRSRSRTPTRRRSRSRTPARRGRSRSRTPARRRSRTRSPVRRRSRSRSPARRSGRSRSRTPARRGRSRSRTPARRGRSRSRTPARRSGRSRSRTPARRGRSRSRTPRRGRSRSRSLVRRGRSHSRTPQRRGRSGSSSERKNKSRTSQRRSRSNSSPEMKKSRISSRRSRSLSSPRSKAKSRLSLRRSLSGSSPCPKQKSQTPPRRSRSGSSQPKAKSRTPPRRSRSSSSPPPKQKSKTPSRQSHSSSSPHPKVKSGTPPRQGSITSPQANEQSVTPQRRSCFESSPDPELKSRTPSRHSCSGSSPPRVKSSTPPRQSPSRSSSPQPKVKAIISPRQRSHSGSSSPSPSRVTSRTTPRRSRSVSPCSNVESRLLPRYSHSGSSSPDTKVKPETPPRQSHSGSISPYPKVKAQTPPGPSLSGSKSPCPQEKSKDSLVQSCPGSLSLCAGVKSSTPPGESYFGVSSLQLKGQSQTSPDHRSDTSSPEVRQSHSESPSLQSKSQTSPKGGRSRSSSPVTELASRSPIRQDRGEFSASPMLKSGMSPEQSRFQSDSSSYPTVDSNSLLGQSRLETAESKEKMALPPQEDATASPPRQKDKFSPFPVQDRPESSLVFKDTLRTPPRERSGAGSSPETKEQNSALPTSSQDEELMEVVEKSEEPAGQILSHLSSELKEMSTSNFESSPEVEERPAVSLTLDQSQSQASLEAVEVPSMASSWGGPHFSPEHKELSNSPLRENSFGSPLEFRNSGPLGTEMNTGFSSEVKEDLNGPFLNQLETDPSLDMKEQSTRSSGHSSSELSPDAVEKAGMSSNQSISSPVLDAVPRTPSRERSSSASSPEMKDGLPRTPSRRSRSGSSPGLRDGSGTPSRHSLSGSSPGMKDIPRTPFRGRSECDSSPEPKALPQTPRPRSRSPSSPELNNKCLTPQRERSGSESSVDQKTVARTPLGQRSRSGSSQELDVKPSASPQERSESDSSPDSKAKTRTPLRQRSRSGSSPEVDSKSRLSPRRSRSGSSPEVKDKPRAAPRAQSGSDSSPEPKAPAPRALPRRSRSGSSSKGRGPSPEGSSSTESSPEHPPKSRTARRGSRSSPEPKTKSRTPPRRRSSRSSPELTRKARLSRRSRSASSSPETRSRTPPRHRRSPSVSSPEPAEKSRSSRRRRSASSPRTKTTSRRGRSPSPKPRGLQRSRSRSRREKTRTTRRRDRSGSSQSTSRRRQRSRSRSRVTRRRRGGSGYHSRSPARQESSRTSSRRRRGRSRTPPTSRKRSRSRTSPAPWKRSRSRASPATHRRSRSRTPLISRRRSRSRTSPVSRRRSRSRTSVTRRRSRSRASPVSRRRSRSRTPPVTRRRSRSRTPTTRRRSRSRTPPVTRRRSRSRTPPVTRRRSRSRTSPITRRRSRSRTSPVTRRRSRSRTSPVTRRRSRSRTSPVTRRRSRSRTPPAIRRRSRSRTPLLPRKRSRSRSPLAIRRRSRSRTPRTARGKRSLTRSPPAIRRRSASGSSSDRSRSATPPATRNHSGSRTPPVALNSSRMSCFSRPSMSPTPLDRCRSPGMLEPLGSSRTPMSVLQQAGGSMMDGPGPRIPDHQRTSVPENHAQSRIALALTAISLGTARPPPSMSAAGLAARMSQVPAPVPLMSLRTAPAANLASRIPAASAAAMNLASARTPAIPTAVNLADSRTPAAAAAMNLASPRTAVAPSAVNLADPRTPTAPAVNLAGARTPAALAALSLTGSGTPPTAANYPSSSRTPQAPASANLVGPRSAHATAPVNIAGSRTAAALAPASLTSARMAPALSGANLTSPRVPLSAYERVSGRTSPPLLDRARSRTPPSAPSQSRMTSERAPSPSSRMGQAPSQSLLPPAQDQPRSPVPSAFSDQSRCLIAQTTPVAGSQSLSSGAVATTTSSAGDHNGMLSVPAPGVPHSDVGEPPASTGAQQPSALAALQPAKERRSSSSSSSSSSSSSSSSSSSSSSSSSGSSSSDSEGSSLPVQPEVALKRVPSPTPAPKEAVREGRPPEPTPAKRKRRSSSSSSSSSSSSSSSSSSSSSSSSSSSSSSSSSSSSSSSSSSPSPAKPGPQALPKPASPKKPPPGERRSRSPRKPIDSLRDSRSLSYSPVERRRPSPQPSPRDQQSSSSERGSRRGQRGDSRSPSHKRRRETPSPRPMRHRSSRSP

SEQ ID NO: 1281 - DNA, 7787 bp, Homo sapien
gaattcggggaacggtgtggagcggaggccgcggaggctcctcggtccttcagcacccctcggcccgacgcacccacgcccctcaccccccgagagccgaaaatggacccaagtggggtcaaagtgctggaaacagcagaggacatccaggagaggcggcagcaggtcctagaccgataccaccgcttcaaggaactctcaacccttaggcgtcagaagctggaagattcctatcgattccagttctttcaaagagatgctgaagagctggagaaatggatacaggaaaaacttcagattgcatctgatgagaattataaagacccaaccaacttgcagggaaagcttcagaagcatcaagcatttgaagctgaagtgcaggccaactcaggagccattgttaagctggatgaaactggaaacctgatgatctcagaagggcattttgcatctgaaaccatacggacccgtttgatggagctgcaccgccagtgggaattacttttggagaagatgcgagaaaaaggaatcaaattgctgcaggcccagaacttggtgcagtacttacgagaatgtgaggacgtgatggactggatcaatgacaaggaagcaattgttacttctgaagagctgggccaggatctggagcatgtagaggttttacagaagaaatttgaagagtttcaaacagatatggctgctcatgaagaaagagttaatgaagtgaaccagtttgctgccaaactcatacaggagcagcaccctgaggaggaactgatcaagactaagcaggatgaagtcaatgcagcctggcagcggctgaagggcctggctctgcagaggcaggggaagctctttggggcagcagaagttcagcgctttaacagggatgtggatgagactatcagttggattaaggaaaaggagcagttaatggcctctgatgattttggccgagacctggcaagtgttcaggctctgcttcggaagcacgagggtctggagagagatcttgctgctctagaagacaaggtcaaagccctgtgtgctgaggctgaccgcctgcaacagtcccaccctctgagtgcaacacagattcaagtgaagcgagaggaactgattacaaactgggagcagatccgcaccttggcggcagagagacatgcacggctcaatgattcatacaggcttcaacgcttccttgctgacttccgtgacctcaccagctgggtgactgagatgaaagccctcatcaatgcagatgagcttgccagtgatgtggctggggctgaagccctgctagatagacaccaagagcacaagggtgaaattgatgcccatgaagacagcttcaaatctgcagatgaatctggacaggcactgcttgctgctggtcactatgcctcagatgaagtgagggagaagctgaccgtcctttccgaggagagagcggcgctgctggagctgtgggagctgcgcaggcagcagtacgagcagtgcatggacctgcagctcttctaccgggacactgagcaggtggacaactggatgagcaagcaggaggcgttcctgttgaatgaagacttgggagatttcttggatagtgtggaagcgcttcttaagaagcacgaagactttgagaaatcccttagtgcccaggaggaaaagattacagcattagatgaatttgcaaccaagctaattcagaacaaccactatgcaatggaagatgtggccactcgccgagacgctctgttgagccgccgcaatgcccttcacgagagagccatgcgtcgccgggcccagctagccgattctttccatctgcagcagtttttccgtgattctgatgagctcaagagttgggtgaatgagaagatgaaaactgccacagatgaagcttataaagatccatccaacctacaaggaaaagtacagaagcatcaggcttttgaggctgagctctcagcaaaccagagccgaattgatgccttggagaaagctggccaaaagctgattgatgtcaaccactatgccaaggatgaagtggcagctcgtatgaatgaggtgatcagtttgtggaagaaactgctagaggccactgaactgaaaggaataaagcttcgtgaagccaaccagcaacagcaatttaatcgcaatgttgaggatattgaattgtggctatatgaagtagaaggtcacttggcttcggatgattacggcaaagatcttaccaatgtgcagaacctccagaagaaacatgccctgctagaggcagatgtggctgctcaccaggaccgaattgatggcgtcaccattcaggcccgccagttccaagatgctggccattttgatgcagaaaacatcaagaagaaacaggaagccctcgtggctcgctatgaggcactcaaggagcccatggttgcccggaagcagaagctggccgattctctgcggttgcagcagctcttccgggatgttgaggatgaggagacgtggattcgagagaaagagcccattgccgcatctaccaacagaggtaaggatttaattggggtccagaatctgctaaagaaacatcaagccttacaagcagaaattgctggacatgaaccacgcatcaaagcagttacacagaaggggaatgccatggtggaggaaggccattttgctgcagaggatgtgaaggccaagcttcacgagctgaaccaaaagtgggaggcactgaaagcaaaagcttcccagcgtcggcaggacctggaggactctctgcaggcccagcagtactttgctgatgctaacgaggctgaatcctggatgcgggagaaggaacccattgtgggcagcactgactatggcaaggacgaagactctgctgaggctctactgaagaaacacgaagctttgatgtcagatctcagtgcctacggcagcagcatccaggctttgcgagaacaagcacagtcctgccggcaacaagtggcccccacggatgatgagactgggaaggagctggtcttggctctctacgactatcaggagaagagtccccgagaggtcaccatgaagaagggagatatccttaccttactcaacagcaccaacaaggattggtggaaagtggaagtgaacgatcgtcagggttttgtgccggctgcgtacgtgaagaaattggaccccgcccagtcagcctcccgggagaatctcctggaggagcaaggcagcatagcactgcggcaggagcagattgacaatcagacacgcataactaaggaggccggcagtgtatctctgcgtatgaagcaggtggaagaactatatcattctctgctggaactgggtgagaagcgtaaaggcatgttggagaagagttgcaagaagtttatgttgttccgtgaagcgaatgaactacagcaatggatcaatgagaaggaagccgctctgacaagtgaggaggtcggagcagacttggagcaggttgaggtgctccagaagaagtttgatgacttccagaaggacctgaaggccaatgagtcacggttgaaggacattaacaaggtagctgaagacctggagtctgaaggtcttatggcagaggaggtgcaggctgtgcaacaacaggaagtgtatggcatgatgcccagggatgaaactgattccaagacagcctccccgtggaagtctgctcgtctgatggttcacaccgtggccacctttaattccatcaaggagctgaatgagcgctggcggtccctacagcagctggccgaggaacggagccagctcttgggcagcgcccatgaagtacagaggttccacagagatgctgatgaaaccaaagaatggattgaagagaagaatcaagctctaaacacagacaattatggacatgatctcgccagtgtccaggccctgcaacgcaagcatgagggcttcgagagggaccttgcggctctcggtgacaaggtaaactcccttggtgaaacagcagagcgcctgacccagtcccatcccgagtcagcagaagacctgcaggaaaagtgcacagagttaaaccaggcctggagcagcctggggaaacgtgcagatcagcgcaaggcaaagttgggtgactcccacgacctgcagcgcttccttagcgatttccgggacctcatgtcttggatcaatggaatacgggggttggtgtcctcagatgagctagccaaggatgtcaccggagctgaggcattgctggagcgacaccaggaacaccggacagaaatcgatgccagggctggcactttccaggcatttgagcagtttggacagcagctgttggctcacggacactatgccagccctgagatcaagcagaaacttgatattcttgaccaggagcgtgcagacctggagaaggcctgggttcagcgcaggatgatgctggatcagtgccttgaactgcagctgttccatcgggactgtgagcaagctgagaactggatggctgcccgggaggccttcttgaataccgaagacaaaggagactcactggacagcgtagaggctctgatcaaaaaacatgaagactttgacaaagcgattaacgtccaggaagagaagattgctgctctgcaggcctttgccgaccagctcatcgctgccggccattatgccaagggagacatttctagccggcgcaatgaggtcttggacaggtggcgacgtctgaaagcccagatgattgagaaaaggtcaaagctaggagaatctcaaaccctccaacagttcagccgggatgtggatgagattgaggcttggatcagtgaaaaattgcaaacagcgagtgatgagtcgtacaaggatcccaccaacatccagagcaagcaccagaagcaccaggcttttgaagcagagctgcatgccaacgctgaccggatccgtggggttatcgacatgggcaactccctcattgaacgtggagcctgtgccggcaatgaggatgctgtcaaggcccgcctggctgccttagctgaccagtggcaattcttggtgcaaaagtcagcggaaaagagccagaaactgaaagaagccaacaagcagcagaacttcaacacagggatcaaggacattgcattctggctgtctgaggtggaggccctgctggcatccgaagattatggcaaagacctggcttctgtgaacaacctgctgaaaaagcatcaactgctggaagcagatatatctgcccatgaggatcgcctgaaggacctgaacagccaggcagacagcctgatgaccagcagtgccttcgacacctcccaagtaaaggacaagagggacaccatcaacgggcgcttccagaagatcaagagcatggcggcctcccggcgagccaagctgaatgaatcccatcgcctgcaccagttcttccgggacatggatgacgaggagtcctggatcaaggagaagaagctgctggtgggctcagaggactacggccgggacctaactggcgtgcagaacctgaggaagaagcacaagcggctggaagcagaactggctgcgcatgagccggctattcagggtgtcctggacactggcaagaagctgtccgatgacaacaccatcgggaaagaggagatccagcagcggctggcgcagtttgtggagcactggaaagagctgaagcagctggcagctgcccggggtcagcggctggaagagtccttggaatatcagcagtttgtagccaatgtggaagaggaagaagcctggatcaatgagaaaatgaccctggtggccagcgaagattatggcgacactcttgccgccatccagggcttactgaagaaacatgaagcttttgagacagccttcaccgtccacaaggatcgcgtgaatgatgtctgcaccaatggacaagacctcattaagaagaacaatcaccatgaggagaacatctcttcaaagatgaagggcctgaacgggaaagtgtcagacctggagaaagctgcagcccagagaaaggcgaacgtggatgagaactcggccttccttcagttcaactggaaggcggacgtggtggagtcctggatcggtgaaaaggagaacagcttgaagacagatgattatggccgagacctgtcttctgtgcagacgctcctcaccaaacaggaaacttttgacgctgggctgcaggccttccagcaggaaggcattgccaacatcactgccctcaaagatcagcttctcgccgccaaacacgttcagtccaaggccatcgaggcccggcacgcctccctcatgaagaggtggagccagcttctggccaactcagccgcccgcaagaagaagcttctggaggctcagagtcacttccgcaaggtggaggacctcttcctgaccttcgccaaaaaggcttctgccttcaacagctggtttgaaaatgcagaggaggacttaacagaccccgtgcgctgcaactccttggaagaaatcaaagctttgcgcgaggcccacgacgccttccgctcctccctcagctctgcccaggctgacttcaaccagctggccgagctggaccgccagatcaagagcttccgcgtagcctccaacccctacacctggtttaccatggaggccctggaggagacctggaggaacctacagaaaatcatcaaggagagggagctggagctgcagaaggaacagcggcggcaggaggagaacgacaagctgcgccaggagtttgcccagcacgccaacgccttccaccagtggatccaagagaccaggacatacctcctcgatgggtcctgtatggtggaagagtcggggaccctcgaatcccagcttgaagctaccaaacgcaagcaccaggaaatccgagccatgagaagtcagctcaaaaagatcgaggacctgggggccgccatggaggaggccctcatcctggacaacaagtacacggagcacagcaccgtgggcctcgcccagcagtgggaccagctggaccagctgggcatgcgcatgcagcacaacctggagcagcagatccaggccaggaacacaacaggtgtgactgaggaggccctcaaagaattcagcatgatgtttaaacactttgacaaggacaagtctggcaggctgaaccatcaggatggcaaatcttgcctgcgctccctgggctatgacctgcccatggtggaggaaggggaacctgaccctgagttcgaggcaatcctggacacggtggatccgaacagagatggccatgtctccttgcaagaatacatggctttcatgatcagccgcgaaactgagaacgtcaagtccagcgaggagattgagagcgccttccgggccctcagctcagagggaaagccttacgtgaccaaggaggagctctaccagaacctgacccgggaacaagccgactactgcgtctcccacatgaagcccatcgtggacggcaagggccgcgagctccccaccgcgttcgactacgtggagttcacccgctcgcttttcgtgaactgagccactccctgggtcacccacccctcgctgcttgccctgcgtcgccttgctgcatgtccgctcctctgtgtgctctcactttccactgtaaccttaagcctgcttagcttggaataagacttaggagaaaatggtgcttcactaacccgcttccggtccagtcacaatcatcatgtcactgtgggacccagatctgtgtcttgaagcagctgccctcattccgacttcagaaaatcgaagcagctggcgcctccccttcggaattc

SEQ ID NO: 1282 - protein, 2000 aa, Homo sapien
MDPSGVKVLETAEDIQERRQQVLDRYHRFKELSTLRRQKLEDSYRFQFFQRDAEELEKWIQEKLQIASDENYKDPTNLQGKLQKHQAFEAEVQANSGAIVKLDETGNLMISEGHFASETIRTRLMELHRQWELLLEKMREKGIKLLQAQNLVQYLRECEDVMDWINDKEAIVTSEELGQDLEHVEVLQKKFEEFQTDMAAHEERVNEVNQFAAKLIQEQHPEEELIKTKQDEVNAAWQRLKGLALQRQGKLFGAAEVQRFNRDVDETISWIKEKEQLMASDDFGRDLASVQALLRKHEGLERDLAALEDKVKALCAEADRLQQSHPLSATQIQVKREELITNWEQIRTLAAERHARLNDSYRLQRFLADFRDLTSWVTEMKALINADELASDVAGAEALLDRHQEHKGEIDAHEDSFKSADESGQALLAAGHYASDEVREKLTVLSEERAALLELWELRRQQYEQCMDLQLFYRDTEQVDNWMSKQEAFLLNEDLGDFLDSVEALLKKHEDFEKSLSAQEEKITALDEFATKLIQNNHYAMEDVATRRDALLSRRNALHERAMRRRAQLADSFHLQQFFRDSDELKSWVNEKMKTATDEAYKDPSNLQGKVQKHQAFEAELSANQSRIDALEKAGQKLIDVNHYAKDEVAARMNEVISLWKKLLEATELKGIKLREANQQQQFNRNVEDIELWLYEVEGHLASDDYGKDLTNVQNLQKKHALLEADVAAHQDRIDGVTIQARQFQDAGHFDAENIKKKQEALVARYEALKEPMVARKQKLADSLRLQQLFRDVEDEETWIREKEPIAASTNRGKDLIGVQNLLKKHQALQAEIAGHEPRIKAVTQKGNAMVEEGHFAAEDVKAKLHELNQKWEALKAKASQRRQDLEDSLQAQQYFADANEAESWMREKEPIVGSTDYGKDEDSAEALLKKHEALMSDLSAYGSSIQALREQAQSCRQQVAPTDDETGKELVLALYDYQEKSPREVTMKKGDILTLLNSTNKDWWKVEVNDRQGFVPAAYVKKLDPAQSASRENLLEEQGSIALRQEQIDNQTRITKEAGSVSLRMKQVEELYHSLLELGEKRKGMLEKSCKKFMLFREANELQQWINEKEAALTSEEVGADLEQVEVLQKKFDDFQKDLKANESRLKDINKVAEDLESEGLMAEEVQAVQQQEVYGMMPRDETDSKTASPWKSARLMVHTVATFNSIKELNERWRSLQQLAEERSQLLGSAHEVQRFHRDADETKEWIEEKNQALNTDNYGHDLASVQALQRKHEGFERDLAALGDKVNSLGETAERLTQSHPESAEDLQEKCTELNQAWSSLGKRADQRKAKLGDSHDLQRFLSDFRDLMSWINGIRGLVSSDELAKDVTGAEALLERHQEHRTEIDARAGTFQAFEQFGQQLLAHGHYASPEIKQKLDILDQERADLEKAWVQRRMMLDQCLELQLFHRDCEQAENWMAAREAFLNTEDKGDSLDSVEALIKKHEDFDKAINVQEEKIAALQAFADQLIAAGHYAKGDISSRRNEVLDRWRRLKAQMIEKRSKLGESQTLQQFSRDVDEIEAWISEKLQTASDESYKDPTNIQSKHQKHQAFEAELHANADRIRGVIDMGNSLIERGACAGNEDAVKARLAALADQWQFLVQKSAEKSQKLKEANKQQNFNTGIKDIAFWLSEVEALLASEDYGKDLASVNNLLKKHQLLEADISAHEDRLKDLNSQADSLMTSSAFDTSQVKDKRDTINGRFQKIKSMAASRRAKLNESHRLHQFFRDMDDEESWIKEKKLLVGSEDYGRDLTGVQNLRKKHKRLEAELAAHEPAIQGVLDTGKKLSDDNTIGKEEIQQRLAQFVEHWKELKQLAAARGQRLEESLEYQQFVANVEEEEAWINEKMTLVASEDYGDTLAAIQGLLKKHEAFETAFTVHKDRVNDVCTNGQDLIKKNNHHEENISSKMKGLNGKVSDLEKAAAQRKANVDENSAFLQFNWKADVVESWIGEKENSLK

SEQ ID NO: 1283 - DNA, 9432 bp, Homo sapien
gccgtggctccggtagcagcaagttcgaaccccgctcccgctccgcttcggttctcgctccttcggcccttgggcctccaaacaccagtccccggcagctcgttgcgcattgcgctctccccgccaccaggatgccggtaaccgagaaggatctagctgaggacgcgccttggaagaagatccagcagaacacgttcacacgctggtgcaacgagcacctcaagtgcgtgaacaaacgcatcggcaacctgcagaccgacctgagcgacgggctgcggctcatcgcgctgctcgaggtgctcagccagaagcgcatgtaccgcaagtaccatcagcggcccacctttcgccagatgcagctcgagaatgtgtccgtggcgctcgagttcctggaccgtgagagcatcaagctcgtgtccatcgatagcaaagccattgtggatgggaacctgaagctcatcttgggtctggtgtggacgctgatcctccactactccatctccatgcccgtgtgggaggatgaaggggatgatgatgccaagaagcagacgccaaagcagaggctgctggggtggattcagaacaagatcccctacttgcccatcaccaactttaaccagaactggcaagacggcaaagccctgggagccctggtagacagctgtgctccaggtctgtgcccagactgggaatcctgggacccgcagaagcctgtggataatgcacgagaagccatgcagcaggcagatgactggctgggtgtcccacaggtcatcactcctgaagaaatcattcacccggatgtggacgagcactcagttatgacttacctgtcccagttccccaaagccaagctcaagccgggggctcctctcaaacccaaactcaacccgaagaaagccagggcctatggcagaggaatcgagcccactggaaacatggtgaagcagccagccaagttcactgtggacaccatcagcgccgggcaaggagacgtgatggtgtttgttgaggacccagaagggaacaaagaggaggcacaagtgacccctgacagcgacaagaacaagacatactctgtggagtatctgcccaaggtcaccgggctacacaaagtcacagtcctctttgcaggacagcacatctccaagagcccatttgaagtgagtgttgacaaggcccagggagatgccagtaaagtcactgcaaaaggtccagggttggaagctgtagggaacatcgccaataagcccacctactttgacatctatacggcaggagctggtgtgggtgacattggtgtggaggtggaagatccccaggggaagaacaccgtggagttgctcgtggaagacaaaggaaaccaggtgtatcgatgtgtgtacaaacccatgcagcctggccctcacgtggtcaagatcttctttgctggggacactattcctaagagtcccttcgttgtgcaggttggggaagcctgcaatccaaatgcctgccgggccagtggccgaggcctacaacccaaaggcgtccgtatccgggagaccacagatttcaaggttgacaccaaagctgcaggaagtggggagctcggggtaaccatgaagggtcctaagggtctggaggagctggtgaagcagaaagactttctggatggggtctacgcattcgagtattaccccagcaccccggggagatacagcattgccatcacatgggggggacaccacattccaaagagcccctttgaagttcaagttggccctgaagcgggtatgcagaaagtccgtgcttggggccctgggctccatggtgggattgtcgggcggtcagcggacttcgtggtagaatccattggctctgaagtggggtctctggggtttgccattgaaggcccctctcaggcaaagattgagtacaacgaccagaatgatggatcgtgtgatgtcaaatactggcccaaggagcctggcgaatatgctgttcacatcatgtgtgacgacgaagacatcaaggacagcccgtacatggccttcatccacccagccacgggaggctacaaccctgatctggttcgagcatacgggccaggtttggagaaatctggatgcattgtcaacaacctggccgagttcactgtggatcctaaggatgctggaaaagctcccttaaagatatttgctcaggatggggaaggccaacgcattgacatccagatgaagaaccggatggacggcacatatgcatgctcatacaccccggtgaaggccatcaagcacaccattgctgtggtctggggaggcgtgaacatcccgcacagcccctacagggtcaacatcgggcaaggtagccatcctcagaaggtcaaagtgtttgggccaggtgtggagagaagtggtctgaaggcaaatgaacctacacacttcacggtggactgtactgaggctggggaaggtgatgtcagtgttggcattaagtgtgatgcccgggtgttaagtgaagatgaggaagacgtggattttgacattattcacaatgccaatgatacgttcacagtcaaatatgtgcctcctgctgctgggcgatacactatcaaagttctctttgcatctcaggaaatccccgccagccctttcagagtcaaagttgacccttcccacgatgccagcaaagtgaaggcagaaggcccagggctcagcaaagcaggtgtggaaaatgggaaaccgacccacttcactgtctacaccaagggggctgggaaagccccgctcaacgtgcagttcaacagccctcttcctggcgatgcagtgaaggatttggatatcatcgataattatgactactctcacacggttaaatatacacccacccaacagggcaacatgcaggttctggtgacttacggtggcgatcccatccctaaaagccctttcactgtgggtgttgctgcaccgctggatctgagcaagataaaactcaatgggctggaaaacagggtggaagttgggaaggatcaggagttcaccgttgataccaggggggcaggaggccaggggaagctggacgtgacaatcctcagcccctctcggaaggtcgtgccatgcctagtgacacctgtgacaggccgggagaacagcacggccaagttcatccctcgggaggaggggctgtatgctgtagacgtgacctacgatggacaccctgtgcccgggagcccctacacagtggaggcctcgctgccaccagatcccagcaaggtgaaggcccacggtcccggcctcgaaggtggtctcgtgggcaagcctgccgagttcaccatcgataccaaaggagctggtactggaggtctgggcttaacggtggaaggtccgtgcgaggccaaaatcgagtgctccgacaatggtgatgggacctgctccgtctcttaccttcccacaaaacccggggagtacttcgtcaacatcctctttgaagaagtccacatacctgggtctcccttcaaagctgacattgaaatgccctttgacccctctaaagtcgtggcatcggggccaggtctcgagcacgggaaggtgggtgaagctggcctccttagcgtcaactgctcggaagcgggaccgggggccctgggcctggaagctgtctcggactcgggaacaaaagccgaagtcagtattcagaacaacaaagatggcacctacgcggtgacctacgtgcccctgacggccggcatgtacacgttgaccatgaagtatggtggcgaactcgtgccacacttccccgcccgggtcaaggtggagcccgccgtggacaccagcaggatcaaagtctttggaccaggaatagaagggaaagatgtgttccgggaagctaccaccgactttacagttgactctcggccgctgacccaggttgggggtgaccacatcaaggcccacattgccaacccctcaggggcctccaccgagtgctttgtcacagacaatgcggatgggacctaccaggtggaatacacaccctttgagaaaggtctccatgtagtggaggtgacatatgatgacgtgcctatcccaaacagtcccttcaaggtggctgtcactgaaggctgccagccatctagggtgcaagcccaaggacctggattgaaagaggcctttaccaacaagcccaatgtcttcaccgtggttaccagaggcgcaggaattggtgggcttggcataactgttgagggaccatcagagtcgaagataaattgcagagacaacaaggatggcagctgcagtgctgagtacattcctttcgcgccgggggattacgatgttaatatcacatatggaggagcccacatccctggcagccccttcagggttcctgtgaaggatgttgtggaccccagcaaggtcaagattgccggccccgggctgggctcaggcgtccgagcccgtgtcctgcagtccttcacggtggacagcagcaaggctggcctggctccgctggaagtgagggttctgggcccacgaggcttggtggagccagtgaacatggtggacaatggagatggcacacacacagtaacctacaccccatctcaggagggaccttacatggtctcagttaaatatgctgatgaagagattcctcgcagtcccttcaaggtcaaggtccttcccacatatgatgccagcaaagtgactgccagtggccccggccttagttcctatggtgtgcctgccagtctacctgtggactttgcaattgatgcccgagatgccggggaaggcctgcttgctgttcaaataacggaccaagaaggaaaacccaaaagagccattgtccatgacaataaagatggcacgtatgctgtcacctacatccccgacaagactgggcgctatatgattggagtcacctacgggggtgacgacatcccactttctccttatcgcatccgagccacacagacgggtgatgccagcaagtgcctggccacgggtcctggaatcgcctccactgtgaaaactggcgaagaagtaggctttgtggttgatgccaagactgccgggaagggtaaagtgacctgcacggttctgaccccagatggcactgaggccgaggccgatgtcattgagaatgaagatggaacctatgacatcttctacacagctgccaagccgggcacatatgtgatctatgtgcgcttcggtggtgttgatattcctaacagccccttcactgtcatggccacagatggggaagtcacagccgtggaggaggcaccggtaaatgcatgtccccctggattcaggccctgggtgaccgaagaggcctatgtcccagtgagtgacatgaacggcctgggatttaagccttttgacctggtcattccgtttgctgtcaggaaaggagaaatcactggagaggtccacatgccttctgggaagacagccacacctgagattgtggacaacaaggacggcacggtcactgttagatatgcccccactgaggtcgggctccatgagatgcacatcaaatacatgggcagccacatccctgagagcccactccagttctacgtgaactaccccaacagtggaagtgtttctgcatacggtccaggcctcgtgtatggagtggccaacaaaactgccaccttcaccatcgtcacagaggatgcaggagaaggtggtctggacttggctattgagggcccctcaaaagcagaaatcagctgcattgacaataaagatgggacatgcacagtgacctacctgccgactctgccaggcgactacagcattctggtcaagtacaatgacaagcacatccctggcagccccttcacagccaagatcacagatgacagcaggcggtgctcccaggtgaagttgggctcagccgctgacttcctgctcgacatcagtgagactgacctcagcagcctgacggccagcattaaggccccatctggccgagacgagccctgtctcctgaagaggctgcccaacaaccacattggcatctccttcatcccccgggaagtgggcgaacatctggtcagcatcaagaaaaatggcaaccatgtggccaacagccccgtgtctatcatggtggtccagtcggagattggtgacgcccgccgagccaaagtctatggccgcggcctgtcagaaggccggactttcgagatgtctgacttcatcgtggacacaagggatgcaggttatggtggcatatccttggcggtggaaggccccagcaaagtggacatccagacggaggacctggaagatggcacctgcaaagtctcctacttccctaccgtgcctggggtttatatcgtctccaccaaattcgctgacgagcacgtgcctgggagcccatttaccgtgaagatcagtggggagggaagagtcaaagagagcatcacccgcaccagtcgggccccgtccgtggccactgtcgggagcatttgtgacctgaacctgaaaatcccagaaatcaacagcagtgatatgtcggcccacgtcaccagcccctctggccgtgtgactgaggcagagattgtgcccatggggaagaactcacactgcgtccggtttgtgccccaggagatgggcgtgcacacggtcagcgtcaagtaccgtgggcagcacgtcaccggcagccccttccagttcaccgtggggccacttggtgaaggaggcgcccacaaggtgcgggcaggaggccctggcctggagagaggagaagcgggagtcccagctgagttcagcatttggacccgggaagcaggcgctggaggcctctccatcgctgttgagggccccagtaaggccgagattacattcgatgaccataaaaatgggtcgtgcggtgtatcttatattgcccaagagcctggtaactacgaggtgtccatcaagttcaatgatgagcacatcccggaaagcccctacctggtgccggtcatcgcaccctccgacgacgcccgccgcctcactgttatgagccttcaggaatcgggattaaaagttaaccagccagcatcctttgctataaggttgaatggcgcaaaaggcaagattgatgcaaaggtgcacagcccctctggagccgtggaggagtgccacgtgtctgagctggagccagataagtatgctgttcgcttcatccctcatgagaatggtgtccacaccatcgatgtcaagttcaatgggagccacgtggttggaagccccttcaaagtgcgcgttggggagcctggacaagcggggaaccctgccctggtgtccgcctatggcacgggactcgaagggggcaccacaggtatccagtcggaattctttattaacaccacccgagcaggtccagggacattatccgtcaccatcgaaggcccatccaaggttaaaatggattgccaggaaacacctgaagggtacaaagtcatgtacacccccatggctcctggtaactacctgatcagtgtcaaatacggtgggcccaaccacatcgtgggcagtcccttcaaggccaaggtgacaggccagcgtctagttagccctggctcagccaacgagacctcatccatcctggtggagtcagtgaccaggtcgtctacagagacctgctatagcgccattcccaaggcatcctcggacgccagcaaggtgacctctaagggggcagggctctcaaaggcctttgtgggccagaagagttccttcctggtggactgcagcaaagctggctccaacatgctgctgatcggggtccatgggcccaccaccccctgcgaggaggtctccatgaagcatgtaggcaaccagcaatacaacgtcacatacgtcgtcaaggagaggggcgattatgtgctggctgtgaagtggggggaggaacacatccctggcagcccttttcatgtcacagtgccttaaaacagttttctcaaatcctggagagagttcttgtggttgcttttgttgcttgtttgtaattcattttatacaaagccctccagcctgtttgtggggctgaaaccccatccctaaaatattgctgttgtaaaatgccttcagaaataagtcctagactggactcttgagggacatattggagaatcttaagaaatgcaagcttgttcagggggctgagaagatcctgagtacactaggtgcaaaccagaactcttggtggaacagaccagccactgcagcagacagaccaggaacacaatgagactgacatttcaaaaaaacaaaactggctagcctgagctgctggttcactcttcagcatttatgaaacaaggctaggggaagatgggcagagaaaaaggggacacctagtttggttgtcatttggcaaaggagatgacttaaaatccgcttaatctcttccagtgtccgtgttaatgtatttggctattagatcactagcactgctttaccgctcctcatcgccaacacccccatgctctgtggccttcttacacttctcagagggcagagtggcagccgggcaccctacagaaactcagagggcagagtggcagccaggcccacatgtctctcaagtacctgtcccctcgctctggtgattatttcttgcagaatcaccacacgagaccatcccggcagtcatggttttgctttagttttccaagtccgtttcagtcccttccttggtctgaagaaattctgcagtggcgagcagtttcccacttgccaaagatcccttttaaccaacactagcccttgtttttaacacacgctccagcccttcatcagcctgggcagtcttaccaaaatgtttaaagtgatctcagaggggcccatggattaacgccctcatcccaaggtccgtcccatgacataacactccacacccgccccagccaacttcatgggtcactttttctggaaaataatgatctgtacagacaggacagaatgaaactcctgcggctctttggcctgaaagttgggaatggttgggggagagaagggcagcagcttattggtggtcttttcaccattggcagaaacagtgagagctgtgtggtgcagaaatccagaaatgaggtgtagggaattttgcctgccttcctgcagacctgagctggctttggaatgaggttaaagtgtcagggacgttgcctgagcccaaatgtgtagtgtggtctgggcaggcagacctttaggttttgctgcttagtcctgaggaagtggccactcttgtggcaggtgtagtatctggggcgagtgttgggggtaaaagcccaccctacagaaagtggaacagcccggacctgatgtgaaaggaccacgggtgttgtaagctgggaccggaaccaaactggaatcaaacgcgactgtaaattgtatcttataacttattaaataaaacattgctccgtaaaaaaaaaaa

SEQ ID NO: 1284 - protein, 2000 aa, Homo sapien
MPVTEKDLAEDAPWKKIQQNTFTRWCNEHLKCVNKRIGNLQTDLSDGLRLIALLEVLSQKRMYRKYHQRPTFRQMQLENVSVALEFLDRESIKLVSIDSKAIVDGNLKLILGLVWTLILHYSISMPVWEDEGDDDAKKQTPKQRLLGWIQNKIPYLPITNFNQNWQDGKALGALVDSCAPGLCPDWESWDPQKPVDNAREAMQQADDWLGVPQVITPEEIIHPDVDEHSVMTYLSQFPKAKLKPGAPLKPKLNPKKARAYGRGIEPTGNMVKQPAKFTVDTISAGQGDVMVFVEDPEGNKEEAQVTPDSDKNKTYSVEYLPKVTGLHKVTVLFAGQHISKSPFEVSVDKAQGDASKVTAKGPGLEAVGNIANKPTYFDIYTAGAGVGDIGVEVEDPQGKNTVELLVEDKGNQVYRCVYKPMQPGPHVVKIFFAGDTIPKSPFVVQVGEACNPNACRASGRGLQPKGVRIRETTDFKVDTKAAGSGELGVTMKGPKGLEELVKQKDFLDGVYAFEYYPSTPGRYSIAITWGGHHIPKSPFEVQVGPEAGMQKVRAWGPGLHGGIVGRSADFVVESIGSEVGSLGFAIEGPSQAKIEYNDQNDGSCDVKYWPKEPGEYAVHIMCDDEDIKDSPYMAFIHPATGGYNPDLVRAYGPGLEKSGCIVNNLAEFTVDPKDAGKAPLKIFAQDGEGQRIDIQMKNRMDGTYACSYTPVKAIKHTIAVVWGGVNIPHSPYRVNIGQGSHPQKVKVFGPGVERSGLKANEPTHFTVDCTEAGEGDVSVGIKCDARVLSEDEEDVDFDIIHNANDTFTVKYVPPAAGRYTIKVLFASQEIPASPFRVKVDPSHDASKVKAEGPGLSKAGVENGKPTHFTVYTKGAGKAPLNVQFNSPLPGDAVKDLDIIDNYDYSHTVKYTPTQQGNMQVLVTYGGDPIPKSPFTVGVAAPLDLSKIKLNGLENRVEVGKDQEFTVDTRGAGGQGKLDVTILSPSRKVVPCLVTPVTGRENSTAKFIPREEGLYAVDVTYDGHPVPGSPYTVEASLPPDPSKVKAHGPGLEGGLVGKPAEFTIDTKGAGTGGLGLTVEGPCEAKIECSDNGDGTCSVSYLPTKPGEYFVNILFEEVHIPGSPFKADIEMPFDPSKVVASGPGLEHGKVGEAGLLSVNCSEAGPGALGLEAVSDSGTKAEVSIQNNKDGTYAVTYVPLTAGMYTLTMKYGGELVPHFPARVKVEPAVDTSRIKVFGPGIEGKDVFREATTDFTVDSRPLTQVGGDHIKAHIANPSGASTECFVTDNADGTYQVEYTPFEKGLHVVEVTYDDVPIPNSPFKVAVTEGCQPSRVQAQGPGLKEAFTNKPNVFTVVTRGAGIGGLGITVEGPSESKINCRDNKDGSCSAEYIPFAPGDYDVNITYGGAHIPGSPFRVPVKDVVDPSKVKIAGPGLGSGVRARVLQSFTVDSSKAGLAPLEVRVLGPRGLVEPVNMVDNGDGTHTVTYTPSQEGPYMVSVKYADEEIPRSPFKVKVLPTYDASKVTASGPGLSSYGVPASLPVDFAIDARDAGEGLLAVQITDQEGKPKRAIVHDNKDGTYAVTYIPDKTGRYMIGVTYGGDDIPLSPYRIRATQTGDASKCLATGPGIASTVKTGEEVGFVVDAKTAGKGKVTCTVLTPDGTEAEADVIENEDGTYDIFYTAAKPGTYVIYVRFGGVDIPNSPFTVMATDGEVTAVEEAPVNACPPGFRPWVTEEAYVPVSDMNGLGFKPFDLVIPFAVRKGEITGEVHMPSGKTATPEIVDNKDGTVTVRYAPTEVGLHEMHIKYMGSHIPESPLQFYVNYPNSGSVSAYGPGLVYGVANKTATFTIVTEDAGEGGLDLAIEGPSKAEISCIDNKDGTCTVTYLPTLPGDYSILVKYNDKHIPGSPFTAKITDDSRRCSQVKLGSAADFLLDISETDLSSLTASIKAPSGRDEPCLLKRLPNNHIGISFIPREVGEHLVSIKKNGNHVANSPVSIMVVQSEIG

SEQ ID NO: 1285 - DNA, 2738 bp, Homo sapien
cttccccagctgtgcactctccatccagctgtgcgctctcgtcgggagtcccagccatgtccgacgagagagaggtagccgaggcagcgaccggggaagacgcctcttcgccgcctccgaaaaccgaggcagcgagcgacccccagcatcccgcggcctccgaaggggccgccgccgccgccgcctcgccgccactgctgcgctgcctagtgctcaccggctttggaggctacgacaaggtgaagctgcagagccggccggcagcgcccccggcccctgggcccggccagctgacgctgcgtctgcgggcctgcgggctcaacttcgcagacctcatggctaggcaggggctgtacgaccgtctcccgcctctgcctgtcactccgggcatggagggcgcgggtgttgtgatcgcagtgggcgagggagtcagcgaccgcaaggcaggagaccgggtgatggtgttgaaccggtcagggatgtggcaggaagaggtgactgtgccctcggtccagaccttcctgattcctgaggccatgacctttgaggaagctgctgccttgctcgtcaattacattacagcctacatggtcctctttgacttcggcaacctacagcctggccacagcgtcttggtacacatggctgcagggggtgtgggtatggctgccgtgcagctgtgccgtacagtggagaatgtgacagtgttcggaacggcctcggccagcaagcacgaggcactgaaggagaatggggtcacacatcccatcgactatcacacgactgactacgtggatgagatcaagaagatttcccctaaaggagtggacattgtcatggaccctctgggtgggtcagatactgccaagggctacaacctcctgaaacccatgggcaaagtcgtcacctatggaatggccaacctgctgacgggccccaaacggaacctgatggccctggcccggacatggtggaatcagttcagcgtgacagctctgcagctgctgcaggccaaccgggctgtgtgtggcttccacctgggctacctggatggtgaggtggagctggtcagtggtgtggtggcccgcctcctggctctgtacaaccagggccacatcaagccccacattgactcagtctggcccttcgagaaggtggctgatgccatgaaacagatgcaggagaagaagaatgtgggcaaggtcctcctggttccagggccagagaaggagaactagggcaagtggctgtgagaccctagagaccagcgaagggagaagttgggaagctacgttctgttggccaccagacttgcatttcagcctctgtcataatgctctgccctccctcccccgaagttctctgtggtgatgaccgctctcccctgcccctccccgcttcctgacctctgaagaggttgggaagtgaccatttggatgtctgggccctgccaaggcgacagggagggtcagagggaggccggctgcttcctgcccccaccctttccccgggcctgctgtgctgcttttgtgccaaggttagccagtcccccctgttgtgttccatgtgctttcacctctgcctcatctttcctcccgtccctgccccgccacctccccaaagaattgaaacgtcagctcaggatatggggccaatctctgtgagtccagcatgtacctgtctctccctagtgtcccttcagcctgggctgaccagtgcccgcctctgggcttgaccagttcccaatctcgtcctctgtccccaacttcttaagcacaattgggcttcttccatctccaggttttctgccattcttaaccaaggctgcctcttccaacagggcgggaatcagacctactcccctaggtcacaactctgggaaggatacagagcccccacccttcactgagttctctggatttgttctcagtgccttagcaacgaaaacctgtgcttgtgtgtgtgtggcggcggggagggaggatcctgtttcccacctccttctcctcccctgtactccccagtgccttccttgttctggtggagctggggtttctctcctccccagtcccacaacactgccaaaaatctgtgtatgtgccattgggtggggcagccccaagcctcctggggaggcagggcaaaaacaggtgccctcatcgtggtctgtgccatgtcccgtctctatggtggttgaggagaaaggcggggaagcttcctcagccttgcagatatgtgtggcatttactagccagagctctgaaaggcagtgctgtctgtttcttgtactgggaccaaagtaaaaatccaagcacattccccttgcagttaggggaggccctactgccttctcaaagcagagaggcagcttatcaaactcagcccaaaactctgtttacatgggtggggagatggagcagggaagtacagagtgggatggtcaggacctgggccattgcaaccaaaatggggacttcctgggtagggaggtcactccctctactcactgagctaggattagggagggttattgccccaaccattgcaatgggaggtggagggacaggctcagcctcctcattgtctaaatgaggcctaaatgtgtgaagtgcgatttctgcttttgtgtaccccaccaccccattaccacagctgcctttgtgtgtttgtgtcaataaaaagccaaaccctgggaaaaaaaaaaaaaaaaaaaaaaaaaaaaaaaaaaaaaaaaaaaa

SEQ ID NO: 1286 - protein, 393 aa, Homo sapien
MSDEREVAEAATGEDASSPPPKTEAASDPQHPAASEGAAAAAASPPLLRCLVLTGFGGYDKVKLQSRPAAPPAPGPGQLTLRLRACGLNFADLMARQGLYDRLPPLPVTPGMEGAGVVIAVGEGVSDRKAGDRVMVLNRSGMWQEEVTVPSVQTFLIPEAMTFEEAAALLVNYITAYMVLFDFGNLQPGHSVLVHMAAGGVGMAAVQLCRTVENVTVFGTASASKHEALKENGVTHPIDYHTTDYVDEIKKISPKGVDIVMDPLGGSDTAKGYNLLKPMGKVVTYGMANLLTGPKRNLMALARTWWNQFSVTALQLLQANRAVCGFHLGYLDGEVELVSGVVARLLALYNQGHIKPHIDSVWPFEKVADAMKQMQEKKNVGKVLLVPGPEKEN

SEQ ID NO: 1287 - DNA, 3398 bp, Homo sapien
cgctgtcgccgccagtagcagccttcgccagcagcgccgcggcggaaccgggcgcaggggagcgagcccggccccgccagcccagcccagcccagccctactccctccccacgccagggcagcagccgttgctcagagagaaggtggaggaagaaatccagaccctagcacgcgcgcaccatcatggaccattatgattctcagcaaaccaacgattacatgcagccagaagaggactgggaccgggacctgctcctggacccggcctgggagaagcagcagagaaagacattcacggcatggtgtaactcccacctccggaaggcggggacacagatcgagaacatcgaagaggacttccgggatggcctgaagctcatgctgctgctggaggtcatctcaggtgaacgcttggccaagccagagcgaggcaagatgagagtgcacaagatctccaacgtcaacaaggccctggatttcatagccagcaaaggcgtcaaactggtgtccatcggagccgaagaaatcgtggatgggaatgtgaagatgaccctgggcatgatctggaccatcatcctgcgctttgccatccaggacatctccgtggaagagacttcagccaaggaagggctgctcctgtggtgtcagagaaagacagccccttacaaaaatgtcaacatccagaacttccacataagctggaaggatggcctcggcttctgtgctttgatccaccgacaccggcccgagctgattgactacgggaagctgcggaaggatgatccactcacaaatctgaatacggcttttgacgtggcagagaagtacctggacatccccaagatgctggatgccgaagacatcgttggaactgcccgaccggatgagaaagccatcatgacttacgtgtctagcttctaccacgccttctctggagcccagaaggcggagacagcagccaatcgcatctgcaaggtgttggccgtcaaccaggagaacgagcagcttatggaagactacgagaagctggccagtgatctgttggagtggatccgccgcacaatcccgtggctggagaaccgggtgcccgagaacaccatgcatgccatgcaacagaagctggaggacttccgggactaccggcgcctgcacaagccgcccaaggtgcaggagaagtgccagctggagatcaacttcaacacgctgcagaccaagctgcggctcagcaaccggcctgccttcatgccctctgagggcaggatggtctcggacatcaacaatgcctggggctgcctggagcaggtggagaagggctatgaggagtggttgctgaatgagatccggaggctggagcgactggaccacctggcagagaagttccggcagaaggcctccatccacgaggcctggactgacggcaaagaggccatgctgcgacagaaggactatgagaccgccaccctctcggagatcaaggccctgctcaagaagcatgaggccttcgagagtgacctggctgcccaccaggaccgtgtggagcagattgccgccatcgcacaggagctcaatgagctggactattatgactcacccagtgtcaacgcccgttgccaaaagatctgtgaccagtgggacaatctgggggccctaactcagaagcgaagggaagctctggagcggaccgagaaactgctggagaccattgaccagctgtacttggagtatgccaagcgggctgcacccttcaacaactggatggagggggccatggaggacctgcaggacaccttcattgtgcacaccattgaggagatccagggactgaccacagcccatgagcagttcaaggccaccctccctgatgccgacaaggagcgcctggccatcctgggcatccacaatgaggtgtccaagattgtccagacctaccacgtcaatatggcgggcaccaacccctacacaaccatcacgcctcaggagatcaatggcaaatgggaccacgtgcggcagctggtgcctcggagggaccaagctctgacggaggagcatgcccgacagcagcacaatgagaggctacgcaagcagtttggagcccaggccaatgtcatcgggccctggatccagaccaagatggaggagatcgggaggatctccattgagatgcatgggaccctggaggaccagctcagccacctgcggcagtatgagaagagcatcgtcaactacaagccaaagattgatcagctggagggcgaccaccagctcatccaggaggcgctcatcttcgacaacaagcacaccaactacaccatggagcacatccgtgtgggctgggagcagctgctcaccaccatcgccaggaccatcaatgaggtagagaaccagatcctgacccgggatgccaagggcatcagccaggagcagatgaatgagttccgggcctccttcaaccactttgaccgggatcactccggcacactgggtcccgaggagttcaaagcctgcctcatcagcttgggttatgatattggcaacgacccccagggagaagcagaatttgcccgcatcatgagcattgtggaccccaaccgcctgggggtagtgacattccaggccttcattgacttcatgtcccgcgagacagccgacacagatacagcagaccaagtcatggcttccttcaagatcctggctggggacaagaactacattaccatggacgagctgcgccgcgagctgccacccgaccaggctgagtactgcatcgcgcggatggccccctacaccggccccgactccgtgccaggtgctctggactacatgtccttctccacggcgctgtacggcgagagtgacctctaatccaccccgcccggccgccctcgtcttgtgcgccgtgccctgccttgcacctccgccgtcgcccatctcctgcctgggttcggtttcagctcccagcctccacccgggtgagctggggcccacgtggcatcgatcctccctgcccgcgaagtgacagtttacaaaattattttctgcaaaaaagaaaaaaaagttacgttaaaaaccaaaaaactacatattttattatagaaaaagtattttttctccaccagacaaatggaaaaaaagaggaaagattaactatttgcaccgaaatgtcttgttttgttgcgacataggaaaataaccaagcacaaagttatattccatcctttttactgatttttttttcttctatctgttccatctgctgtattcatttctccaatctcatgtccattttggtgtgggagtcggggtagggggtactcttgtcaaaaggcacattggtgcgtgtgtgtttgctagctcacttgtccatgaaaatattttatgatattaaagaaaatcttttg

SEQ ID NO: 1288 - protein, 892 aa, Homo sapien
MDHYDSQQTNDYMQPEEDWDRDLLLDPAWEKQQRKTFTAWCNSHLRKAGTQIENIEEDFRDGLKLMLLLEVISGERLAKPERGKMRVHKISNVNKALDFIASKGVKLVSIGAEEIVDGNVKMTLGMIWTIILRFAIQDISVEETSAKEGLLLWCQRKTAPYKNVNIQNFHISWKDGLGFCALIHRHRPELIDYGKLRKDDPLTNLNTAFDVAEKYLDIPKMLDAEDIVGTARPDEKAIMTYVSSFYHAFSGAQKAETAANRICKVLAVNQENEQLMEDYEKLASDLLEWIRRTIPWLENRVPENTMHAMQQKLEDFRDYRRLHKPPKVQEKCQLEINFNTLQTKLRLSNRPAFMPSEGRMVSDINNAWGCLEQVEKGYEEWLLNEIRRLERLDHLAEKFRQKASIHEAWTDGKEAMLRQKDYETATLSEIKALLKKHEAFESDLAAHQDRVEQIAAIAQELNELDYYDSPSVNARCQKICDQWDNLGALTQKRREALERTEKLLETIDQLYLEYAKRAAPFNNWMEGAMEDLQDTFIVHTIEEIQGLTTAHEQFKATLPDADKERLAILGIHNEVSKIVQTYHVNMAGTNPYTTITPQEINGKWDHVRQLVPRRDQALTEEHARQQHNERLRKQFGAQANVIGPWIQTKMEEIGRISIEMHGTLEDQLSHLRQYEKSIVNYKPKIDQLEGDHQLIQEALIFDNKHTNYTMEHIRVGWEQLLTTIARTINEVENQILTRDAKGISQEQMNEFRASFNHFDRDHSGTLGPEEFKACLISLGYDIGNDPQGEAEFARIMSIVDPNRLGVVTFQAFIDFMSRETADTDTADQVMASFKILAGDKNYITMDELRRELPPDQAEYCIARMAPYTGPDSVPGALDYMSFSTALYGESDL

SEQ ID NO: 1289 - DNA, 3198 bp, Homo sapien
ctgccactgccacctcgcggatcaggagccagcgttgttcgcccgacgcctcgctgccggtgggaggaagcgagagggaagccgcttgggctcttgtcgccgctgctcgcccaccgcctggaagagccgagccccggccagtcggtcgcttgccaccgctcgtagccgttacccgcgggccgccacagccgccggcgggagaggcgcgcgccatggcttctggagccgattcaaaaggtgatgacctatcaacagccattctcaaacagaagaaccgtcccaatcggttaattgttgatgaagccatcaatgaggacaacagtgtggtgtccttgtcccagcccaagatggatgaattgcagttgttccgaggtgacacagtgttgctgaaaggaaagaagagacgagaagctgtttgcatcgtcctttctgatgatacttgttctgatgagaagattcggatgaatagagttgttcggaataaccttcgtgtacgcctaggggatgtcatcagcatccagccatgccctgatgtgaagtacggcaaacgtatccatgtgctgcccattgatgacacagtggaaggcattactggtaatctcttcgaggtataccttaagccgtacttcctggaagcgtatcgacccatccggaaaggagacatttttcttgtccgtggtgggatgcgtgctgtggagttcaaagtggtggaaacagatcctagcccttattgcattgttgctccagacacagtgatccactgcgaaggggagcctatcaaacgagaggatgaggaagagtccttgaatgaagtagggtatgatgacattggtggctgcaggaagcagctagctcagatcaaagagatggtggaactgcccctgagacatcctgccctctttaaggcaattggtgtgaagcctcctagaggaatcctgctttacggacctcctggaacaggaaagaccctgattgctcgagctgtagcaaatgagactggagccttcttcttcttgatcaatggtcctgagatcatgagcaaattggctggtgagtctgagagcaaccttcgtaaagcctttgaggaggctgagaagaatgctcctgccatcatcttcattgatgagctagatgccatcgctcccaaaagagagaaaactcatggcgaggtggagcggcgcattgtatcacagttgttgaccctcatggatggcctaaagcagagggcacatgtgattgttatggcagcaaccaacagacccaacagcattgacccagctctacggcgatttggtcgctttgacagggaggtagatattggaattcctgatgctacaggacgcttagagattcttcagatccataccaagaacatgaagctggcagatgatgtggacctggaacaggtagccaatgagactcacgggcatgtgggtgctgacttagcagccctgtgctcagaggctgctctgcaagccatccgcaagaagatggatctcattgacctagaggatgagaccattgatgccgaggtcatgaactctctagcagttactatggatgacttccggtgggccttgagccagagtaacccatcagcactgcgggaaaccgtggtagaggtgccacaggtaacctgggaagacatcgggggcctagaggatgtcaaacgtgagctacaggagctggtccagtatcctgtggagcacccagacaaattcctgaagtttggcatgacaccttccaagggagttctgttctatggacctcctggctgtgggaaaactttgttggccaaagccattgctaatgaatgccaggccaacttcatctccatcaagggtcctgagctgctcaccatgtggtttggggagtctgaggccaatgtcagagaaatctttgacaaggcccgccaagctgccccctgtgtgctattctttgatgagctggattcgattgccaaggctcgtggaggtaacattggagatggtggtggggctgctgaccgagtcatcaaccagatcctgacagaaatggatggcatgtccacaaaaaaaaatgtgttcatcattggcgctaccaaccggcctgacatcattgatcctgccatcctcagacctggccgtcttgatcagctcatctacatcccacttcctgatgagaagtcccgtgttgccatcctcaaggctaacctgcgcaagtccccagttgccaaggatgtggacttggagttcctggctaaaatgactaatggcttctctggagctgacctgacagagatttgccagcgtgcttgcaagctggccatccgtgaatccatcgagagtgagattaggcgagaacgagagaggcagacaaacccatcagccatggaggtagaagaggatgatccagtgcctgagatccgtcgagatcactttgaagaagccatgcgctttgcgcgccgttctgtcagtgacaatgacattcggaagtatgagatgtttgcccagacccttcagcagagtcggggctttggcagcttcagattcccttcagggaaccagggtggagctggccccagtcagggcagtggaggcggcacaggtggcagtgtatacacagaagacaatgatgatgacctgtatggctaagtggtggtggccagcgtgcagtgagctggcctgcctggaccttgttccctgggggtggggcgcttgcccaggagagggaccaggggtgcgcccacagcctgctccattctccagtctgaacagttcagctacagtctgactctggacagggggtttctgttgcaaaaatacaaaacaaaagcgataaaataaaagcgattttcatttggtaggcggagagtgaattaccaacagggaattgggccttgggcctatgccatttctgttgtagtttggggcagtgcaggggacctgtgtggggtgtgaaccaaggcactactgccacctgccacagtaaagcatctgcacttgactcaatgctgcccgagccctcccttccccctatccaacctgggtaggtgggtaggggccacagttgctggatgtttatatagagagtaggttgatttattttacatgcttttgagttaatgttggaaaactaatcacaagcagtttctaaaccaaaaaatgacatgttgtaaaaggacaataaacgttgggtcaaaatggaaaaaaaaaaaaa

SEQ ID NO: 1290 - protein, 806 aa, Homo sapien
MASGADSKGDDLSTAILKQKNRPNRLIVDEAINEDNSVVSLSQPKMDELQLFRGDTVLLKGKKRREAVCIVLSDDTCSDEKIRMNRVVRNNLRVRLGDVISIQPCPDVKYGKRIHVLPIDDTVEGITGNLFEVYLKPYFLEAYRPIRKGDIFLVRGGMRAVEFKVVETDPSPYCIVAPDTVIHCEGEPIKREDEEESLNEVGYDDIGGCRKQLAQIKEMVELPLRHPALFKAIGVKPPRGILLYGPPGTGKTLIARAVANETGAFFFLINGPEIMSKLAGESESNLRKAFEEAEKNAPAIIFIDELDAIAPKREKTHGEVERRIVSQLLTLMDGLKQRAHVIVMAATNRPNSIDPALRRFGRFDREVDIGIPDATGRLEILQIHTKNMKLADDVDLEQVANETHGHVGADLAALCSEAALQAIRKKMDLIDLEDETIDAEVMNSLAVTMDDFRWALSQSNPSALRETVVEVPQVTWEDIGGLEDVKRELQELVQYPVEHPDKFLKFGMTPSKGVLFYGPPGCGKTLLAKAIANECQANFISIKGPELLTMWFGESEANVREIFDKARQAAPCVLFFDELDSIAKARGGNIGDGGGAADRVINQILTEMDGMSTKKNVFIIGATNRPDIIDPAILRPGRLDQLIYIPLPDEKSRVAILKANLRKSPVAKDVDLEFLAKMTNGFSGADLTEICQRACKLAIRESIESEIRRERERQTNPSAMEVEEDDPVPEIRRDHFEEAMRFARRSVSDNDIRKYEMFAQTLQQSRGFGSFRFPSGNQGGAGPSQGSGGGTGGSVYTEDNDDDLYG

SEQ ID NO: 1291 - DNA, 2968 bp, Homo sapien
cggcgccgcaggggattgaggggttgactgagcgttgcgagccttagctttctcccgaacgccagcgctgaggacacgatgtcgcggctctcccgctcactgctttgggccgccacctgcctgggcgtgctctgcgtgctgtccgcggacaagaacacgacccagcacccgaacgtgacgactttagcgcccatctccaacgtaacctcggcgccggtgacgtccctcccgctggtcaccactccggcaccagaaacctgtgaaggtcgaaacagctgcgtttcctgttttaatgttagcgttgttaatactacctgcttttggatagaatgtaaagatgagagctattgttcacataactcaacagttagtgattgtcaagtggggaacacgacagacttctgttccgctaaacccacagttcagccctccccttctacaacttccaagacagttactacatcaggtacaacaaataacactgtgactccaacctcacaacctgtgcgaaagtctacctttgatgcagccagtttcattggaggaattgtcctggtcttgggtgtgcaggctgtaattttctttctttataaattctgcaaatctaaagaacgaaattaccacactctgtaaacagacccattgaattaataaggactggtgattcatttgtgtaactcactgaagccaaaatactatcttttaagatgtcccacatggaagacgctattccaggatctttaaatttccatggatgcatataggatgtttgggagcatcatccgtgaagaaaaaatcaattaaatcattgtgttcaacaggaatatttaaaatattctgcatgaatcctgtggctgtcttattttaaatagctgctgctgtgggattatattttttttccttaacatgccaaatataactttctgaaagtgatggaaaatgttgtcttgtgcagacaacatcatggctcttggcagtttaaatttagtaattttaatttagtgaacagaattgagaagaacgtgccaaatgagaatcaattaggtggatttttggctgtcatttcaaaagtggaataaatttattaatttagtagtactaaatggtatccttagattaaaattttgtgcttgataacagctgttttttctacattagaaataagatgccacacaaggaactacattccagatttaaagaaatgaaaggataccattagtgtgtataacagattattgttcatacttgtaaagcatcttatgtcattgagaatataaagaacagtgccttagaagacagtgaaaggtaagctctagcttaatgtctatgatttgttctttgacattaaggaaggtaaggattggtcagaggatgtaacttgatgtgagcagtagtaaacctgttttagatatcatactgttaatattttattgaaaatttatttcagagcggagaaacttaagctaaagtctgttatacagaattgaaagccttcgtatcttgaacctcccaacatttttcttatggctgttgaaaagtatagagctaaattgatttaattacactttcctttgtactttaaaaaaaagtatgctagcactattgtaccttgaaaggatttccaccagactgtcttgagtagtgacttctttggtgaggcaagaaggatatacattattttagaatcatttactatttaaatgagacaatcatattattttagaatcatttattttaaatgagacaatcattttaagttttaagataacagaagtgaccaatgtaatttcacaacacctaaggattttttggttgatcaggttactgtagatttttactgattgtcctggatgaatagactgtgctttttctttttctctcccttccttcttggtttcccatagtataataagcatgcatactttaacttctatagttttctcctttagagggtcgtcttcagttttagaggtttacttctcccttgcctttgactcattggactagtgcagaggctttaagtagtttaaaatgggcttttgcttttctaggtcattaacgttttttatttagtttctttagccaatagtggctgagtttcgcacttgattttcaatattttatagtaagaaatgacaaactgctttgtttcatttcataaacaaactctgcatttagataactattaaaggttgttaagatgaagatttactgtttctttgttactcgttggtacagctgtttgttttacttgcacatttgtacatatacttaatgttttcaagtgccttaattgtttaaaatctctggcttcaaagtttcttggggaaaggtcggtttacctcacattttttgtttccattagtaatattctaggtacctcacaaaatgtattatggtgccatggctgttagtttttagtgagtgctgtaggattaattcgaaaataggcagaattccattcctcccaaggtggcaaaaattagctatactgatgtaattgtcatttacctgggtatgaattccctgacacacattcatgtcaacatatgtagcaaattttgtgaaaacataacaatttgaagcttctgtaattttgagcactgctctaacaacaagcataatataaaattagttagattttgcaagtctacaaatgagctcttgcaacagaactcacagcctttttacttttttcccctaactttagcaatgtagtatcttgagccattaatttttgggtttttttaaaatccagaaggtatatagaaaccttttcagatttttcatctgatttgttcttgcagatgttcttctatcaaataccttattttaccttacagatatttgttgcacaggcagatactgctgtatttagacatttctatttcagttcattaaaaactgcaaaaccaatctgtatcatgtaccaaactgacttaaaataaatctacatgtttattgaatt

SEQ ID NO: 1292 - protein, 184 aa, Homo sapien
MSRLSRSLLWAATCLGVLCVLSADKNTTQHPNVTTLAPISNVTSAPVTSLPLVTTPAPETCEGRNSCVSCFNVSVVNTTCFWIECKDESYCSHNSTVSDCQVGNTTDFCSAKPTVQPSPSTTSKTVTTSGTTNNTVTPTSQPVRKSTFDAASFIGGIVLVLGVQAVIFFLYKFCKSKERNYHTL

SEQ ID NO: 1293 - DNA, 9078 bp, Homo sapien
ctgaactagttgccagtgatcttgaaacgtgacagtaaccaagagataaataggtgacaatgacaggaaaattagatgtagtaaaagagagtgtttgagagcagaagctatggcaactaaagactggatttgaatccttcctagcttggtgacatgagcaaattacttgatttaagtgagcattttcccatctgtacagtggagataacgataattgtgcctgctaagaagaattgctgtgaagattagtgaaataatgcatgtaaaacatttggtacagtatgtgacacatagtacaaatagtttgctaggaagattgttattattcttcacttgtgatattgtgaagttttcatacagcaaattggacatcatgagatggattgattaaataaatagatttgaacttcaaggactggtagtgttcttgctttggaaagaagaaacttggtttatcctaataatagtaggataataatggtgaagtgataggtacaagtaatagtgtttatgatgcgctggtgatgataggaaaagaaagccattatatgggcaagagctagaagtaataaaatggtgcatttttcagtgatgtttggcctatgtagctattctctgataactataaaaatccttattattgaagattcttcaggaaaaaaaaacccttagtctgaaactttagcaccaatcccccttgccccccattgaaatacgtatttttaaaacatggcttttgataatgtgagggttttttcctttttgcgatttagcagtgctgattgtgtattgcagtagttgtgagagcattagaagcagcagtcgataggaggatggaaggtctggatgccgccttggggagttaggagattggcagacttaccctgtaccactctagccctactcctttgcccaagacagaaacacactgagatggataggagaatatgagcagttgataggaaagttctcagtggagtcaggatttaggttaggccaggagattgagaatataacagtttgtgtatgatgaaatggcatatttcacagaatgcagtaaaagcaggtagggtacaagtgcagcaacaggaagatgtcttttcttcattcagcaaacacttatttgagagcttaccatgtgctaggcacatacaaagataaataagatgcccttgatgatcctctatttaaaggagacatgtaaacaggttaacttagagtagagatggtgaatatgtgaacctgaggaaaggaagaaatagattaaattatctggagagagaggaaaagtcagcagaatggggacgagaatctttcggagctcagtgttctgataggagttatttccttgggcataggttccaagtatttttctaatataccatagaagccaggaaaactttcttctgttatctcaaatgatttaattactgacttgagtttgtgttgtctccttagacttgtgcaccatggacaattttgctgagggagatttcactgtggcggattatgccttgttagaagattgccctcacgtggatgattgtgtctttgctgctgaatttatgagcaatgattatgttcgtgtgactcagctttactgtgatggggtgggtgtgcaatataaagattatatccaaagtgagaggaatttggaatttgacatctgcagtatatggtgtagtaaaccaatttctgtcctgcaagattattgcgatgccattaaaataaacatcttctggccacttctgtttcaacatcaaaacagttccgtaatatcacgattgcatccctgtgtggacgccaacaattcacgtgcttctgagataaatttgaagaaactacaacatcttgagttgatggaagatattgtggatttggcaaagaaagttgctaatgattcattccttattggaggcttattgagaattggttgtaaaatagaaaataaaatcttggcaatggaagaagctctgaattggataaaatatgcaggcgatgtaacaattctaactaaattaggatcaattgacaattgttggcctatgttaagtattttctttactgaatacaagtaccacataactaaaattgtaatggaagactgcaatttgcttgaagaacttaaaactcaaagttgtatggattgtatagaggaaggagaactaatgaaaatgaaaggaaatgaagagttttccaaagaaagatttgatatagctattatctattacaccagagccattgaatatagacctgaaaactaccttctttatggtaaccgagctctttgttttcttcgtactggacagtttagaaatgcactcggtgatggaaagagagccactattctgaagaacacttggccaaagggtcattatcgttattgtgatgctctttctatgctgggggaatatgactgggccctgcaagcaaacataaaagctcaaaaactctgtaaaaatgaccctgagggaatcaaggatctaattcagcagcatgtaaagttacaaaaacaaatagaagacctacaaggtcgaacagcaaataaggatccaattaaagccttttatgaaaacagggcctacacacctaggagtttatcagcacctatatttactacttcacttaactttgtggagaaggaaagagatttcagaaaaattaatcacgaaatggccaacggtggtaatcagaatctaaaggtggcggatgaggcgttgaaggtagatgattgtgactgtcatcctgaattttcaccaccatcaagtcagcctccaaaacataaaggaaaacaaaaatctcgaaacaatgaatcagaaaagttcagttctagttcaccattgactttaccagcagatttgaagaacatcttggagaaacagttttctaaatcttccagagctgcacaccaggattttgctaatataatgaaaatgctgagaagcttaattcaagatggctatatggccttattggagcagcgttgccgcagcgctgcacaggcctttacagagttgctgaacggtttagatcctcaaaaaataaagcaattgaacctggccatgattaactatgttttggtcgtctatggacttgccatttctctccttggaataggacagcctgaggaattatctgaagccgaaaaccagtttaagaggattattgaacactaccccagtgagggccttgattgcttggcctactgtggaattggaaaagtgtatttgaaaaaaaacagatttctagaagctctcaatcactttgagaaagcaagaaccttgatttatcgtcttcctggagtgttaacttggcccacgagtaatgtgattattgaagagtctcagccacaaaaaataaagatgctgttagagaaatttgttgaagaatgcaagttccctccagtgccagatgccatttgttgctatcagaagtgccatggatattctaagatccagatatacataactgatccagactttaagggttttatacgcatcagctgttgccagtactgtaaaatagaatttcacatgaattgctggaagaagttaaaaactacaacctttaatgataaaattgacaaggattttctacaaggaatatgtcttacccctgactgtgaaggtgtcatttctaagattatcatcttcagcagtggtggtgaagttaaatgtgaatttgaacacaaggtcataaaagaaaaggttcctccaagacctattctgaaacagaaatgttctagcctagagaaactaagactgaaagaagacaaaaaattgaagagaaagatccaaaaaaaagaagcaaaaaagttagcacaagaaagaatggaggaggacttaagagaaagtaatccacccaaaaatgaagagcagaaagaaactgtagacaatgttcagcgttgtcagttccttgatgacagaattctacagtgtataaagcagtatgctgacaagattaaatccggcatacagaatacagccatgcttctcaaagaattgctttcttggaaagttttgagcacagaagactatacaacctgtttttctagcagaaattttctaaatgaagcagtggactatgttattcgccacttgattcaagaaaataacagagtaaagacaagaatatttctgcatgttttgagtgagcttaaagaagtggagcccaaattagccgcctggatccaaaaacttaatagctttggcttagatgccacaggaactttcttttctcgttatggagcatctcttaaactgcttgattttagtatcatgactttcctctggaatgagaaatatggtcacaaactagactctatagaaggaaagcaacttgattatttctctgagccagcatcattgaaggaagcccgttgtttaatatggctgctagaagaacacagagacaagttcccagcattgcatagtgctttagatgaattctttgatataatggacagccgctgtactgtgttaaggaaacaagatagtggtgaagcaccgtttagttcaaccaaggtgaaaaacaaaagcaagaaaaagaagccaaaggattcaaagcctatgttagttgggtctggaacaacttcagtaacttcaaataatgagatcatcacttcaagtgaagaccatagcaatcgaaattcagattctgcaggcccatttgcagtgcctgaccatcttcggcaagatgtagaagaattcgaagctctctatgaccaacacagtaacgaatatgttgtccgcaataagaagctatgggacatgaacccaaaacaaaaatgttcaactctatatgattacttctctcagtttttggaggaacatggtcccttggacatgagtaacaagatgttctctgcagaatatgagtttttcccagaagaaactcgacagatactagaaaaagcaggaggtttaaaaccttttctcttgggatgccctcgttttgttgtgattgacaactgtattgcactgaagaaggttgcatcacggctcaagaaaaaaaggaagaagaaaaacattaaaacaaaagtagaagaaatttcaaaagcaggggagtatgtacgagttaaactacaactgaatccagctgctagggaatttaaaccagatgtaaagtctaaaccagtgtcagattcatcttcagcaccagcttttgaaaatgtgaaacccaaacctgtgtctgcaaattctcccaagccagcttgtgaagatgtgaaggccaaaccagtatccgacaattcttctagacaagtttctgaggatgggcaacccaaaggggtctcttctaattctcctaaaccaggctctgaggatgcaaattacaagcgagtctcctgtaattcccccaaaccggttcttgaggatgtgaaaccaacttattgggctcaatcccatttggtcacaggatactgtacgtatcttcctttccagagatttgatatcacccagacaccgccagcatacataaacgtgttaccaggtttgccccagtacaccagcatatatacacccttggccagcctttctcctgaatatcagctaccaagatcagtaccagtggtgccgtcttttgtagccaatgacagagcagataaaaatgctgctgcctattttgagggtcatcatttgaatgctgagaatgttgctggtcaccagattgcctctgaaacacagatccttgagggctctttgggaatatctgtaaagtcacactgcagcacaggtgatgctcatacagtcctgagtgagtctaacagaaatgatgagcactgtggaaattctaacaacaaatgtgaagtaattccagaaagcaccagtgcagtaacaaacattccacacgtgcagatggttgccatacaggtatcttggaacataatacaccaagaagtcaatactgagccatataatccttttgaggaacgacaaggggaaatttcacggattgaaaaggagcaccaagtattacaagaccaacttcaagaagtgtatgaaaattatgagcagataaaacttaagggcttagaagagaccagggacctggaagagaagttgaaaaggcacttagaagaaaacaagatctcaaagacggaattagattggttccttcaagatttggaaagagaaattaaaaaatggcaacaggaaaaaaaagaaatccaagaaagactaaaatcactgaagaagaaaattaaaaaggtttcaaatgccagtgaaatgtatacccagaaaaatgatggaaaggaaaaggaacatgaattacatctggatcagtcccttgaaatcagcaacacacttacaaatgagaaaatgaaaatagaagagtatataaagaaagggaaagaggattatgaagagagtcatcagagagctgtggctgcagaggtatccgtacttgaaaactggaaggagagtgaagtgtataagctacagatcatggagtcacaagcagaagcctttctgaagaagctggggctgattagccgtgatcctgcagcatatcctgacatggagtctgatatacgttcatgggaattgtttctttctaatgttacaaaagaaattgagaaagcaaagtctcagtttgaagaacaaattaaggcaattaaaaatggttctcggctcagtgaactttctaaagtgcagatttctgagctttcatttcctgcctgtaacacggttcatcccgagttactccctgagtcttcaggccacgatggccaagggcttgtgacttctgcaagcgacgtgactggaaaccacgcagcacttcacagggatcctagtgtgttctctgctggtgattccccaggggaggctccttctgcgctgttgccagggccaccccctggtcagcctgaagccactcagctgacagggccaaaacgggctggccaggcagctctgtcagaacgaagccctgtggctgatcggaagcagcctgttcctccaggacgtgctgcgcgttcaagccagtctccaaaaaagccgttcaatagtattattgagcacctgtcagtggtattcccatgttacaacagcactgagcttgctggttttattaaaaaagtgcgaagcaaaaacaagaactcactctcaggattgagtattgatgaaattgtccaaagagtgacagaacacattctagatgaacagaaaaagaaaaagccaaacccaggaaaggacaagaggacttatgagcccagctctgccacccccgtgaccaggtcctcccagggctcaccctcggtggttgttgcaccatcacccaaaaccaaggggcagaaagcagaagatgtccctgtgaggattgcactgggtgcaagttcctgtgaaatatgccacgaggtgttcaaatcaaaaaacgtgcgtgtgctcaaatgtgggcacaagtatcacaaagggtgctttaagcagtggcttaaagggcagagcgcttgcccggcctgccagggtcgtgatctcctgacagaagagtcaccttctggaagaggctggcccagtcagaatcaggagctgccttcctgctcttctaggtagtcacacttcactaaagtgtcatccaccagtgtgttgaatccgaagaatgacaattttctaccactggtgtaaaaaacaaacatttgaagacccttgtgcattgtgtgtcacaaagctaaatacatggaaatcgttaatatcgctgatattaagtaatttccccactctgagtgaatactttgatgattgccaacagtggctaataaaatgacggctaccacactcatgggtcactggggctgcgcagggctctttgaggtgggtggcttcttttggaaagtactatgaacgtctcgaagcagtattctagtgataagaattcttaacatagccaagcgccccacgtttgttccccacgtttgttccccttttctgtttgaaaaacctgttctggtagctccacaagagagatgatactgactttttaaattttttacaagagtctgtattcctgatatgcctatatttttcctcaaagattctgcattttaaggatgggcataagcaaactatattttaataatttatagttaatgttaaaatattggctgatttagaccaaaagattcaaatctcctctttgtgaaatcccatctgcatttgattttttattattttatgttcccccgttagattgttttaagtgtttgcttttcatcttttatagatgtaatctgattttcaaaaatcattaacactttttaattagtatcgactaagactttttccccctggaatcgaggctgtgtgtccgtcatcccagcccccggttggagcctgctctttgaactccgctgccttccttagcagcttctgtcctcttctgtgagtcagtcagcgagtgcttgggatccgcatccagccgtgctgagcacacaacaggctgtgtgtggaaatggccaccaccattctccttccccaccccaccacaaaaagagaagctgtgtctttagacaaccctgaggtatctgtgttacaatcgttctgtgtttgatatttgtgtaaagtatgcatgcagtcttgtactgtgacctaagaacaaaactgtaactgcattagaaaccatgaaaaaattagatattgttttgtgacttttagacagtggtaaatatagaaccatgaattctggtcacattccatttctctccaacatgaaggatcaaaaaatgtttttcaatgtgttctttgttccactggaaacttagagtcatgagtttatgagctgatttggtcaccttcctctgcctttgttcactgtgagttctgatgtcttagtgacttagttcttagaagctcacgccttagtttgaaacagattctccacggtggtccccaaaacactgtctgcatatccataagaattgagcgctatgggtgttaacgtgcatgaggatcagtttgcagcagcaagtacaaaaggagaagaggaacatccgttgaatgagtgtgttttgtacataacttcagatacttgtgaacatgccttatatttgtccaacaactgtcagaataaagaacattctaaaatgag

SEQ ID NO: 1294 - protein, 2000 aa, Homo sapien
MDNFAEGDFTVADYALLEDCPHVDDCVFAAEFMSNDYVRVTQLYCDGVGVQYKDYIQSERNLEFDICSIWCSKPISVLQDYCDAIKINIFWPLLFQHQNSSVISRLHPCVDANNSRASEINLKKLQHLELMEDIVDLAKKVANDSFLIGGLLRIGCKIENKILAMEEALNWIKYAGDVTILTKLGSIDNCWPMLSIFFTEYKYHITKIVMEDCNLLEELKTQSCMDCIEEGELMKMKGNEEFSKERFDIAIIYYTRAIEYRPENYLLYGNRALCFLRTGQFRNALGDGKRATILKNTWPKGHYRYCDALSMLGEYDWALQANIKAQKLCKNDPEGIKDLIQQHVKLQKQIEDLQGRTANKDPIKAFYENRAYTPRSLSAPIFTTSLNFVEKERDFRKINHEMANGGNQNLKVADEALKVDDCDCHPEFSPPSSQPPKHKGKQKSRNNESEKFSSSSPLTLPADLKNILEKQFSKSSRAAHQDFANIMKMLRSLIQDGYMALLEQRCRSAAQAFTELLNGLDPQKIKQLNLAMINYVLVVYGLAISLLGIGQPEELSEAENQFKRIIEHYPSEGLDCLAYCGIGKVYLKKNRFLEALNHFEKARTLIYRLPGVLTWPTSNVIIEESQPQKIKMLLEKFVEECKFPPVPDAICCYQKCHGYSKIQIYITDPDFKGFIRISCCQYCKIEFHMNCWKKLKTTTFNDKIDKDFLQGICLTPDCEGVISKIIIFSSGGEVKCEFEHKVIKEKVPPRPILKQKCSSLEKLRLKEDKKLKRKIQKKEAKKLAQERMEEDLRESNPPKNEEQKETVDNVQRCQFLDDRILQCIKQYADKIKSGIQNTAMLLKELLSWKVLSTEDYTTCFSSRNFLNEAVDYVIRHLIQENNRVKTRIFLHVLSELKEVEPKLAAWIQKLNSFGLDATGTFFSRYGASLKLLDFSIMTFLWNEKYGHKLDSIEGKQLDYFSEPASLKEARCLIWLLEEHRDKFPALHSALDEFFDIMDSRCTVLRKQDSGEAPFSSTKVKNKSKKKKPKDSKPMLVGSGTTSVTSNNEIITSSEDHSNRNSDSAGPFAVPDHLRQDVEEFEALYDQHSNEYVVRNKKLWDMNPKQKCSTLYDYFSQFLEEHGPLDMSNKMFSAEYEFFPEETRQILEKAGGLKPFLLGCPRFVVIDNCIALKKVASRLKKKRKKKNIKTKVEEISKAGEYVRVKLQLNPAAREFKPDVKSKPVSDSSSAPAFENVKPKPVSANSPKPACEDVKAKPVSDNSSRQVSEDGQPKGVSSNSPKPGSEDANYKRVSCNSPKPVLEDVKPTYWAQSHLVTGYCTYLPFQRFDITQTPPAYINVLPGLPQYTSIYTPLASLSPEYQLPRSVPVVPSFVANDRADKNAAAYFEGHHLNAENVAGHQIASETQILEGSLGISVKSHCSTGDAHTVLSESNRNDEHCGNSNNKCEVIPESTSAVTNIPHVQMVAIQVSWNIIHQEVNTEPYNPFEERQGEISRIEKEHQVLQDQLQEVYENYEQIKLKGLEETRDLEEKLKRHLEENKISKTELDWFLQDLEREIKKWQQEKKEIQERLKSLKKKIKKVSNASEMYTQKNDGKEKEHELHLDQSLEISNTLTNEKMKIEEYIKKGKEDYEESHQRAVAAEVSVLENWKESEVYKLQIMESQAEAFLKKLGLISRDPAAYPDMESDIRSWELFLSNVTKEIEKAKSQFEEQIKAIKNGSRLSELSKVQISELSFPACNTVHPELLPESSGHDGQGLVTSASDVTGNHAALHRDPSVFSAGDSPGEAPSALLPGPPPGQPEATQLTGPKRAGQAALSERSPVADRKQPVPPGRAARSSQSPKKPFNSIIEHLSVVFPCYNSTELAGFIKKVRSKNKNSLSGLSIDEIVQRVTEHILDEQKKKKPNPGKDKRTYEPSSATPVTRSSQGSPSVVVAPSPKTKGQKAEDVPVRIALGASSCEICHEVFKSKNVRVLKCGHKYHKGCFKQWLKGQSACPACQGRD

SEQ ID NO: 1295 - DNA, 937 bp, Homo sapien
gttcttgcctggtgtcggtggttagtttctgcgacttgtgttgggactgctgataggaagatgtcttcaggaaatgctaaaattgggcaccctgcccccaacttcaaagccacagctgttatgccagatggtcagtttaaagatatcagcctgtctgactacaaaggaaaatatgttgtgttcttcttttaccctcttgacttcacctttgtgtgccccacggagatcattgctttcagtgatagggcagaagaatttaagaaactcaactgccaagtgattggtgcttctgtggattctcacttctgtcatctagcatgggtcaatacacctaagaaacaaggaggactgggacccatgaacattcctttggtatcagacccgaagcgcaccattgctcaggattatggggtcttaaaggctgatgaaggcatctcgttcaggggcctttttatcattgatgataagggtattcttcggcagatcactgtaaatgacctccctgttggccgctctgtggatgagactttgagactagttcaggccttccagttcactgacaaacatggggaagtgtgcccagctggctggaaacctggcagtgataccatcaagcctgatgtccaaaagagcaaagaatatttctccaagcagaagtgagcgctgggctgttttagtgccaggctgcggtgggcagccatgagaacaaaacctcttctgtattttttttttccattagtaaaacacaagacttcagattcagccgaattgtggtgtcttacaaggcaggcctttcctacagggggtggagagaccagcctttcttcctttggtaggaatggcctgagttggcgttgtgggcaggctactggtttgtatgatgtattagtagagcaacccattaatcttttgtagtttgtattaaacttgaactgag

SEQ ID NO: 1296 - protein, 199 aa, Homo sapien
MSSGNAKIGHPAPNFKATAVMPDGQFKDISLSDYKGKYVVFFFYPLDFTFVCPTEIIAFSDRAEEFKKLNCQVIGASVDSHFCHLAWVNTPKKQGGLGPMNIPLVSDPKRTIAQDYGVLKADEGISFRGLFIIDDKGILRQITVNDLPVGRSVDETLRLVQAFQFTDKHGEVCPAGWKPGSDTIKPDVQKSKEYFSKQK

SEQ ID NO: 1297 - DNA, 2741 bp, Homo sapien
ggcacgagggagagagaactagtctcgagtttttttttttttttttgtgcaggtaggaaatgtctttattattggccttgagtcatcatgtagtgtctgacataggttacgtgtccagaggatctgcctggcacacgctagctacccctgcccactggagcagcccctctggccgacgccaggcctttgtccatcatgccagggaagccaaccccaccatcccacaagttcatgctaggggtgctgaggaacaaggctgtcctaggattggaccctccatcctggacaggggtcctggggaggatgaggctgaggcctggatgatcagtctctttttggtttcatgatcatttaaaaaacagaaaagacaaacatttcacagtctttaaaaaatagaagtctgaggagagaagccagagtcctgggccccgggaggcccctcgaggcctcagcattccctgtcccttgaggtctgtctgcaggcctggccacagcacacgtggcccgttattggagccaggcctacaccccagcaaccatgtccaagggacctgcagttggtattgatcttggcaccacctactcttgtgtgggtgttttccagcacggaaaagtcgagataattgccaatgatcagggaaaccgaaccactccaagctatgtcgcctttacggacactgaacggttgatcggtgatgccgcaaagaatcaagttgcaatgaaccccaccaacacagtttttgatgccaaacgtctgattggacgcagatttgatgatgctgttgtccagtctgatatgaaacattggccctttatggtggtgaatgatgctggcaggcccaaggtccaagtagaatacaagggagagaccaaaagcttctatccagaggaggtgtcttctatggttctgacaaagatgaaggaaattgcagaagcctaccttgggaagactgttaccaatgctgtggtcacagtgccagcttactttaatgactctcagcgtcaggctaccaaagatgctggaactattgctggtctcaatgtacttagaattattaatgagccaactgctgctgctattgcttacggcttagacaaaaaggttggagcagaaagaaacgtgctcatctttgacctgggaggtggcacttttgatgtgtcaatcctcactattgaggatggaatctttgaggtcaagtctacagctggagacacccacttgggtggagaagattttgacaaccgaatggtcaaccattttattgctgagtttaagcgcaagcataagaaggacatcagtgagaacaagagagctgtaagacgcctccgtactgcttgtgaacgtgctaagcgtaccctctcttccagcacccaggccagtattgagatcgattctctctatgaaggaatcgacttctatacctccattacccgtgcccgatttgaagaactgaatgctgacctgttccgtggcaccctggacccagtagagaaagcccttcgagatgccaaactagacaagtcacagattcatgatattgtcctggttggtggttctactcgtatccccaagattcagaagcttctccaagacttcttcaatggaaaagaactgaataagagcatcaaccctgatgaagctgttgcttatggtgcagctgtccaggcagccatcttgtctggagacaagtctgagaatgttcaagatttgctgctcttggatgtcactcctctttcccttggtattgaaactgctggtggagtcatgactgtcctcatcaagcgtaataccaccattcctaccaagcagacacagaccttcactacctattctgacaaccagcctggtgtgcttattcaggtttatgaaggcgagcgtgccatgacaaaggataacaacctgcttggcaagtttgaactcacaggcatacctcctgcaccccgaggtgttcctcagattgaagtcacttttgacattgatgccaatggtatactcaatgtctctgctgtggacaagagtacgggaaaagagaacaagattactatcactaatgacaagggccgtttgagcaaggaagacattgaacgtatggtccaggaagctgagaagtacaaagctgaagatgagaagcagagggacaaggtgtcatccaagaattcacttgagtcctatgccttcaacatgaaagcaactgttgaagatgagaaacttcaaggcaagattaacgatgaggacaaacagaagattctggacaagtgtaatgaaattatcaactggcttgataagaatcagactgctgagaaggaagaatttgaacatcaacagaaagagctggagaaagtttgcaaccccatcatcaccaagctgtaccagagtgcaggaggcatgccaggaggaatgcctgggggatttcctggtggtggagctcctccctctggtggtgcttcctcagggcccaccattgaagaggttgattaagccaaccaagtgtagatgtagcattgttccacacatttaaaacatttgaaggacctaaattcgtagcaaattctgtggcagttttaaaaagttaagctgctatagtaagttactgggcattctcaatacttgaatatggaacatatgcacaggggaaggaaataacattgcactttataaacactgtattgtaagtggaaaatgcaatgtcttaaataaaactatttaaaattggcaccataaaaaaaaaaaaaaaaaaaaa

SEQ ID NO: 1298 - protein, 646 aa, Homo sapien
MSKGPAVGIDLGTTYSCVGVFQHGKVEIIANDQGNRTTPSYVAFTDTERLIGDAAKNQVAMNPTNTVFDAKRLIGRRFDDAVVQSDMKHWPFMVVNDAGRPKVQVEYKGETKSFYPEEVSSMVLTKMKEIAEAYLGKTVTNAVVTVPAYFNDSQRQATKDAGTIAGLNVLRIINEPTAAAIAYGLDKKVGAERNVLIFDLGGGTFDVSILTIEDGIFEVKSTAGDTHLGGEDFDNRMVNHFIAEFKRKHKKDISENKRAVRRLRTACERAKRTLSSSTQASIEIDSLYEGIDFYTSITRARFEELNADLFRGTLDPVEKALRDAKLDKSQIHDIVLVGGSTRIPKIQKLLQDFFNGKELNKSINPDEAVAYGAAVQAAILSGDKSENVQDLLLLDVTPLSLGIETAGGVMTVLIKRNTTIPTKQTQTFTTYSDNQPGVLIQVYEGERAMTKDNNLLGKFELTGIPPAPRGVPQIEVTFDIDANGILNVSAVDKSTGKENKITITNDKGRLSKEDIERMVQEAEKYKAEDEKQRDKVSSKNSLESYAFNMKATVEDEKLQGKINDEDKQKILDKCNEIINWLDKNQTAEKEEFEHQQKELEKVCNPIITKLYQSAGGMPGGMPGGFPGGGAPPSGGASSGPTIEEVD

SEQ ID NO: 1299 - DNA, 5015 bp, Homo sapien
cgggtggcggctcgggacggaggacgcgctagtgttcttctgtgtggcagttcagaatgatggatcaagctagatcagcattctctaacttgtttggtggagaaccattgtcatatacccggttcagcctggctcggcaagtagatggcgataacagtcatgtggagatgaaacttgctgtagatgaagaagaaaatgctgacaataacacaaaggccaatgtcacaaaaccaaaaaggtgtagtggaagtatctgctatgggactattgctgtgatcgtctttttcttgattggatttatgattggctacttgggctattgtaaaggggtagaaccaaaaactgagtgtgagagactggcaggaaccgagtctccagtgagggaggagccaggagaggacttccctgcagcacgtcgcttatattgggatgacctgaagagaaagttgtcggagaaactggacagcacagacttcaccggcaccatcaagctgctgaatgaaaattcatatgtccctcgtgaggctggatctcaaaaagatgaaaatcttgcgttgtatgttgaaaatcaatttcgtgaatttaaactcagcaaagtctggcgtgatcaacattttgttaagattcaggtcaaagacagcgctcaaaactcggtgatcatagttgataagaacggtagacttgtttacctggtggagaatcctgggggttatgtggcgtatagtaaggctgcaacagttactggtaaactggtccatgctaattttggtactaaaaaagattttgaggatttatacactcctgtgaatggatctatagtgattgtcagagcagggaaaatcacctttgcagaaaaggttgcaaatgctgaaagcttaaatgcaattggtgtgttgatatacatggaccagactaaatttcccattgttaacgcagaactttcattctttggacatgctcatctggggacaggtgacccttacacacctggattcccttccttcaatcacactcagtttccaccatctcggtcatcaggattgcctaatatacctgtccagacaatctccagagctgctgcagaaaagctgtttgggaatatggaaggagactgtccctctgactggaaaacagactctacatgtaggatggtaacctcagaaagcaagaatgtgaagctcactgtgagcaatgtgctgaaagagataaaaattcttaacatctttggagttattaaaggctttgtagaaccagatcactatgttgtagttggggcccagagagatgcatggggccctggagctgcaaaatccggtgtaggcacagctctcctattgaaacttgcccagatgttctcagatatggtcttaaaagatgggtttcagcccagcagaagcattatctttgccagttggagtgctggagactttggatcggttggtgccactgaatggctagagggatacctttcgtccctgcatttaaaggctttcacttatattaatctggataaagcggttcttggtaccagcaacttcaaggtttctgccagcccactgttgtatacgcttattgagaaaacaatgcaaaatgtgaagcatccggttactgggcaatttctatatcaggacagcaactgggccagcaaagttgagaaactcactttagacaatgctgctttccctttccttgcatattctggaatcccagcagtttctttctgtttttgcgaggacacagattatccttatttgggtaccaccatggacacctataaggaactgattgagaggattcctgagttgaacaaagtggcacgagcagctgcagaggtcgctggtcagttcgtgattaaactaacccatgatgttgaattgaacctggactatgagaggtacaacagccaactgctttcatttgtgagggatctgaaccaatacagagcagacataaaggaaatgggcctgagtttacagtggctgtattctgctcgtggagacttcttccgtgctacttccagactaacaacagatttcgggaatgctgagaaaacagacagatttgtcatgaagaaactcaatgatcgtgtcatgagagtggagtatcacttcctctctccctacgtatctccaaaagagtctcctttccgacatgtcttctggggctccggctctcacacgctgccagctttactggagaacttgaaactgcgtaaacaaaataacggtgcttttaatgaaacgctgttcagaaaccagttggctctagctacttggactattcagggagctgcaaatgccctctctggtgacgtttgggacattgacaatgagttttaaatgtgatacccatagcttccatgagaacagcagggtagtctggtttctagacttgtgctgatcgtgctaaattttcagtagggctacaaaacctgatgttaaaattccatcccatcatcttggtactactagatgtctttaggcagcagcttttaatacagggtagataacctgtacttcaagttaaagtgaataaccacttaaaaaatgtccatgatggaatattcccctatctctagaattttaagtgctttgtaatgggaactgcctctttcctgttgttgttaatgaaaatgtcagaaaccagttatgtgaatgatctctctgaatcctaagggctggtctctgctgaaggttgtaagtggtcgcttactttgagtgatcctccaacttcatttgatgctaaataggagataccaggttgaaagaccttctccaaatgagatctaagcctttccataaggaatgtagctggtttcctcattcctgaaagaaacagttaactttcagaagagatgggcttgttttcttgccaatgaggtctgaaatggaggtccttctgctggataaaatgaggttcaactgttgattgcaggaataaggccttaatatgttaacctcagtgtcatttatgaaaagaggggaccagaagccaaagacttagtatattttcttttcctctgtcccttcccccataagcctccatttagttctttgttatttttgtttcttccaaagcacattgaaagagaaccagtttcaggtgtttagttgcagactcagtttgtcagactttaaagaataatatgctgccaaattttggccaaagtgttaatcttaggggagagctttctgtccttttggcactgagatatttattgtttatttatcagtgacagagttcactataaatggtgtttttttaatagaatataattatcggaagcagtgccttccataattatgacagttatactgtcggttttttttaaataaaagcagcatctgctaataaaacccaacagatactggaagttttgcatttatggtcaacacttaagggttttagaaaacagccgtcagccaaatgtaattgaataaagttgaagctaagatttagagatgaattaaatttaattaggggttgctaagaagcgagcactgaccagataagaatgctggttttcctaaatgcagtgaattgtgaccaagttataaatcaatgtcacttaaaggctgtggtagtactcctgcaaaattttatagctcagtttatccaaggtgtaactctaattcccattttgcaaaatttccagtacctttgtcacaatcctaacacattatcgggagcagtgtcttccataatgtataaagaacaaggtagtttttacctaccacagtgtctgtatcggagacagtgatctccatatgttacactaagggtgtaagtaattatcgggaacagtgtttcccataattttcttcatgcaatgacatcttcaaagcttgaagatcgttagtatctaacatgtatcccaactcctataattccctatcttttagttttagttgcagaaacattttgtggtcattaagcattgggtgggtaaattcaaccactgtaaaatgaaattactacaaaatttgaaatttagcttgggtttttgttacctttatggtttctccaggtcctctacttaatgagatagtagcatacatttataatgtttgctattgacaagtcattttaactttatcacattatttgcatgttacctcctataaacttagtgcggacaagttttaatccagaattgaccttttgacttaaagcagggggactttgtatagaaggtttgggggctgtggggaaggagagtcccctgaaggtctgacacgtctgcctacccattcgtggtgatcaattaaatgtaggtatgaataagttcgaagctccgtgagtgaaccatcattataaacgtgatgatcagctgtttgtcatagggcagttggaaacggcctcctagggaaaagttcatagggtctcttcaggttcttagtgtcacttacctagatttacagcctcacttgaatgtgtcactactcacagtctctttaatcttcagttttatctttaatctcctcttttatcttggactgacatttagcgtagctaagtgaaaaggtcatagctgagattcctggttcgggtgttacgcacacgtacttaaatgaaagcatgtggcatgttcatcgtataacacaatatgaatacagggcatgcattttgcagcagtgagtctcttcagaaaacccttttctacagttagggttgagttacttcctatcaagccagtacgtgctaacaggctcaatattcctgaatgaaatatcagactagtgacaagctcctggtcttgagatgtcttctcgttaaggagatgggccttttggaggtaaaggataaaatgaatgagttctgtcatgattcactattctagaacttgcatgacctttactgtgttagctctttgaatgttcttgaaattttagactttctttgtaaacaaataatatgtccttatcattgtataaaagctgttatgtgcaacagtgtggagattccttgtctgatttaataaaatacttaaacactgaaaaaaaaaaaaaaaaaaa

SEQ ID NO: 1300 - protein, 760 aa, Homo sapien
MMDQARSAFSNLFGGEPLSYTRFSLARQVDGDNSHVEMKLAVDEEENADNNTKANVTKPKRCSGSICYGTIAVIVFFLIGFMIGYLGYCKGVEPKTECERLAGTESPVREEPGEDFPAARRLYWDDLKRKLSEKLDSTDFTGTIKLLNENSYVPREAGSQKDENLALYVENQFREFKLSKVWRDQHFVKIQVKDSAQNSVIIVDKNGRLVYLVENPGGYVAYSKAATVTGKLVHANFGTKKDFEDLYTPVNGSIVIVRAGKITFAEKVANAESLNAIGVLIYMDQTKFPIVNAELSFFGHAHLGTGDPYTPGFPSFNHTQFPPSRSSGLPNIPVQTISRAAAEKLFGNMEGDCPSDWKTDSTCRMVTSESKNVKLTVSNVLKEIKILNIFGVIKGFVEPDHYVVVGAQRDAWGPGAAKSGVGTALLLKLAQMFSDMVLKDGFQPSRSIIFASWSAGDFGSVGATEWLEGYLSSLHLKAFTYINLDKAVLGTSNFKVSASPLLYTLIEKTMQNVKHPVTGQFLYQDSNWASKVEKLTLDNAAFPFLAYSGIPAVSFCFCEDTDYPYLGTTMDTYKELIERIPELNKVARAAAEVAGQFVIKLTHDVELNLDYERYNSQLLSFVRDLNQYRADIKEMGLSLQWLYSARGDFFRATSRLTTDFGNAEKTDRFVMKKLNDRVMRVEYHFLSPYVSPKESPFRHVFWGSGSHTLPALLENLKLRKQNNGAFNETLFRNQLALATWTIQGAANALSGDVWDIDNEF

SEQ ID NO: 1301 - DNA, 2742 bp, Homo sapien
gtcactcgtataaaaacctatgctttgaaggttctcgtgtgtctcggcctgcaggtctcgctcagagctgtgtccctgaacatccaccctgctggggtggcttgacgcacttctgtgcaaatctgttcgctcgcaaccctacctacctctctcccgaaccggagaaaaccttcggcggggtccttccgggttttgtgtcgaatctgcggcggcgacccggcgccgcgtcacgcggtggtgaatgtgcggcagtacgcgcgccgcgtcgtttacgcggcgatttcatcatgctccgagccggcggcgcgcgccgcttccgtcgccaccctctctggacagcccagggccgcaggctcatgccctctccgcgtccagtgctgcttagaggtgctcgcgccgctctgctgctgctgctgccgccccggctcttagcccgaccctcgctcctcctccgccggtccctcagcgcggcctcctgcgccccgatctccttgcccgccgccgcctcccggagcagcatggacggcgcgggggctgaggaggtgctggcacctctgaggctagcagtgcgccagcagggagatcttgtgcgaaaactcaaagaagataaagcaccccaagtagacgtagacaaagcagtggctgagctcaaagcccgcaagagggttctggaagcaaaggagctggcgttacagcccaaagatgatattgtagaccgagcaaaaatggaagataccctgaagaggaggtttttctatgatcaagcttttgctatttatggaggtgttagtggtctgtatgactttgggccagttggctgtgctttgaagaacaatattattcagacctggaggcagcactttatccaagaggaacagatcctggagatcgattgcaccatgctcacccctgagccagttttaaagacctctggccatgtagacaaatttgctgacttcatggtgaaagacgtaaaaaatggagaatgttttcgtgctgaccatctattaaaagctcatttacagaaattgatgtctgataagaagtgttctgtcgaaaagaaatcagaaatggaaagtgttttggcccagcttgataactatggacagcaagaacttgcggatctttttgtgaactataatgtaaaatctcccattactggaaatgatctatcccctccagtgtcttttaacttaatgttcaagactttcattgggcctggaggaaacatgcctgggtacttgagaccagaaactgcacaggggattttcttgaatttcaaacgacttttggagttcaaccaaggaaagttgccttttgctgctgcccagattggaaattcttttagaaatgagatctcccctcgatctggactgatcagagtcagagaattcacaatggcagaaattgagcactttgtagatcccagtgagaaagaccaccccaagttccagaatgtggcagaccttcacctttatttgtattcagcaaaagcccaggtcagcggacagtccgctcggaaaatgcgcctgggagatgctgttgaacagggtgtgattaataacacagtattaggctatttcattggccgcatctacctctacctcacgaaggttggaatatctccagataaactccgcttccggcagcacatggagaatgagatggcccattatgcctgtgactgttgggatgcagaatccaaaacatcctacggttggattgagattgttggatgtgctgatcgttcctgttatgacctctcctgtcatgcacgagccaccaaagtcccacttgtagctgagaaacctctgaaagaacccaaaacagtcaatgttgttcagtttgaacccagtaagggagcaattggtaaggcatataagaaggatgcaaaactggtgatggagtatcttgccatttgtgatgagtgctacattacagaaatggagatgctgctgaatgagaaaggggaattcacaattgaaactgaagggaaaacatttcagttaacaaaagacatgatcaatgtgaagagattccagaaaacactatatgtggaagaagttgttccgaatgtaattgaaccttccttcggcctgggtaggatcatgtatacggtatttgaacatacattccatgtacgagaaggagatgaacagagaacattcttcagtttccctgctgtagttgctccattcaaatgttccgtcctcccactgagccaaaaccaggagttcatgccatttgtcaaggaattatcggaagccctgaccaggcatggagtatctcacaaagtagacgattcctctgggtcaatcggaaggcgctatgccaggactgatgagattggcgtggcttttggtgtcaccattgactttgacacagtgaacaagaccccccacactgcaactctgagggaccgtgactcaatgcggcagataagagcagagatctctgagctgcccagcatagtccaagacctagccaatggcaacatcacatgggctgatgtggaggccaggtatcctctgtttgaagggcaagagactggtaaaaaagagacaatcgaggaatgaggacaattttgacaacttttgaccacttgcgctaataaaaaaaaaaaaactactcttatgtccactttacaaaagaaaacagcattgtgattactcccagggaccgtattttatcttcagtggctgcctgattttacccccacaattaaagttgaaggaatcctga

SEQ ID NO: 1302 - protein, 685 aa, Homo sapien
MDGAGAEEVLAPLRLAVRQQGDLVRKLKEDKAPQVDVDKAVAELKARKRVLEAKELALQPKDDIVDRAKMEDTLKRRFFYDQAFAIYGGVSGLYDFGPVGCALKNNIIQTWRQHFIQEEQILEIDCTMLTPEPVLKTSGHVDKFADFMVKDVKNGECFRADHLLKAHLQKLMSDKKCSVEKKSEMESVLAQLDNYGQQELADLFVNYNVKSPITGNDLSPPVSFNLMFKTFIGPGGNMPGYLRPETAQGIFLNFKRLLEFNQGKLPFAAAQIGNSFRNEISPRSGLIRVREFTMAEIEHFVDPSEKDHPKFQNVADLHLYLYSAKAQVSGQSARKMRLGDAVEQGVINNTVLGYFIGRIYLYLTKVGISPDKLRFRQHMENEMAHYACDCWDAESKTSYGWIEIVGCADRSCYDLSCHARATKVPLVAEKPLKEPKTVNVVQFEPSKGAIGKAYKKDAKLVMEYLAICDECYITEMEMLLNEKGEFTIETEGKTFQLTKDMINVKRFQKTLYVEEVVPNVIEPSFGLGRIMYTVFEHTFHVREGDEQRTFFSFPAVVAPFKCSVLPLSQNQEFMPFVKELSEALTRHGVSHKVDDSSGSIGRRYARTDEIGVAFGVTIDFDTVNKTPHTATLRDRDSMRQIRAEISELPSIVQDLANGNITWADVEARYPLFEGQETGKKETIEE

SEQ ID NO: 1303 - DNA, 2068 bp, Homo sapien
cggcagccctcctacctgcgcacgtggtgccgctgctgctgcctcccgctcgccctgaacccagtgcctgcagccatggctcccggccagctcgccttatttagtgtctctgacaaaaccggccttgtggaatttgcaagaaacctgaccgctcttggtttgaatctggtcgcttccggagggactgcaaaagctctcagggatgctggtctggcagtcagagatgtctctgagttgacgggatttcctgaaatgttggggggacgtgtgaaaactttgcatcctgcagtccatgctggaatcctagctcgtaatattccagaagataatgctgacatggccagacttgatttcaatcttataagagttgttgcctgcaatctctatccctttgtaaagacagtggcttctccaggtgtaactgttgaggaggctgtggagcaaattgacattggtggagtaaccttactgagagctgcagccaaaaaccacgctcgagtgacagtggtgtgtgaaccagaggactatgtggtggtgtccacggagatgcagagctccgagagtaaggacacctccttggagactagacgccagttagccttgaaggcattcactcatacggcacaatatgatgaagcaatttcagattatttcaggaaacagtacagcaaaggcgtatctcagatgcccttgagatatggaatgaacccacatcagacccctgcccagctgtacacactgcagcccaagcttcccatcacagttctaaatggagcccctggatttataaacttgtgcgatgctttgaacgcctggcagctggtgaaggaactcaaggaggctttaggtattccagccgctgcctctttcaaacatgtcagcccagcaggtgctgctgttggaattccactcagtgaagatgaggccaaagtctgcatggtttatgatctctataaaaccctcacacccatctcagcggcatatgcaagagcaagaggggctgataggatgtcttcatttggtgattttgttgcattgtccgatgtttgtgatgtaccaactgcaaaaattatttccagagaagtatctgatggtataattgccccaggatatgaagaagaagccttgacaatactttccaaaaagaaaaatggaaactattgtgtccttcagatggaccaatcttacaaaccagatgaaaatgaagttcgaactctctttggtcttcatttaagccagaagagaaataatggtgtcgtcgacaagtcattatttagcaatgttgttaccaaaaataaagatttgccagagtctgccctccgagacctcatcgtagccaccattgctgtcaagtacactcagtctaactctgtgtgctacgccaagaacgggcaggttatcggcattggagcaggacagcagtctcgtatacactgcactcgccttgcaggagataaggcaaactattggtggcttagacaccatccacaagtgctttcgatgaagtttaaaacaggagtgaagagagcagaaatctccaatgccatcgatcaatatgtgactggaaccattggcgaggatgaagatttgataaagtggaaggcactgtttgaggaagtccctgagttactcactgaggcagagaagaaggaatgggttgagaaactgactgaagtttctatcagctctgatgccttcttccctttccgagataacgtagacagagctaaaaggagtggtgtggcgtacattgcggctccctccggttctgctgctgacaaagttgtgattgaggcctgcgacgaactgggaatcatcctcgctcatacgaaccttcggctcttccaccactgattttaccacacactgttttttggcttgcttatgtgtaggtgaacagtcacgcctgaaactttgaggataactttttaaaaaaataaaacagtatctcttaaaacaatgttttgatctacataaacattgtaaaaattttcaatcacgctttttaactttcttaccacaaaaaaatgataagtgggtgaagtgatggttatgttaattagcgtgc

SEQ ID NO: 1304 - protein, 592 aa, Homo sapien
MAPGQLALFSVSDKTGLVEFARNLTALGLNLVASGGTAKALRDAGLAVRDVSELTGFPEMLGGRVKTLHPAVHAGILARNIPEDNADMARLDFNLIRVVACNLYPFVKTVASPGVTVEEAVEQIDIGGVTLLRAAAKNHARVTVVCEPEDYVVVSTEMQSSESKDTSLETRRQLALKAFTHTAQYDEAISDYFRKQYSKGVSQMPLRYGMNPHQTPAQLYTLQPKLPITVLNGAPGFINLCDALNAWQLVKELKEALGIPAAASFKHVSPAGAAVGIPLSEDEAKVCMVYDLYKTLTPISAAYARARGADRMSSFGDFVALSDVCDVPTAKIISREVSDGIIAPGYEEEALTILSKKKNGNYCVLQMDQSYKPDENEVRTLFGLHLSQKRNNGVVDKSLFSNVVTKNKDLPESALRDLIVATIAVKYTQSNSVCYAKNGQVIGIGAGQQSRIHCTRLAGDKANYWWLRHHPQVLSMKFKTGVKRAEISNAIDQYVTGTIGEDEDLIKWKALFEEVPELLTEAEKKEWVEKLTEVSISSDAFFPFRDNVDRAKRSGVAYIAAPSGSAADKVVIEACDELGIILAHTNLRLFHH

SEQ ID NO: 1305 - DNA, 1946 bp, Homo sapien
aattcgggggccgtggagtttgtgacatacgaggtgacacccctcgagtcacttcccttcaactccagctggagcgcctgcttggctttgggttcgttctgcagccttcgccccgctcctagcctcagggccggactccagcgcagagcccagcccagcgcagcctgccagcagccacccagccgcccagccgcccagccccgcacgaaacccggccagagcttcctagcagcccgagccatgaacaccgaaatgtatcagacccccatggaggtggcggtctaccagctgcacaatttctccatctccttcttctcttctctgcttggaggggatgtggtttccgttaagctggacaacagtgcctccggagccagcgtggtggccatagacaacaagatcgaacaggccatggatctggtgaagaatcatctgatgtatgctgtgagagaggaggtggagatcctgaaggagcagatccgagagctggtggagaagaactcccagctagagcgtgagaacaccctgttgaagaccctggcaagcccagagcagctggagaagttccagtcctgtctgagccctgaagagccagctcccgaatccccacaagtgcccgaggcccctggtggttctgcggtgtaagtggctctgtcctcagggtgggcagagccactaaacttgttttacctagttctttccagtttgtttttggctccccaagcatcatctcacgaggagaactttacacctagcacagctggtgccaagagatgtcctaaggacatggccacctgggtccactccagcgacagacccctgacaagagcaggtctctggaggctgagttgcatggggcctagtaacaccaagccagtgagcctctaatgctactgcgccctgggggctcccagggcctgggcaacttagctgcaactggcaaaggagaagggtagtttgaggtgtgacaccagtttgctccagaaagtttaaggggtctgtttctcatctccatggacatcttcaacagcttcacctgacaacgactgttcctatgaagaagccacttgtgttttaagcagaggcaacctctctcttctcctctgtttcgtgaaggcaggggacacagatgggagagattgagccaagtcagccttctgttggttaatatggtataatgcatggctttgtgcacagcccagtgtgggattacagctttgggatgaccgcttacaaagttctgtttggttagtattggcatagtttttctatatagccataaatgcgtatatatacccatagggctagatctgtatcttagtgtagcgatgtatacatatacacatccacctacatgttgaagggcctaaccagccttgggagtattgactggtcccttacctcttatggctaagtctttgactgtgttcatttaccaagttgacccagtttgtcttttaggttaagtaagaactcgagagtaaaggcaaggaggggggccagcctctgaatgcggccacggatgccttgctgctgcaaccctttccccagctgtccactgaaacgtgaagtcctgttttgaatgccaaacccaccattcactggtgctgactacatagaatgggttgagagaagatcagtttgggcttcacagtgtcatttgaaaaagcgtttttgttttgttttgaattattgtggaaaactttcaagtgaacagaaggatggtgtcctactgtggatgagggatgaacaaggggatggctttgatccaatggagcctgggaggtgtgcccagaaagcttgtctgtagcgggttttgtgagagtgaacactttccactttttgacaccttatcctgatgtatggttccaggatttggattttgattttccaaatgtagcttgaaatttcaataaactttgctctgtttttctaaaaaataaaaa

SEQ ID NO: 1306 - protein, 134 aa, Homo sapien
MNTEMYQTPMEVAVYQLHNFSISFFSSLLGGDVVSVKLDNSASGASVVAIDNKIEQAMDLVKNHLMYAVREEVEILKEQIRELVEKNSQLERENTLLKTLASPEQLEKFQSCLSPEEPAPESPQVPEAPGGSAV

SEQ ID NO: 1307 - DNA, 2102 bp, Homo sapien
ttaaggcaggggctgatatagaacttggctgctccacacctctgatggaggcatctcaggagggacacctggaattggttaaatatttgctggcttctggcgctaatgtgcatgctacaacagcaacaggagacacagccttaacctatgcttgtgaaaatggacatacggatgttgcagatgttttacttcaagcaggggctgatttagacaagcaggaggacatgaagactattttggagggcatagatccggccaagcatcaggaacatgaatctgaaggtggaagaacacctttgatgaaagctgcaagagctggtcatttgtgcactgtgcagtttcttattagcaaaggtgccaatgttaacagggctacagccaataatgatcatacagtagtgtcgctggcatgtgcaggaggccacctggcagttgttgagcttctcttggctcatggggctgaccctactcatcgactcaaggatggttcaacaatgctcattgaagctgcaaagggtggccatactaatgtagtttcttatctgttggattatccaaataatgttctgtcagttcccaccacagatgtgtctcagctccctccaccttctcaagatcagtctcaggaacctgacagaacttcacaggagaactctcctgcccttttaggagtgcaaaaagctgtgagtaccagagtgcccactggttccaacagttcttctcagaccacagagtgtcttacacctgaatcctgttcgcagactacaagcaatgtggcttcccaatcgatgcctcctgtgtatccttcagttgacgttgatgcacatactgagagcaatcatgacacagcattaacactagcttgtgcaggtggtcatgaagaacttgtatctgtgctcattgcacgggatgccaaaattgaacacagagacaaaaaaggtttcacaccactaatcctggcagcaacagcagggcatgttggagttgttgaaatccttttggataaaggtggagatatagaagcacagtctgaacgaactaaggatactccgctttcattggcatgttctggtggacgtcaggaggtggtagacttgctgctggctcgaggtgcaaataaagaacataggaacgtatctgattatacaccactgagtctagctgcgtctggaggatatgttaatatcattaagattctgcttaatgctggggcagaaattaattcaaggactgggagtaaactaggtatttctcccctgatgttggctgcaatgaatggacatgttcctgcagtaaaattgctgctcgatatgggttcagacattaatgcccaaatagagaccaatcggaacacggctctcaccctggcctgtttccagggccgagcagaagtagtgagtttgcttctggaccgaaaagccaatgttgaacatagggcaaagacgggtcttacccccttgatggaagcagcttctggagggtatgcagaggttggaagagttcttcttgataaaggagcagatgttaatgctccccctgtgccttcctcaagagatactgctttaacaatagcagcagacaaaggtcactacaaattttgtgaactcctgattcataggggagcccacattgatgttcgtaacaaaaagggaaatacgccactttggctggcatccaatggaggtcattttgatgttgtgcagttgctagtgcaagcaggtgctgatgtggatgcagcagataaccggaaaatcacacctcttatgtcagcatttcgcaagggtcatgtaaaagttgttcaatatttggtaaaggaagtaaatcagttcccttctgatatagaatgcatgagatacatagcaacaattacagataaggaactgttgaaaaaatgtcatcaatgtgtcgaaaccattgtgaaggctaaagaccagcaagctgcggaagcaaataagaatgcgagtattcttttaaaggaacttgatctggaaaagtcaagagaagagagcagaaagcaggctcttgctgctaaaagagaaaaaagaaaagaaaagagaaaaaaaaaaaaaaaaaaaaaaaaaaaaaaaaaaaaaaaaaaaaaa

SEQ ID NO: 1308 - protein, 685 aa, Homo sapien
MEASQEGHLELVKYLLASGANVHATTATGDTALTYACENGHTDVADVLLQAGADLDKQEDMKTILEGIDPAKHQEHESEGGRTPLMKAARAGHLCTVQFLISKGANVNRATANNDHTVVSLACAGGHLAVVELLLAHGADPTHRLKDGSTMLIEAAKGGHTNVVSYLLDYPNNVLSVPTTDVSQLPPPSQDQSQEPDRTSQENSPALLGVQKAVSTRVPTGSNSSSQTTECLTPESCSQTTSNVASQSMPPVYPSVDVDAHTESNHDTALTLACAGGHEELVSVLIARDAKIEHRDKKGFTPLILAATAGHVGVVEILLDKGGDIEAQSERTKDTPLSLACSGGRQEVVDLLLARGANKEHRNVSDYTPLSLAASGGYVNIIKILLNAGAEINSRTGSKLGISPLMLAAMNGHVPAVKLLLDMGSDINAQIETNRNTALTLACFQGRAEVVSLLLDRKANVEHRAKTGLTPLMEAASGGYAEVGRVLLDKGADVNAPPVPSSRDTALTIAADKGHYKFCELLIHRGAHIDVRNKKGNTPLWLASNGGHFDVVQLLVQAGADVDAADNRKITPLMSAFRKGHVKVVQYLVKEVNQFPSDIECMRYIATITDKELLKKCHQCVETIVKAKDQQAAEANKNASILLKELDLEKSREESRKQALAAKREKRKEKRKKKKKKKKKKKKKK

SEQ ID NO: 1309 - DNA, 792 bp, Homo sapien
atggcgcttgccagcgtgttggagagaccgctaccggtgaaccagcgcgggtttttcggacttgggggtcgtgcagatctgctggatctaggtccagggagtctcagtgatggtctgagcctggccgcgccaggctggggtgtcccagaagagccaggaatcgaaatgcttcatggaacaaccaccctggccttcaagttccgccatggagtcatagttgcagctgactccagggctacagcgggtgcttacattgcctcccagacggtgaagaaggtgatagagatcaacccatacctgctaggcaccatggctgggggcgcagcggattgcagcttctgggaacggctgttggctcggcaatgtcgaatctatgagcttcgaaataaggaacgcatctctgtagcagctgcctccaaactgcttgccaacatggtgtatcagtacaaaggcatggggctgtccatgggcaccatgatctgtggctgggataagagaggccctggcctctactacgtggacagtgaagggaaccggatttcaggggccaccttctctgtaggttctggctctgtgtatgcatatggggtcatggatcggggctattcctatgacctggaagtggagcaggcctatgatctggcccgtcgagccatctaccaagccacctacagagatgcctactcaggaggtgcagtcaacctctaccacgtgcgggaggatggctggatccgagtctccagtgacaatgtggctgatctacatgagaagtatagtggctctaccccctga

SEQ ID NO: 1310 - protein, 263 aa, Homo sapien
MALASVLERPLPVNQRGFFGLGGRADLLDLGPGSLSDGLSLAAPGWGVPEEPGIEMLHGTTTLAFKFRHGVIVAADSRATAGAYIASQTVKKVIEINPYLLGTMAGGAADCSFWERLLARQCRIYELRNKERISVAAASKLLANMVYQYKGMGLSMGTMICGWDKRGPGLYYVDSEGNRISGATFSVGSGSVYAYGVMDRGYSYDLEVEQAYDLARRAIYQATYRDAYSGGAVNLYHVREDGWIRVSSDNVADLHEKYSGSTP

SEQ ID NO: 1311 - DNA, 979 bp, Rattus norvegicus
cggtgcctggtgcgggagctacggggcccagggattgtgtttaaagtagtgcttctaccaacatgtcccgtggttccagcgccggttttgaccgccacattaccattttttcacccgagggtcggctctaccaagtagaatatgcttttaaggctattaaccagggtggccttacatcagtagctgtcagagggaaagactgtgcagtaattgtcacacagaagaaagtacctgacaaattattggattccagcacagtgactcacttattcaagataactgaaaacattggttgtgtgatgaccggaatgacagctgacagcagatcccaggtacagagggcacgctatgaggcagctaactggaaatacaagtatggctatgagattcctgtggacatgctgtgtaaaagaattgccgatatttctcaggtctacacacagaatgctgaaatgaggcctcttggttgttgtatgattttaattggtatagatgaagagcaaggccctcaggtatataagtgtgatcctgcaggttactactgtgggtttaaagccactgcagcgggagttaaacaaactgagtcaaccagcttccttgaaaaaaaagtgaagaagaaatttgattggacatttgaacagacagtggaaactgcaattacatgcctgtctactgttctatcaattgatttcaaaccttcagaaatagaagttggagtagtgacagttgaaaatcctaaattcaggattcttacagaagcagagattgatgctcaccttgttgctctagcagagagagactaaacattgtcgttagtttaccagatccgtgatgccacttacctgtgtgtttggtaacaacaaacaaacatcatggaggtccctggattgaaaaaggagcctctcccactcctcctaccaccgaagtggttaggactctatataaataaaaacaaggcttttggaaaaaaaaaaaaaaa

SEQ ID NO: 1312 - protein, 246 aa, Rattus norvegicus
MSRGSSAGFDRHITIFSPEGRLYQVEYAFKAINQGGLTSVAVRGKDCAVIVTQKKVPDKLLDSSTVTHLFKITENIGCVMTGMTADSRSQVQRARYEAANWKYKYGYEIPVDMLCKRIADISQVYTQNAEMRPLGCCMILIGIDEEQGPQVYKCDPAGYYCGFKATAAGVKQTESTSFLEKKVKKKFDWTFEQTVETAITCLSTVLSIDFKPSEIEVGVVTVENPKFRILTEAEIDAHLVALAERD

SEQ ID NO: 1313 - DNA, 1277 bp, Homo sapien
gatgtggcccgtggcctagctcgtcaagttgccgtggcgcggagaactctgcaaaacaagaggctgaggattgcgttagagataaaccagttcacgccggagccccgtgagggaagcgtctccgttgggtccggccgctctgcgggactctgaggaaaagctcgcaccaggtggacgcggatctgtcaacatgggtaaaggagaccccaacaagccgcggggcaaaatgtcctcgtacgccttcttcgtgcagacctgccgggaagagcacaagaagaaacacccggactcttccgtcaatttcgcggaattctccaagaagtgttcggagagatggaagaccatgtctgcaaaggagaagtcgaagtttgaagatatggcaaaaagtgacaaagctcgctatgacagggagatgaaaaattacgttcctcccaaaggtgataagaaggggaagaaaaaggaccccaatgctcctaaaaggccaccatctgccttcttcctgttttgctctgaacatcgcccaaagatcaaaagtgaacaccctggcctatccattggggatactgcaaagaaattgggtgaaatgtggtctgagcagtcagccaaagataaacaaccatatgaacagaaagcagctaagctaaaggagaaatatgaaaaggatattgctgcatatcgtgccaagggcaaaagtgaagcaggaaagaagggccctggcaggccaacaggctcaaagaagaagaacgaaccagaagatgaggaggaggaggaggaagaagaagatgaagatgaggaggaagaggatgaagatgaagaataaatggctatcctttaatgatgcgtgtggaatgtgtgtgtgtgctcaggcaattattttgctaagaatgtgaattcaagtgcagctcaatactagcttcagtataaaaactgtacagatttttgtatagctgataagattctctgtagagaaaatacttttaaaaaatgcaggttgtagctttttgatgggctactcatacagttagattttacagcttctgatgttgaatgttcctaaatatttaatggtttttttaatttctgtgtgtatggtagcacagcaaacttgtaggaattagtatcaatagtaaattttgggttttttaggatgttgcatttcgtttttttaaaaaaaattttgtaataaaattatgtatattatttctattgtctttgtcttaatatgctaagttaattttcactttaaaaaagccatttgaagaccaaaaaaaaaaaaa

SEQ ID NO: 1314 - protein, 209 aa, Homo sapien
MGKGDPNKPRGKMSSYAFFVQTCREEHKKKHPDSSVNFAEFSKKCSERWKTMSAKEKSKFEDMAKSDKARYDREMKNYVPPKGDKKGKKKDPNAPKRPPSAFFLFCSEHRPKIKSEHPGLSIGDTAKKLGEMWSEQSAKDKQPYEQKAAKLKEKYEKDIAAYRAKGKSEAGKKGPGRPTGSKKKNEPEDEEEEEEEEDEDEEEEDEDEE

SEQ ID NO: 1315 - DNA, 1941 bp, Homo sapien
tctcttgattcctagtctctcgatatggcacctccgtcagtctttgccgaggttccgcaggcccagcctgtcctggtcttcaagctcactgccgacttcagggaggatccggacccccgcaaggtcaacctgggagtgggagcatatcgcacggatgactgccatccctgggttttgccagtagtgaagaaagtggagcagaagattgctaatgacaatagcctaaatcacgagtatctgccaatcctgggcctggctgagttccggagctgtgcttctcgtcttgcccttggggatgacagcccagcactcaaggagaagcgggtaggaggtgtgcaatctttggggggaacaggtgcacttcgaattggagctgatttcttagcgcgttggtacaatggaacaaacaacaagaacacacctgtctatgtgtcctcaccaacctgggagaatcacaatgctgtgttttccgctgctggttttaaagacattcggtcctatcgctactgggatgcagagaagagaggattggacctccagggcttcctgaatgatctggagaatgctcctgagttctccattgttgtcctccacgcctgtgcacacaacccaactgggattgacccaactccggagcagtggaagcagattgcttctgtcatgaagcaccggtttctgttccccttctttgactcagcctatcagggcttcgcatctggaaacctggagagagatgcctgggccattcgctattttgtgtctgaaggcttcgagttcttctgtgcccagtccttctccaagaacttcgggctctacaatgagagagtcgggaatctgactgtggttggaaaagaacctgagagcatcctgcaagtcctttcccagatggagaagatcgtgcggattacttggtccaatccccccgcccagggagcacgaattgtggccagcaccctctctaaccctgagctctttgaggaatggacaggtaatgtgaagacaatggctgaccggattctgaccatgagatctgaactcagggcacgactagaagccctcaaaacccctgggacctggaaccacatcactgatcaaattggcatgttcagcttcactgggttgaaccccaagcaggttgagtatctggtcaatgaaaagcacatctacctgctgccaagtggtcgaatcaacgtgagtggcttaaccaccaaaaatctagattacgtggccacctccatccatgaagcagtcaccaaaatccagtgaagaaacaccacccgtccagtaccaccaaagtagttctctgtcatgtgtgttccctgcctgcacaaacctacatgtacataccatggattagagacacttgcaggactgaaagctgctctggtgaggcagcctctgtttaaaccggccccacatgaagagaacatcccttgagacgaatttggagactgggattagagcctttggaggtcaaagcaaattaagatttttatttaagaataaaagagtactttgatcatgagacataggtatcttgtccctctcactaaaaaggagtgttgtgtgtggcggccacgtgcttctatgtggtgtttgactctgtacaaattctagtcccaaagatcaagttgtctgaaggagccaaagtgtgaatgtgggtgtcggctgcggcattaaattcatcatctcaacccagagtgtctggtctccctgctctttctgcatggttgtgtccctagtcctaagctttggttctttagggtgactgtggtaagaaggatatttaatcatgacatgcacggacacgtacatatttaactgaaacaagttttaccaaacagtatttactcgtgatgtgcgtagtgcattctgatatttttgagccattctattgtgttctacttcacctaaaaaaataaaataaaaatgttgatcaag

SEQ ID NO: 1316 - protein, 413 aa, Homo sapien
MAPPSVFAEVPQAQPVLVFKLTADFREDPDPRKVNLGVGAYRTDDCHPWVLPVVKKVEQKIANDNSLNHEYLPILGLAEFRSCASRLALGDDSPALKEKRVGGVQSLGGTGALRIGADFLARWYNGTNNKNTPVYVSSPTWENHNAVFSAAGFKDIRSYRYWDAEKRGLDLQGFLNDLENAPEFSIVVLHACAHNPTGIDPTPEQWKQIASVMKHRFLFPFFDSAYQGFASGNLERDAWAIRYFVSEGFEFFCAQSFSKNFGLYNERVGNLTVVGKEPESILQVLSQMEKIVRITWSNPPAQGARIVASTLSNPELFEEWTGNVKTMADRILTMRSELRARLEALKTPGTWNHITDQIGMFSFTGLNPKQVEYLVNEKHIYLLPSGRINVSGLTTKNLDYVATSIHEAVTKIQ

SEQ ID NO: 1317 - DNA, 846 bp, Homo sapien
cccacgcgtccgcagtaccggaggagaaagatggcggctaccttactagctgctcggggagccgggccagcaccggcttgggggccggaggcgttcactccagactgggaaagccgagaagtttccactgggaccactatcatggccgtgcagtttgacgggggcgtggttctgggggcggactccagaacaaccactgggtcctacatcgccaatcgagtgactgacaagctgacacctattcacgaccgcattttctgctgtcgctcaggctcagctgctgatacccaggcagtagctgatgctgtcacctaccagctcggtttccacagcattgaactgaatgagcctccactggtccacacagcagccagcctctttaaggagatgtgttaccgataccgggaagacctgatggcgggaatcatcatcgcaggctgggaccctcaagaaggagggcaggtgtactcagtgcctatggggggtatgatggtaaggcagtcctttgccattggaggctccgggagctcctacatctatggctatgttgatgctacctaccgggaaggcatgaccaaggaagagtgtctgcaattcactgccaatgctctcgctttggccatggagcgggatggctccagtggaggagtgatccgcctggcagccattgcagagtcaggggtagagcggcaagtacttttgggagaccagatacccaaattcgccgttgccactttaccacccgcctgaatcctgggattctagtatgcaataagagatgccctgtactgatgcaaaatttaataaagtttgtcacagagaaaaaaaaaaaaaaaaaaaaaaaaa

SEQ ID NO: 1318 - protein, 239 aa, Homo sapien
MAATLLAARGAGPAPAWGPEAFTPDWESREVSTGTTIMAVQFDGGVVLGADSRTTTGSYIANRVTDKLTPIHDRIFCCRSGSAADTQAVADAVTYQLGFHSIELNEPPLVHTAASLFKEMCYRYREDLMAGIIIAGWDPQEGGQVYSVPMGGMMVRQSFAIGGSGSSYIYGYVDATYREGMTKEECLQFTANALALAMERDGSSGGVIRLAAIAESGVERQVLLGDQIPKFAVATLPPA

SEQ ID NO: 1319 - DNA, 1679 bp, Homo sapien
atgacgaagaacgagaagaagtccctcaaccagagcctggccgagtggaagctcttcatctacaacccgaccaccggagaattcctggggcgcaccgccaagagctggggtttgatcttgctcttctacctagttttttatgggttcctggctgcactcttctcattcacgatgtgggttatgcttcagactctcaacgatgaggttccaaaataccgtgaccagattcctagcccaggactcatggtttttccaaaaccagtgaccgcattggaatatacattcagtaggtctgatccaacttcgtatgcagggtacattgaagaccttaagaagtttctaaaaccatatactttagaagaacagaagaacctcacagtctgtcctgatggagcactttttgaacagaagggtccagtttatgttgcatgtcagtttcctatttcattacttcaagcatgcagtggtatgaatgatcctgattttggctattctcaaggaaacccttgtattcttgtgaaaatgaacagaataattggattaaagcctgaaggagtgccaaggatagattgtgtttcaaagaatgaagatataccaaatgtagcagtttatcctcataatggaatgatagacttaaaatatttcccatattatgggaaaaaactgcatgttgggtatctacagccattggttgctgttcaggtcagctttgctcctaacaacactgggaaagaagtaacagttgagtgcaagattgatggatcagccaacctaaaaagtcaggatgatcgtgacaagtttttgggacgagttatgttcaaaatcacagcacgtgcatagtatgagtaggatatctccacagagtaaatgttgtgttgtctgtcttcattttgtaacagctggaccttccattctagaattatgagaccaccttggagaaaggtgtgtggtacatgacattgggttacatcataacgtgcttccagatcatagtgttcagtgtcctctgaagtaactgcctgttgcctctgctgccctttgaaccagtgtacagtcgccagatagggaccggtgaacacctgattccaaacatgtaggatgggggtcttgtcctctttttatgtggtttaattgccaagtgtctaaagcttaatatgccgtgctatgtaaatattttatggatataacaactgtcatattttgatgtcaacagagttttagggataaaatggtacccggccaacatcaagtgactttatagctgcaagaaatgtggtatgtggagaagttctgtatgtgaggaaggaaaaaaagaaaataaaagtgtgtttgaaaaatattatcttgggttctttgtaaaatttattttttacatgctgaattagcctcgatctttttgattaagagcacaaacttttttttgtaaaacatgtaaaaaaaaaaactgggattaatttttagtgttggaactgcctcttattttaggctgtagataaaatagcatttttaggttagccagtgtgactatgcacctaattttttatgagattaaattcataagacttaatttgtacaatagtttgtgaaatatcttgttactgcttttatttagcagactgtggactgtaataaagtatataaattgtgaaatataaaaacttggaacttattcaaagctt

SEQ ID NO: 1320 - protein, 279 aa, Homo sapien
MTKNEKKSLNQSLAEWKLFIYNPTTGEFLGRTAKSWGLILLFYLVFYGFLAALFSFTMWVMLQTLNDEVPKYRDQIPSPGLMVFPKPVTALEYTFSRSDPTSYAGYIEDLKKFLKPYTLEEQKNLTVCPDGALFEQKGPVYVACQFPISLLQACSGMNDPDFGYSQGNPCILVKMNRIIGLKPEGVPRIDCVSKNEDIPNVAVYPHNGMIDLKYFPYYGKKLHVGYLQPLVAVQVSFAPNNTGKEVTVECKIDGSANLKSQDDRDKFLGRVMFKITARA

SEQ ID NO: 1321 - DNA, 1432 bp, Homo sapien
cccttacatcctcctaggacccggtcggtagtcgtcgccccagcccgccgggggcgcagcgcccgagccgcggccctcgagacgggaccgagagcatcatgggcagcactgtcccgcgctccgcctccgtgctgcttctgctgctgctcctgcgccgggccgagcagccctgcggggccgagctcaccttcgagctgccggacaacgccaagcagtgcttccacgaggaggtggagcagggcgtgaagttctccctggattaccaggtcatcactggaggccactacgatgttgactgctatgtagaggacccccaggggaacaccatctacagagaaacgaagaagcagtacgacagcttcacgtaccgggctgaagtcaagggcgtttatcagttttgcttcagtaatgagttttccaccttctctcacaagaccgtctactttgactttcaagtgggcgatgagcctcccattctcccagacatggggaacagggtcacagctctcacccagatggagtccgcctgcgtgaccatccatgaggctctgaaaacggtgattgactcccagacgcattaccggctgcgggaggcccaggaccgggcccgagcggaagaccttaatagccgagtctcttactggtctgttggcgagacgattgccctgttcgtggtcagcttcagtcaggtgctactgttgaaaagcttcttcacagaaaaacgacccatcagcagggcagtccactcctagccccggcatcctgctctagggcccctcatgccccaggctggagcagctctcctaggtcacagcctgctgggctgggtcgcgtagcccagggtggaggcagaacgatgctgctgtggtagccctttgcctttcatgcccatgcttgattcttgcacctcagcagctgaaggtctcagagaccagtaatcagaaggcatccgactgcattaagtgtgcagcgctgaaaagacatttacaactaggccagggattagccactgtgggagggtggacaggcaatggttcagtggcctggctgttggcaggaactccaagtgcccaggcctcttgggcagcttagggccctgcctctgtttcatgatgcatgggtcatttgtcttgggtgtcctatcccatatggagaagaaaggggctctaagttctggctcttctttctttggggttctctgtacctgaggaaaccaggccctgggtgactttgcagatctgctcaccctcggtgagcaacagtgtcagccatgcaagcaggacagaatggtgactgggtgcccttggtgagctgtgtatttcctaggaggtagaaaactgtgggaaactgtggctaataaaaactaagtgtgagcgtcaaaaaaaaaaaaaaaaaaaaaaaaaaaaaaaaaaaaaaaaaaaaaaaaaaaaaa

SEQ ID NO: 1322 - protein, 217 aa, Homo sapien
MGSTVPRSASVLLLLLLLRRAEQPCGAELTFELPDNAKQCFHEEVEQGVKFSLDYQVITGGHYDVDCYVEDPQGNTIYRETKKQYDSFTYRAEVKGVYQFCFSNEFSTFSHKTVYFDFQVGDEPPILPDMGNRVTALTQMESACVTIHEALKTVIDSQTHYRLREAQDRARAEDLNSRVSYWSVGETIALFVVSFSQVLLLKSFFTEKRPISRAVHS

SEQ ID NO: 1323 - DNA, 4190 bp, Homo sapien
caacctccagccagtccctgggtcgggcggatcctcccagaggtggcacaatggagcgatctccaggagagggccccagccccagccccatggaccagccctctgctccctccgaccccactgaccagccccccgctgctcacgcaaagccagacccaggttctgggggccaacctgctggccctggcgcggcgggtgaggccctggcggtgctgacttcattcgggaggcggttgctggtgctgatacctgtgtatttggccggggcagtgggactcagcgtgggtttcgtgctcttcggcctcgccctctacctgggctggcgccgggtccgcgacgagaaagaacggagccttcgagcagcgaggcagctactggacgacgaggagcagctcactgcgaaaactctctatatgagtcatcgagagctacctgcctgggtcagcttcccagacgtggaaaaggctgaatggctcaataagattgtggcccaggtctggcccttcctgggccagtatatggagaagcttctggctgaaactgtggctccggctgttaggggatctaacccccatctgcaaacatttacatttacacgagtggaactgggtgaaaagccattgcgcatcattggagtcaaggttcacccaggtcagagaaaagagcagatcctgctggacttgaacatcagctatgtaggtgatgtgcagattgatgtggaagtgaagaaatatttttgcaaagcaggagtcaagggcatgcagctacatggcgttttgcgggtgatactggagccactcattggggaccttcccttcgtgggggctgtgtcaatgttcttcatccgacgcccgaccctagacatcaactggacagggatgaccaacctgctggatatcccaggacttagctcactctctgacaccatgatcatggactccattgctgccttcctcgtgttgcccaaccgattactggtgccccttgtgcctgaccttcaagatgtggctcagttgcgttcccctctgcccaggggcattattcgaattcacctgctggctgctcgagggctgagttccaaggacaaatatgtgaagggcctgattgagggcaagtcagacccatatgcacttgtgcgtttgggtacccagacattctgcagtcgtgtcattgatgaagaactcaacccacagtggggagagacttatgaggtgatggtacacgaggtcccagggcaggagattgaagtggaggtgttcgacaaggatccagataaagatgactttctgggcagaatgaagctggatgtagggaaggtgttacaggctagcgttctggatgattggttccctctacaaggtgggcaaggccaagttcacttgaggctagaatggctgtcacttttgtcagatgcagagaaactggagcaggttctacagtggaattggggagtctcctctcgaccagatcccccgtcagctgccatcttagttgtctacctggatcgggcccaggatcttcctctgaagaaggggaacaaggaacccaaccctatggtacaactgtcaattcaggatgtgactcaggagagcaaggctgtctacagtaccaactgcccagtgtgggaggaagcgttccggttcttcctacaagaccctcaaagccaggagctcgatgtgcaagtgaaggatgattccagggccctgactttaggagcactgacgctgcctctggcccgcctgctgactgccccagaactcatcctggaccagtggttccagctcagcagctctggtccaaactccagactctatatgaaactagtcatgaggatcctgtacttggattcatcagaaatatgcttccccacggtgcctggttgtcctggtgcttgggacgtggacagtgagaatccccagagaggcagcagtgtggatgccccacctcgaccctgtcacacgactcctgatagccagtttgggactgagcatgtgcttcggatccatgtattagaggcccaggacctgattgccaaagaccgtttcttggggggactggtgaagggcaagtcagacccctatgtcaaactaaagttggcaggacgaagcttccggagccatgttgttcgggaagatctcaatccccgctggaatgaggtttttgaggtgatcgtcacatcagttccaggccaagagctagaggttgaagtctttgacaaggacttggacaaggatgattttctgggcaggtgtaaagtgcgtctcaccacagtcttaaacagtggcttccttgatgagtggctgaccctggaggatgtcccatctggccgcctgcacttgcgcctggagcgtctcaccccccgtcccactgctgctgagttagaggaggtgctgcaggtgaatagtttgatccagactcagaagagtgcggagctggctgcggccctgctatccatctatatggagcgggcagaggacctcccgctgcgaaaaggcaccaagcacctcagcccttatgctactctcactgtgggagatagttctcataaaaccaagactatttcgcaaacttcagcccctgtctgggatgagagtgcctcctttctcatcaggaaaccacacactgagagcctagagttgcaggttcggggtgagggcactggcgtgctgggctcattatccctgcccctctcagagctcctcgtggctgaccagctctgcttggaccgctggtttacactcagcagtggtcaggggcaggtgctactgagagcacagctagggatcctggtgtcccagcactcgggagtggaagctcatagccacagctacagccacagctcctcatcgctgagtgaagaaccagagctctcggggggaccccctcacatcacctcctcagccccagagctccggcagcgcctaacacatgttgacagtccccttgaggctccagccgggcctctgggccaggtgaaactgactctgtggtactacagtgaagaacgaaagctggtcagcattgttcatggttgccggtcccttcgacagaatggacgtgatcctcctgatccctatgtgtcactgttgctactgccagacaagaaccgaggcaccaagaggaggacctcacagaagaagaggaccctgagtcctgaatttaatgaacggtttgagtgggaactccccctggatgaggcccagagacgaaagctggatgtctctgtcaagtctaattcctccttcatgtcaagagagcgtgagctgctggggaaggtgcagctggacctagctgagacagacctttcccagggtgtagcccggtggtatgacctgatggacaacaaggacaagggcagctcctaggagctggcgagtcccagcctgactgctctgtcttcctgccttcgtctcgctccatcaccgcctcaatgtgatgagcctaaagctagggtccaagggcagagcctgtgcccttcagccctttcacctaacaggcccatattcgggcctttgcctgaccaaagagaagaaccgtatgttccctttactgcacggcctttatccttctgggcccctggggcggggacctgagctggctgtttcctgctttgcctgcacattgttctcccttcctcccaactcctcagggccttctgtatctgtgcctggccagtggcagcactagcagtggtattagcttatgccaaatacagctttggaaggatctttttttctttaactagatggtcaccttcttccctaccacacatgggtgggaaggtggacaggctaacctctccagctgtgagcctcttagactactgcatgtagcaaatgttcagcagctcaggcccccatgtccagttctgtccccactgtcctcaaccctgtcctgaaaattctactgctttgatggctggggccagtctcttgtcactttggaaactgaggacgcgtggattctactcaagcctccaagtagtggcatatcagtcttggagctcctagctggtgatacggagagggctttggaggacttgggacagcagggccaatttttttgcccaagtgcctaggctgctaactcactgactagaacttaatctggtactttacagttttgcaccaactctgccaagccactggatcttacattaaacatcatactcaaaaaaaaaaaaaaaaaaa

SEQ ID NO: 1324 - protein, 1104 aa, Homo sapien
MERSPGEGPSPSPMDQPSAPSDPTDQPPAAHAKPDPGSGGQPAGPGAAGEALAVLTSFGRRLLVLIPVYLAGAVGLSVGFVLFGLALYLGWRRVRDEKERSLRAARQLLDDEEQLTAKTLYMSHRELPAWVSFPDVEKAEWLNKIVAQVWPFLGQYMEKLLAETVAPAVRGSNPHLQTFTFTRVELGEKPLRIIGVKVHPGQRKEQILLDLNISYVGDVQIDVEVKKYFCKAGVKGMQLHGVLRVILEPLIGDLPFVGAVSMFFIRRPTLDINWTGMTNLLDIPGLSSLSDTMIMDSIAAFLVLPNRLLVPLVPDLQDVAQLRSPLPRGIIRIHLLAARGLSSKDKYVKGLIEGKSDPYALVRLGTQTFCSRVIDEELNPQWGETYEVMVHEVPGQEIEVEVFDKDPDKDDFLGRMKLDVGKVLQASVLDDWFPLQGGQGQVHLRLEWLSLLSDAEKLEQVLQWNWGVSSRPDPPSAAILVVYLDRAQDLPLKKGNKEPNPMVQLSIQDVTQESKAVYSTNCPVWEEAFRFFLQDPQSQELDVQVKDDSRALTLGALTLPLARLLTAPELILDQWFQLSSSGPNSRLYMKLVMRILYLDSSEICFPTVPGCPGAWDVDSENPQRGSSVDAPPRPCHTTPDSQFGTEHVLRIHVLEAQDLIAKDRFLGGLVKGKSDPYVKLKLAGRSFRSHVVREDLNPRWNEVFEVIVTSVPGQELEVEVFDKDLDKDDFLGRCKVRLTTVLNSGFLDEWLTLEDVPSGRLHLRLERLTPRPTAAELEEVLQVNSLIQTQKSAELAAALLSIYMERAEDLPLRKGTKHLSPYATLTVGDSSHKTKTISQTSAPVWDESASFLIRKPHTESLELQVRGEGTGVLGSLSLPLSELLVADQLCLDRWFTLSSGQGQVLLRAQLGILVSQHSGVEAHSHSYSHSSSSLSEEPELSGGPPHITSSAPELRQRLTHVDSPLEAPAGPLGQVKLTLWYYSEERKLVSIVHGCRSLRQNGRDPPDPYVSLLLLPDKNRGTKRRTSQKKRTLSPEFNERFEWELPLDEAQRRKLDVSVKSNSSFMSRERELLGKVQLDLAETDLSQGVARWYDLMDNKDKGSS

SEQ ID NO: 1325 - DNA, 501 bp, Homo sapien
gaattcgctttggatccatttccatcggtccttacagccgctcgtcagactccagcagccaagatggtgaagcagatcgagagcaagactgcttttcaggaagccttggacgctgcaggtgataaacttgtagtagttgacttctcagccacgtggtgtgggccttgcaaaatgatcaaccctttctttcattccctctctgaaaagtattccaacgtgatattccttgaagtagatgtggatgactgtcaggatgttgcttcagagtgtgaagtcaaatgcacgccaacattccagttttttaagaagggacaaaaggtgggtgaattttctggagccaataaggaaaagcttgaagccaccattaatgaattagtctaatcatgttttctgaaaacataaccagccattggctatttaaacttgtatttttttatttacaaaatataaatatgaagacataaccagttgccatctgcgtgacaataaacattatgctaa

SEQ ID NO: 1326 - protein, 105 aa, Homo sapien
MVKQIESKTAFQEALDAAGDKLVVVDFSATWCGPCKMINPFFHSLSEKYSNVIFLEVDVDDCQDVASECEVKCTPTFQFFKKGQKVGEFSGANKEKLEATINELV

SEQ ID NO: 1327 - DNA, 2709 bp, Homo sapien
cttggagggagggattagaagccgctagactttttttcctcccctctcagtagcacggagtccgaattaattggatttcattcactggggaggaacaaaaactatctgggcagcttcattgagagagattcattgacactaagagccagcggctgcagctgggtgcagagagaacctccggctttacttctgtctcgtctgccccaaccgctagcctcggcttgggtaaggcgaggcggaattaaaccccgctccgagagcggcagcttcgcgcgcggtgcgctcggcctatgcctgccccgaggggcgtctggtaggcaccccgccctctcccgcagctcgacccccatgatagatacgctcagacccgtgcccttcgcgtcggaaatggcgatcagcaagacggtggcgtggctcaacgagcagctggagctgggcaacgagcggctgctgctgatggactgccggccgcaggagctatacgagtcgtcgcacatcgagtcggccatcaacgtggccatcccgggcatcatgctgcggcgcctgcagaagggtaacctgccggtgcgcgcgctcttcacgcgcggcgaggaccgggaccgcttcacccggcgctgtggcaccgacacagtggtgctctacgacgagagcagcagcgactggaacgagaatacgggcggcgagtcgttgctcgggctgctgctcaagaagctcaaggacgagggctgccgggcgttctacctggaaggtggcttcagtaagttccaagccgagttctccctgcattgcgagaccaatctagacggctcgtgtagcagcagctcgccgccgttgccagtgctggggctcgggggcctgcggatcagctctgactcttcctcggacatcgagtctgaccttgaccgagaccccaatagtgcaacagactcggatggtagtccgctgtccaacagccagccttccttcccagtggagatcttgcccttcctctacttgggctgtgccaaagactccaccaacttggacgtgttggaggaattcggcatcaagtacatcttgaacgtcacccccaatttgccgaatctctttgagaacgcaggagagtttaaatacaagcaaatccccatctcggatcactggagccaaaacctgtcccagtttttccctgaggccatttctttcatagatgaagcccggggcaagaactgtggtgtcttggtacattgcttggctggcattagccgctcagtcactgtgactgtggcttaccttatgcagaagctcaatctgtcgatgaacgatgcctatgacattgtcaaaatgaaaaaatccaacatatcccctaacttcaacttcatgggtcagctgctggacttcgagaggacgctgggactcagcagcccatgtgacaacagggttccagcacagcagctgtattttaccaccccttccaaccagaatgtataccaggtggactctctgcaatctacgtgaaagaccccacatccctccttgctggaatgtgtctggcccttcagcagtttctcttggcagcatcagctgggctgctttctttgtgtgtggccccaggtgtcaaaatgacaccagctgtctgtactagacaaggttaccaagtgcggaattggttaatactaacagagagatttgctccattctctttggaataacaggacatgctgtatagatacaggcagtaggtttgctctgtacccatgtgtacagcctacccatgcagggactgggattcgaggacttccaggcgcatagggtagaaccaaatgatagggtaggagcatgtgttctttagggccttgtaaggctgtttccttttgcatctggaactgactatataattgtcttcaatgaagactaattcaattttgcatatagaggagccaaagagagatttcagctctgtatttgtggtatcagtttggaaaaaaaaatctgatactccatttgattattgtaaatatttgatcttgaatcacttgacagtgtttgtttgaattgtgtttgttttttcctttgatgggcttaaaagaaattatccaaagggagaaagagcagtatgccacttcttaaaacagaacaaaacaaaaaaagaaaattgtgctcttttctaatccaaagggtatatttgcagcatgcttgactttaccaattctgatgacatctttacggacactattatcactaagaccttgttatggcgaagtctttagtctttttcatgtattttcctcatgattttttctctttatgtagtttgactatgccttacctttgtaaatatttttgcttgtgttgtcgcaaaggggataatctgggaaagacaccaaatcatgggctcactttaaaaaaagaaagaataaaaaaaccttcagctgtgctaaacagtatattacctctgtataaaattcttcagggagtgtcacctcaaatgcaatactttgggttggtttctttcctttaaaaaaatttgtataaaactggaagtgtgtgtgtgtgagcatgggtacccatttgataagagaaatgcatttgattgtgaagaagggagagttaaattctccattatgttcgtggtgtaaagtttagagctggaatttattataagaatgtaaaaccttaaattattaataaataactattttggctattgaaaaaaaaaaaaaaaaaaaaaaa

SEQ ID NO: 1328 - protein, 381 aa, Homo sapien
MIDTLRPVPFASEMAISKTVAWLNEQLELGNERLLLMDCRPQELYESSHIESAINVAIPGIMLRRLQKGNLPVRALFTRGEDRDRFTRRCGTDTVVLYDESSSDWNENTGGESLLGLLLKKLKDEGCRAFYLEGGFSKFQAEFSLHCETNLDGSCSSSSPPLPVLGLGGLRISSDSSSDIESDLDRDPNSATDSDGSPLSNSQPSFPVEILPFLYLGCAKDSTNLDVLEEFGIKYILNVTPNLPNLFENAGEFKYKQIPISDHWSQNLSQFFPEAISFIDEARGKNCGVLVHCLAGISRSVTVTVAYLMQKLNLSMNDAYDIVKMKKSNISPNFNFMGQLLDFERTLGLSSPCDNRVPAQQLYFTTPSNQNVYQVDSLQST

SEQ ID NO: 1329 - DNA, 1952 bp, Homo sapien
ccagcctcggagggagggattagaagccgctagactttttttcctcccctctcagtagcacggagtccgaattaattggatttcattcactggggaggaacaaaaactatctgggcagcttcattgagagagattcattgacactaagagccagcgctgcagctggtgcagagagaacctccggctttgacttctgtctcgtctgccccaaggccgctagcctcggcttgggaaggcgaggcggaattaaaccccgctccgagagcgcacgttcgcgcgcggtgcgtcggccattgcctgccccgaggggcgtctggtaggcaccccgccctctcccgcagctcgacccccatgatagatacgctcagacccgtgcccttcgcgtcggaaatggcgatcagcaagacggtggcgtggctcaacgagcagctggagctgggcaacgagcggctgctgctgatggactgccggccgcaggagctatacgagtcgtcgcacatcgagtcggccatcaacgtggccatcccgggcatcatgctgcggcgcctgcagaagggtaacctgccggtgcgcgcgctcttcacgcgcggcgaggaccgggaccgcttcacccggcgctgtggcaccgacacagtggtgctctacgacgagagcagcagcgactggaacgagaatacgggcggcgagtcgttgctcgggctgctgctcaagaagctcaaggacgagggctgccgggcgttctacctggaagatgaagcccggggcaagaactgtggtgtcttggtacattgcttggctggcattagccgctcagtcactgtgactgtggcttaccttatgcagaagctcaatctgtcgatgaacgatgcctatgacattgtcaaaatgaaaaaatccaacatatcccctaacttcaacttcatgggtcagctgctggacttcgagaggacgctgggactcagcagcccatgtgacaacagggttccagcacagcagctgtattttaccaccccttccaaccagaatgtataccaggtggactctctgcaatctacgtgaaagaccccacacccctccttgctggaatgtgtctggcccttcagcagtttctcttggcagcatcagctgggctgctttctttgtgtgtggccccaggtgtcaaaatgacaccagctgtctgtactagacaaggttaccaagtgcggaattggttaatactaacagagagatttgctccattctctttggaataacaggacatgctgtatagatacaggcagtaggtttgctctgtacccatgtgtacagcctacccatgcagggactgggattcgaggacttccaggcgcatagggtagaaccaaatgatagggtaggagcatgtgttctttagggccttgtaaggctgtttccttttgcatctggaactgactatataattgtcttcaagtgaagactaattcaattttgcatatagaggagccaaagagagatttcagctctgtatttgtggtatcagtgttggaaaagagaaatctgatactccatttggattattgtaaatatttgatcttgaatcacttgacagtgtttgtttgaattgtgtttgttttttcctttgatgggcttaaaagaaattatccaaagggagaaagagcagtatgccacttcttaaaacagaacaaaacaaaaaaagaaaattgtgctctgttgtaatccaaaggggagatttgcagcatgcttgactttaccaattctgatgacatctttacggacactattatcactaagaccttgttatggcgaagtctttagtctttttcatgtattttcctcatgattttttctctttatgtagtttgagtatgccttacctttgtaaatatttttgcttgtgttgtcgcaaaggggataatctgggaaagacaccaaatcatgggctcactttaaaa

SEQ ID NO: 1330 - protein, 235 aa, Homo sapien
MIDTLRPVPFASEMAISKTVAWLNEQLELGNERLLLMDCRPQELYESSHIESAINVAIPGIMLRRLQKGNLPVRALFTRGEDRDRFTRRCGTDTVVLYDESSSDWNENTGGESLLGLLLKKLKDEGCRAFYLEDEARGKNCGVLVHCLAGISRSVTVTVAYLMQKLNLSMNDAYDIVKMKKSNISPNFNFMGQLLDFERTLGLSSPCDNRVPAQQLYFTTPSNQNVYQVDSLQST

SEQ ID NO: 1331 - DNA, 1675 bp, Homo sapien
gtgacaaccggaagcggaagtgaaaatgggtgtccctgctgcctcttagcaacaagaggggtcaagtgacacaaccagctgactcccgtagaggaagacactgtggaggccagttctggagctattgcagcctcggttgcccggccggggacccgagccgaaaagttatcgtcagaatgtcgggcaaagaccgaattgaaatctttccctcgcgaatggcacagaccatcatgaaggctcgtttaaagggagcacagacaggtcgaaacctcctgaagaaaaaatctgatgccttaactcttcgatttcgacagatcctaaagaagataatagagactaaaatgttgatgggcgaagtgatgagagaagctgccttttcactagctgaagccaagttcacagcaggtgacttcagcactacagttatccaaaatgtcaataaagcgcaagtgaagattcgagcgaagaaagataatgtagcaggtgttactttgccagtatttgaacattaccatgaaggaactgacagttatgaactgactggtttagccagaggtggggaacagttggctaaattaaagaggaattatgccaaagcagtggaactactggtggaactagcttctctgcagacttcttttgttactttggatgaagctattaagataaccaacaggcgtgtaaatgccattgaacatgtcatcattccccggattgaacgtactcttgcttatatcatcacagagctggatgagagagagcgagaagagttctataggttaaagaaaatacaagagaagaaaaagattctaaaggaaaaatctgagaaggacttggagcaaaggagagcagctggagaggtgttggagcctgctaatcttctggctgaagagaaggacgaggatcttctatttgaataatctttcctgttctggttctttgagaaaccctaacactggcttcattttaattcacagtgtgtaggtttgatttgtgtggctatttattttttggcctaagaatttcactggttgtaaaatttacctagatgtctatttatgggattacttttgcagaatcataatttagcaaccatttatcatggatgaaagagatctgtaaaacctgcccaggaacttacagaatttactttgcagaagcgttatcatactccatttacatctgtgttacacgtgatctgcttaccaagcatattaggaaatacctcttaggaagcattagcggtctcaggccaattactgtggagcagctttcattcctacccacttgcaaaccttggcgctgttgtctgagattgctgcagccattcttgttaccatggtacttctcaaactttgtgaaaacctgcacttttccttgcatgacaggttcctgtcttgtctgtcatgggagccattctgccaatttaaatgcgactgtggtataaacagtaaaatgatttaaaagtaagtcattccgtttttattaatttactgttaagtcatgttctcatgctcagatcagtagtgtcagccagagctttctctgcagacatgtaggaagtgggtagctatttttcccactccatgtattagagttttacaaaaaggcttacttttgagacaactgttgcattttggggtactaataaatgattgccgatgagttaaaaaaa

SEQ ID NO: 1332 - protein, 247 aa, Homo sapien
MSGKDRIEIFPSRMAQTIMKARLKGAQTGRNLLKKKSDALTLRFRQILKKIIETKMLMGEVMREAAFSLAEAKFTAGDFSTTVIQNVNKAQVKIRAKKDNVAGVTLPVFEHYHEGTDSYELTGLARGGEQLAKLKRNYAKAVELLVELASLQTSFVTLDEAIKITNRRVNAIEHVIIPRIERTLAYIITELDEREREEFYRLKKIQEKKKILKEKSEKDLEQRRAAGEVLEPANLLAEEKDEDLLFE

SEQ ID NO: 1333 - DNA, 1020 bp, Homo sapien
ggggagagagtggggacgtccggcttcggagcgggagtgttcgttgtgccagcgactaaaaagagaattaaatatgggtgatgttgagaaaggcaagaagatttttattatgaagtgttcccagtaccacaccgttgaaaagggaggcaagcacaagactgggccaaatctccatggtctctttgggcggaagacaggtcaggcccctggatactcttacacagccgccaataagaacaaaggcatcatctggggagaggatacactgatggagtatttggagaatcccaagaagtacatccctggaacaaaaatgatctttgtcggcattaagaagaaggaagaaagggcagacttaatagcttatctcaaaaaagctactaatgagtaataattggccactgccttatttattacaaaacagaaatgtctcatgacttttttatgtgtaccatcctttaatagatctcatacaccagaattcagatcatgaatgactgacagaatattttgttgggcagtcctgatttaaaactaagactggcttgtggttaaatgaatatgttcagtttttgaattttaatagtaactccaattcagtaaatggtatcactgtttaccccttttaaagatatgattagacttcgttagtaatgttcaacttttcacaaagatggtgagtgccatcttaaaacttactggagattggttttatatttagatttatataactggttatgtgaatatatttaaatactggggaaattgcttcactgtcttagaaccaagcaagattcacctgtgttttgtgttcatgttcatttgcctcttaaaggcaagggttgaagataaataaggtagcaatgtctatagttttggccttaactatgccaatctaattataattccctgtatttaaaatggtttcttttacttattgaaaggcattttagtgtggtttatgtgtaatattaaagattattcaacaccccaaaaaaaaaaaaaaaaaaaaaaaaaaaa

SEQ ID NO: 1334 - protein, 105 aa, Homo sapien
MGDVEKGKKIFIMKCSQYHTVEKGGKHKTGPNLHGLFGRKTGQAPGYSYTAANKNKGIIWGEDTLMEYLENPKKYIPGTKMIFVGIKKKEERADLIAYLKKATNE

SEQ ID NO: 1335 - DNA, 2012 bp, Homo sapien
ggcacgaggcctaagagttcctctgctgtacgactgcactcccgcaccctcccctaaatcccccctcttcggcctgtttaccttttaacttggcttcgttgcacgtttgtgtgtgtgtgtttgctcttcgcagcctcttgagcgtcttttgtacttaattcttacactgtggacgctctctcgcgcccgccatcccccgacccctctgatctccgatccttgacgatgtctagcctgcattgattggcccttttccctgggtatggcagatctattgcttgatgatcctctccccccaagaattctaacacaggagctgtcctgaggctctggatgactttattcttcaaatggctttaccctcccagtagctccagggaccctccattttccatatccaggaaaatgtgatgcgccacaggtatcagcgtctggatcgccacttcacgttttagccacaagtgactcagtggaagatccagagtcaacagaggctcgtcaggaagatgtctacagaaaaggtagaccaaaaggaggaagctggggaaaaagaggtgtgcggagaccagatcaaaggaccggacaaagaggaggaaccaccagctgctgcatcccatggccaggggtggcgtccaggtggcagagcagctaggaacgcaaggcctgaacctggggccagacaccctgctctcccggccatggtcaacgaccctccagtacctgccttactgtgggcccaggaggtgggccaagtcttggcaggccgtgcccgcaggctgctgctgcagtttggggtgctcttctgcaccatcctccttttgctctgggtgtctgtcttcctctatggctccttctactattcctatatgccgacagtcagccacctcagccctgtgcatttctactacaggaccgactgtgattcctccaccacctcactctgctccttccctgttgccaatgtctcgctgactaagggtggacgtgatcgggtgctgatgtatggacagccgtatcgtgttaccttagagcttgagctgccagagtcccctgtgaatcaagatttgggcatgttcttggtcaccatttcctgctacaccagaggtggccgaatcatctccacttcttcgcgttcggtgatgctgcattaccgctcagacctgctccagatgctggacacactggtcttctctagcctcctgctatttggctttgcagagcagaagcagctgctggaggtggaactctacgcagactatagagagaactcgtacgtgccgaccactggagcgatcattgagatccacagcaagcgcatccagctgtatggagcctacctccgcatccacgcgcacttcactgggctcagatacctgctatacaacttcccgatgacctgcgccttcataggtgttgccagcaacttcaccttcctcagcgtcatcgtgctcttcagctacatgcagtgggtgtgggggggcatctggccccgacaccgcttctctttgcaggttaacatccgaaaaagagacaattcccggaaggaagtccaacgaaggatctctgctcatcagccaggtgcagggcctgaaggccaggaggagtcaactccgcaatcagatgttacagaggatggtgagagccctgaagatccctcagggacagagggtcagctgtccgaggaggagaaaccagatcagcagcccctgagcggagaagaggagctagagcctgaggccagtgatggttcaggctcctgggaagatgcagctttgctgacggaggccaacctgcctgctcctgctcctgcttctgcttctgcccctgtcctagagactctgggcagctctgaacctgctgggggtgctctccgacagcgccccacctgctctagttcctgaagaaaaggggcagactcctcacattccagcactttcccacctgactcctctcccctcgtttttccttcaataaactattttgtgtcagcttcaaaaaaaaaaaaaaaaaaa

SEQ ID NO: 1336 - protein, 464 aa, Homo sapien
MSTEKVDQKEEAGEKEVCGDQIKGPDKEEEPPAAASHGQGWRPGGRAARNARPEPGARHPALPAMVNDPPVPALLWAQEVGQVLAGRARRLLLQFGVLFCTILLLLWVSVFLYGSFYYSYMPTVSHLSPVHFYYRTDCDSSTTSLCSFPVANVSLTKGGRDRVLMYGQPYRVTLELELPESPVNQDLGMFLVTISCYTRGGRIISTSSRSVMLHYRSDLLQMLDTLVFSSLLLFGFAEQKQLLEVELYADYRENSYVPTTGAIIEIHSKRIQLYGAYLRIHAHFTGLRYLLYNFPMTCAFIGVASNFTFLSVIVLFSYMQWVWGGIWPRHRFSLQVNIRKRDNSRKEVQRRISAHQPGAGPEGQEESTPQSDVTEDGESPEDPSGTEGQLSEEEKPDQQPLSGEEELEPEASDGSGSWEDAALLTEANLPAPAPASASAPVLETLGSSEPAGGALRQRPTCSSS

SEQ ID NO: 1337 - DNA, 3676 bp, Homo sapien
aaatcccccaagttctcatgatccttgcttccctttccagtcacccttggtgccctgtacttcactgtggtcctgaactgaagagctgtgtttttcaggaagacttggccaggccgtgttccgtgtctctggattcaagtcccaggagtcctgaccagagagcaggcatcagtgtttttctgaccgaagtgctcatttcctgacaatggaaatggaacaagaaaaaatgaccatgaataaggaattgagtccagacgcggctgcttactgctgctcggcctgccacggcgatgagacctggagttacaaccaccccatccggggccgggccaagtctcgcagcctgtctgcctcgcccgccctggggagcaccaaggagttcaggaggacacgctctcttcatgggccatgcccggtgaccacttttggaccaaaggcctgtgtgctgcagaacccccagaccatcatagccactcctttgtcactcgcatctcagctgctgccttcaccagccgtcagtcactcgggccagggcggggtcaccggacaggtgcatgttctgcctcagccctcagaccagggcgtactcagtggtccccgagctgcccgaggccagacagccccgcaggaggaagcggtgacccaggaagaggtcgaggcgctggtttgtggtcacacacagcggtgggtgcctgggccggtgtacgacgccgctgctggtggctctggctgggctcagctgagcctcagggctggaatgggtgtaggccaggccactgggcacattcaggaccccgcgagccagcggctgacgtggaacaagtccccaaagagcgtccttgtcatcaagaagatgagagatgccagcctactgcagccgttcaaggagctctgcacgcacctcatggaggcacgcggggcaggggggaagggggcctggggtgcacatggagttgggggggcctccatccacatcaccgccccgagggtggggtctgcaggtggaatgagcaggttggcactttgcttccaggagaacatgatcgtgtatgtggaaaagaaagtgctagaagaccctgccatcgccagcgatgaaagctttggggcagtgaagaagaaattctgtacctttcgagaagattatgatgacatttccaatcagatagacttcatcatctgcctggggggagacgggacgctgctgtacgcttcctcgcttttccagggcagcgtccctccggtcatggccttccacctgggctccctgggcttcctgaccccattcagctttgagaactttcagtcccaagttactcaggtgatagaggggaacgcagctgttgttctccggagtcggctgaaggtcagggtggtgaaggagctccgggggaagaagacggccgtgcacaatgggctgggtgagaacggctcgcaggctgcaggcctggacatggatgtcgggaagcaggccatgcagtaccaggtcctgaatgaggtggtgattgacagaggcccctcctcctacctgtccaatgtggatgtctacctggacggacacctcatcaccacggtgcagggcgacggagtgatcgtgtccaccccgacgggcagcacggcgtatgcggccgcggccggggcctccatgatccaccccaacgtgccggccatcatgatcacgcccatctgcccccactcgctgtccttccggcccatcgtggtccccgcagtcgagctgaagatcatgctgtcacctgaagcaaggaacacagcatgggtgtcctttgatggacggaagagacaagagatccgccatggagacagcatcagcatcactacctcatgctacccgctcccctccatctgtgtgcgggaccccgtgagcgactggtttgagagcctcgcccagtgcctgcattggaacgtccggaagaagcaagcccacttcgaggaggaggaggaggaggaggaggagggctaggtcaagcccctatccaggcccgaatccttccgctgccctccaagcgccctctggggacagaccaatctgcgtgtgtctgtgaccgcctgtcatcagtggcacggccacttcctttctgtagctgggttagagcctgggtctgccttttgtccagatcagctgtttttttaaaatctctgactttttttgcatttctaaagaagcgtgagaaatgggctgggagtgcttctgtcctgctgacaccccgcggtgggtccctggagcgcggcctccagctgccgcaatttccatgccaggatatttttccgcaaatcagtcggttgaaattcagaggagtcagaatgactcgacctgtccttcaatgttgataataaatgtctcagccaaaaaccttccttgagctgccatgcttttccccttgacctgcacctcttcccctaaaatttctgcagggaagcccctggcggaggcgccattgaaagcatggtcttgccagtggctggcaaggcggttttgttctgctcagtttctggagagggttggatgcgtcccctgccatccagccctccccgcttgaggccagcactgagtctgggacactcagcgggaagggggctggcatcgccacggacccacacattcctcacgtagcttctgctcccaggaaggtagtttaaatcctgtatatactttttagagactcttttaaactttctgaagtgctgatgtacatactttctcgtacacacttttgtgaagatttcaaggggaagggagttgtctgccattcaatgtttacatttatgttctgcaagacgctgtcctcagggaccattaggggaccattctgttcagtgcgatcctgatggtccgggagatgagggtttccggggctagtgatcgtgatcccttttatttgcaactgtaatgagaatttttcacactaacacagcgagggactcaacacgctgattctcctcctgcctctcccgtgagtctccagcctgcccagcaccagcagctgtggagcacgtggatgctgcctaccccggcgcccgcgtcttccacgggcacaggtgtgtggaggccgtggtcggaccctggtgtcctggttactgctgcccgggtgtcttttttttgagtaactgctctctgagttttgcacacgaagttgccctcatctgctggagatcgataaggaaggcacaagacgttctcctctgcccgtgaggagcttcccgcagccgcctggcccagcctgggcacgttctccgaggcatgtgtctccctgctcaccctcgtctgggcacctcagcatctgtggacttgagcgtccaaaaaccctgagtgtgattctgggcagccggcctggcttgaagtccgccatgaccctgggcacaggggaagcccagccgtgggcttaggagagagggaccagcgcccagcgttagggctggaagacggcagtgttcagaattccagccgctcatctgaacacagaaggtgtgaactgacctctaaagcagcgtgagatgggaatgatctagaaaactttggatttttgaagtaaattttaatgtttcatattaatttcttgaaaatgtattaaatgtcattgaaagccttattacgcttttcagatcctttcaataaacaagacttgtagaaaataaaaaaaaaaaaaaaaaaaaaaaaaaa

SEQ ID NO: 1338 - protein, 590 aa, Homo sapien
MEMEQEKMTMNKELSPDAAAYCCSACHGDETWSYNHPIRGRAKSRSLSASPALGSTKEFRRTRSLHGPCPVTTFGPKACVLQNPQTIIATPLSLASQLLPSPAVSHSGQGGVTGQVHVLPQPSDQGVLSGPRAARGQTAPQEEAVTQEEVEALVCGHTQRWVPGPVYDAAAGGSGWAQLSLRAGMGVGQATGHIQDPASQRLTWNKSPKSVLVIKKMRDASLLQPFKELCTHLMEARGAGGKGAWGAHGVGGASIHITAPRVGSAGGMSRLALCFQENMIVYVEKKVLEDPAIASDESFGAVKKKFCTFREDYDDISNQIDFIICLGGDGTLLYASSLFQGSVPPVMAFHLGSLGFLTPFSFENFQSQVTQVIEGNAAVVLRSRLKVRVVKELRGKKTAVHNGLGENGSQAAGLDMDVGKQAMQYQVLNEVVIDRGPSSYLSNVDVYLDGHLITTVQGDGVIVSTPTGSTAYAAAAGASMIHPNVPAIMITPICPHSLSFRPIVVPAVELKIMLSPEARNTAWVSFDGRKRQEIRHGDSISITTSCYPLPSICVRDPVSDWFESLAQCLHWNVRKKQAHFEEEEEEEEEG

SEQ ID NO: 1339 - DNA, 2264 bp, Homo sapien
ggcacgagggagcgcttgggagttaggttgtttgccggcgtagcggccagcgcctgagcccgccgttgatcttcgctgtggcatggcggacgaggggaagtcgtacagcgaacacgatgatgaacgcgttaatttccctcaaagaaagaagaaaggccggggtcccttccggtggaaatatggtgaaggaaaccgtaggtctggaagaggcggttctggtattcggtcttcccgccttgaggaagatgatggagatgtggcaatgagtgatgcccaggatggtccccgagtacgatacaacccctataccacccgacctaaccgtcggggtgatacttggcatgatcgagatcgcattcatgttactgtgcggagagacagagctcctccagagagaggaggggctggcaccagccaggatgggacctcaaagaactggttcaagattacaattccttatggcagaaagtatgacaaggcatggctcctgagcatgattcagagcaagtgcagtgtgcccttcacccctattgagtttcactatgagaatacacgggcccagttcttcgttgaagacgccagtactgcctctgcattgaaggctgtcaactataagattttggatcgggagaaccgaaggatatctatcatcatcaactcttctgctccaccccacactatactgaatgaactgaagccagaacaagtagaacagctaaagctgatcatgagcaaacgatacgatggctcccaacaagcccttgacctcaaaggcctccgttcagacccagatttggtggcccagaacattgacgttgtcctgaatcgcagaagctgtatggcagctaccctgaggatcattgaagagaacatccctgagctattgtccttgaacttgagcaacaacaggctgtacaggctggatgacatgtctagcattgttcagaaggcacccaacctgaagatcctaaacctttctggaaatgaattgaagtctgagcgggaattggacaagataaaggggctgaagctagaagagctctggctcgatggaaactccctgtgtgacaccttccgagaccagtccacctacatcagcgccattcgcgaacgatttcccaagttactacgcctggatggccatgagctacccccaccaattgcctttgatgttgaagcccccacgacgttaccgccctgcaagggaagctattttggaacagaaaacttgaagagtctggtcttgcacttcctgcaacagtactatgcaatttacgactctggagaccgacaagggctcctggatgcctaccatgatggggcctgctgttccctgagcattcctttcattcctcagaaccctgcccgaagcagcttagccgagtatttcaaggatagcagaaatgtgaagaagcttaaagaccctaccttgcggttccggctgctgaagcacacgcgtctcaacgttgttgccttcctcaatgagttgcccaaaacccagcacgacgtcaattccttcgtggtagacataagcgcccagacaagcacattgctgtgtttttctgtcaatggagtcttcaaggaagtggacggaaagtcccgggattctttgcgagccttcacccggacattcattgctgttcctgctagcaattcagggctatgtattgtaaatgatgagctatttgtgcggaatgccagttctgaagagatccaaagagccttcgctatgcctgcacccacgccttcctccagcccggtgcccaccctctctccagagcagcaggaaatgttgcaagcattctctacccagtctggcatgaacctcgagtggtcccagaagtgccttcaggacaacaactgggactacaccagatctgcccaggccttcactcatctcaaggccaagggcgagatcccagaagtggcattcatgaagtgatcgtagtcatgcctcagaagcagtcccccctgtaaatagtccttggatattaccgtctggttgtcgtctgtcatctcctcctgtctggcccgaggccgccccgtgactgtgaccgagggagggagggctgcctgatccctctcctcgcctgccttctggaagacttcagaagattgagcctcactggtgccaggaagccaaagcttactttgtagaactgacactaaactacccgaaggacttaggtgctttgtgtacttaaccccaggacctccttactttttaatataaagagtgatgttgtaaaaaaaaaaaaaaaaaa

SEQ ID NO: 1340 - protein, 619 aa, Homo sapien
MADEGKSYSEHDDERVNFPQRKKKGRGPFRWKYGEGNRRSGRGGSGIRSSRLEEDDGDVAMSDAQDGPRVRYNPYTTRPNRRGDTWHDRDRIHVTVRRDRAPPERGGAGTSQDGTSKNWFKITIPYGRKYDKAWLLSMIQSKCSVPFTPIEFHYENTRAQFFVEDASTASALKAVNYKILDRENRRISIIINSSAPPHTILNELKPEQVEQLKLIMSKRYDGSQQALDLKGLRSDPDLVAQNIDVVLNRRSCMAATLRIIEENIPELLSLNLSNNRLYRLDDMSSIVQKAPNLKILNLSGNELKSERELDKIKGLKLEELWLDGNSLCDTFRDQSTYISAIRERFPKLLRLDGHELPPPIAFDVEAPTTLPPCKGSYFGTENLKSLVLHFLQQYYAIYDSGDRQGLLDAYHDGACCSLSIPFIPQNPARSSLAEYFKDSRNVKKLKDPTLRFRLLKHTRLNVVAFLNELPKTQHDVNSFVVDISAQTSTLLCFSVNGVFKEVDGKSRDSLRAFTRTFIAVPASNSGLCIVNDELFVRNASSEEIQRAFAMPAPTPSSSPVPTLSPEQQEMLQAFSTQSGMNLEWSQKCLQDNNWDYTRSAQAFTHLKAKGEIPEVAFMK

SEQ ID NO: 1341 - DNA, 1894 bp, Homo sapien
cgggaagcgcggcggggcctccagaccggggcgggcttaagggtgacatctgcgctttaaagggtccgggtcagctgactcccgactctgtggagtctagctgccagggtcgcggcagtgcggggagagatgactggggagcgacccagcacggcgctcccggacagacgctgggggccgcggattctgggcttctggggaggctgtagggtttgggtgtttgccgcgatcttcctgctgctgtctctggcagcctcctggtccaaggctgagaacgacttcggtctggtgcagccgctggtgaccatggagcaactgctgtgggtgagcgggagacagatcggctcagtggacaccttccgcatcccgctcatcacagccactccgcggggcactcttctcgcctttgctgaggcgaggaaaatgtcctcatccgatgagggggccaagttcatcgccctgcggaggtccatggaccagggcagcacatggtctcctacagcgttcattgtcaatgatggggatgtccccgatgggctgaaccttggggcagtagtgagcgatgttgagacaggagtagtatttcttttctactccctttgtgctcacaaggccggctgccaggtggcctctaccatgttggtatggagcaaggatgatggtgtttcctggagcacaccccggaatctctccctggatattggcactgaagtgtttgcccctggaccgggctctggtattcagaaacagcgggagccacggaagggccgcctcatcgtgtgtggccatgggacgctggagcgggacggagtcttctgtctcctcagcgatgatcatggtgcctcctggcgctacggaagtggggtcagcggcatcccctacggtcagcccaagcaggaaaatgatttcaatcctgatgaatgccagccctatgagctcccagatggctcagtcgtcatcaatgcccgaaaccagaacaactaccactgccactgccgaattgtcctccgcagctatgatgcctgtgatacactaaggccccgtgatgtgaccttcgaccctgagctcgtggaccctgtggtagctgcaggagctgtagtcaccagctccggcattgtcttcttctccaacccagcacatccagagttccgagtgaacctgaccctgcgatggagcttcagcaatggtacctcatggcggaaagagacagtccagctatggccaggccccagtggctattcatccctggcaaccctggagggcagcatggatggagaggagcaggccccccagctctacgtcctgtatgagaaaggccggaaccactacacagagagcatctccgtggccaaaatcagtgtctatgggacactctgagctgtgccactgccacaggggtattctgccttcaggactctgccttcaggaacacgggtctgtagagggtctgctggagacgcctgaaagacagttccatcttcctttagactccagccttggcaaaatcaccttccctttaccagggaaatcacttcctttaggactgaaagctaggcgtcctctcccacaaaaaagtcctgccctcatctgagaatactgtctttccatatggctaagtgtggccccaccaccctctctgcctcccgggacattgattggtcctgtcttgggcaggtctagtgagctgtagaattgaatcaatgtgaactcagggaactggggaaggctgagcctcctctttggtgttgcggtaagataaccgacagggctggtgaaagtccccagatggcaggatatttggtttcagagtaaggactaggtgcaccaccatgactgactatcaatcaaaatgtttgtaacttaaaatttttaatgaaggataatgaatatttta

SEQ ID NO: 1342 - protein, 415 aa, Homo sapien
MTGERPSTALPDRRWGPRILGFWGGCRVWVFAAIFLLLSLAASWSKAENDFGLVQPLVTMEQLLWVSGRQIGSVDTFRIPLITATPRGTLLAFAEARKMSSSDEGAKFIALRRSMDQGSTWSPTAFIVNDGDVPDGLNLGAVVSDVETGVVFLFYSLCAHKAGCQVASTMLVWSKDDGVSWSTPRNLSLDIGTEVFAPGPGSGIQKQREPRKGRLIVCGHGTLERDGVFCLLSDDHGASWRYGSGVSGIPYGQPKQENDFNPDECQPYELPDGSVVINARNQNNYHCHCRIVLRSYDACDTLRPRDVTFDPELVDPVVAAGAVVTSSGIVFFSNPAHPEFRVNLTLRWSFSNGTSWRKETVQLWPGPSGYSSLATLEGSMDGEEQAPQLYVLYEKGRNHYTESISVAKISVYGTL

SEQ ID NO: 1343 - DNA, 1447 bp, Homo sapien
gaacaccagcgagctggtctccagcgaggtctacctgctcagtgccttggctgctctgcagaaggttgtggagactctcccgcacttcatcagcccctatctggaaggcattctctcccaggtgattcatctggagaaaatcactagtgaaatgggttctgcgtcacaggctaatatccgtctcacatctcttaaaaagacactggctaccacacttgcaccccgagtcctgttgcccgccatcaaaaaaacttacaagcagattgagaagaactggaagaatcacatgggtccgtttatgagcatcttgcaagagcatattggggcgatgaagaaggaagagctcacctcccatcagtctcagctaaccgcctttttcctggaggccctggacttccgagcccagcactctgagaacgatctggaggaagttggaaaaacggaaaattgtatcattgactgtctagtagccatggttgtcaaactttccgaggtcacattcaggcccctgttcttcaagctgtttgattgggctaaaacagaagatgccccaaaggacaggttgttgacattttacaacttggcagattgcattgctgaaaagctgaaagggctttttactctgtttgccggccacttagtgaagccttttgctgacaccttggaccaggtgaacatctccaaaacagatgaagcattttttgactctgaaaatgaccctgaaaagtgctgcttgctgttgcagtttattttgaactgtttatacaaaatcttcctttttgatacccagcattttataagtaaagagagagcaggagccttgatgatgcctctggtggatcagctggaaaacaggcttgggggagaagagaaattccaggaacgggtgacaaagcacctgataccatgcatcgcacagttttcagtggccatggcggatgactctctttggaaaccactgaactaccagattctgctaaagacgagagactcctcgcctaaggttcgatttgctgctttgattactgtgttagcactggctgaaaaactaaaggagaattatattgtcttgctaccagaatccattcctttcttagcagagttgatggaagatgaatgtgaagaagtagaacatcagtgccaaaagactattcagcaactggaaactgtcctgggagagccactccagagctatttctaagactttctgtggtgtttcatactctactcagagttcacactcatatttcatatttttatttttgggtgttgggtgccatgttacttttggtgccttaatacacctacttggattacttacaaatgttttatcacttcgttacaaaatccccacctggcttgtgctgccacataagcctctcctgcctatcgtatagagctgcagaaagagtaaatgatacacggtatttttaaaaaaaaaaaaaaa

SEQ ID NO: 1344 - protein, 349 aa, Homo sapien
MGSASQANIRLTSLKKTLATTLAPRVLLPAIKKTYKQIEKNWKNHMGPFMSILQEHIGAMKKEELTSHQSQLTAFFLEALDFRAQHSENDLEEVGKTENCIIDCLVAMVVKLSEVTFRPLFFKLFDWAKTEDAPKDRLLTFYNLADCIAEKLKGLFTLFAGHLVKPFADTLDQVNISKTDEAFFDSENDPEKCCLLLQFILNCLYKIFLFDTQHFISKERAGALMMPLVDQLENRLGGEEKFQERVTKHLIPCIAQFSVAMADDSLWKPLNYQILLKTRDSSPKVRFAALITVLALAEKLKENYIVLLPESIPFLAELMEDECEEVEHQCQKTIQQLETVLGEPLQSYF

SEQ ID NO: 1345 - DNA, 1470 bp, Homo sapien
ccgagcctggagtttgcatgaaactttcacctgcgctccggggagactttcggctccggctcccaccgcgcgcctcgccgccctcgcaaccgcgggctccgtccaacccggcccgacatggacgtgctccccatgtgcagcatcttccaggagctccagatcgtgcacgagaccggctacttctcggcgctgccgtctctggaggagtactggcaacagacctgcctagagctggaacgttacctccagagcgagccctgctatgtttcagcctcagaaatcaaatttgacagccaggaagatctgtggaccaaaatcattctggctcgggagaaaaaggaggaatccgaactgaagatatcttccagtcctccagaggacactctcatcagcccgagcttttgttacaacttagagaccaacagcctgaactcagatgtcagcagcgaatcctctgacagctccgaggaactttctcccacggccaagtttacctccgaccccattggcgaagttttggtcagctcgggaaaattgagctcctctgtcacctccacgcctccatcttctccggaactgagcagggaaccttctcaactgtggggttgcgtgcccggggagctgccctcgccagggaaggtgcgcagcgggacttcggggaagccaggtgacaagggaaatggcgatgcctcccccgacggcaggaggagggtgcaccggtgccactttaacggctgcaggaaagtttacaccaaaagctcccacttgaaagcacaccagcggacgcacacaggagaaaagccttacagatgctcatgggaagggtgtgagtggcgttttgcaagaagtgatgagttaaccaggcacttccgaaagcacaccggggccaagccttttaaatgctcccactgtgacaggtgtttttccaggtctgaccacctgggcctgcacatgaagaggcacctctgagggagcaaagaggtggatcctgtaggctaaaaggcttccaggctgagagccggccgtggaaggagggatgcgtgttccagccaaagcatgccgttctgcacctacccagttgcctccagggcctctccttggaaggtcttttgaaggctaaaaaggtcctgtaagaagtggcatagcacccgtggtgcatggtatgtgggtgaccctggactcgccactggtacccgcccttccgagcggcgcctaagcctttgccgtgagcatgcacactgagaatgctaatggttgggttgattgtatgttgaggatctattactgaccgtatgatgaggccaactttttttccttgtggttagcaagactgcaagagatggaaaaaaagtagtttgaatgttttgtgtgaaaggagtataccatgagatgagatgaccaccaatcatttccttggggggagggggtgtctgcaccttagaaaaaaaaaaaaaaaaaaaaaaaaaaaaa

SEQ ID NO: 1346 - protein, 283 aa, Homo sapien [sequence omitted]

SEQ ID NO: 1347 - DNA, 4213 bp, Homo sapien
tccactcctggagcccgcggaccccgagcacgcgcctgacagcccctgctggcccggcgcgcggcgtcgccaggccagctatggcccccgacccggtggccgccgagaccgcggctcagggacctaccccgcgctacttcacctgggacgaggtggcccagcgctcagggtgcgaggagcggtggctagtgatcgaccgtaaggtgtacaacatcagcgagttcacccgccggcatccagggggctcccgggtcatcagccactacgccgggcaggatgccacggatccctttgtggccttccacatcaacaagggccttgtgaagaagtatatgaactctctcctgattggagaactgtctccagagcagcccagctttgagcccaccaagaataaagagctgacagatgagttccgggagctgcgggccacagtggagcggatggggctcatgaaggccaaccatgtcttcttcctgctgtacctgctgcacatcttgctgctggatggtgcagcctggctcaccctttgggtctttgggacgtcctttttgcccttcctcctctgtgcggtgctgctcagtgcagttcaggcccaggctggctggctgcagcatgactttgggcacctgtcggtcttcagcacctcaaagtggaaccatctgctacatcattttgtgattggccacctgaagggggcccccgccagttggtggaaccacatgcacttccagcaccatgccaagcccaactgcttccgcaaagacccagacatcaacatgcatcccttcttctttgccttggggaagatcctctctgtggagcttgggaaacagaagaaaaaatatatgccgtacaaccaccagcacaaatacttcttcctaattgggcccccagccttgctgcctctctacttccagtggtatattttctattttgttatccagcgaaagaagtgggtggacttggcctggatgattaccttctacgtccgcttcttcctcacttatgtgccactattggggctgaaagccttcctgggccttttcttcatagtcaggttcctggaaagcaactggtttgtgtgggtgacacagatgaaccatattcccatgcacattgatcatgaccggaacatggactgggtttccacccagctccaggccacatgcaatgtccacaagtctgccttcaatgactggttcagtggacacctcaacttccagattgagcaccatctttttcccacgatgcctcgacacaattaccacaaagtggctcccctggtgcagtccttgtgtgccaagcatggcatagagtaccagtccaagcccctgctgtcagccttcgccgacatcatccactcactaaaggagtcagggcagctctggctagatgcctatcttcaccaataacaacagccaccctgcccagtctggaagaagaggaggaagactctggagccaaggcagaggggagcttgagggacaatgccactatagtttaatactcagagggggttgggtttggggacataaagcctctgactcaaactcctcccttttatcttctagccacagttctaagacccaaagtggggggtggacacagaagtccctaggagggaaggagctgttggggcaggggtgtaaattatttcctttttctagtttggcacatgcaggtagttggtgaacagagagaaccaggagggtaacagaagaggagggacctactgaacccagagtcaggaagagatttaacactaaaattccactcatgccgggcgtggtggcacgcgcctgtaatcccagctacccaggaggctgaggcaggagaatcgcttgaaccggggaggtggaggttgcagtgagctgagatcacgccattgtactccagcctgggcgacagagcaagactccatttcaaaaaaaaaaaaaaaatccactcatataaaaggtgagctcagctcactggtccatttctcagtggcttctccatcctcatttgcaaacctcagagggataaggcagttgaacctgatgagcaagaattataacagcaaggaaacattaatgcttagaattctgagatccagcacaactcagtctgtgggagctcagctcgctgcccagggataggtatgacctatgtctgccttaggctgctgggagatgccattctccagtttcagaagcaggcagggcaaaggtcaagactgtggtattggggtcttttggctctgaaggatcctggaaccactgattttggtttattccctccagggtctaaagagaacaagaggtgctagctcttaccaaaacagatggtagagagagttgctggctatttaaaaagctctttcatcttttaattcacctcttcttttcacctctttaaccactcctcaggaacagaacacttctaggactgggggtcttttagctccataagcaagtgagcagatgggacaagttagtcttttctccctagaaacaaaggggatgcccagtggtttccctttgcttcccaacctaaaatttcaagtttaataaaatagcaattagcagaagtgaccaaattgggagataattatcagtcatgaggaaagacacagatttcggtcataaagaatgtaagggctataagtagaaactttctataacctaaatgatgttatagaattatttttgagcaggagcagaaagattaaatatgatcacttcatacttctaaatcagaaataggaagattaaaaccacagaacagtttgtgatttctattgctgtagctaggtatcttactctgtccactcttgttcaagtatctaactcttctggaaaccaaataggctttagaagagattatcctatattcctatcagtataatactaaaatgtaactttttaatcatctggtttttaaaagataaacagtttagcccatctctccagagagcaaacataggaatatgactcaggagcctcctagggcttatcatcagccctcacacccgcttccccctccaacccacagcctttgcttccaggtggcaggattactactttgcctcttcagcagcatctactctaggcatattgatcattttagacactgggagaagagaacctcaaactaggaggaaaagacagagcctccacttagttttgggaggggatggcagacagtcaaggagatgagcgtcctaaggcatgttgggatagggtcagatgcaccacccatggagaggtttgtcaacacaaagacatggaaggttagaggtttgtcaacaaaaagacatggaaggttaggtttgtcaacacaaagacatggaagattagaggtttgtcaacacaaagacacaggaagaatgggctgcagaagatttagatgttttccatttgggcacattttacttagctggagaactaggtttaaaacagcctgggtaggaaaattagaagcaagctggatgcagtggctcatgcctgtaatcccaacacttttgggaggtccaggcaggaggatcacttgggcccaggaggtcaagcctgcagcgagctgagatcacaccactgcactccagcctggggtgatagaacaagaccctgtctcaaaaaaaaaaaaaaacaacaaaaacttagaattgaggagttgtacctccattggcttcctcactccaaaataggtgctgatccttcctattcctattctttgccaccttttgggtgtggtgtcaccagcctgtttagccaagtagctttgggcataggctgcccaatctgagcaaacaccagtgaggctctattgagccaagaccaagtcctcaaagcacctgaaccactgtggccttctcagcctacagcagtgtggtctcttacatggccacaaagggacacacagtgacaaaaggctcggaatgttacaatggtaaaatgagtgatctcaaatccactgacagatataaaataggcttagagaggaaaagctgcctctggtcaagtagatcatggcagcatgaattccaactcacttttttacaactccaacttctatgtttatctttgttactttcacttttttacaacctggccagaggcattttttaaatcaggcccaatatcagtattctttttgtgtgtgccaattttgttatcacatccctatgaagttgaaaaataaagttaattttgaccaaaaaaaaaaaaaaaag

SEQ ID NO: 1348 - protein, 444 aa, Homo sapien
MAPDPVAAETAAQGPTPRYFTWDEVAQRSGCEERWLVIDRKVYNISEFTRRHPGGSRVISHYAGQDATDPFVAFHINKGLVKKYMNSLLIGELSPEQPSFEPTKNKELTDEFRELRATVERMGLMKANHVFFLLYLLHILLLDGAAWLTLWVFGTSFLPFLLCAVLLSAVQAQAGWLQHDFGHLSVFSTSKWNHLLHHFVIGHLKGAPASWWNHMHFQHHAKPNCFRKDPDINMHPFFFALGKILSVELGKQKKKYMPYNHQHKYFFLIGPPALLPLYFQWYIFYFVIQRKKWVDLAWMITFYVRFFLTYVPLLGLKAFLGLFFIVRFLESNWFVWVTQMNHIPMHIDHDRNMDWVSTQLQATCNVHKSAFNDWFSGHLNFQIEHHLFPTMPRHNYHKVAPLVQSLCAKHGIEYQSKPLLSAFADIIHSLKESGQLWLDAYLHQ

SEQ ID NO: 1349 - DNA, 1577 bp, Homo sapien
ggcacgaggctgctgtttgtctacttcctcctgcttccccgccgccgccgccgccatcatgagggaaatcgtgcacttgcaggccgggcagtgcggcaaccaaatcggcgccaagttttgggaggtgatcagcgatgagcacggcatcgaccccacgggcacctaccacggggacagcgacctgcagctggaacgcatcaacgtgtactacaatgaggccaccggcggcaagtacgtgccccgcgccgtgctcgtggatctggagcccggcaccatggactccgtgcgctcggggcccttcgggcagatcttccggccggacaacttcgttttcggtcagagtggtgctgggaacaactgggccaaggggcactacacagaaggcgcggagctggtggactcggtgctggatgttgtgagaaaggaggctgagagctgtgactgcctgcagggtttccagctgacccactccctgggtggggggactgggtctgggatgggtaccctcctcatcagcaagatccgggaggagtacccagacaggatcatgaacacgtttagtgtggtgccttcgcccaaagtgtcagacacagtggtggagccctacaacgccaccctctcagtccaccagctcgtagaaaacacagacgagacctactgcattgataacgaagctctctacgacatttgcttcagaaccctaaagctgaccacgcccacctatggtgacctgaaccacctggtgtctgctaccatgagtggggtcaccacctgcctgcgcttcccaggccagctcaatgctgacctgcggaagctggctgtgaacatggtcccgtttccccggctgcacttcttcatgcccggctttgccccactgaccagccggggcagccagcagtaccgggcgctgaccgtgcccgagctcacccagcagatgtttgatgccaagaacatgatggctgcctgcgacccccgccatggccgctacctgacggttgccgccgtgttcaggggccgcatgtccatgaaggaggtggatgagcaaatgcttaatgtccaaaacaaaaacagcagctattttgttgagtggatccccaacaatgtgaaaacggctgtctgtgacatcccacctcgggggctaaaaatgtccgccaccttcattggcaacagcacggccatccaggagctgttcaagcgcatctccgagcagttcacggccatgttccggcgcaaggccttcctgcactggtacacgggcgagggcatggacgagatggagttcaccgaggccgagagcaacatgaatgacctggtgtccgagtaccagcagtaccaggatgccacagccgaggaggagggcgagttcgaggaggaggctgaggaggaggtggcctagagccttcagtcactggggaaagcagggaagcagtgtgaactctttattcactcccagcctgtcctgtggcctgtcccactgtgtgcacttgctgttttccctgtccacatccatgctgtacagacaccaccattaaagcattttcatagtgaaaaaaaaaaaaaaaaaaaaaaaaaaaaaa

SEQ ID NO: 1350 - protein, 445 aa, Homo sapien
MREIVHLQAGQCGNQIGAKFWEVISDEHGIDPTGTYHGDSDLQLERINVYYNEATGGKYVPRAVLVDLEPGTMDSVRSGPFGQIFRPDNFVFGQSGAGNNWAKGHYTEGAELVDSVLDVVRKEAESCDCLQGFQLTHSLGGGTGSGMGTLLISKIREEYPDRIMNTFSVVPSPKVSDTVVEPYNATLSVHQLVENTDETYCIDNEALYDICFRTLKLTTPTYGDLNHLVSATMSGVTTCLRFPGQLNADLRKLAVNMVPFPRLHFFMPGFAPLTSRGSQQYRALTVPELTQQMFDAKNMMAACDPRHGRYLTVAAVFRGRMSMKEVDEQMLNVQNKNSSYFVEWIPNNVKTAVCDIPPRGLKMSATFIGNSTAIQELFKRISEQFTAMFRRKAFLHWYTGEGMDEMEFTEAESNMNDLVSEYQQYQDATAEEEGEFEEEAEEEVA

SEQ ID NO: 1351 - DNA, 3371 bp, Homo sapien
gcgggcgcatgcgcaagggggcgcgccgcctctgccccgcggcgagggtgtctatggagaggcggcggccgcggctgctgaggcggaggctgaggcagtggcgatggcgccctttcctgaagaagtggacgtcttcaccgccccacactggcggatgaagcagctggtggggctctactgcgacaagctttctaaaaccaatttttccaacaacaacgatttccgtgctcttctgcagtctttgtatgctactttcaaggagttcaaaatgcatgagcagattgaaaatgaatacattattggtttgcttcaacaacgcagccagaccatttataatgtacattctgacaataaactctccgagatgcttagcctctttgaaaagggactgaagaatgttaagaatgaatatgaacagttaaattatgcaaaacaactgaaagagagattggaggcttttacaagagattttcttcctcacatgaaagaggaagaggaggtttttcagcccatgttaatggaatattttacctatgaagagcttaaggatattaaaaagaaagtgattgcacaacactgctctcagaaggatactgcagaactccttagaggtcttagcctatggaatcatgctgaagagcgacagaagttttttaaatattccgtggatgaaaagtcagataaagaagcagaagtgtcagaacactccacaggtataacccatcttcctcctgaggtaatgctgtcaattttcagctatcttaatcctcaagagttatgtcgatgcagtcaagtaagcatgaaatggtctcagctgacaaaaacgggatcgctttggaaacatctttaccctgttcattgggccagaggtgactggtatagtggtcccgcaactgaacttgatactgaacctgatgatgaatgggtgaaaaataggaaagatgaaagtcgtgcttttcatgagtgggatgaagatgctgacattgatgaatctgaagagtctgcggaggaatcaattgctatcagcattgcacaaatggaaaaacgtttactccatggcttaattcataacgttctaccatatgttggtacttctgtaaaaaccttagtattagcatacagctctgcagtttccagcaaaatggttaggcagattttagagctttgtcctaacctggagcatctggatcttacccagactgacatttcagattctgcatttgacagttggtcttggcttggttgctgccagagtcttcggcatcttgatctgtctggttgtgagaaaatcacagatgtggccctagagaagatttccagagctcttggaattctgacatctcatcaaagtggctttttgaaaacatctacaagcaaaattacttcaactgcgtggaaaaataaagacattaccatgcagtccaccaagcagtatgcctgtttgcacgatttaactaacaagggcattggagaagaaatagataatgaacacccctggactaagcctgtttcttctgagaatttcacttctccttatgtgtggatgttagatgctgaagatttggctgatattgaagatactgtggaatggagacatagaaatgttgaaagtctttgtgtaatggaaacagcatccaactttagttgttccacctctggttgttttagtaaggacattgttggactaaggactagtgtctgttggcagcagcattgtgcttctccagcctttgcgtattgtggtcactcattttgttgtacaggaacagctttaagaactatgtcatcactcccagaatcttctgcaatgtgtagaaaagcagcaaggactagattgcctaggggaaaagacttaatttactttgggagtgaaaaatctgatcaagagactggacgtgtacttctgtttctcagtttatctggatgttatcagatcacagaccatggtctcagggttttgactctgggaggagggctgccttatttggagcaccttaatctctctggttgtcttactataactggtgcaggcctgcaggatttggtttcagcatgtccttctctgaatgatgaatacttttactactgtgacaacattaacggtcctcatgctgataccgccagtggatgccagaatttgcagtgtggttttcgagcctgctgccgctctggcgaatgacccttgacttctgatctttgtctacttcatttagctgagcaggctttctttcatgcactttactcatagcacatttcttgtgttaaccatccctttttgagcgtgacttgttttggccccatttcttacaacttcagaaatcttaatttaccagtgaattgtaatgttgtttctcttgcaaattatacttttggtttagaaagggattaggtcttttcaaaagggtgagaacagtcttacatttttcttttaaatgaaatgctttaaagaatgttggtaatgccatgtcatttaaagtatttcatagataattttgagttttaaagtccatggaggtgattggttctctttacacattaacactgtaccaagctttgcagatcttttccgacacacatgtctgaagacttattttcaaagacagcacatttttggaaactaatctcttttccgtaatatttcctttatttcaatgattctcagaaggccaattcaaacaaacccacatttaaggttctttaggattatagaataaattggcttctgagtgttagctcagtgagctaggaaagcaccaatcgatatttgtttcctttagggatactttgttctcaccactgtccctatgtcatcaaatttgggagagattttttaaaataccacaatcatttgaagaaatgtataaataaaatctactttgaggactttaccaagtaatactgttgtgttgtgatttttattataaatctcaatccaggtttactttagtatagaataggactacatactttgtctttggacctcccatgaacttattaccctgacaaatagttttagacagatactgaattttattgagctgaattttctttttgaaatgagttattcagtagtcaaaatttgaatccgtaagtatatctactttgctttgttaaaacatcatgagagtggaggcctgccacccagaaaggcacatactagtgccttttagtacaattttatgtcatgtagaagaaaatggcaatgttcctcctattgatacagatacaggcatatgtcatcttattgcgttttgctttattgcactttgcaaataatgcattttttacaaatggaaggtttatggcaactctgcgttgagccagtctattggtgccatgtttccaataaaacttctcctttcatgtctcgt

SEQ ID NO: 1352 - protein, 691 aa, Homo sapien
MAPFPEEVDVFTAPHWRMKQLVGLYCDKLSKTNFSNNNDFRALLQSLYATFKEFKMHEQIENEYIIGLLQQRSQTIYNVHSDNKLSEMLSLFEKGLKNVKNEYEQLNYAKQLKERLEAFTRDFLPHMKEEEEVFQPMLMEYFTYEELKDIKKKVIAQHCSQKDTAELLRGLSLWNHAEERQKFFKYSVDEKSDKEAEVSEHSTGITHLPPEVMLSIFSYLNPQELCRCSQVSMKWSQLTKTGSLWKHLYPVHWARGDWYSGPATELDTEPDDEWVKNRKDESRAFHEWDEDADIDESEESAEESIAISIAQMEKRLLHGLIHNVLPYVGTSVKTLVLAYSSAVSSKMVRQILELCPNLEHLDLTQTDISDSAFDSWSWLGCCQSLRHLDLSGCEKITDVALEKISRALGILTSHQSGFLKTSTSKITSTAWKNKDITMQSTKQYACLHDLTNKGIGEEIDNEHPWTKPVSSENFTSPYVWMLDAEDLADIEDTVEWRHRNVESLCVMETASNFSCSTSGCFSKDIVGLRTSVCWQQHCASPAFAYCGHSFCCTGTALRTMSSLPESSAMCRKAARTRLPRGKDLIYFGSEKSDQETGRVLLFLSLSGCYQITDHGLRVLTLGGGLPYLEHLNLSGCLTITGAGLQDLVSACPSLNDEYFYYCDNINGPHADTASGCQNLQCGFRACCRSGE

SEQ ID NO: 1353 - DNA, 1962 bp, Homo sapien
agtgcgcatccggacgtaggaggtggaggttgtggaattcgccgttcgaaagcagggactaaaagccccacttcgtcttacgttccgaaaggaaggcgtctgttgagcctttctctcagtcgtgagggaggcgtcgacggcgtgcggaagtcctgagttgaggcttgcgggatcctttccggagaaagcgcaggctaaagccgcaggtgaagatgtccaactacgtgaacgacatgtggccgggctcgccgcaggagaaggattcgccctcgacctcgcggtcgggcgggtccagccggctgtcgtcgcggtctaggagccgctctttttccagaagctctcggtcccattcccgcgtctcgagccggttttcgtccaggagtcggaggagcaagtccaggtcccgttcccgaaggcgccaccagcggaagtacaggcgctactcgcggtcatactcgcggagccggtcgcgatcccgcagccgccgttaccgagagaggcgctacgggttcaccaggagatactaccggtctccttcgcggtaccggtcccggtcccgtagcaggtcgcgctctcggggaaggtcgtactgcggaagggcgtacgcgatcgcgcggggacagcgctactacggctttggtcgcacagtgtacccggaggagcacagcagatggagggacagatccaggacgaggtcgcggagcagaaccccctttcgcttaagtgaaaaagatcgaatggagctgttagaaatagcaaaaaccaatgcagcgaaagctctaggaacaaccaacattgacttgccagctagtctcagaactgttccttcagccaaagaaacaagccgtggaataggtgtatcaagtaatggtgcaaagcctgaagtaagtattctaggtttgtcggaacaaaactttcagaaagccaactgtcaaatctgattagccacttatatcttagactatactttttgggaagtctagagatgtatataatgtgctaaattcaaagtagcaaatctgaagataggcaatgtcaaacccatgaaaatgggagattaatgagctttatttggccgtgcatggtgcctcatgcctgtaatgaggcagatggcttgagtccaggagttcaagactagcctgggcaatgtggcaaaaccgcgtgtttacaaaaaatacaaaaattagccaggcatggtggtgcatgcctgtagtcccagctgtttgggaggctgaggcaggaggatctttgagcctaggatgctaaggttgcagtgagccaagatggcaccattgcactctagcctgggcagcagagcgagaccctgtctcaaaaaatacatttatttttttcattttcagttaacagtgtactcttataacaccgttattagctggtactttggtgatttctattactagtttttctaagctatttacagagtgtttgtagctttcatttgcagcattatgttcccacaaattctgtactcagcatatacagtatagtttatctgctctatttctgtcttatagaaatcatgaatgtggtctgcagacattgatgaagaaaatctgttggtaattgatacatgggctaaagcatcagaggtttaatttgaagtttatgttcacacactgaaaacttagtttttttgttggtagatccatgtgcatgctagaatttgggacaggcactatttgcataaagtattaaagtcaatttttaaactaagcaaaggtacacgttgtaacggtggggcatctgtgaaaaagatgtccctttcataatatatgcaatatattccagatgttttgagagattacagaagaggaggcctgcttcacttgcagataagtttattataattctccagaaatgtgcaggatgtgcattagcaaattgcactgtacttttcactccagcctgggtgacagagcaagactcccgtctcgggggctt

SEQ ID NO: 1354 - protein, 242 aa, Homo sapien
MSNYVNDMWPGSPQEKDSPSTSRSGGSSRLSSRSRSRSFSRSSRSHSRVSSRFSSRSRRSKSRSRSRRRHQRKYRRYSRSYSRSRSRSRSRRYRERRYGFTRRYYRSPSRYRSRSRSRSRSRGRSYCGRAYAIARGQRYYGFGRTVYPEEHSRWRDRSRTRSRSRTPFRLSEKDRMELLEIAKTNAAKALGTTNIDLPASLRTVPSAKETSRGIGVSSNGAKPEVSILGLSEQNFQKANCQI

SEQ ID NO: 1355 - DNA, 1431 bp, Homo sapien
ggacgtaggaggtggaggttgtggaattcgccgttcgaaagcagggactaaaagccccacttcgtcttacgttccgaaaggaaggcgtctgttgagcctttctctcagtcgtgagggaggcgtcgacggcgtgcggaagtcctgagttgaggcttgcgggatcctttccggagaaagcgcaggctaaagccgcaggtgaagatgtccaactacgtgaacgacatgtggccgggctcgccgcaggagaaggattcgccctcgacctcgcggtcgggcgggtccagccggctgtcgtcgcggtctaggagccgctctttttccagaagctctcggtcccattcccgcgtctcgagccggttttcgtccaggagtcggaggagcaagtccaggtcccgttcccgaaggcgccaccagcggaagtacaggcgctactcgcggtcatactcgcggagccggtcgcgatcccgcagccgccgttaccgagagaggcgctacgggttcaccaggagatactaccggtctccttcgcggtaccggtcccggtcccgtagcaggtcgcgctctcggggaaggtcgtactgcggaagggcgtacgcgatcgcgcggggacagcgctactacggctttggtcgcacagtgtacccggaggagcacagcagatggagggacagatccaggacgaggtcgcggagcagaaccccctttcgcttaagtgaaaaagatcgaatggagctgttagaaatagcaaaaaccaatgcagcgaaagctctaggaacaaccaacattgacttgccagctagtctcagaactgttccttcagccaaagaaacaagccgtggaataggtgtatcaagtaatggtgcaaagcctgaactgtcggaaaaggtaacagaagatggaactcgaaatcccaatggaaaacctacccagcaaagaagcatagcttttagctctaataattctgtagcaaagccaatacaaaaatcagctaaagctgccacagaagaggcatcttcaagatcaccaaaaatagatcagaaaaaaagtccatatggactgtggatacctatctaaaagaagaaaactgatggctaagtttgcatgaaaactgcactttattgcaagttagtgtttctagcattatcccatccctttgagccattcaggggtacttgtgcatttaaaaaccaacacaaaaagatgtaaatacttaacactcaaatattaacattttaggtttctcttgcagatatgagagatagcacagatggaccaaaggttatgcacaggtgggagtcttttgtatatagttgtaaatattgtcttggttatgtaaaaatgaaattttttagacacagtaattgaactgtattcctgttttgtatatttaataaatttcttgttttcattcttaaaaaaaaaaaaaaaaaa

SEQ ID NO: 1356 - DNA, 3111 bp, Homo sapien
gcgagttgtgtgagccgccagtatggccgggctatggcggcgagcactggctacgtgcgactgtggggagcggcgcggtgctgggtgctgcggcggccgatgctggccgccgccggggggcgggttcccactgcagcaggagcgtggttgctccgaggccagcggacctgcgacgcctctcctccttgggcactgtggggccgaggcccggcaattgggggccaatggcgggggttttgggaagcgagcagccgcggcggaggcgcattctcggggggcgaggacgcctccgagggcggcgcggaggaaggagccggcggcgcggggggcagcgcgggcgccggggaaggcccggtcataacggcgctcacgcccatgacgatccccgatgtgtttccgcacctgccgctcatcgccatcacccgcaacccggtgttcccgcgctttatcaagattatcgaggttaaaaataagaagttggttgagctgctgagaaggaaagttcgtctcgcccagccttatgtcggcgtctttctaaagagagatgacagcaatgagtcggatgtggtcgagagcctggatgaaatctaccacacggggacgtttgcccagatccatgagatgcaggaccttggggacaagctgcgcatgatcgtcatgggacacagaagagtccatatcagcagacagctggaggtggagcccgaggagccggaggcggagaacaagcacaagccccgcaggaagtcaaagcggggcaagaaggaggcggaggacgagctgagcgccaggcacccggcggagctggcgatggagcccacccctgagctcccggctgaggtgctcatggtggaggtagagaacgttgtccacgaggacttccaggtcacggaggaggtgaaagccctgactgcagagatcgtgaagaccatccgggacatcattgccttgaaccctctctacagggagtcagtgctgcagatgatgcaggctggccagcgggtggtggacaaccccatctacctgagcgacatgggcgccgcgctcaccggggccgagtcccatgagctgcaggacgtcctggaagagaccaatattcctaagcggctgtacaaggccctctccctgctgaagaaggaatttgaactgagcaagctgcagcagcgcctggggcgggaggtggaggagaagatcaagcagacccaccgtaagtacctgctgcaggagcagctaaagatcatcaagaaggagctgggcctggagaaggacgacaaggatgccatcgaggagaagttccgggagcgcctgaaggagctcgtggtccccaagcacgtcatggatgttgtggacgaggagctgagcaagctgggcctgctggacaaccactcctcggagttcaatgtcacccgcaactacctagactggctcacgtccatcccttggggcaagtacagcaacgagaacctggacctggcgcgggcacaggcagtgctggaggaagaccactacggcatggaggacgtcaagaaacgcatcctggagttcattgccgttagccagctccgcggctccacccagggcaagatcctctgcttctatggcccccctggcgtgggtaagaccagcattgctcgctccatcgcccgcgccctgaaccgagagtacttccgcttcagcgtcgggggcatgactgacgtggctgagatcaagggccacaggcggacctacgtgggcgccatgcccgggaagatcatccagtgtttgaagaagaccaagacggagaaccccctgatcctcatcgacgaggtggacaagatcggccgaggctaccagggggacccgtcgtcggcactgctggagctgctggacccagagcagaatgccaacttcctggaccactacctggacgtgcccgtggacttgtccaaggtgctgttcatctgcacggccaacgtcacggacaccatccccgagccgctgcgagaccgtatggagatgatcaacgtgtcgggctacgtggcccaggagaagctggccattgcggagcgctacctggtgccccaggctcgcgccctgtgtggcttggatgagagcaaggccaagctgtcatcggacgtgctgacgctgctcatcaagcagtactgccgcgagagcggtgtccgcaacctgcagaagcaagtggagaaggtgttacggaaatcggcctacaagattgtcagcggcgaggccgagtccgtggaggtgacgcccgagaacctgcaggacttcgtggggaagcccgtgttcaccgtggagcgcatgtatgacgtgacaccgcccggcgtggtcatggggctggcctggaccgcaatgggaggctccacgctgtttgtggagacatccctgagacggccacaggacaaggatgccaagggtgacaaggatggcagcctggaggtgacaggccagctgggggaggtgatgaaggagagcgcccgcatagcctacaccttcgccagagccttcctcatgcagcacgcccccgccaatgactacctggtgacctcacacatccacctgcatgtgcccgagggcgccacccccaaggacggcccaagcgcaggctgcaccatcgtcacggccctgctgtccctggccatgggcaggcctgtccggcagaatctggccatgactggcgaagtctccctcacgggcaagatcctgcctgttggtggcatcaaggagaagaccattgcggccaagcgcgcaggggtgacgtgcatcgtcctgccagccgagaacaagaaggacttctacgacctggcagccttcatcaccgagggcctggaggtgcacttcgtggaacactaccgggagatcttcgacatcgccttcccggacgagcaggcagaggcgctggccgtggaacggtgacggccaccccgggactgcaggcggcggatgtcaggccctgtctgggccagaactgagcgctgtggggagcgcgcccggacctggcagtggagccaccgagcgagcagctcggtccagtgacccagatcccagggacctcagtcggcttaatcagagtgtggcatagaagctatttaatgattaaagtcatttgcagta

SEQ ID NO: 1357 - protein, 959 aa, Homo sapien
MAASTGYVRLWGAARCWVLRRPMLAAAGGRVPTAAGAWLLRGQRTCDASPPWALWGRGPAIGGQWRGFWEASSRGGGAFSGGEDASEGGAEEGAGGAGGSAGAGEGPVITALTPMTIPDVFPHLPLIAITRNPVFPRFIKIIEVKNKKLVELLRRKVRLAQPYVGVFLKRDDSNESDVVESLDEIYHTGTFAQIHEMQDLGDKLRMIVMGHRRVHISRQLEVEPEEPEAENKHKPRRKSKRGKKEAEDELSARHPAELAMEPTPELPAEVLMVEVENVVHEDFQVTEEVKALTAEIVKTIRDIIALNPLYRESVLQMMQAGQRVVDNPIYLSDMGAALTGAESHELQDVLEETNIPKRLYKALSLLKKEFELSKLQQRLGREVEEKIKQTHRKYLLQEQLKIIKKELGLEKDDKDAIEEKFRERLKELVVPKHVMDVVDEELSKLGLLDNHSSEFNVTRNYLDWLTSIPWGKYSNENLDLARAQAVLEEDHYGMEDVKKRILEFIAVSQLRGSTQGKILCFYGPPGVGKTSIARSIARALNREYFRFSVGGMTDVAEIKGHRRTYVGAMPGKIIQCLKKTKTENPLILIDEVDKIGRGYQGDPSSALLELLDPEQNANFLDHYLDVPVDLSKVLFICTANVTDTIPEPLRDRMEMINVSGYVAQEKLAIAERYLVPQARALCGLDESKAKLSSDVLTLLIKQYCRESGVRNLQKQVEKVLRKSAYKIVSGEAESVEVTPENLQDFVGKPVFTVERMYDVTPPGVVMGLAWTAMGGSTLFVETSLRRPQDKDAKGDKDGSLEVTGQLGEVMKESARIAYTFARAFLMQHAPANDYLVTSHIHLHVPEGATPKDGPSAGCTIVTALLSLAMGRPVRQNLAMTGEVSLTGKILPVGGIKEKTIAAKRAGVTCIVLPAENKKDFYDLAAFITEGLEVHFVEHYREIFDIAFPDEQAEALAVER

SEQ ID NO: 1358 - DNA, 4170 bp, Homo sapien
tcaacatatgaaaaatcaatgtaatatttcatattaacagttggaagactcacaattcatagtttcagaatttacaacacaaacctacaggaataaagacaatgtagtattagaataaggtcagatatatagatcaatggacagaattgacagtccagaaatacacccatacgattacggtcacctgatttttgactaaggttccaaaacaattcactaggggaaagaatagtcttgtcaaaaaatggtgctcagacaagtggatagccataagcacagaatgagtttggacccctatctcaaatctcaaatacaaacattaactccgaattaatcaaatgcctaaatttaagagctaaaattttaaagctcttagaagaaaacataggtacacatctttgtgactttgaattaggtcacggtttccttgacatgacacttaaaagtacaagcaacaaaagaaaaaaatagataaaatgaacttcagcaaaattagaatgtttatgcttcagaaaacactgtgaagaaagtgatcagacaactcacagaatgggaaaaatatttgtgaatcatatctcttaataagggtccagcagaaaagggcaaaggtggaaatggaggaggaaaacctccttctggtccaaaccgaatgaatggtcatcaccaacagaatggagtggaaaacatgatgttgtttgaagttgttaaaatgggcaagagtgctatgcagtcggtggtagatgattggatagaatcatacaagcatgaccgagatatagcacttcttgaccttatcaacttttttattcagtgttcaggctgtaaaggagttgtcacagcagaaatgtttagacatatgcagaactctgagataattcgaaaaatgactgaagaattcgatgaggatagtggagattatccacttaccatggctggtcctcagtggaagaagttcaaatccagtttttgtgaattcattggcgtgttagtacggcaatgtcaatatagtatcatatatgatgagtatatgatggatacagtcatttcacttcttacaggattgtctgactcacaagtcagagcatttcgacatacaagcaccctggcagctatgaagttgatgacagctttggtgaatgtggcactaaatcttagcattaatatggataatacacaaagacaatatgaagcagaacgaaataaaatgattgggaaacgagccaatgagaggctagaactcctgctacaaaagcggaaagagcttcaggaaaatcaagatgaaatagaaaatatgatgaatgcaatatttaaaggagtgtttgtacatagataccgtgatgcgatacgtgaaattcgagctatttgcattgaagagattggcatttggatgaagatgtatagtgatgcctttcttaatgacagttatttaaaatatgttggttggactatgcatgataagcaaggtgaagtaagactcaaatgtcttactgctctacaagggctttattataacaaagagcttaattccaaactggaactttttaccagtcggttcaaggatagaattgtgtctatgacccttgacaaagaatatgatgttgcagtacaagcaataaaattactcactcttgttttacagagtagtgaagaagttctcactgcagaagattgtgaaaatgtctatcatctggtttattcagctcaccggccagtagcagtagcagctggagaatttctctacaaaaagctcttcagtcgtagagatccagaggaggatggaatgatgaaaagaagaggaagacaaggtccaaatgccaaccttgttaagacattggtttttttctttctagaaagtgagttacatgagcatgcagcataccttgtggatagcatgtgggactgtgctactgagctgctgaaagactgggaatgtatgaatagcttgttactggaagagccacttagtggagaggaagcactaacagataggcaagagagtgctctgattgaaataatgctttgtaccattagacaagcggctgaatgtcatcctcccgtgggaagagggacaggaaaaagggtgcttacagcaaaggagaagaagacacagttggatgataggacaaaaatcactgagctttttgccgtggcccttcctcagttattagcaaaatactctgtagatgcagaaaaggtgactaacttgttgcagttgcctcagtactttgatttggaaatatataccactggacgattagaaaacgatttggatgccttattgcgacagatccggaatattgtagagaagcacacagatacagatgttttggaagcatgttctaaaacttaccatgcactctgtaatgaagagttcacaatcttcaacagagtagatatttcaagaagtcaactgatagatgaattggcagataaatttaaccggcttcttgaagattttctgcaagagggtgaagaacctgatgaagatgatgcatatcaggtattgtcaacattgaagaggatcactgcttttcataatgcccatgacctttcaaagagggatttatttgcttgtaattacaaactcttgaaaactggaatcgaaaatggagacatgcctgagcagattgttattcacgcactgcagtgtactcactatgtaatcctttggcaacttgctaagataactgaaagcagctctacaaaggaggacttgctgcgtttaaagaaacaaatgagagtattttgtcagatatgtcaacattacctgaccaacgtgaatactactgttaaggaacaggccttcactattctgtgtgatattttgatgatcttcagccatcagattatgtcaggagggcgtgacatgttagagccattagtgtatacccctgattcttcattgcagtctgagttgctcagctttattttggatcatgtcttcattgaacaggatgatgataataatagtgcagatggtcagcaagaggatgaagccagtaaaattgaagctctgcacaagagaagaaatttacttgcagcattttgtaagctaattgtatatactgtggtggagatgaatacagctgcagatatcttcaaacagtatatgaagtattataatgactatggagatatcatcaaagaaacaatgagtaaaacaaggcagatagacaaaattcagtgtgctaagacccttattctcagtctgcaacagctttttaatgaaatgatacaagaaaatggctataattttgatagatcatcctctacatttagtggcataaaagaacttgctcgacgttttgctttaacttttggacttgatcagttgaaaacaagagaagccattgccatgctacacaaagatggcatagaatttgcttttaaagagcctaatccgcaaggggagagccatccacctttaaatttggcatttcttgatattctgagtgaattttcttctaaactacttcgacaagacaaaagaacagtgtatgtttacttggaaaagttcatgacctttcagatgtcactccgaagagaggatgtgtggcttccactgatgtcttaccgaaattctttgctagctggtggtgatgatgacaccatgtcagtcattagtggaatcagcagccgggggtcaacagtacggagtaaaaaatcaaaaccatctacaggaaaacggaaagtggttgagggcatgcagctttcactcactgaagaaagtagtagtagtgacagtatgtggttaacgagagaacaaacactgcacacccctgttatgatgcagacaccacaactcacctccactattatgagagagcccaaaagattacggcctgaggatagcttcatgagtgtttatcctaagcagactgaacatcatcaaacacctcttgattataatcggcgtggcacaagcctaatggaagatgatgaagagccaattgtggaagatgttatgatgtcctcagaagggaggattgaggatcttaatgagggaatggattttgacaccatggatatagatttgccaccatcaaagaacagacgagagagaacagaactgaagcctgatttctttgatccagcttcaattatggatgaatcagttcttggagtgtcaatgttttaataccagtacacaattaaatctgtggtgaagtc

SEQ ID NO: 1359 - protein, 1162 aa, Homo sapien
MNGHHQQNGVENMMLFEVVKMGKSAMQSVVDDWIESYKHDRDIALLDLINFFIQCSGCKGVVTAEMFRHMQNSEIIRKMTEEFDEDSGDYPLTMAGPQWKKFKSSFCEFIGVLVRQCQYSIIYDEYMMDTVISLLTGLSDSQVRAFRHTSTLAAMKLMTALVNVALNLSINMDNTQRQYEAERNKMIGKRANERLELLLQKRKELQENQDEIENMMNAIFKGVFVHRYRDAIREIRAICIEEIGIWMKMYSDAFLNDSYLKYVGWTMHDKQGEVRLKCLTALQGLYYNKELNSKLELFTSRFKDRIVSMTLDKEYDVAVQAIKLLTLVLQSSEEVLTAEDCENVYHLVYSAHRPVAVAAGEFLYKKLFSRRDPEEDGMMKRRGRQGPNANLVKTLVFFFLESELHEHAAYLVDSMWDCATELLKDWECMNSLLLEEPLSGEEALTDRQESALIEIMLCTIRQAAECHPPVGRGTGKRVLTAKEKKTQLDDRTKITELFAVALPQLLAKYSVDAEKVTNLLQLPQYFDLEIYTTGRLENDLDALLRQIRNIVEKHTDTDVLEACSKTYHALCNEEFTIFNRVDISRSQLIDELADKFNRLLEDFLQEGEEPDEDDAYQVLSTLKRITAFHNAHDLSKRDLFACNYKLLKTGIENGDMPEQIVIHALQCTHYVILWQLAKITESSSTKEDLLRLKKQMRVFCQICQHYLTNVNTTVKEQAFTILCDILMIFSHQIMSGGRDMLEPLVYTPDSSLQSELLSFILDHVFIEQDDDNNSADGQQEDEASKIEALHKRRNLLAAFCKLIVYTVVEMNTAADIFKQYMKYYNDYGDIIKETMSKTRQIDKIQCAKTLILSLQQLFNEMIQENGYNFDRSSSTFSGIKELARRFALTFGLDQLKTREAIAMLHKDGIEFAFKEPNPQGESHPPLNLAFLDILSEFSSKLLRQDKRTVYVYLEKFMTFQMSLRREDVWLPLMSYRNSLLAGGDDDTMSVISGISSRGSTVRSKKSKPSTGKRKVVEGMQLSLTEESSSSDSMWLTREQTLHTPVMMQTPQLTSTIMREPKRLRPEDSFMSVYPKQTEHHQTPLDYNRRGTSLMEDDEEPIVEDVMMSSEGRIEDLNEGMDFDTMDIDLPPSKNRRERTELKPDFFDPASIMDESVLGVSMF

SEQ ID NO: 1360 - DNA, 1696 bp, Homo sapien
ctttttctccatctcagaaccttcctgccgtcgcgtttgcacctcgctgctccagcctctggggcgcattccaaccttccagcctgcgacctgcggagaaaaaaaattacttattttcttgccccatacataccttgaggcgagcaaaaaaattaaattttaaccatgagggaaatcgtgcacatccaggctggtcagtgtggcaaccagatcggtgccaagttctgggaggtgatcagtgatgaacatggcatcgaccccaccggcacctaccacggggacagcgacctgcagctggaccgcatctctgtgtactacaatgaagccacaggtggcaaatatgttcctcgtgccatcctggtggatctagaacctgggaccatggactctgttcgctcaggtccttttggccagatctttagaccagacaactttgtatttggtcagtctggggcaggtaacaactgggccaaaggccactacacagagggcgccgagctggttgattctgtcctggatgtggtacggaaggaggcagagagctgtgactgcctgcagggcttccagctgacccactcactgggcgggggcacaggctctggaatgggcactctccttatcagcaagatccgagaagaataccctgatcgcatcatgaataccttcagtgtggtgccttcacccaaagtgtctgacaccgtggtcgagccctacaatgccaccctctccgtccatcagttggtagagaatactgatgagacctattgcattgacaacgaggccctctatgatatctgcttccgcactctgaagctgaccacaccaacctacggggatctgaaccaccttgtctcagccaccatgagtggtgtcaccacctgcctccgtttccctggccagctcaatgctgacctccgcaagttggcagtcaacatggtccccttcccacgtctccatttctttatgcctggctttgcccctctcaccagccgtggaagccagcagtatcgagctctcacagtgccggaactcacccagcaggtcttcgatgccaaggacatgatggctgcctgtgacccccgccacggccgatacctcaccgtggctgctgtcttccgtggtcggatgtccatgaaggaggtcgatgagcagatgcttaacgtgcagaacaagaacagcagctactttgtggaatggatccccaacaatgtcaagacagccgtctgtgacatcccacctcgtggcctcaagatggcagtcaccttcattggcaatagcacagccatccaggagctcttcaagcgcatctcggagcagttcactgccatgttccgccggaaggccttcctccactggtacacaggcgagggcatggacgagatggagttcaccgaggctgagagcaacatgaacgacctcgtctctgagtatcagcagtaccaggatgccaccgcagaagaggaggaggatttcggtgaggaggccgaagaggaggcctaaggcagagcccccatcacctcaggcttctcagttcccttagccgtcttactcaactgcccctttcctctccctcagaatttgtgtttgctgcctctatcttgttttttgttttttcttctgggggggggtctagaacagtgcctggcacatagtaggcgctcaataaatacttgtttgttgaaaaaaaaaaaaaaaa

SEQ ID NO: 1361 - protein, 444 aa, Homo sapien [sequence omitted]

SEQ ID NO: 1362 - DNA, 2061 bp, Homo sapien
tgttccgcgatcttctcaggctctcctagcagcatccatcgccgccaccctatcttcactggcttcaccttctccttctctcttcgttgctgagcgacaagcttcctagcgctatgactgtcgtctccgtcccgcagcgggagccgctcgtcctgggtggccgccttgcgccgcttggcttttcctcccgaggttactttggggccctcccgatggtgaccacggctccgcctcctttaccccggatcccggacccccgggcactgcccccgaccctcttcctccctcatttcctagggggagatggcccgtgtctgaccccccagcctcgcgctccagcagctctgcccaaccgcagcctcgccgtggcgggaggcactcctcgggcagcgccgaagaagcggcgaaagaagaaggtgcgggccagccccgcagggcagctgcccagccgcttccaccagtaccagcagcaccggccgagtctggagggcggccggagccccgcgaccggcccgagcggagcgcaggaggtcccgggcccggccgccgccttggccccgagtcctgcagccgcagccggcacggagggagccagccccgaccttgccccgctgcggcccgcggctcccggccaaacccccctcaggaaagaggttttaaaatcaaagatgggaaaatcggagaaaattgcccttccccatggccagcttgttcatggtatacacttgtatgagcaaccaaagataaacagacagaaaagcaaatataacttgccactaaccaagatcacctctgcaaaaagaaatgaaaacaacttttggcaggattctgtttcatctgacagaattcagaagcaggaaaaaaagccttttaaaaataccgagaacattaaaaattcgcatttgaagaaatcagcatttctaactgaagtgagccaaaaggaaaattatgctggggcaaagtttagtgatccaccttctcctagtgttcttccaaagcctcctagtcactggatgggaagcactgttgaaaattccaaccaaaacagggagctgatggcagtacacttaaaaaccctcctcaaagttcaaacttagatttcagatttcagtatgtgtgtaaaacataatttttcccatatccctggactcttgagaaaattggtacagaaatggaaatttgccttgttgcaacatacaattgcaaaagatgagtttaaaaaattacatacaaacagcttgtattatattttatattttgtaaatactgtataccatgtattatgtgtatattgttcatacttgagaggtatattatagttttgttatgaaagtatgtattttgccctgcccacattgcaggtgttttgtatatatacaatggataaattttaagtgtgtgctaaggcacatggaagaccgattttatttgcacaaggtactgagatttttttcaagaaacagctgtcaaatctcaaggtgaagatctaaatgtgaacagtttactaatgcactactgaagtttaaatctgtggcacaatcaatgtaagcatggggtttgtttctctaaattgatttgtaatctgaaattactgaacaactcctattcccatttttgctaaactcaatttctggttttggtatatatccattccagcttaatgcctctaattttaatgccaacaaaattggttgtaatcaaattttaaaataataataatttggcccccccttttaaaatagtcttgactctttgtgtgtgactgtttctcatgtttgaatgtgtgactaggagatgattttgtgtggttggatttttttgacttctactttactggctgagtgtgagccgccatgcctggccataatctacattttcttaccaggagcagcattgaggtttttgagcatagtacttgactactctagaggctgagacgggagcatctcttgagcctgagaagtggagattgcaattgagctaggatcaggccactgcactccagcctgggtaacagacgctgtctcaaaaaaaaggccaagagaaagtaagggagacaga

SEQ ID NO: 1363 - protein, 327 aa, Homo sapien
MTVVSVPQREPLVLGGRLAPLGFSSRGYFGALPMVTTAPPPLPRIPDPRALPPTLFLPHFLGGDGPCLTPQPRAPAALPNRSLAVAGGTPRAAPKKRRKKKVRASPAGQLPSRFHQYQQHRPSLEGGRSPATGPSGAQEVPGPAAALAPSPAAAAGTEGASPDLAPLRPAAPGQTPLRKEVLKSKMGKSEKIALPHGQLVHGIHLYEQPKINRQKSKYNLPLTKITSAKRNENNFWQDSVSSDRIQKQEKKPFKNTENIKNSHLKKSAFLTEVSQKENYAGAKFSDPPSPSVLPKPPSHWMGSTVENSNQNRELMAVHLKTLLKVQT

SEQ ID NO: 1364 - DNA, 2265 bp, Homo sapien
ccggctgctcagcgcgctccgcggtcatggagatccccgggagcttgtgcaagaaagtcaagctgagcaataacgcgcagaactggggaatgcagagagcaaccaatgtcacctaccaagcccatcatgtcagcaggaacaagagaggtcaggtggtggggaccagaggtggctttcgtggttgcacagtttggctaacaggcttgtctggagcgggaaagactactgtgagcatggccttggaggagtacctggtttgtcatggtattccatgctacactctggatggtgacaatattcgtcaaggtctcaataaaaatcttggctttagtcctgaagacagagaagagaatgttcgacgcatcgcagaagttgctaaactgtttgcagatgctggcttagtgtgcatcacaagtttcatatcaccttacactcaggatcgcaacaatgcaaggcaaattcatgaaggtgcaagtttaccgttttttgaagtatttgttgatgctcctctgcatgtttgtgaacagagggatgtcaaaggactctacaaaaaagcccgggcaggagaaattaaaggtttcactgggatcgattctgaatatgaaaagccagaggcccctgagttggtgctgaaaacagactcctgtgatgtaaatgactgtgtccagcaagttgtggaacttctacaggaacgggatattgtacctgtggatgcatcttatgaagtaaaagaactatatgtgccagaaaataaacttcatttggcaaaaacagatgcggaaacattaccagcactgaaaattaataaagtggatatgcagtgggtgcaggttttggcagaaggttgggcaaccccattgaatggctttatgagagagagggagtacttgcagtgccttcattttgattgtcttctggatggaggtgtcattaacttgtcagtacctatagttctgactgcgactcatgaagataaagagaggctggacggctgtacagcatttgctctgatgtatgagggccgccgtgtggccattcttcgcaatccagagttttttgagcacaggaaagaggagcgctgtgccagacagtggggaacgacatgcaagaaccacccctatattaagatggtgatggaacaaggagattggctgattggaggagatcttcaagtcttggatcgagtttattggaatgatggtcttgatcagtatcgtcttactcctactgagctaaagcagaaatttaaagatatgaatgctgatgctgtctttgcatttcaactacgcaacccagtgcacaatggacatgccctgttaatgcaggatacccataagcaacttctagagaggggctaccggcgccctgtcctcctcctccaccctctgggtggctggacaaaggatgacgatgttcctttgatgtggcgtatgaagcagcatgctgcagtgttggaggaaggagttctgaatcctgagacgacagtggtggccatcttcccatctcccatgatgtatgctggaccaactgaggtccagtggcattgcagagcacggatggttgcaggagccaacttttacattgttggacgagaccctgctggcatgcctcatccagaaacagggaaggatctttatgagccaagtcatggtgccaaagtgctgacgatggcccctggtttaatcactttggaaatagttccctttcgagttgcagcttacaacaagaaaaagaagcgtatggactactatgactctgaacaccatgaagactttgaatttatttcaggaacacgaatgcgcaaacttgctcgagaaggccagaaaccacctgaaggtttcatggctcccaaggcttggaccgtgctgacagaatactacaaatccttggagaaagcttaggctgttaacccagtcactccacctttgacacattactagtaacaagaggggaccacatagtctctgttggcatttctttgtggtgtctgtctggacatgcttcctaaaaacagaccattttccttaacttgcatcagttttggtctgccttatgagttctgttttgaacaagtgtaacacactgatggttttaatgtatcttttccacttattatagttatattcctacaatacaattttaaaattgtctttttatattatatttatgcttctgtgtcatgattttttcaagctgttatattagttgtaaccagtagtattcacattaaatcttgctttttttccccttaaaaaaaaaaaaaaa

SEQ ID NO: 1365 - protein, 624 aa, Homo sapien
MEIPGSLCKKVKLSNNAQNWGMQRATNVTYQAHHVSRNKRGQVVGTRGGFRGCTVWLTGLSGAGKTTVSMALEEYLVCHGIPCYTLDGDNIRQGLNKNLGFSPEDREENVRRIAEVAKLFADAGLVCITSFISPYTQDRNNARQIHEGASLPFFEVFVDAPLHVCEQRDVKGLYKKARAGEIKGFTGIDSEYEKPEAPELVLKTDSCDVNDCVQQVVELLQERDIVPVDASYEVKELYVPENKLHLAKTDAETLPALKINKVDMQWVQVLAEGWATPLNGFMREREYLQCLHFDCLLDGGVINLSVPIVLTATHEDKERLDGCTAFALMYEGRRVAILRNPEFFEHRKEERCARQWGTTCKNHPYIKMVMEQGDWLIGGDLQVLDRVYWNDGLDQYRLTPTELKQKFKDMNADAVFAFQLRNPVHNGHALLMQDTHKQLLERGYRRPVLLLHPLGGWTKDDDVPLMWRMKQHAAVLEEGVLNPETTVVAIFPSPMMYAGPTEVQWHCRARMVAGANFYIVGRDPAGMPHPETGKDLYEPSHGAKVLTMAPGLITLEIVPFRVAAYNKKKKRMDYYDSEHHEDFEFISGTRMRKLAREGQKPPEGFMAPKAWTVLTEYYKSLEKA

SEQ ID NO: 1366 - DNA, 8137 bp, Homo sapien
  Unsure 729-731: Unknown base
agagatgggtctcgccatcaccatgttgcccagtctggtctccaactcctgggctcaagcgatcctcctgccttggtctcccaaagtgctgggattacaggtgtgagcccccacacccggcctgagtgagtgggttctgaatggtgactgttgttgtccatagccttccccctgcttctgagagtggagtccctcccctcatgttggagacctcccaaggtccatgtggtcctataggggctgttcagcctccctagccccttaacgtgtcaggtaatactgtatatattccatgaaatgtgaataattagttatataattcctaagcacttattttaaaaaacagcaatgtgatgcttaactcttcccacctctgttcctgtcccccttagaaaaccactgataactctttttttttttgagacggagtcttgccctgtcgcccaggctggagtgtagtggcctgatctcggctcggctcattgtaacctccgcctcgggtttgagcgattctcctgcctcagcctcctgagtagctgggattataggcgtgcaccaccacgcctggctaattttttgtatctttagtagggacgggtttcaccatgttggccagagtggtcttgaactcctgaccttgtgatccgctcgcctcagcctcccaaagtgctgggattacaggcatgagccaccgtgcctgtcctagaaccactggtaactcttaactgnnnagtgttctaagaacggaagcatctgggctggatggaatttagcatcaagcagagtcccctttctgttcagagtgttgtaaagtgcataaagatgaagcaggcaccagaaatcctcggcagtgccaacgggaagactccgagctgcgaggtgaaccgcgagtgttctgtgttcctcagcaaagcccagctctccagtagcctgcaggagggggtcatgcagaagtttaacggccacgacgccctgccctttattccagccgacaagctgaaagatcttacttcccgggtgtttaatggagaacccggcgcacacgatgccaaactgcgttttgagtcccaggaaatgaaagggattgggacaccccctaacactacccctatcaaaaatggctctccagaaattaagctgaaaatcaccaaaacatacatgaatgggaagcctctctttgaatcttccatttgtggtgacagtgctgctgatgtgtctcagtcagaagaaaatggacaaaaaccagaaaacaaggcgagaaggaacaggaagaggagcataaaatatgactccttgctggagcagggccttgtcgaagcagctcttgtgtctaagatctcaagtccttcagataaaaagattccagctaagaaagagtcttgtccaaacactggaagagacaaagaccacctgttgaaatacaacgttggtgatttggtgtggtccaaagtgtcgggttacccttggtggccttgcatggtttctgcagatccactccttcacagctataccaaacttaaaggtcagaaaaagagtgcacgccagtatcacgtacagttctttggtgacgccccagaaagagcttggatatttgagaagagcctcgtagcttttgaaggagaaggacagtttgaaaaattatgccaggaaagtgccaagcaggcacccacgaaagctgagaaaattaagctattgaaaccaatttcagggaaattgagggcccagtgggaaatgggcattgttcaagcagaagaagctgcaagcatgtcagtggaggagcggaaagccaagttcacctttctctatgtgggggaccagcttcatctcaaccctcaagtagccaaggaggctggcattgctgcagagtctttgggagaaatggcagaatcctcaggagtcagtgaagaagctgctgaaaaccccaagtctgtgagagaagagtgcattcccatgaagagaaggcggagggccaaactgtgtagctctgcagagaccctggagagtcaccccgacatagggaagagtactcctcaaaagacggcagaggctgaccccagaagaggagtagggtctcctcctgggaggaagaagaccacagtctccatgccacgaagcaggaagggagatgcagcatcccagtttttggtcttctgtcaaaaacacagggatgaggtggtagctgagcacccagatgcttcaggtgaggagattgaagagctgctcaggtcacagtggagtctgctgagtgagaagcagagagcacgctacaacaccaagtttgccctggtggcccctgtccaggctgaagaagactctggtaatgtaaatgggaaaaaaagaaaccacacaaagaggatacaggaccctacagaagatgctgaagctgaggacacacccaggaaaagactcaggacggacaagcacagtcttcggaagagagacacaatcactgacaaaacggccagaacaagctcttacaaggccatggaggcagcctcctcgctcaagagccaggcagcaacgaaaaatctgtctgatgcatgtaaaccactgaagaagcgaaatcgggcttccacggcagcatcttcagctcttgggtttagcaaaagttcatctccttctgcatccttaactgagaatgaggtctcggacagcccgggagacgagccctcggagtccccatacgaaagtgcagacgaaacacaaactgaagtatctgtctcatccaaaaagtctgagcgaggagtgactgccaaaaaggagtatgtgtgccagctgtgtgagaagccgggcagcctcctgctctgtgaaggaccctgctgcggagctttccacctcgcctgccttgggctttcccggaggccagaagggaggttcacctgcagcgagtgtgcctcagggattcactcatgtttcgtgtgtaaagagagcaagacagatgttaagcgctgtgtggtaactcagtgtggaaaattttaccatgaggcttgtgtgaaaaaataccctctgactgtatttgagagccgaggtttccgctgccccctccacagctgtgtgagctgccatgcttccaacccttcaaacccaaggccgtcaaaaggtaaaatgatgcggtgtgtccgctgccccgttgcctatcacagcggggatgcttgtctggcagcaggatgctcagtgatcgcctccaacagcatcatctgcactgcccacttcactgctcggaaggggaagcgacaccacgcccacgtcaacgtgagctggtgcttcgtgtgctccaaaggggggagccttctgtgctgtgagtcctgcccagcggccttccaccctgactgcctgaacatcgagatgcctgacggcagctggttctgcaatgactgcagggctgggaagaagctgcacttccaggatatcatttgggtgaaacttgggaactacagatggtggccggcagaagtttgccatcccaaaaatgttcccccaaatattcagaaaatgaagcacgagattggagaattccctgtgtttttctttgggtctaaagattattactggacgcatcaggcgcgagtgttcccgtacatggagggggaccggggcagccgctaccagggggtcagagggatcggaagagtcttcaaaaacgcactgcaagaagctgaagctcgttttcgtgaaattaagcttcagagggaagcccgagaaacacaggagagcgagcgcaagcccccaccatacaagcacatcaaggtgaataagccttacgggaaagtccagatctacacagcggatatttcagaaatccctaagtgcaactgcaagcccacagatgagaatccttgtggctttgattcggagtgtctgaacaggatgctgatgtttgagtgccacccgcaggtgtgtcccgcgggcgagttctgccagaaccagtgcttcaccaagcgccagtacccagagaccaagatcatcaagacagatggcaaagggtggggcctggtcgccaagagggacatcagaaagggagaatttgttaacgagtacgttggggagctgatcgacgaggaggagtgcatggcgagaatcaagcacgcacacgagaacgacatcacccacttctacatgctcactatagacaaggaccgtataatagacgctggccccaaaggaaactactctcgatttatgaatcacagctgccagcccaactgtgagaccctcaagtggacagtgaatggggacactcgtgtgggcctgtttgccgtctgtgacattcctgcagggacggagctgacttttaactacaacctcgattgtctgggcaatgaaaaaacggtctgccggtgtggagcctccaattgcagtggattcctcggggatagaccaaagacctcgacgaccctttcatcagaggaaaagggcaaaaagaccaagaagaaaacgaggcggcgcagagcaaaaggggaagggaagaggcagtcagaggacgagtgcttccgctgcggtgatggcgggcagctggtgctgtgtgaccgcaagttctgcaccaaggcctaccacctgtcctgcctgggccttggcaagcggcccttcgggaagtgggaatgtccttggcatcattgtgacgtgtgtggcaaaccttcgacttcattttgccacctctgccccaattcgttctgtaaggagcaccaggacgggacagccttcagctgcaccccggacgggcggtcctactgctgtgagcatgacttaggggcggcatcggtcagaagcaccaagactgagaagccccccccagagccagggaagccgaaggggaagaggcggcggcggaggggctggcggagagtcacagagggcaaatagcgccaggcggccgcttggccggatccaggggcggtgcagggcggccggccctgcctgcgggagagggcgagcatgaactggcccggaggacccagctcgagccgccaggacacagacgtacaggcctcctcgggagggagcgcctccccaccactgagccatcctcagcagcgtccgctgcgtctgcactgatgaccgtctgagcccagctcagcgttcctggacaaacagcctcactcctcagcgttaccgccacacttgaatttctccgaatgtcaaggttccctcccactctatttttttaggttaaagttaattggcatatggaatgttttaatctcctctgaaatgtgtagcgtaggcttttcccaagggtcgctagaaactcgtcttcgcgttgccccctttctggctctcagcgccgtcgccactcgggagaggctgggtgaggcccgtgtgaggactgaccctggattcctcgaaactgccattgtgatcattactctgctctttggtggctgtatcatttttttgtactaatgtgaattgttcctcagaaacgcttcttttccatcctagtgagaagctggccctgcaggtggtggcagcaatggtgttgtaagatttcctcccgtagttttttctcctcatggatttgaatgaaatgccaataacacgtccactttcaacgtgtagtttacgcggagcactttcgaggcctggccgggttgggcctacttctcacctgggcctatcttctgaactcgctaggttcttatcaacatttgggggataactttgtatatttttttcatttggcttttctttaccagtttctgatttttattctcaatatatttttgctaaacctatttcacaaatcaccaccgactgaagtgtgtgtttactgatgcggccctgagctccatggcgaaaggagtgactttgcagggcgtgagaccgcagtctgcttagagcacaggaagtgacaacttagggagccccgtagggcgctgcaggccccggggaccccagcacgtgggtctaaagagagacggagtctagctctcctgccacccagagtggcttccatctcagcactctgtgggtctggtgatggaagatgcagtctctgctgatcacatgtgccctctgccagggcacctactgagaggtgcggtcctgggggtggaggcctgcctggcaggtgtgcgtgcctcgtacgtgtgttatgggcactggtctaggccaggtatgacacccactctcctgtgagatttcactttagtttttaaaaggtccagttctacagagtgagacctatctatctgagtactacatatgttttaagacttggttctttttttgagggatccttgaccctgggaagtctggagcaccctgagaagggggcaccatgtgtgcctttgcccacgtgtcctgaggggctgcttgtctgggagggagggagagaacattcagcagcaggtgcttttttatggccttttcttaaaataacctaagggggacacatccatcttgcagagaagtttacagaactccccttgaaaactgctgctgaggctcctgttaaattttctgtggcatcttttatgccttggtaaaaactgcagtgtctttggacctgagagtggctactccgtggttttgtgacctgtaagcgtggggttcaggggtgtgtggccctgcagggtcccacgcctccctgagcactgactggaagtttcactggctggtggctgtcccttctcccatcagggtccccagcaaagttaactacacagaggacccaggggaaacgagctgtgtagccactgacttgctcgcgcggccgtggcctctgaggggcactcgccggttaagacagggtgggagtagtgctttccagttcagactctaacttctcccaaagtgtcctaagaaaatactggatcggctcatagatttatgctccttatgatgccctaacttggaaggttgttctagggacaggccgggcagtgtccccacacacaccttagagtcgaaggccccagggccccgctgtcacttgcccaaaagatcccttccggcaggtaagggactaccaatgcttacgtcaaaacagcagaatcggctttgcagtgcactttggggagcagatattaacttatttttgtgttggacagtagtgaaatcttgtgatttttaatcgctttgataatacttccaaattttatgatttttctgaaggaaataatgcaaacattttaaatatgtttctccccctttccaaaaactgttaaactaatgagcaagtaacactaactttgaatgtctctacaatacccgttgataactcagtggagccaggctttggggtagcggccctgagcttgcagggtttctcgccactggggctgaccacgcccccagctgtgaccgtgggtgtggctggctctcggccctgcccagctttgttctgaggacgtggtgacttcctgaacatcagcttcaatcctccatcattaatgtgaagcaaaacacaaaaaccgccccaatccctcaggattccttggcatccgaaaccagcatctgcacctaaacccatacccacccgtgtgcgcccacagggggatgtgtccgaatgggcagcttaaaatgtggtcacctgtgggggaaactcttcaggcacctgaagtgagaacccagctgtccgtcctcaggccggcctttcttccggcgacacccgtccatggctggctgggtccccttcgcagtgtttgtctgtcttgacatctaaaccccggcgtgtgcagtgcccatcttccaggactaccttattttccagaattaaacctgttttataattcaagttaatgcaaatgactgtcagttgccaaatatcttgatcctgtgagtgtagttgatgactgtttgttagtcagtagagtaaaatgctgtgtccacggggtgtcacagcctcaccataccctgttgaggtgtgaaatgccccgtcagaaattaaatacaaacttaaatgtgcctattggtgtctaaacttcatacaatgtaaggtcagattccttttaggaatactgggtgctgtcaccaggtttgatagttagacttaaaaacttgaaattcactttttggggggagggatatactgaaatagagagttgagacttgccagttgggggaaaatagcatttaaaatggaaagctgtgtttggaaaattgtgtatgagtatttttgtattaaaaacattttaaa

SEQ ID NO: 1367 - protein, 1365 aa, Homo sapien
MEFSIKQSPLSVQSVVKCIKMKQAPEILGSANGKTPSCEVNRECSVFLSKAQLSSSLQEGVMQKFNGHDALPFIPADKLKDLTSRVFNGEPGAHDAKLRFESQEMKGIGTPPNTTPIKNGSPEIKLKITKTYMNGKPLFESSICGDSAADVSQSEENGQKPENKARRNRKRSIKYDSLLEQGLVEAALVSKISSPSDKKIPAKKESCPNTGRDKDHLLKYNVGDLVWSKVSGYPWWPCMVSADPLLHSYTKLKGQKKSARQYHVQFFGDAPERAWIFEKSLVAFEGEGQFEKLCQESAKQAPTKAEKIKLLKPISGKLRAQWEMGIVQAEEAASMSVEERKAKFTFLYVGDQLHLNPQVAKEAGIAAESLGEMAESSGVSEEAAENPKSVREECIPMKRRRRAKLCSSAETLESHPDIGKSTPQKTAEADPRRGVGSPPGRKKTTVSMPRSRKGDAASQFLVFCQKHRDEVVAEHPDASGEEIEELLRSQWSLLSEKQRARYNTKFALVAPVQAEEDSGNVNGKKRNHTKRIQDPTEDAEAEDTPRKRLRTDKHSLRKRDTITDKTARTSSYKAMEAASSLKSQAATKNLSDACKPLKKRNRASTAASSALGFSKSSSPSASLTENEVSDSPGDEPSESPYESADETQTEVSVSSKKSERGVTAKKEYVCQLCEKPGSLLLCEGPCCGAFHLACLGLSRRPEGRFTCSECASGIHSCFVCKESKTDVKRCVVTQCGKFYHEACVKKYPLTVFESRGFRCPLHSCVSCHASNPSNPRPSKGKMMRCVRCPVAYHSGDACLAAGCSVIASNSIICTAHFTARKGKRHHAHVNVSWCFVCSKGGSLLCCESCPAAFHPDCLNIEMPDGSWFCNDCRAGKKLHFQDIIWVKLGNYRWWPAEVCHPKNVPPNIQKMKHEIGEFPVFFFGSKDYYWTHQARVFPYMEGDRGSRYQGVRGIGRVFKNALQEAEARFREIKLQREARETQESERKPPPYKHIKVNKPYGKVQIYTADISEIPKCNCKPTDENPCGFDSECLNRMLMFECHPQVCPAGEFCQNQCFTKRQYPETKIIKTDGKGWGLVAKRDIRKGEFVNEYVGELIDEEECMARIKHAHENDITHFYMLTIDKDRIIDAGPKGNYSRFMNHSCQPNCETLKWTVNGDTRVGLFAVCDIPAGTELTFNYNLDCLGNEKTVCRCGASNCSGFLGDRPKTSTTLSSEEKGKKTKKKTRRRRAKGEGKRQSEDECFRCGDGGQLVLCDRKFCTKAYHLSCLGLGKRPFGKWECPWHHCDVCGKPSTSFCHLCPNSFCKEHQDGTAFSCTPDGRSYCCEHDLGAASVRSTKTEKPPPEPGKPKGKRRRRRGWRRVTEGK

SEQ ID NO: 1368 - DNA, 1662 bp, Rattus norvegicus
ggtcgttcgttgggcggtgctggtttttcgctcgtcgactgcggctcttcctcgggcagcggaagcggcgcggcggtcggagaagtggcctaaaacttcggcgttgggtgaaagaaaatggcccgaaccaagcagactgctcgtaagtccaccggtgggaaagccccccgcaaacagctggccacgaaagccgccaggaaaagcgctccctctaccggcggggtgaagaagcctcatcgctacaggcccgggaccgtggcgcttcgagagattcgtcgttatcagaagtcgaccgagctgctcatccggaagctgcccttccagaggttggtgagggagatcgcgcaggatttcaaaaccgacctgaggtttcagagcgcagccatcggtgcgctgcaggaggctagcgaagcgtacctggtgggtctgttcgaagataccaacctgtgtgccatccacgctaagagagtcaccatcatgcccaaagacatccagttggctcgccggatacggggagagagagcttaagtgaaggcagtttttatggcgttttgtagtaaattctgtaaaatactttggtttaatttgtgactttttttgtaagaaattgtttataatatgttgcatttgtacttaagtcattccatctttcactcaggatgaatgcgaaaagtgactgttcacagacctcagtgatgtgagcactgttgctcaggagtgacaagttgctaatatgcagaagggatgggtgatacttcttgcttctcatgatgcatgtttctgtatgttaatgacttgttgggtagctattaaggtactagagttgataaatgtgtacagggtccttttgcaataaaactggttatgacttgatccaagtgtttaacaattggggctgttaagtctgaccatacatcactgtgatagaatgtgggctttttcaagggtgaagatacaagtcttaaccacagtgtaacttacagtttcctttaaaaaaaaaaaaagtaaacctggcagctatagaatacactatgtgcatttataatagctattttatatattgtagtatcaacatttttaaattaaatgttttacattcacaagtggtggggagtcttgtcattaaggtgtgtgtaatttagagtccagttggttttcttctgactgcacttgttctcatagtagtaaaatgctatgcgcatttataccttgcataagtcctcattctaccacatgttaaccctctagctgataatgcaaacactaactgggggattttatttataagggctctagaaaaaacgagttattcacaccagcatcatcttaactaacattctgaactagttagtgcagcttttcattgtgttgtgtggttggtctcataactaggttgagtttttctcctctgctgaggaaacagtaccgaagttctttttcttgtggcatttgtattataaaaacttggtgtgggggaggagcacaaaactccagcccactgaacctctgccaattaagatggtgttgggttaggttacatctggttactgtcctgggaaaatcatttttatagagatggccttccaagtggttttaaaatttactgaagtttttaggtcaattatgtatgttgactaaatttacaaataaacttgtttatcc

SEQ ID NO: 1369 - protein, 136 aa, Rattus norvegicus
MARTKQTARKSTGGKAPRKQLATKAARKSAPSTGGVKKPHRYRPGTVALREIRRYQKSTELLIRKLPFQRLVREIAQDFKTDLRFQSAAIGALQEASEAYLVGLFEDTNLCAIHAKRVTIMPKDIQLARRIRGERA

SEQ ID NO: 1370 - DNA, 1942 bp, Homo sapien
gagcatggaggcgggggcggctgaggcagctgtagcggccgtggaggaggtcggctcagccgggcagtttgaggagctgctgcgcctcaaagccaagtccctccttgtggtccatttctgggcaccatgggctccacagtgtgcacagatgaacgaagttatggcagagttagctaaagaactccctcaagtttcatttgtgaagttggaagctgaaggtgttcctgaagtatctgaaaaatatgaaattagctctgttcccacttttctgtttttcaagaattctcagaaaatcgaccgattagatggtgcacatgccccagagttgaccaaaaaagttcagcgacatgcatctagtggctccttcctacccagcgctaatgaacatcttaaagaagatctcaaccttcgcttgaagaaattgactcatgctgccccctgcatgctgtttatgaaaggaactcctcaagaaccacgctgtggtttcagcaagcagatggtggaaattcttcacaaacataatattcagtttagcagttttgatatcttctcagatgaagaggttcgacagggactcaaagcctattccagttggcctacctatcctcagctctatgtttctggagagctcataggaggacttgatataattaaggagctagaagcatctgaagaactagatacaatttgtcccaaagctcccaaattagaggaaaggctcaaagtgctgacaaataaagcttctgtgatgctctttatgaaaggaaacaaacaggaagcaaaatgtggattcagcaaacaaattctggaaatactaaatagtactggtgttgaatatgaaacattcgatatattggaggatgaagaagttcggcaaggattaaaagcttactcaaattggccaacataccctcagctgtatgtgaaaggggagctggtgggaggattggatattgtgaaggaactgaaagaaaatggtgaattgctgcctatactgagaggagaaaattaataaatcttaaacttggtgcccaactattacggggtctggctctgtcacccaggctggagtgcagtggcacgattatggctcattgcagcctcgacttctcggggccaagcgatcctcctgcctcagccttctgagtagctgggaccacaggcgtgcaccaccatgcccacctaattttttatttcttgtagagatgaggtctcctgcctcagcctcccaaagtgctggaatttacaggagtgtcggctgtgccccttgtgatggatgaggaaaggtatccacctttctgaatcagacacaagctgcagtagcttcctgatgcctcattcaccaggatgggtaactttaaagacaagttttataactggcatcccatctggtttcagagtcttgggggcttttttcatacagctttgtctgatatttagagacattcagattcagaagccatgagttcagttagctcatgggccgggcacgtgcactgactcactggctgcagcagaacacattgagggagtcttggtgcacttaggtcactgtaaggttctagggctgggagctgggatttgaaccaggatctgtcagcgcagccccagtgctgtgcttgaagcctcgtgccacactggctttgaggtagcacgctgcaagttagtgagtggagttgcccaagtctggggcttctgaaatgacctggtatttttatgttcctgttagaaatggtgtggctttcacaaattaagtgccaggctgggcacaatggctcgtgcttgtaatcccagcactttgggaggcggaggcaggcgggttgcttgagctccggagcttgagaccagcctgagcaacatggcgaaacctcatatctacaaaaaataaaaaattaactggtcaaaaaaaaaaaaaaaaaaaaaaaaaaaaaaaaaaaaaaaa

SEQ ID NO: 1371 - protein, 335 aa, Homo sapien
MEAGAAEAAVAAVEEVGSAGQFEELLRLKAKSLLVVHFWAPWAPQCAQMNEVMAELAKELPQVSFVKLEAEGVPEVSEKYEISSVPTFLFFKNSQKIDRLDGAHAPELTKKVQRHASSGSFLPSANEHLKEDLNLRLKKLTHAAPCMLFMKGTPQEPRCGFSKQMVEILHKHNIQFSSFDIFSDEEVRQGLKAYSSWPTYPQLYVSGELIGGLDIIKELEASEELDTICPKAPKLEERLKVLTNKASVMLFMKGNKQEAKCGFSKQILEILNSTGVEYETFDILEDEEVRQGLKAYSNWPTYPQLYVKGELVGGLDIVKELKENGELLPILRGEN

SEQ ID NO: 1372 - DNA, 1659 bp, Homo sapien
tcagcgggcgagtccccggctcctccagctccttcctcctcttcctcctcctcctccacctccggcttttgggggatcactgtcctctctcggcagcagaatgagccggcaggtggtccgctccagcaagttccgccacgtgtttggacagccggccaaggccgaccagtgctatgaagatgtgcgcgtctcacagaccacctgggacagtggcttctgtgctgtcaaccctaagtttgtggccctgatctgtgaggccagcgggggaggggccttcctggtgctgcccctgggcaagactggacgtgtggacaagaatgcgcccacggtctgtggccacacagcccctgtgctagacatcgcctggtgcccgcacaatgacaacgtcattgccagtggctccgaggactgcacagtcatggtgtgggagatcccggatgggggcctgatgctgcccctgcgggagcccgtcgtcaccctggagggccacaccaagcgtgtgggcattgtggcctggcacaccacagcccagaacgtgctgctcagtgcaggttgtgacaacgtgatcatggtgtgggacgtgggcactggggcggccatgctgacactgggcccagaggtgcacccagacacgatctacagtgtggactggagccgagatggaggcctcatttgtacctcctgccgtgacaagcgcgtgcgcatcatcgagccccgcaaaggcactgtcgtagctgagaaggaccgtccccacgaggggacccggcccgtgcgtgcagtgttcgtgtcggaggggaagatcctgaccacgggcttcagccgcatgagtgagcggcaggtggcgctgtgggacacaaagcacctggaggagccgctgtccctgcaggagctggacaccagcagcggtgtcctgctgcccttctttgaccctgacaccaacatcgtctacctctgtggcaagggtgacagctcaatccggtactttgagatcacttccgaggcccctttcctgcactatctctccatgttcagttccaaggagtcccagcggggcatgggctacatgcccaaacgtggcctggaggtgaacaagtgtgagatcgccaggttctacaagctgcacgagcggaggtgtgagcccattgccatgacagtgcctcgaaagtcggacctgttccaggaggacctgtacccacccaccgcagggcccgaccctgccctcacggctgaggagtggctggggggtcgggatgctgggcccctcctcatctccctcaaggatggctacgtacccccaaagagccgggagctgagggtcaaccggggcctggacaccgggcgcaggagggcagcaccagaggccagtggcactcccagctcggatgccgtgtctcggctggaggaggagatgcggaagctccaggccacggtgcaggagctccagaagcgcttggacaggctggaggagacagtccaggccaagtagagccccgcagggcctccagcagggtcagccattcacacccatccactcacctcccattcccagccacatggcagagaaaaaaatcataataaaatggctttattttctggtaaaaaaaaaaaaaaaaaaaaaaaaaaaaaaaaaaaaaaaaaaaaaaaaaaagggggggggga

SEQ ID NO: 1373 - protein, 461 aa, Homo sapien
MSRQVVRSSKFRHVFGQPAKADQCYEDVRVSQTTWDSGFCAVNPKFVALICEASGGGAFLVLPLGKTGRVDKNAPTVCGHTAPVLDIAWCPHNDNVIASGSEDCTVMVWEIPDGGLMLPLREPVVTLEGHTKRVGIVAWHTTAQNVLLSAGCDNVIMVWDVGTGAAMLTLGPEVHPDTIYSVDWSRDGGLICTSCRDKRVRIIEPRKGTVVAEKDRPHEGTRPVRAVFVSEGKILTTGFSRMSERQVALWDTKHLEEPLSLQELDTSSGVLLPFFDPDTNIVYLCGKGDSSIRYFEITSEAPFLHYLSMFSSKESQRGMGYMPKRGLEVNKCEIARFYKLHERRCEPIAMTVPRKSDLFQEDLYPPTAGPDPALTAEEWLGGRDAGPLLISLKDGYVPPKSRELRVNRGLDTGRRRAAPEASGTPSSDAVSRLEEEMRKLQATVQELQKRLDRLEETVQAK

SEQ ID NO: 1374 - DNA, 2275 bp, Homo sapien
  Unsure 2005: Unknown base
gctaacctagtgcctatagctaaggcaggtacctgcatccttgtttttgtttagtggatcctctatccttcagagactctggaacccctgtggtcttctcttcatctaatgaccctgaggggatggagttttcaagtccttccagagaggaatgtcccaagcctttgagtagggtaagcatcatggctggcagcctcacaggtttgcttctacttcaggcagtgtcgtgggcatcaggtgcccgcccctgcatccctaaaagcttcggctacagctcggtggtgtgtgtctgcaatgccacatactgtgactcctttgaccccccgacctttcctgcccttggtaccttcagccgctatgagagtacacgcagtgggcgacggatggagctgagtatggggcccatccaggctaatcacacgggcacaggcctgctactgaccctgcagccagaacagaagttccagaaagtgaagggatttggaggggccatgacagatgctgctgctctcaacatccttgccctgtcaccccctgcccaaaatttgctacttaaatcgtacttctctgaagaaggaatcggatataacatcatccgggtacccatggccagctgtgacttctccatccgcacctacacctatgcagacacccctgatgatttccagttgcacaacttcagcctcccagaggaagataccaagctcaagatacccctgattcaccgagccctgcagttggcccagcgtcccgtttcactccttgccagcccctggacatcacccacttggctcaagaccaatggagcggtgaatgggaaggggtcactcaagggacagcccggagacatctaccaccagacctgggccagatactttgtgaagttcctggatgcctatgctgagcacaagttacagttctgggcagtgacagctgaaaatgagccttctgctgggctgttgagtggataccccttccagtgcctgggcttcacccctgaacatcagcgagacttcattgcccgtgacctaggtcctaccctcgccaacagtactcaccacaatgtccgcctactcatgctggatgaccaacgcttgctgctgccccactgggcaaaggtggtactgacagacccagaagcagctaaatatgttcatggcattgctgtacattggtacctggactttctggctccagccaaagccaccctaggggagacacaccgcctgttccccaacaccatgctctttgcctcagaggcctgtgtgggctccaagttctgggagcagagtgtgcggctaggctcctgggatcgagggatgcagtacagccacagcatcatcacgaacctcctgtaccatgtggtcggctggaccgactggaaccttgccctgaaccccgaaggaggacccaattgggtgcgtaactttgtcgacagtcccatcattgtagacatcaccaaggacacgttttacaaacagcccatgttctaccaccttggccacttcagcaagttcattcctgagggctcccagagagtggggctggttgccagtcagaagaacgacctggacgcagtggcactgatgcatcccgatggctctgctgttgtggtcgtgctaaaccgctcctctaaggatgtgcctcttaccatcaaggatcctgctgtgggcttcctggagacaatctcacctggctactccattcacacctacctgtggcatcgccagtgatggagcagatactcaaggaggcactgggctcagcctgggcattaaagggacagagtcagctcacacgctgtctgtgactaaagagggcacagcagggccagtgtgagcttacagcgacgtaagcccaggggcaatggtttgggtgactcactttcccctctaggtggtgcccagggctggaggcccctagaaaaagatcagtaagccccagtgtccccccagcccccatgcttatgtgaacatgcgctgtgtgctgcttgctttggaaactngcctgggtccaggcctagggtgagctcactgtccgtacaaacacaagatcagggctgagggtaaggaaaagaagagactaggaaagctgggcccaaaactggagactgtttgtctttcctagagatgcagaactgggcccgtggagcagcagtgtcagcatcagggcggaagccttaaagcagcagcgggtgtgcccaggcacccagatgattcctatggcaccagccaggaaaaatggcagctcttaaaggagaaaatgtttgagccca

SEQ ID NO: 1375 - protein, 536 aa, Homo sapien
MEFSSPSREECPKPLSRVSIMAGSLTGLLLLQAVSWASGARPCIPKSFGYSSVVCVCNATYCDSFDPPTFPALGTFSRYESTRSGRRMELSMGPIQANHTGTGLLLTLQPEQKFQKVKGFGGAMTDAAALNILALSPPAQNLLLKSYFSEEGIGYNIIRVPMASCDFSIRTYTYADTPDDFQLHNFSLPEEDTKLKIPLIHRALQLAQRPVSLLASPWTSPTWLKTNGAVNGKGSLKGQPGDIYHQTWARYFVKFLDAYAEHKLQFWAVTAENEPSAGLLSGYPFQCLGFTPEHQRDFIARDLGPTLANSTHHNVRLLMLDDQRLLLPHWAKVVLTDPEAAKYVHGIAVHWYLDFLAPAKATLGETHRLFPNTMLFASEACVGSKFWEQSVRLGSWDRGMQYSHSIITNLLYHVVGWTDWNLALNPEGGPNWVRNFVDSPIIVDITKDTFYKQPMFYHLGHFSKFIPEGSQRVGLVASQKNDLDAVALMHPDGSAVVVVLNRSSKDVPLTIKDPAVGFLETISPGYSIHTYLWHRQ

SEQ ID NO: 1376 - DNA, 2320 bp, Homo sapien
gcgcagggaggggagaccttggcggacggcggagccccagcggaggtgaaagtattggcggaaaggaaaatacagcggaaaaatgcagagctggagtcgtgtgtactgctccttggccaagagaggccatttcaatcgaatatctcatggcctacagggactttctgcagtgcctctgagaacttacgcagatcagccgattgatgctgatgtaacagttataggttctggtcctggaggatatgttgctgctattaaagctgcccagttaggcttcaagacagtctgcattgagaaaaatgaaacacttggtggaacatgcttgaatgttggttgtattccttctaaggctttattgaacaactctcattattaccatatggcccatggaacagattttgcatctagaggaattgaaatgtccgaagttcgcttgaatttagacaagatgatggagcagaagagtactgcagtaaaagctttaacaggtggaattgcccacttattcaaacagaataaggttgttcatgtcaatggatatggaaagataactggcaaaaatcaagtcactgctacgaaagctgatggcggcactcaggttattgatacaaagaacattcttatagccacgggttcagaagttactccttttcctggaatcacgatagatgaagatacaatagtgtcatctacaggtgctttatctttaaaaaaagttccagaaaagatggttgttattggtgcaggagtaataggtgtagaattgggttcagtttggcaaagacttggtgcagatgtgacagcagttgaatttttaggtcatgtaggtggagttggaattgatatggagatatctaaaaactttcaacgcatccttcaaaaacaggggtttaaatttaaattgaatacaaaggttactggtgctaccaagaagtcagatggaaaaattgatgtttctattgaagctgcttctggtggtaaagctgaagttatcacttgtgatgtactcttggtttgcattggccgacgaccctttactaagaatttgggactagaagagctgggaattgaactagatcctagaggtagaattccagtcaataccagatttcaaactaaaattccaaatatctatgccattggtgatgtagttgctggtccaatgctggctcacaaagcagaggatgaaggcattatctgtgttgaaggaatggctggtggtgctgtgcacattgactacaattgtgtgccatcagtgatttacacacaccctgaagttgcttgggttggcaaatcagaagagcagttgaaagaagagggtattgagtacaaagttgggaaattcccatttgctgctaacagcagagctaagacaaatgctgacacagatggcatggtgaagatccttgggcagaaatcgacagacagagtactgggagcacatattcttggaccaggtgctggagaaatggtaaatgaagctgctcttgctttggaatatggagcatcctgtgaagatatagctagagtctgtcatgcacatccgaccttatcagaagcttttagagaagcaaatcttgctgcgtcatttggcaaatcaatcaacttttgaattagaagattatatatttttttttctgaaatttcctgggagcttttgtagaagtcacattcctgaacaggatattctcacagctccaagaatttctaggactgaattatgaaacttttggaaggtatttaataggtttggacaaaatggaatactcttatatctatattttacataaatttagtattttgtttcagtgcactaatatgtaagacaaaaaggactacttattgtagtcatcctggaatatctccgtcaactcatattttcatgctgttcatgaaagattcaatgcccctgaatttaaatagctcttttctctgatacagaaaagttgaattttacatggctggagctagaatttgatatgtgaacagttgtgtttgaagcacagtgatcaagttatttttaatttggttttcacattggaaacaagtcagtcattcagatatgattcaaatgtctataaaccaaactgatgtaagtaaatggtctctcacttgttttatttaacctctaaattctttcattttaggggtagcatttgtgttgaagaggttttaaagcttccattgttgtctgcaactctgaagggtaattatatagttacccaaattaagagagtctatttacggaactcaaatacgtgggcattcaaatgtattacagtggggaatgaagatactgaaataaacgtcttaaatattc

SEQ ID NO: 1377 - protein, 509 aa, Homo sapien
MQSWSRVYCSLAKRGHFNRISHGLQGLSAVPLRTYADQPIDADVTVIGSGPGGYVAAIKAAQLGFKTVCIEKNETLGGTCLNVGCIPSKALLNNSHYYHMAHGTDFASRGIEMSEVRLNLDKMMEQKSTAVKALTGGIAHLFKQNKVVHVNGYGKITGKNQVTATKADGGTQVIDTKNILIATGSEVTPFPGITIDEDTIVSSTGALSLKKVPEKMVVIGAGVIGVELGSVWQRLGADVTAVEFLGHVGGVGIDMEISKNFQRILQKQGFKFKLNTKVTGATKKSDGKIDVSIEAASGGKAEVITCDVLLVCIGRRPFTKNLGLEELGIELDPRGRIPVNTRFQTKIPNIYAIGDVVAGPMLAHKAEDEGIICVEGMAGGAVHIDYNCVPSVIYTHPEVAWVGKSEEQLKEEGIEYKVGKFPFAANSRAKTNADTDGMVKILGQKSTDRVLGAHILGPGAGEMVNEAALALEYGASCEDIARVCHAHPTLSEAFREANLAASFGKSINF

SEQ ID NO: 1378 - DNA, 1314 bp, Homo sapien
atggcatccgttgcagttgatccacaaccgagtgtggtgactcgggtggtcaacctgcccttggtgagctccacgtatgacctcatgtcctcagcctatctcagtacaaaggaccagtatccctacctgaagtctgtgtgtgagatggcagagaacggtgtgaagaccatcacctccgtggccatgaccagtgctctgcccatcatccagaagctagagccgcaaattgcagttgccaatacctatgcctgtaaggggctagacaggattgaggagagactgcctattctgaatcagccatcaactcagattgttgccaatgccaaaggcgctgtgactggggcaaaagatgctgtgacgactactgtgactggggccaaggattctgtggccagcacgatcacaggggtgatggacaagaccaaaggggcagtgactggcagtgtggagaagaccaagtctgtggtcagtggcagcattaacacagtcttggggagtcggatgatgcagctcgtgagcagtggcgtagaaaatgcactcaccaaatcagagctgttggtagaacagtacctccctctcactgaggaagaactagaaaaagaagcaaaaaaagttgaaggatttgatctggttcagaagccaagttattatgttagactgggatccctgtctaccaagcttcactcccgtgcctaccagcaggctctcagcagggttaaagaagctaagcaaaaaagccaacagaccatttctcagctccattctactgttcacctgattgaatttgccaggaagaatgtgtatagtgccaatcagaaaattcaggatgctcaggataagctctacctctcatgggtagagtggaaaaggagcattggatatgatgatactgatgagtcccactgtgctgagcaatttgagtcacgtactcttgcaattgcccgcaacctgactcagcagctccagaccacgtgccacaccctcctgtccaacatccaaggtgtaccacagaacatccaagatcaagccaagcacatgggggtgatggcaggcgacatctactcagtgttccgcaatgctgcctcctttaaagaagtgtctgacagcctcctcacttctagcaaggggcagctgcagaaaatgaaggaatctttagatgacgtgatggattatcttgttaacaacacgcccctcaactggctggtaggtcccttttatcctcagctgactgagtctcagaatgctcaggaccaaggtgcagagatggacaagagcagccaggagacccagcgatctgagcataaaactcattaa

SEQ ID NO: 1379 - protein, 437 aa, Homo sapien
MASVAVDPQPSVVTRVVNLPLVSSTYDLMSSAYLSTKDQYPYLKSVCEMAENGVKTITSVAMTSALPIIQKLEPQIAVANTYACKGLDRIEERLPILNQPSTQIVANAKGAVTGAKDAVTTTVTGAKDSVASTITGVMDKTKGAVTGSVEKTKSVVSGSINTVLGSRMMQLVSSGVENALTKSELLVEQYLPLTEEELEKEAKKVEGFDLVQKPSYYVRLGSLSTKLHSRAYQQALSRVKEAKQKSQQTISQLHSTVHLIEFARKNVYSANQKIQDAQDKLYLSWVEWKRSIGYDDTDESHCAEQFESRTLAIARNLTQQLQTTCHTLLSNIQGVPQNIQDQAKHMGVMAGDIYSVFRNAASFKEVSDSLLTSSKGQLQKMKESLDDVMDYLVNNTPLNWLVGPFYPQLTESQNAQDQGAEMDKSSQETQRSEHKTH

SEQ ID NO: 1380 - DNA, 1394 bp, Homo sapien
ggcacgagggggagccgggctggcaggagcaggatggcggcggcggcggctgcaggcgaggcgcgccgggtgctggtgtacggcggcaggggcgctctgggttctcgatgcgtgcaggcttttcgggcccgcaactggtgggttgccagcgttgatgtggtggagaatgaagaggccagcgctagcatcattgttaaaatgacagactcgttcactgagcaggctgaccaggtgactgctgaggttggaaagctcttgggtgaagagaaggtggatgcaattctttgcgttgctggaggatgggccgggggcaatgccaaatccaagtctctctttaagaactgtgacctgatgtggaagcagagcatatggacatcgaccatctccagccatctggctaccaagcatctcaaggaaggaggcctcctgaccttggctggcgcaaaggctgccctggatgggactcctggtatgatcgggtacggcatggccaagggtgctgttcaccagctctgccagagcctggctgggaagaacagcggcatgccgcccggggcagccgccatcgctgtgctcccggttaccctggataccccgatgaacaggaaatcaatgcctgaggctgacttcagctcctggacacccttagaattcctagttgaaactttccatgactggatcacagggaaaaaccgaccgagctcaggaagcctaatccaggtggtaaccacagaaggaaggacggaactcaccccagcatatttttaggcctcatctcagtgcctatgaggggcctgccagaaaagtcactaacctgtctcagtgtggccttgtccagccttgtgttttctgtaacccctgtttgtggtacgagataatgagtcctatttttctctcacataatatgcatttgctctcctaggacagtgtaatacatttatgtgaagtaaagacatgcgagactggtggcctgcaaatagcatccgtcaatctgtgttaactgcatagggagggctctgcatagcacctgctatagcggtgtcatgttggatcgcttttgtgactgttcatctgtccttgacagtggctgtcatcttgactactttgttgatttgttggtattggggacattttaaaggctgagttatttttgaatgtcatgtttatgtcatagacgtagttttcgcatccttgaattaaactgccttaactccttttgtggtataagcaaaactccatggactctgtcctggtatccttttcctgtgtggttgccctgtgtcctctggcctagggttaagtgtgcaagataactactcgtgagtattcagaatgttgttcctaataaatgcacttgttgtctgtcttctttaaaaaaaaaaaaaaaaaaaaaa

SEQ ID NO: 1381 - protein, 244 aa, Homo sapien
MAAAAAAGEARRVLVYGGRGALGSRCVQAFRARNWWVASVDVVENEEASASIIVKMTDSFTEQADQVTAEVGKLLGEEKVDAILCVAGGWAGGNAKSKSLFKNCDLMWKQSIWTSTISSHLATKHLKEGGLLTLAGAKAALDGTPGMIGYGMAKGAVHQLCQSLAGKNSGMPPGAAAIAVLPVTLDTPMNRKSMPEADFSSWTPLEFLVETFHDWITGKNRPSSGSLIQVVTTEGRTELTPAYF

SEQ ID NO: 1382 - DNA, 1755 bp, Homo sapien
cgcccgggcaggtcccaaaattaggggggaagaggaaaaaaaaaagccagaaaaagttttcttttctggagtcccaaacgaggtgcgggacggaagagggggtgaaggccagaggctcggggcttcaagaccgctgtctggagtccccctttccaggccatgtcggggcccacctggctgcccccgaagcagccggagcccgccagagcccctcaggggagggcgatcccccgcggcaccccggggccaccaccggcccacggagcagcactccagccccaccccagggtcaatttttgcccccttccatctgagcagtgttaccaggccccagggggaccggaggatcgggggccggcgtgggtggggtcccatggagtactccagcacacgcaggggctccctgcagacagggggggccttcgccctggaagcctggacgccgagatagacttgctgagcaccacgctggccaaactgaatgggggtcggggtcatgcgtcacggcgaccagaccgacaggcatatgagcccccgccacctcctgcctaccgcacgggctccctgaagccaaatccagcctcgccgctcccagcgtctccctatgggggccccactccagcctcttacactaccgccagcaccccggctggcccagccttccccgtgcaagtgaaggtggcacagccagtgaggggctgcggcccacccaggcggggagcctctcaggcttctgggcccctcccgggcccccactttcctctcccaggccgaggtgaagtctgggggcctggctataggagccagagagagccagggccaggggccaaagaggaagctgctggggtctctggccctgcaggaagaggaagaggaggcgagcacgggccccaggtgcccctgagccagcctccagaggatgagctggataggctgacgaagaagctggttcacgacatgaaccacccgcccagcggggagtactttggccagtgtggtggctgcggagaagatgtggttggggatggggctggggttgtggcccttgatcgcgtctttcacgtgggctgctttgtatgttctacatgccgggcccagcttcgcggccagcatttctacgccgtggagaggagggcatattgcgagggctgctacgtggccaccctggagaaatgtgccacgtgctcccagcccatcctggaccggatcctgcgggctatggggaaggcctaccaccctggctgcttcacctgcgtggtgtgtcaccgcggcctcgacggcatccccttcacagtggatgctacgagccagatccactgtattgaggactttcacaggaagtttgccccaagatgctcagtgtgcggtggggccataatgcctgagccaggtcaggaggagactgtgagaattgttgctctggatcgaagttttcacattggctgttacaagtgcgaggagtgtgggctgctgctctcctctgagggcgagtgtcagggctgctacccgctggatgggcacatcttgtgcaaggcctgcagcgcctggcgcatccaggagctctcagccaccgtcaccactgactgctgagtcttcctagaagtacctgctgggttctcagttccagttcccatcctttgattgatcactctccctgacatccacctgtatgactttgtcaccaaatgctgtcttctctttctccaatcaagaaataataatccctcgagtttacaaaaaaaaaaaaaaaaaaaa

SEQ ID NO: 1383 - protein, 476 aa, Homo sapien [sequence omitted]

SEQ ID NO: 1384 - DNA, 1948 bp, Homo sapien
ggcttcttggcgcgatgaggttccggttctgtggtgatctggactgtcccgactgggtcctggcagaaatcagcacgctggccaagatgtcctctgtgaagttgcggctgctctgcagccaggtactaaaggagctgctgggacaggggattgattatgagaagatcctgaagctcacggctgacgccaagtttgagtcaggcgatgtgaaggccacagtggcagtgctgagtttcatcctctccagtgcggccaagcacagtgtcgatggcgaatccttgtccagtgaactgcagcagctggggctgcccaaagagcacgcggccagcctgtgccgctgttatgaggagaagcaaagccccttgcagaagcacttgcgggtctgcagcctacgcatgaataggttggcaggtgtgggctggcgggtggactacaccctgagctccagcctgctgcaatccgtggaagagcccatggtgcacctgcggctggaggtggcagctgccccagggaccccagcccagcctgttgccatgtccctctcagcagacaagttccaggtcctcctggcagaactgaagcaggcccagaccctgatgagctccctgggctgaggagaagggtgttccaggcctgtgtggagccgccctgcccgtatggagtcacgccctctgaactgctcttcgggaggcagccctggttctaggatgctgaggccctggcccggactctggcctcccagatccccagctgcctcacttctctcttgagaacttggctcagggctcctgaggacctttcccagcattaccttcccttcccttgaaagtagagatgaggtttctccatgttggtcaggctggtctcgaactcctgacctcaggtgatccacccaccttgccctcccaaagtgctgggattacaggcgtaagccactgcgcccagccactgccatcatctttaggaagagagaagtgaccatgcctgaaccagtcattggcaagaggaacggtgttatggactgaatgttcatgttcctccagaattcatatgctgaagcctctgtccacacatgcacaccagatgagggccatgtgcgcacacgaggtggctgtctacaaggccagaaagagggctgtcaacaggaactgcgtctgctggcaccttgatcttgaacttcccagcctccagaactgtgagaaagaaatctctatggtgtaagccactagtctgtggcattgttatagcagctcgagaagactaaggcagatgggcttccaggactggcccagaccagccagggctccttgtagaaaaggctgatgccagggttggcacatggagggtacaaggaggactcgcctggagtatcttaaggaacctatcgaagaataatggcttgttccactggccaaagatgggacaatttgaacatcaaaagagatacttactgactccactcctgacttctgcttctgaaaaaatgaagtaggtgttttccctattcctcccactaagtacagttaacaaccctggatgttacatataaaacaaacaaaaagactccgagcgatggagagaaggcaccctagcctggctgggatcctcaggacctgaggctccacagagagaaattcctggaatctggaccccatggcccagtcaggttacacaaaactgatcatcacagatctgtagaactatacaaaagtgctaacattcatgattagggtctcagaaggtaaggaggaagagagtggaatggaaaaagtattcaaaaaaataatcactaaaggccaggtgcagtggcccatgcctgtaatcccagcactttgggaggtgggacaattgctttagaccttgcaactggcctgagcaacacagggagactcagtttctccaaaaaaataaaaaattagccgatcatgaaaaaaaaaaaaaaaaaaaa

SEQ ID NO: 1385 - protein, 199 aa, Homo sapien
MRFRFCGDLDCPDWVLAEISTLAKMSSVKLRLLCSQVLKELLGQGIDYEKILKLTADAKFESGDVKATVAVLSFILSSAAKHSVDGESLSSELQQLGLPKEHAASLCRCYEEKQSPLQKHLRVCSLRMNRLAGVGWRVDYTLSSSLLQSVEEPMVHLRLEVAAAPGTPAQPVAMSLSADKFQVLLAELKQAQTLMSSLG

SEQ ID NO: 1386 - DNA, 2680 bp, Homo sapien
cggaccgtgcaatggcccagcgtaagaatgccaagagcagcggcaacagcagcagcagcggctccggcagcggtagcacgagtgcgggcagcagcagccccggggcccggagagagacaaagcatggaggacacaagaatgggaggaaaggcggactctcaggaacttcattcttcacgtggtttatggtgattgcattgctgggcgtctggacatctgtagctgtcgtttggtttgatcttgttgactatgaggaagttctaggaaaactaggaatctatgatgctgatggtgatggagattttgatgtggatgatgccaaagttttattaggacttaaagagagatctacttcagagccagcagtcccgccagaagaggctgagccacacactgagcccgaggagcaggttcctgtggaggcagaaccccagaatatcgaagatgaagcaaaagaacaaattcagtcccttctccatgaaatggtacacgcagaacatgttgagggagaagacttgcaacaagaagatggacccacaggagaaccacaacaagaggatgatgagtttcttatggcgactgatgtagatgatagatttgagaccctggaacctgaagtatctcatgaagaaaccgagcatagttaccacgtggaagagacagtttcacaagactgtaatcaggatatggaagagatgatgtctgagcaggaaaatccagattccagtgaaccagtagtagaagatgaaagattgcaccatgatacagatgatgtaacataccaagtctatgaggaacaagcagtatatgaacctctagaaaatgaagggatagaaatcacagaagtaactgctccccctgaggataatcctgtagaagattcacaggtaattgtagaagaagtaagcatttttcctgtggaagaacagcaggaagtaccaccagatacttaaagcttcaaaaagactgcccctaccaccacaggaggaccagcctaaccatacgctccaaaagatggctgtgatagatcttgtgaagcaattactgagcagatcaagatctttgggaaggaacactaaagatgttttgaatgaattatagtccactggcattttagtgtatttttttttctttttacaaacacacatttctaaaaatgtcatgttacattcctgcatgtcccttttgatagcattagtggatccattggatttcttttttctttttgtgagacagcttttagtcttacctgaatttatgtgtgtttttccgacagtggttaataattatattggtgatgtagcagcaattgtgttggcagggttttcatatattattagtaattaacactaactgttggactgacttgtgtacactgtgttaaacatgatttaaaagctattaagagtactttgtgttagcactcttaaaaacgctaacagagatcatcattagctgtgaagatttgagttgtatatacctgcactgatattcttatcaaaaatttctacattagctttaagtgttcagattaacacttttgaaatttttgtagcttttagctgattaattagaaaaattaatatttcagtgaaagttttaaattatcatttatttatttttttaaatgagaggggaaagctgaaattccttgttaagacacaaggaaaaagaatggccctactattatcatgcaaaaatgctttgttggcacctcagattaatcatataatagctatagtctcttcagcatttgtttaaattttagaaaacctgtataaattactggtgcataacttaaagattattctgcctttggctaattgagtaattcccctccagcactagagaccgctcagtgctcttactagatgaactcagtaacgccttgagctgggttgattgaggatgtgtgaaaagctcacagagcccgatgcctgctgctatttcacggcaatgagcctttttctttctacactgaagattttcttcttatttaatgtggtttattttgggctcagaaataattgctctgttgaaaataatcctttgtcagaaaagaaggtagctaccacatcattttgaaaggaccatgagcaactataagcaaagccataagaagtggtttgatcgatatattaggggtagctcttgattttgttaacattaagataaggtgactttttccccctgcttttaggattaaaatcaaagatacttctatatttttatcactatagatcatagttattatacaatgtagtgagtcctgcatgggtactcgatgtgtaatgaaacctgaaataataagataataagaaaagcaataattttctaaagctgtgctgtcggtgatacagagacgatactcaaattataataaaactcttcattttgtgaattatagaagctactttttataaagccatatttttttagggaaactaaggagtgacatagaactgatgaatgagcaaaagtaagttttgctggatttttgtagaactctggacgttgaggattcattatgctgtggttaactttaaatatttttgaattccaaatatctgaattaatgagccttgtgtttacaaatatgtgccattgtgcaacatcggtggattttctaaaaataatgtaaatgtcttctattaaatgttgagtgcaataaaatccagaa

SEQ ID NO: 1387 - protein, 758 aa, Homo sapien; identical to SEQ ID NO: 1093

SEQ ID NO: 1388 - DNA, 1944 bp, Homo sapien
aggctgtctgcagagatttgaaaaatggcaacaaatgaaagtgtcagcatctttagttcagcatccttggctgtggaatatgtagattcacttttacctgagaatcctctgcaagaaccatttaaaaatgcttggaactatatgttgaataattatacaaagttccagattgcaacatggggatcccttatagttcatgaagccctttatttcttattctgtttacctggatttttatttcaatttataccttatatgaaaaaatacaaaattcaaaaggataagccagagacatgggaaaaccaatggaagtgtttcaaagttcttctctttaatcacttctgtatccagctgcctttgatttgtggaacctattattttacagagtatttcaatattccttatgattgggaaagaatgccaagatggtattttcttttggcaagatgctttggttgtgcagtcattgaagatacttggcactattttctgcatagactcttacaccacaaaagaatatacaagtatattcataaagttcatcatgagtttcaggctccatttggaatggaagctgaatatgcacatcctttggagactctaattcttggaactggatttttcattggaatcgtgcttttgtgtgatcatgtaattcttctttgggcatgggtgaccattcgtttattagaaactattgatgtccatagtggttatgatattcctctcaaccctttaaatctgatccctttctatgctggttctcggcatcatgatttccaccacatgaacttcattggaaactatgcttcaacatttacatggtgggatcgaatttttggaacagactctcagtataatgcctataatgaaaagaggaagaagtttgagaaaaagactgaataaatatctcacgtaaaccttcctgaaagataaacgttttcctgaattcagaaactagtagctaacattgcttctggagagcagaaataagcatgtcttctggctactaagtgataaaaagaacattaacaacctttaattaccttcctagtgggaactttttctactttacctacaagttctatatatgtagaaatgaataaatatatatttaagtacagttttcatgaggaagttttaaaagaccatgttcctaagcttccaagaaggttttggatactagaagtattaatctatggcttttctcccagtaaaaccataggcctgaagttcacattgggtctttaaatcttttagatatatactggtcatttcagaaaattcttcatagtggtattggccttatatttaactttttttttattttttttttgagacaaagccacactctgtctccttggctggagtgtggtggcacagtctcagctcactgcaacctctgcctcccagttcaagcaattcttctgcctcagcctcccaagtagctgggattacaggcacccgccaccacgcccagctaatttttgtatttttgtagagatggggtttcacgatgttggccaggctggtctcaaacttctgacctcaagtgatctgcccaccttggcctcccaaagtgctgggattacaggtgtaagccactgcgcccggcctttttaactttaaacatgttttagaattcacctaaagatcaaaatatcatggattgaacctcatcaattgatagcagtgagtgactgaagcttccaaatcaagaaaagccggcaccaagaacttccattctaatctagagctgaccagtttgagctgattctctctttgaagagtccttcttgattgcagtgcagtactggcatttctgaatggatgtaagtggagtattttagtctaaaggcttttcaaattacttgaatttttttaaaaattgaggagctttatttctatttacccttccatttttgtgtgaaaaaaaaaaaaaaa

SEQ ID NO: 1389 - protein, 293 aa, Homo sapien
MATNESVSIFSSASLAVEYVDSLLPENPLQEPFKNAWNYMLNNYTKFQIATWGSLIVHEALYFLFCLPGFLFQFIPYMKKYKIQKDKPETWENQWKCFKVLLFNHFCIQLPLICGTYYFTEYFNIPYDWERMPRWYFLLARCFGCAVIEDTWHYFLHRLLHHKRIYKYIHKVHHEFQAPFGMEAEYAHPLETLILGTGFFIGIVLLCDHVILLWAWVTIRLLETIDVHSGYDIPLNPLNLIPFYAGSRHHDFHHMNFIGNYASTFTWWDRIFGTDSQYNAYNEKRKKFEKKTE

SEQ ID NO: 1390 - DNA, 1451 bp, Homo sapien
aggggcgctccggccagtgattggctggaggtttgttaactattcatgagggggcgggccgagcggggcggcctttgttaagcagcgagggcgcgaccgcgggtactctgctgccggcttctcggagcggcgctgggcgaccagagcagggtcgagatgtcctacatcccgggccagccggtcaccgccgtggtgcaaagagttgaaattcacaagctgcgtcaaggtgagaacttaatcctgggtttcagcattggaggtggaatcgaccaggacccttcccagaatcccttctctgaagacaagacggacaagggtatttatgtcacacgggtgtctgaaggaggccctgctgaaatcgctgggctgcagattggagacaagatcatgcaggtgaacggctgggacatgaccatggtcacacacgaccaggcccgcaagcggctcaccaagcgctcggaggaggtggtgcgtctgctggtgacgcggcagtcgctgcagaaggccgtgcagcagtccatgctgtcctagcagccaccaccatctgcgactcctgcctgccgcctctctgtacagtaacgccacttccacactctgtccccatctggcttctgctgaccgctgggccccagctcagaagggctatagctggtcccagaggcctggcctggccttccttcccttctcccatccctggcctggggcctctgggaccagctttctctcctggacaccgaggattggaaataagggcctggagctgagtagtagccagtctgctgtgaccacaggctcaggtccgaccctgctgcttggccacagcagtggctgggcaagtgggaaccactatctcttgggagcccccaaaagctgggaaatgctggaggaaccaggcctttcccgcttttgcctggctgcagggttcggctccgcccctgccccccagccctcgtgtgtccacaccgcagtgcctctgcccctcgggggactggacacacatcctgccagaggcgctacgaagctttgcccagatgaagccaggtgggctccgcgttcactcccactctcccgaggggtgctggcctccccagggtttgccttcttacggatttagacgaggttcgaggctcacctatcagggcagctctcaggattgtcattttcctctttgcctgtgggtttaacttttgtatttttttaatcacaagtttgatacaaaatgtttttatcgtactctttggagatgcccattctacttttgaatttagcttttactaattcgcatctggaagctcagcaagtgcacaagccttactttggttaccgtggaaaccactgccgcccctccccgatgtggtgcgctcaataaaaatgctggaattcaaaaaaaaaaaaaaaaaaaaaaaaaaaaaaaaaaaaaaaaaaaaaaaaaaaaaaaaaaaaaaaaaaaa

SEQ ID NO: 1391 - protein, 124 aa, Homo sapien
MSYIPGQPVTAVVQRVEIHKLRQGENLILGFSIGGGIDQDPSQNPFSEDKTDKGIYVTRVSEGGPAEIAGLQIGDKIMQVNGWDMTMVTHDQARKRLTKRSEEVVRLLVTRQSLQKAVQQSMLS

SEQ ID NO: 1392 - DNA, 3439 bp, Homo sapien
gcgcccgcgcctcgggccgtcgggagcggagcctcctcgggaccaggacttcagggccacaggtgctgccaagatgctccagggcacctgctccgtgctcctgctctggggaatcctgggggccatccaggcccagcagcaggaggtcatctcgccggacactaccgagagaaacaacaactgcccagagaagaccgactgccccatccacgtgtacttcgtgctggacacctcggagagcgtcaccatgcagtcccccacggacatcctgctcttccacatgaagcagttcgtgccgcagttcatcagccagctgcagaacgagttctacctggaccaggtggcgctgagctggcgctacggcggcctgcacttctctgaccaggtggaggtgttcagcccaccgggcagcgaccgggcctccttcatcaagaacctgcagggcatcagctccttccgccgcggcaccttcaccgactgcgcgctggccaacatgacggagcagatccggcaggaccgcagcaagggcaccgtccacttcgccgtggtcatcaccgacggccacgtcaccggcagcccctgcgggggcatcaagctgcaggccgagcgggcccgcgaggagggcatccggctcttcgccgtggcccccaaccagaacctgaaggagcagggcctgcgggacatcgccagcacgccgcacgagctctaccgcaacgactacgccaccatgctgcccgactccaccgagatcaaccaggacaccatcaaccgcatcatcaaggtcatgaaacacgaagcctacggagagtgctacaaggtgagctgcctggaaatccctgggccctctgggcccaagggctaccgtggacagaagggtgccaagggcaacatgggtgagccgggagagcctggccagaagggaagacagggagacccgggcatcgaaggccccattggattcccaggacccaagggcgttcctggcttcaaaggagagaagggtgaatttggagccgacggtcgcaagggggcccctggcctggctggcaagaacgggaccgatggacagaagggcaagctggggcgcatcggacctcctggctgcaagggagaccctggaaaccggggccccgacggttacccgggggaagcagggagtccaggggagcgaggagaccaaggcggcaagggggaccctggccgcccaggacgcagagggcccccgggagaaatcggggccaagggaagcaaggggtatcaaggcaacaatggagccccaggaagtcctggtgtgaaaggagccaagggcgggcctgggccccgcggacccaaaggcgagccggggcgcaggggagaccccggcaccaagggcagcccaggcagcgatggccccaagggggagaagggggaccctggccctgagggcccccgcggcctggctggagaggttggcaacaaaggagccaagggagaccgaggcttgcctggacccagaggcccccagggagctcttggggagcccggaaagcagggatctcggggagaccccggtgatgcaggaccccgtggagactcaggacagccaggccccaagggagaccccggcaggcctggattcagctacccaggaccccgaggagcacccggagaaaaaggcgagcccggcccacgcggccccgagggaggccgaggcgactttggcttgaaaggagaacctgggaggaaaggagagaaaggagagcctgcggatcctggtccccctggtgagccaggccctcgggggccaagaggagtcccaggacccgagggtgagcccggcccccctggagaccccggtctcacggagtgtgacgtcatgacctacgtgagggagacctgcgggtgctgcgactgtgagaagcgctgtggcgccctggacgtggtcttcgtcatcgacagctccgagagcattgggtacaccaacttcacactggagaagaacttcgtcatcaacgtggtcaacaggctgggtgccatcgctaaggaccccaagtccgagacagggacgcgtgtgggcgtggtgcagtacagccacgagggcacctttgaggccatccagctggacgacgaacatatcgactccctgtcgagcttcaaggaggctgtcaagaacctcgagtggattgcgggcggcacctggacaccctcagccctcaagtttgcctacgaccgcctcatcaaggagagccggcgccagaagacacgtgtgtttgcggtggtcatcacggacgggcgccacgaccctcgggacgatgacctcaacttgcgggcgctgtgcgatcgcgacgtcacagtgacggccatcggcatcggggacatgttccacgagaagcacgagagtgaaaacctctactccatcgcctgcgacaagccacagcaggtgcgcaacatgacgctgttctccgacctggtcgctgagaagttcatcgatgacatggaggacgtcctctgcccggaccctcagatcgtgtgcccagaccttccctgccaaacagagctgtccgtggcacagtgcacgcagcggcccgtggacatcgtcttcctgctggacggctccgagcggctgggtgagcagaacttccacaaggcccggcgcttcgtggagcaggtggcgcggcggctgacgctggcccggagggacgacgaccctctcaacgcacgcgtggcgctgctgcagtttggtggccccggcgagcagcaggtggccttcccgctgagccacaacctcactgccatccacgaggcgctggagaccacacaatacctgaactccttctcgcacgtgggcgcaggcgtggtgcacgccatcaatgccatcgtgcgcagcccgcgtggcggggcccggaggcacgcagagctgtccttcgtgttcctcacggacggcgtcacgggcaacgacagtctgcacgagtcggcgcactccatgcgcaagcagaacgtggtacccaccgtgctggccttgggcagcgacgtggacatggacgtgctcaccacgctcagcctgggtgaccgcgccgccgtgttccacgagaaggactatgacagcctggcgcaacccggcttcttcgaccgcttcatccgctggatctgctagcgccgccgcccgggccccgcagtcgagggtcgtgagcccaccccgtccatggtgctaagcgggcccgggtcccacacggccagcaccgctgctcactcggacgacgccctgggcctgcacctctccagctcctcccacggggtccccgtagccccggcccccgcccagccccaggtctccccaggccctccgcaggctgcccggcctccctccccctgcagccatcccaaggctcctgacctacctggcccctgagctctggagcaagccctgacccaataaaggctttgaacccaaaaaaaaaaa

SEQ ID NO: 1393 - protein, 1019 aa, Homo sapien
MLQGTCSVLLLWGILGAIQAQQQEVISPDTTERNNNCPEKTDCPIHVYFVLDTSESVTMQSPTDILLFHMKQFVPQFISQLQNEFYLDQVALSWRYGGLHFSDQVEVFSPPGSDRASFIKNLQGISSFRRGTFTDCALANMTEQIRQDRSKGTVHFAVVITDGHVTGSPCGGIKLQAERAREEGIRLFAVAPNQNLKEQGLRDIASTPHELYRNDYATMLPDSTEINQDTINRIIKVMKHEAYGECYKVSCLEIPGPSGPKGYRGQKGAKGNMGEPGEPGQKGRQGDPGIEGPIGFPGPKGVPGFKGEKGEFGADGRKGAPGLAGKNGTDGQKGKLGRIGPPGCKGDPGNRGPDGYPGEAGSPGERGDQGGKGDPGRPGRRGPPGEIGAKGSKGYQGNNGAPGSPGVKGAKGGPGPRGPKGEPGRRGDPGTKGSPGSDGPKGEKGDPGPEGPRGLAGEVGNKGAKGDRGLPGPRGPQGALGEPGKQGSRGDPGDAGPRGDSGQPGPKGDPGRPGFSYPGPRGAPGEKGEPGPRGPEGGRGDFGLKGEPGRKGEKGEPADPGPPGEPGPRGPRGVPGPEGEPGPPGDPGLTECDVMTYVRETCGCCDCEKRCGALDVVFVIDSSESIGYTNFTLEKNFVINVVNRLGAIAKDPKSETGTRVGVVQYSHEGTFEAIQLDDEHIDSLSSFKEAVKNLEWIAGGTWTPSALKFAYDRLIKESRRQKTRVFAVVITDGRHDPRDDDLNLRALCDRDVTVTAIGIGDMFHEKHESENLYSIACDKPQQVRNMTLFSDLVAEKFIDDMEDVLCPDPQIVCPDLPCQTELSVAQCTQRPVDIVFLLDGSERLGEQNFHKARRFVEQVARRLTLARRDDDPLNARVALLQFGGPGEQQVAFPLSHNLTAIHEALETTQYLNSFSHVGAGVVHAINAIVRSPRGGARRHAELSFVFLTDGVTGNDSLHESAHSMRKQNVVPTVLALGSDVDMDVLTTLSLGDRAAVFHEKDYDSLAQPGFFDRFIRWIC

SEQ ID NO: 1394 - DNA, 1204 bp, Homo sapien
ctctgaggagaagcagcagcaaacatttgctagtcagacaagtgacagggaatggattccaaacagcagtgtgtaaagctaaatgatggccacttcatgcctgtattgggatttggcacctatgcacctccagaggttccgagaagtaaagctttggaggtcacaaaattagcaatagaagctgggttccgccatatagattctgctcatttatacaataatgaggagcaggttggactggccatccgaagcaagattgcagatggcagtgtgaagagagaagacatattctacacttcaaagctttggtccacttttcatcgaccagagttggtccgaccagccttggaaaactcactgaaaaaagctcaattggactatgttgacctctatcttattcattctccaatgtctctaaagccaggtgaggaactttcaccaacagatgaaaatggaaaagtaatatttgacatagtggatctctgtaccacctgggaggccatggagaagtgtaaggatgcaggattggccaagtccattggggtgtcaaacttcaaccgcaggcagctggagatgatcctcaacaagccaggactcaagtacaagcctgtctgcaaccaggtagaatgtcatccgtatttcaaccggagtaaattgctagatttctgcaagtcgaaagatattgttctggttgcctatagtgctctgggatctcaacgagacaaacgatgggtggacccgaactccccggtgctcttggaggacccagtcctttgtgccttggcaaaaaagcacaagcgaaccccagccctgattgccctgcgctaccagctgcagcgtggggttgtggtcctggccaagagctacaatgagcagcgcatcagacagaacgtgcaggtttttgagttccagttgactgcagaggacatgaaagccatagatggcctagacagaaatctccactattttaacagtgatagttttgctagccaccctaattatccatattcagatgaatattaacatggagagctttgcctgatgtctaccagaagccctgtgtgtggatggtgacgcagaggacgtctctatgccggtgactggacatatcacctctacttaaatccgtcctgtttagcgacttcagtcaactacagctgagtccataggccagaaagacaataaatttttatcattttgaaat

SEQ ID NO: 1395 - protein, 323 aa, Homo sapien
MDSKQQCVKLNDGHFMPVLGFGTYAPPEVPRSKALEVTKLAIEAGFRHIDSAHLYNNEEQVGLAIRSKIADGSVKREDIFYTSKLWSTFHRPELVRPALENSLKKAQLDYVDLYLIHSPMSLKPGEELSPTDENGKVIFDIVDLCTTWEAMEKCKDAGLAKSIGVSNFNRRQLEMILNKPGLKYKPVCNQVECHPYFNRSKLLDFCKSKDIVLVAYSALGSQRDKRWVDPNSPVLLEDPVLCALAKKHKRTPALIALRYQLQRGVVVLAKSYNEQRIRQNVQVFEFQLTAEDMKAIDGLDRNLHYFNSDSFASHPNYPYSDEY

SEQ ID NO: 1396 - DNA, 6996 bp, Homo sapien
gcggggaccgcgacgagcccgggtcgccgttggcagcagcagcagcaacaccagcagcagcagcagccccggcggcggcgcggaaccccgagcgcccgggcgcaccccggcttcccggagcgcgacgcggcggcagcagccccggtgcggccgcgcgcgccttaggctcggccccgcggctcggggaccccgactcccggcccagcgagcgcgtcccccggcgccgcccgagagcccgaggaggcagcggccgcagagcccgggggaggggggcggccaccgcccgcgccgggcatcctcaggagccccagagcgcggagggcgcggcgccgccgagcggtgctggcccccgcgggctccccggaccttccccaccgcctgggcccgagggacgcgtgatcgggcgggcggccgggcgcaagggtgggagggagccgcccccgcccgcgccccctccgcccctcgccccaaacccctgggcgccgggcccgggccgcgcggcctgaagcgcccgcgatggcgagcccgccgcggcacgggccgcccgggccggcgagcggagacggccccaacctcaacaacaacaacaacaacaacaacaaccacagcgtgcgcaagtgcggctacctgcgcaacgaagagcatggccacaagcgcttcttcgtgctgcgcggacccggcgcgggcggcgacgaggcgacggcgggcggggggtcggcgccgcaaccgccgcggctcgagtactacgagagcgagaaaaagtggcggagcaaggcaggcgcgccgaaacgggtgatcgctctcgactgctgcctgaacatcaacaagcgcgccgacgccaagcacaagtacctgatcgccctctacaccaaggacgagtacttcgccgtggccgccgagaacgagcaggagcaggagggctggtaccgcgcgctcaccgacctggtcagcgagggccgcgcggccgccggagacgcgccccccgccgccgcgcccgccgcgtcctgcagcgcctccctgcccggcgccctgggcggctctgccggcgccgccggggccgaggacagctacgggctggtggctcccgccacggccgcctaccgtgaggtgtggcaggtgaacctgaagcccaagggtctgggccagagcaagaacctgacgggggtgtaccgtctgtgcctgtctgcgcgcaccatcggcttcgtgaagctcaactgcgagcagccgtcggtgacgctgcagctcatgaacatccgccgctgcggccactcggacagcttcttcttcatcgaggtgggccgctcggccgtcacaggccccggcgagctgtggatgcaggcggacgactcggtggtggcgcagaacatccacgagaccatcctggaggccatgaaggcgctcaaggagctcttcgagttccggccgcgcagtaagagccaatcgtcggggtcgtcggccacgcaccccatcagcgtccccggcgcgcgccgccaccaccacctggtcaacctgccccccagccagacgggcctggtgcgccgctcgcgcaccgacagcctggccgccaccccgccggcggccaagtgcagctcgtgccgggtgcgcaccgccagcgagggcgacggcggccgggctgcgggagcggcggccgcggcgcagaggctggtgtcggtggctgggagccccctgagccccgggccggtgcgcgcgcccctgagccgctcgcacaccctgagcggcggctgcggcggccgcgggagcaaggtggcgctgctgccggcagggggcgcgctgcaacacagccgctccatgtccatgcccgtggcgcactcgccgcccgccgccaccagccccggctccctgtcgtccagcagcggccacggctcgggctcctacccgccgccgcccggcccgcacccgcctctgccgcatccgctgcaccacggccccggccagcggccctccagcggcagcgcctccgcctcgggctcccccagcgaccccggcttcatgtccctggacgagtacggctccagcccaggcgacctgcgcgccttctgcagccaccgaagcaacacgcccgagtccatcgcggagacgcccccggcccgagacggcggcggcggcggtgagttctacgggtacatgaccatggacaggcccctgagccactgtggccgctcctaccgccgggtctcgggggacgcggcccaggacctggaccgagggctgcgcaagaggacctactccctgaccacgccagcccggcagcggccggtgccccagccctcctctgcctcgctggatgaatacaccctgatgcgggccaccttctcgggcagcgcgggccgcctctgcccgtcctgccccgcgtcctctcccaaggtggcctaccacccctacccagaggactacggagacatcgagatcggctcccacaggagctccagcagcaacctgggggcagacgacggctacatgcccatgacgcccggcgcggccttcgcgggcagtgggagcggcagctgcaggagcgacgactacatgcccatgagccccgccagcgtgtccgcccccaagcagatcttgcagcccagggccgccgccgccgccgccgccgccgtgccttctgcggggcctgcggggccagcacccacctctgcggcgggcaggacattcccggcgagcgggggcggctacaaggccagctcgcccgccgagagctcccccgaggacagtgggtacatgcgcatgtggtgcggttccaagctgtccatggagcatgcagatggcaagctgctgcccaacggggactacctcaacgtgtcccccagcgacgcggtcaccacgggcaccccgcccgacttcttctccgcagccctgcaccccggcggggagccgctcaggggcgttcccggctgctgctacagctccttgccccgctcctacaaggccccctacacctgtggcggggacagcgaccagtacgtgctcatgagctcccccgtggggcgcatcctggaggaggagcgtctggagcctcaggccacgccagggcccagccaggcggccagcgccttcggggccggccccacgcagccccctcaccctgtagtgccttcgcccgtgcggcgtagcggccgccggtcaggtttcttgggccagcgcggccgggcggtgaggcccacgcgcctgtccctggaggggctgcccagcctgcccagcatgcacgagtacccactgccaccggagcccaagagccccggcgagtacatcaacatcgactttggcgagcccggggcccgcctgtcgccgcccgcgcctcccctgctggcgtcggcggcctcgtcctcctcgctcttgtccgccagcagcccggcctcgtcgctgggctcaggcaccccgggcaccagcagcgacagccggcagcggtctccgctctccgactacatgaacctcgacttcagctcccccaagtctcctaagccgggcgccccgagcggccaccccgtgggctccttggacggcctcctgtcccccgaggcctcctccccgtatccgccgttgcccccgcgtccgtccgcgtccccgtcgtcgtctctgcagccgccgccaccgccgccggccccgggggagctgtaccgcctgccccccgcctcggccgttgccaccgcccagggcccgggcgccgcctcatcgttgtcctcggacaccggggacaatggtgactacaccgagatggcttttggtgtggccgccaccccgccgcaacctatcgcggcccccccgaagccagaagctgcccgcgtggccagcccgacgtcgggcgtgaagaggctgagcctcatggagcaggtgtcgggagtcgaggccttcctgcaggccagccagcccccggacccccaccgcggcgccaaggtcatccgcgcagacccgcaggggggccgccgccgccacagttccgagaccttctcctccaccacgacggtcacccccgtgtccccgtccttcgcccacaaccccaagcgccacaactcggcctccgtggaaaatgtctctctcaggaaaagcagcgagggcggcgtgggtgtcggccctggagggggcgacgagccgcccacctccccacgacagttgcagccggcgccccctttggcaccgcagggccggccgtggaccccgggtcagcccgggggcttggtcggttgtcctgggagcggtggatcgcccatgcgcagagagacctctgccggcttccagaatggtctcaactacatcgccatcgacgtgagggaggagcccgggctgccaccccagccgcagccgccgccgccgccgcttcctcagccgggagacaagagctcctggggccggacccgaagcctcgggggtctcatcagcgctgtgggcgtcggcagcaccggcggcgggtgcggggggccgggtcccggtgccctgccccctgccaacacctacgccagcattgacttcttgtcccaccacttgaaggaggccaccatcgtgaaagagtgaagatctgtctggctttatcaccaggatgtcacatgtcagagaatatcattaaaagaagacgctcagcgctgtttcagcccgaagctgcttgcagttttcttttggatctgagcaatgactgtgtttggaaacatctgtggactctgatagatggggcacaacaaggcaaggtcacctgcctctttcccttgttcccggatgggcattcatcattgtgctgtttgcgttttgttttgttttgttttaacaaaattagctgaagaagttattctcaagaaaattggatgttttcattggccttcttaaattgtggccagtgtcttttaatttcttcttcttttccttttggcaaagcagatataaccctcagcatgctaggagagtgcacccgtacctatggaagtggtaaaatctggtatttactggcttacactcaaaacgaccacagtcctacctcagttcaaggtaaagccggatttccgtggcgggggtccacaggacctcctgtagtagcccctgcgctgtgtgtctggagcgcgtcctcgccttatttaaatggtccagtagacagctgcttgttggattccagtgcaggtacctgcgatgtttacgtccacaccgagcccagtgtgggactgacatttctcaatggaagtgaaatttgggattggactttgaagacgattactaaataataattattatatgtaactgaagcaacctacttttgaaaatcaactgtattgggtagtgggaggtgggagggaagggctttgggaaggggatgaatatctctttttacctttaacagacttgtttaatcttctcgatgtagatgtttatgtaggtacttcacattgcaaacgccttttattctatttacaagctcagatgtctctgctctcctgaatcttgggcatgcctttctgtaaccaaaaatccctgtaggcgtgctagcaattccagggtggtccgggtttggcagatttgatttttaaaaaatgtattatctttaataaaaatgttattatgtcaaccagtgaggctgccctgaacaaaaaaaaacaaaaagaaaaaaaaaaaaaggaaagaaagaaactgataaaaagaggcatccagcccctatgttattgatggaaaaagaaaaagaagaaaagcaatctcgcagtacatgttacttgtcgaaaaaattccggacaagactacccttgttttatgttttcagtattctgaaaataccagtgtgtggcagttctcgcagatgttacctaaaactgctgaacttgaccggcagaatgttctgccgttttctgctccctcgacacttgattggagggctgtcgacctctcctcccgtgggggcttccccagtgcctatcttctctgatagtcatggagaggttacactaattcattggagatgtaagttgttggttttgttttgttttgtttttagaaaaatatatataaatatataatagatatctatcgctatagaataatgcattaataaaatgaggcttttttagaggaagaccaaaaaattcaatgtcttaaaaatatatttaatggcaatgcaaaagtcttcctgcttccgtgctgaactttagaacagaggattgtattgcaagacaaagttgaatgtaaagtgatctccctgaacatttttaaggttttacttttctgaaattatacatcacagcagtgcataggccatataatgttagctggaaggtcaatttcagtgtatgatatactttattaagatgtataaaacatcctgaagtttttatttagttttgggaataggcatcagtgggtggtatttgctttgtaactccccccaggtacgatagggactgaatatggaccctgctgaaagcagtgtattgacgcatatttaactcgccctctatccgtagagtagtcatgacactatacagatggttcgtgttcatactgcagcttaaaacaagcaaaatacacagatgataatatgctaaattttcctctatcctgtacatttcacaaaaaggcatatgcaatatttacatttttaatttagtttacagaatggaaccaaaatgtataaatgttatgtttgctaaaacttcacaatgtatattgggtctttgtacattttgcctgacttaccttaaatttaaaatattttttgctatataaactttaacagttattaaacagtgttttccttttgggtacgtattgtttctggatatcaagatgttaaatatatttcttgctattgtgatatgacaagagacttaacttatcttgctctgtcttccactgtacacgctgtatataggggtcaatgtgatgctgctggagacgagaataaactggactagaatagtgcattgtatttagtctgtattgatcatggatgccctccttaatagccatatgcaataaaataaagtacattatttatgaaatgaa

SEQ ID NO: 1397 - protein, 1338 aa, Homo sapien [sequence omitted]

SEQ ID NO: 1398 - DNA, 4134 bp, Homo sapien
gggtgattcagcgcccggcgaggcggaacgggccgcaagaggaggaggggagagcccgtccgcgcctgggctcccggggtggcacgagcccgcggccggagtgcgaggcggaggcgaggaggccgcggggacgggaggcgaggccggccgggcccccgaagccatggagaacgcgcacaccaagacggtggaggaggtgctgggccacttcggcgtcaacgagagtacggggctgagcctggaacaggtcaagaagcttaaggagagatggggctccaacgagttaccggctgaagaaggaaaaaccttgctggaacttgtgattgagcagtttgaagacttgctagttaggattttattactggcagcatgtatatcttttgttttggcttggtttgaagaaggtgaagaaacaattacagcctttgtagaaccttttgtaattttactcatattagtagccaatgcaattgtgggtgtatggcaggaaagaaatgctgaaaatgccatcgaagcccttaaggaatatgagcctgaaatgggcaaagtgtatcgacaggacagaaagagtgtgcagcggattaaagctaaagacatagttcctggtgatattgtagaaattgctgttggtgacaaagttcctgctgatataaggttaacttccatcaaatctaccacactaagagttgaccagtcaattctcacaggtgaatctgtctctgtcatcaagcacactgatcccgtccctgacccacgagctgtcaaccaagataaaaagaacatgctgttttctggtacaaacattgctgctgggaaagctatgggagtggtggtagcaactggagttaacaccgaaattggcaagatccgggatgaaatggtggcaacagaacaggagagaacaccccttcagcaaaaactagatgaatttggggaacagctttccaaagtcatctcccttatttgcattgcagtctggatcataaatattgggcacttcaatgacccggttcatggagggtcctggatcagaggtgctatttactactttaaaattgcagtggccctggctgtagcagccattcctgaaggtctgcctgcagtcatcaccacctgcctggctcttggaactcgcagaatggcaaagaaaaatgccattgttcgaagcctcccgtctgtggaaacccttggttgtacttctgttatctgctcagacaagactggtacacttacaacaaaccagatgtcagtctgcaggatgttcattctggacagagtggaaggtgatacttgttcccttaatgagtttaccataactggatcaacttatgcacctattggagaagtgcataaagatgataaaccagtgaattgtcaccagtatgatggtctggtagaattagcaacaatttgtgctctttgtaatgactctgctttggattacaatgaggcaaagggtgtgtatgaaaaagttggagaagctacagagactgctctcacttgcctagtagagaagatgaatgtatttgataccgaattgaagggtctttctaaaatagaacgtgcaaatgcctgcaactcagtcattaaacagctgatgaaaaaggaattcactctagagttttcacgtgacagaaagtcaatgtcggtttactgtacaccaaataaaccaagcaggacatcaatgagcaagatgtttgtgaagggtgctcctgaaggtgtcattgacaggtgcacccacattcgagttggaagtactaaggttcctatgacctctggagtcaaacagaagatcatgtctgtcattcgagagtggggtagtggcagcgacacactgcgatgcctggccctggccactcatgacaacccactgagaagagaagaaatgcaccttgaggactctgccaactttattaaatatgagaccaatctgaccttcgttggctgcgtgggcatgctggatcctccgagaatcgaggtggcctcctccgtgaagctgtgccggcaagcaggcatccgggtcatcatgatcactggggacaacaagggcactgctgtggccatctgtcgccgcatcggcatcttcgggcaggatgaggacgtgacgtcaaaagctttcacaggccgggagtttgatgaactcaacccctccgcccagcgagacgcctgcctgaacgcccgctgttttgctcgagttgaaccctcccacaagtctaaaatcgtagaatttcttcagtcttttgatgagattacagctatgactggcgatggcgtgaacgatgctcctgctctgaagaaagccgagattggcattgctatgggctctggcactgcggtggctaaaaccgcctctgagatggtcctggcggatgacaacttctccaccattgtggctgccgttgaggaggggcgggcaatctacaacaacatgaaacagttcatccgctacctcatctcgtccaacgtcggggaagttgtctgtattttcctgacagcagcccttggatttcccgaggctttgattcctgttcagctgctctgggtcaatctggtgacagatggcctgcctgccactgcactggggttcaaccctcctgatctggacatcatgaataaacctccccggaacccaaaggaaccattgatcagcgggtggctctttttccgttacttggctattggctgttacgtcggcgctgctaccgtgggtgctgctgcatggtggttcattgctgctgacggtggtccaagagtgtccttctaccagctgagtcatttcctacagtgtaaagaggacaacccggactttgaaggcgtggattgtgcaatctttgaatccccatacccgatgacaatggcgctctctgttctagtaactatagaaatgtgtaacgccctcaacagcttgtccgaaaaccagtccttgctgaggatgcccccctgggagaacatctggctcgtgggctccatctgcctgtccatgtcactccacttcctgatcctctatgtcgaacccttgccactcatcttccagatcacaccgctgaacgtgacccagtggctgatggtgctgaaaatctccttgcccgtgattctcatggatgagacgctcaagtttgtggcccgcaactacctggaacctggtaaagagtgtgtgcagcctgccaccaaatcctgctcgttctcggcatgcaccgatgggatttcctggccgtttgtgctgctcataatgcccctggtgatctgggtctatagcacagacactaactttagcgatatgttctggtcttgactgacagttttccataaagaagatgtttaacttaatcaattaatttttttattgtttaaagcaactgtctatttctgctgaattttcacatgaacatactggctggtgatggaggtttcatactctagattttgttttgctttttctgactccagtggggcaagattttccttttttatacacataattaaagtgtccattgacatgtacagagaactaacactattttatgcaaatatttttttgtagatgaaaaagcatgtacagtgttctgtttaatactcatccttgtataaaaaaaatagttgagccagcagacattgtcagcaaattaattggcagcagattttaggaaatgaatgtgtgtggttttttttctaaaactaaatagcatgtattgtgtcttttgcatgatgatccggatttaatttgatatcacagtctaatttttattcataagccaatttttctgcactgagcagagtcttgctacctcagtcagtattgttttggtttgctacttccctcacccactttggcctccgttcaccccaccccaccccacctctccccaccttacccccgccccgcttggcttcttctttaggattgtgatggttcgttctgtttacatcagttttaacgagaggtatgcctgtactcgcttgtgcagaaaacattgttccagattcaatcgactgggtttatgtcccttcacatagtttttaaggttatttatttaaatgtctaatgtattttattgtaacagacattgttttgccaacattgcctatttcagtggcacgtcatctagttttaaaaaaataaaacattttaaaaag

SEQ ID NO: 1399 - protein, 1042 aa, Homo sapien
MENAHTKTVEEVLGHFGVNESTGLSLEQVKKLKERWGSNELPAEEGKTLLELVIEQFEDLLVRILLLAACISFVLAWFEEGEETITAFVEPFVILLILVANAIVGVWQERNAENAIEALKEYEPEMGKVYRQDRKSVQRIKAKDIVPGDIVEIAVGDKVPADIRLTSIKSTTLRVDQSILTGESVSVIKHTDPVPDPRAVNQDKKNMLFSGTNIAAGKAMGVVVATGVNTEIGKIRDEMVATEQERTPLQQKLDEFGEQLSKVISLICIAVWIINIGHFNDPVHGGSWIRGAIYYFKIAVALAVAAIPEGLPAVITTCLALGTRRMAKKNAIVRSLPSVETLGCTSVICSDKTGTLTTNQMSVCRMFILDRVEGDTCSLNEFTITGSTYAPIGEVHKDDKPVNCHQYDGLVELATICALCNDSALDYNEAKGVYEKVGEATETALTCLVEKMNVFDTELKGLSKIERANACNSVIKQLMKKEFTLEFSRDRKSMSVYCTPNKPSRTSMSKMFVKGAPEGVIDRCTHIRVGSTKVPMTSGVKQKIMSVIREWGSGSDTLRCLALATHDNPLRREEMHLEDSANFIKYETNLTFVGCVGMLDPPRIEVASSVKLCRQAGIRVIMITGDNKGTAVAICRRIGIFGQDEDVTSKAFTGREFDELNPSAQRDACLNARCFARVEPSHKSKIVEFLQSFDEITAMTGDGVNDAPALKKAEIGIAMGSGTAVAKTASEMVLADDNFSTIVAAVEEGRAIYNNMKQFIRYLISSNVGEVVCIFLTAALGFPEALIPVQLLWVNLVTDGLPATALGFNPPDLDIMNKPPRNPKEPLISGWLFFRYLAIGCYVGAATVGAAAWWFIAADGGPRVSFYQLSHFLQCKEDNPDFEGVDCAIFESPYPMTMALSVLVTIEMCNALNSLSENQSLLRMPPWENIWLVGSICLSMSLHFLILYVEPLPLIFQITPLNVTQWLMVLKISLPVILMDETLKFVARNYLEPGKECVQPATKSCSFSACTDGISWPFVLLIMPLVIWVYSTDTNFSDMFWS

SEQ ID NO: 1400 - DNA, 2084 bp, Mus musculus
aaccgcatctgcagcgagcaactgagaagccaagactgagccggcggccgcggcgcagcgaacgagcagtgaccgtgctcctacccagctctgcttcacagcgcccacctgtctccgcccctcggcccctcgcccggctttgcctaaccgccacgatgatgttctcgggcttcaacgcagactacgaggcgtcatcctcccgctgcagcagcgcgtccccggccggggatagcctctcttactaccactcacccgcagactccttctccagcatgggctcgcctgtcaacgcgcaggacttctgcacggacctggccgtctccagtgccaacttcattcccacggtcactgccatctcgaccagtccggacctgcagtggctggtgcagcccgccctcgtctcctctgtggccccatcgcagaccagagcccctcaccctttcggagtccccgccccctccgctggggcttactccagggctggcgttgtgaagaccatgacaggaggccgagcgcagagcattggcaggaggggcaaggtggaacagttatctccagaagaagaagagaaaaggagaatccgaagggaaaggaataagatggctgcagccaaatgccgcaaccggaggagggagctgactgatacactccaagcggagacagaccaactagaagatgagaagtctgctttgcagaccgagattgccaacctgctgaaggagaaggaaaaactagagttcatcctggcagctcaccgacctgcctgcaagatccctgatgacctgggcttcccagaagagatgtctgtggcttcccttgatctgactgggggcctgccagaggttgccaccccggagtctgaggaggccttcaccctgcctctcctcaatgaccctgagcccaagccctcagtggaacctgtcaagagcatcagcagcatggagctgaagaccgagccctttgatgacttcctgttcccagcatcatccaggcccagtggctctgagacagcccgctccgtgccagacatggacctatctgggtccttctatgcagcagactgggagcctctgcacagtggctccctggggatggggcccatggccacagagctggagcccctgtgcactccggtggtcacctgtactcccagctgcactgcttacacgtcttccttcgtcttcacctaccccgaggctgactccttccccagctgtgcagctgcccaccgcaagggcagcagcagcaatgagccttcctctgactcgctcagctcacccacgctgctggccctgtgagggggcagggaaggggaggcagccggcacccacaagtgccactgcccgagctggtgcattacagagaggagaaacacatcttccctagagggttcctgtagacctagggaggaccttatctgtgcgtgaaacacaccaggctgtgggcctcaaggacttgaaagcatccatgtgtggactcaagtccttacctcttccggagatgtagcaaaacgcatggagtgtgtattgttcccagtgacacttcagagagctggtagttagtagcatgttgagccaggcctgggtctgtgtctcttttctctttctccttagtcttctcatagcattaactaatctattgggttcattattggaattaacctggtgctggatattttcaaattgtatctagtgcagctgattttaacaataactactgtgttcctggcaatagtgtgttctgattagaaatgaccaatattatactaagaaaagatacgactttattttctggtagatagaaataaatagctatatccatgtactgtagtttttcttcaacatcaatgttcattgtaatgttactgatcatgcattgttgaggtggtctgaatgttctgacattaacagttttccatgaaaacgttttattgtgtttttaatttatttattaagatggattctcagatatttatatttttattttatttttttctaccttgaggtcttttgacatgtggaaagtgaatttgaatgaaaaatttaagcattgtttgcttattgttccaagacattgtcaataaa

SEQ ID NO: 1401 - protein, 380 aa, Mus musculus
MMFSGFNADYEASSSRCSSASPAGDSLSYYHSPADSFSSMGSPVNAQDFCTDLAVSSANFIPTVTAISTSPDLQWLVQPALVSSVAPSQTRAPHPFGVPAPSAGAYSRAGVVKTMTGGRAQSIGRRGKVEQLSPEEEEKRRIRRERNKMAAAKCRNRRRELTDTLQAETDQLEDEKSALQTEIANLLKEKEKLEFILAAHRPACKIPDDLGFPEEMSVASLDLTGGLPEVATPESEEAFTLPLLNDPEPKPSVEPVKSISSMELKTEPFDDFLFPASSRPSGSETARSVPDMDLSGSFYAADWEPLHSGSLGMGPMATELEPLCTPVVTCTPSCTAYTSSFVFTYPEADSFPSCAAAHRKGSSSNEPSSDSLSSPTLLAL

SEQ ID NO: 1402 - DNA, 1843 bp, Homo sapien
gggcacgagggcagagccagttcctagcgcagagccgcgcccgccatgagggagatcgtgcacatccaggcgggccagtgcgggaaccagatcggcaccaagttttgggaagtgatcagcgatgagcacggcatcgacccggccggaggctacgtgggagactcggcgctgcagctggagagaatcaacgtctactacaatgagtcatcgtctcagaaatatgtgcccagggccgccctggtggacttagagccaggcaccatggacagcgtgcggtctgggccttttgggcagcttttccggcctgacaacttcatctttggccagacgggtgcagggaacaactgggcgaaagggcactacacggagggcgcggagctggtggacgcagtgctggacgtggtgcggaaggagtgcgagcactgcgactgcctgcagggcttccagctcacgcactcgctgggcggcggcacgggctcaggcatgggcacgctgctcatcagcaagatccgtgaggagttcccggaccgcatcatgaacaccttcagcgtcatgccctcgcccaaggtgtcggacacggtggtggagccctacaatgccacactgtcggtgcaccagctggtggagaatacagacgagacctactgcatcgacaacgaggcgctctatgacatctgcttccgcactctgaagctgacaacgcccacctacggggacctcaaccacctggtgtccgccaccatgagtggggtcaccacctcgctgcgcttcccgggccagctcaatgctgacctgcgcaagctggcggtgaacatggtgcccttcccgcgcctgcacttcttcatgcctggcttcgcgccgctcaccagccgcggcagccagcagtaccgggccctgaccgtgcccgagctcacccagcagatgttcgacgccaggaacatgatggccgcctgcgatccgcgccatggccgctacctgaccgtggccaccgtgttccgcgggcccatgtccatgaaggaggtggacgagcagatgctggccatccagagtaagaacagcagctacttcgtggagtggattcccaacaacgtgaaggtggccgtgtgcgacatcccgccccgcggcctgaagatggcctccaccttcatcggcaacagcacggccatccaggagctgttcaagcgcatctccgagcagttctcagccatgttccggcgcaaggccttcctgcactggttcacgggtgagggcatggatgaaatggagttcaccgaggcggagagcaacatgaacgacctggtatccgagtaccagcagtaccaggatgccaccgccaatgacggggaggaagcttttgaggatgaggaagaggagatcgatggatagtcggaatagagccgccccaactcagatcctacaacacgcaagttccttcttgaaccctggtgcctcctaccctatggccctgaatggtgcactggtttaattgtgttggtgtcggcccctcacaaatgcagccaagtcatgtaattagtcatctggaacaaagactaaaaacagcagagaattgcgggttctacccagtcagaagatcacaccatggagactttctactagaggacttgaaagagaactgaggggccacaaaataaacttcaccttccattaagtgttcaagcatgtctgcaaattaggagggagttagaaacagtctttttcatcctttgtgatgaagcctgaaattgtgccgtgttgccttatatgaatatgcagtatgggactttgaaataatgattcataataaaatactaaacgtgtgtcttcaaaaaaaaaaaaaaaaaaa

SEQ ID NO: 1403 - protein, 446 aa, Homo sapien
MREIVHIQAGQCGNQIGTKFWEVISDEHGIDPAGGYVGDSALQLERINVYYNESSSQKYVPRAALVDLEPGTMDSVRSGPFGQLFRPDNFIFGQTGAGNNWAKGHYTEGAELVDAVLDVVRKECEHCDCLQGFQLTHSLGGGTGSGMGTLLISKIREEFPDRIMNTFSVMPSPKVSDTVVEPYNATLSVHQLVENTDETYCIDNEALYDICFRTLKLTTPTYGDLNHLVSATMSGVTTSLRFPGQLNADLRKLAVNMVPFPRLHFFMPGFAPLTSRGSQQYRALTVPELTQQMFDARNMMAACDPRHGRYLTVATVFRGPMSMKEVDEQMLAIQSKNSSYFVEWIPNNVKVAVCDIPPRGLKMASTFIGNSTAIQELFKRISEQFSAMFRRKAFLHWFTGEGMDEMEFTEAESNMNDLVSEYQQYQDATANDGEEAFEDEEEEIDG

SEQ ID NO: 1404 - DNA, 2623 bp, Homo sapien
gaggaggcccgagaggagtcggtggcagcggcggcggcgggaccggcagcagcagcagcagcagcagcagcaaccactagcctcctgccccgcggcgttgcgacgagccccacgagccgctcaccccgccgttctcagcgctgcccgaccccgctggcgcgcctcccgccgcagtcccggcagcgcctcagttgtcctccgactcgccctcggccttcgcgcagcgcagcacagccgcacgcaccgcagcacagcacagcacagcccaggcatagcttcggcacagccccggctccggctcctgcggcagctcctctggcacgtccctgcgccgacattctggaggttggatgctcttgtccaaaatcaactcgcttgcccacctgcgcgccgcgccctgcaacgacctgcacgccaccaagctggcgcccggcaaggagaaggagcccctggagtcgcagtaccaggtgggcccgctactgggcagcggcggcttcggctcggtctactcaggcatccgcgtctccgacaacttgccggtggccatcaaacacgtggagaaggaccggatttccgactggggagagctgcctaatggcactcgagtgcccatggaagtggtcctgctgaagaaggtgagctcgggtttctccggcgtcattaggctcctggactggttcgagaggcccgacagtttcgtcctgatcctggagaggcccgagccggtgcaagatctcttcgacttcatcacggaaaggggagccctgcaagaggagctggcccgcagcttcttctggcaggtgctggaggccgtgcggcactgccacaactgcggggtgctacaccgcgacatcaaggacgaaaacatccttatcgacctcaatcgcggcgagctcaagctcatcgacttcgggtcgggggcgctgctcaaggacaccgtctacacggacttcgatgggacccgagtgtatagccctccagagtggatccgctaccatcgctaccatggcaggtcggcggcagtctggtccctggggatcctgctgtatgatatggtgtgtggagatattcctttcgagcatgacgaagagatcatcaggggccaggttttcttcaggcagagggtctcttcagaatgtcagcatctcattagatggtgcttggccctgagaccatcagataggccaaccttcgaagaaatccagaaccatccatggatgcaagatgttctcctgccccaggaaactgctgagatccacctccacagcctgtcgccggggcccagcaaatagcagcctttctggcaggtcctcccctctcttgtcagatgcccgagggaggggaagcttctgtctccagcttcccgagtaccagtgacacgtctcgccaagcaggacagtgcttgatacaggaacaacatttacaactcattccagatcccaggcccctggaggctgcctcccaacagtggggaagagtgactctccaggggtcctaggcctcaactcctcccatagatactctcttcttctcataggtgtccagcattgctggactctgaaatatcccgggggtggggggtgggggtgggcagaaccctgccaatggaactctttcttcatcatgagttctgctgaatgccgcgatgggtcaggtaggggggaaacaggttgggatgggataggactagcacattttaagtccctgtcacctcttccgactctttctgagtgccttctgtggggactccggctgtgctgggagaaatacttgaacttgcctcttttacctgctgcttctccaaaaatctgcctgggttttgttccctatttttctctcctgtcctccctcaccccctccttcatatgaaaggtgccatggaagaggctacagggccaaacgctgagccacctgcccttttttctgcctcctttagtaaaactccgagtgaactggtcttcctttttggtttttacttaactgtttcaaagccaagacctcacacacacaaaaaaatgcacaaaccaagcaatcaacagaaaagctgtaaatgtgtgtacagttggcatggtagtatacaaaaagattgtagtggatctaatttttaagaaattttgcctttaagttattttacctgtttttgtttcttgttttgaaagatgcgcattctaacctggaggtcaatgttatgtatttatttatttatttatttggttcccttcctattccaagcttccatagctgctgccctagttttctttcctcctttcctcctctgacttggggaccttttgggggagggctgcgacgcttgctctgtttgtggggtgacgggactcaggcgggacagtgctgcagctccctggcttctgtggggcccctcacctacttacccaggtgggtcccggctctgtgggtgatgggaggggccattgctgactgtgtatataggataattatgaaacacagttctggatggtgtgccttccagatcctctctggggctgtgttttgagcagcaggtagcctgctggttttatctgagtgaaatactgtacaggggaataaaagagatcttattttttttttatacttgcgtttggaataaaaaccctttggcttt

SEQ ID NO: 1405 - protein, 313 aa, Homo sapien
MLLSKINSLAHLRAAPCNDLHATKLAPGKEKEPLESQYQVGPLLGSGGFGSVYSGIRVSDNLPVAIKHVEKDRISDWGELPNGTRVPMEVVLLKKVSSGFSGVIRLLDWFERPDSFVLILERPEPVQDLFDFITERGALQEELARSFFWQVLEAVRHCHNCGVLHRDIKDENILIDLNRGELKLIDFGSGALLKDTVYTDFDGTRVYSPPEWIRYHRYHGRSAAVWSLGILLYDMVCGDIPFEHDEEIIRGQVFFRQRVSSECQHLIRWCLALRPSDRPTFEEIQNHPWMQDVLLPQETAEIHLHSLSPGPSK

SEQ ID NO: 1406 - DNA, 4077 bp, Homo sapien
gaattcccagctctctgctcgctctgctcgcagtcacagacacttgagcacacgcgtacacccagacatcttcgggctgctattggattgactttgaaggttctgtgtgggtcgccgtggctgcatgtttgaatcaggtggagaagcacttcaacgctggacgaagtaaagattattgttgttattttttttttctctctctctctctcttaagaaaggaaaatatcccaaggactaatctgatcgggtcttccttcatcaggaacgaatgcaggaatttgggaactgagctgtgcaagtgctgaagaaggagatttgtttggaggaaacaggaaagagaaagaaaaggaaggaaaaaatacataatttcagggacgagagagagaagaaaaacggggactatggggagaaaaaagattcagattacgaggattatggatgaacgtaacagacaggtgacatttacaaagaggaaatttgggttgatgaagaaggcttatgagctgagcgtgctgtgtgactgtgagattgcgctgatcatcttcaacagcaccaacaagctgttccagtatgccagcaccgacatggacaaagtgcttctcaagtacacggagtacaacgagccgcatgagagccggacaaactcagacatcgtggagacgttgagaaagaagggccttaatggctgtgacagcccagaccccgatgcggacgattccgtaggtcacagccctgagtctgaggacaagtacaggaaaattaacgaagatattgatctaatgatcagcaggcaaagattgtgtgctgttccacctcccaacttcgagatgccagtctccatcccagtgtccagccacaacagtttggtgtacagcaaccctgtcagctcactgggaaaccccaacctattgccactggctcacccttctctgcagaggaatagtatgtctcctggtgtaacacatcgacctccaagtgcaggtaacacaggtggtctgatgggtggagacctcacgtctggtgcaggcaccagtgcagggaacgggtatggcaatccccgaaactcaccaggtctgctggtctcacctggtaacttgaacaagaatatgcaagcaaaatctcctcccccaatgaatttaggaatgaataaccgtaaaccagatctccgagttcttattccaccaggcagcaagaatacgatgccatcagtgtctgaggatgtcgacctgcttttgaatcaaaggataaataactcccagtcggctcagtcattggctaccccagtggtttccgtagcaactcctactttaccaggacaaggaatgggaggatatccatcagccatttcaacaacatatggtaccgagtactctctgagtagtgcagacctgtcatctctgtctgggtttaacaccgccagcgctcttcaccttggttcagtaactggctggcaacagcaacacctacataacatgccaccatctgccctcagtcagttgggagcttgcactagcactcatttatctcagagttcaaatctctccctgccttctactcaaagcctcaacatcaagtcagaacctgtttctcctcctagagaccgtaccaccaccccttcgagatacccacaacacacgcgccacgaggcggggagatctcctgttgacagcttgagcagctgtagcagttcgtacgacgggagcgaccgagaggatcaccggaacgaattccactcccccattggactcaccagaccttcgccggacgaaagggaaagtccctcagtcaagcgcatgcgactttctgaaggatgggcaacatgatcagattattacttactagtttttttttttttcttgcagtgtgtgtgtgtgctataccttaatggggaaggggggtcgatatgcattatatgtgccgtgtgtggaaaaaaaaaaagtcaggtactctgttttgtaaaagtacttttaaattgcctcagtgatacagtataaagataaacagaaatgctgagataagcttagcacttgagttgtacaacagaacacttgtacaaaatagattttaaggctaacttcttttcactgttgtgctcctttgcaaaatgtatgttacaatagatagtgtcatgttgcaggttcaacgttatttacatgtaaatagacaaaaggaaacatttgccaaaagcggcagatctttactgaaagagagagcagctgttatgcaacatatagaaaaatgtatagatgcttggacagacccggtaatgggtggccattggtaaatgttaggaacacaccaggtcacctgacatcccaagaatgctcacaaacctgcaggcatatcattggcgtatggcactcattaaaaaggatcagagaccattaaaagaggaccatacctattaaaaaaaaatgtggagttggagggctaacatatttaattaaataaataaataaatctgggtctgcatctcttattaaataaaaatataaaaatatgtacattacattttgcttattttcatataaaaggtaagacagagtttgcaaagcatttgtggctttttgtagtttacttaagccaaaatgtgtttttttccccttgatagcttcgctaatattttaaacagtcctgtaaaaaaccaaaaaggactttttgtatagaaagcactaccctaagccatgaagaactccatgctttgctaaccaagataactgttttctctttgtagaagttttgtttttgaaatgtgtatttctaattatataaaatattaagaatcttttaaaaaaatctgtgaaattaacatgcttgtgtatagctttctaatatatataatattatggtaatagcagaagttttgttatcttaatagcgggaggggggtatatttgtgcagttgcacatttgagtaactattttctttctgttttcttttactctgcttacattttataagtttaaggtcagctgtcaaaaggataacctgtggggttagaacatatcacattgcaacaccctaaattgtttttaatacattagcaatctattgggtcaactgacatccattgtatatactagtttctttcatgctatttttattttgttttttgcatttttatcaaatgcagggcccctttctgatctcaccatttcaccatgcatcttggaattcagtaagtgcatatcctaacttgcccatattctaaatcatctggttggttttcagcctagaatttgatacgctttttagaaatatgcccagaatagaaaagctatgttggggcacatgtcctgcaaatatggccctagaaacaagtgatatggaatttacttggtgaataagttataaattcccacagaagaaaaatgtgaaagactgggtgctagacaagaaggaagcaggtaaagggatagttgctttgtcatccgtttttaattattttaactgacccttgacaatcttgtcagcaatataggactgttgaacaatcccggtgtgtcaggacccccaaatgtcacttctgcataaagcatgtatgtcatctattttttcttcaataaagagatttaatagccatttcaagaaatcccataaagaacctctctatgtccctttttttaatttaaaaaaatgactcttgtctaatattcgtctataagggattaattttcagaccctttaataagtgagtgccataagaaagtcaatatatattgtttaaaagatatttcagtctaggaaagattttccttctcttggaatgtgaagatctgtcgattcatctccaatcatatgcattgacatacacagcaaagaagatataggcagtaatatcaacactgctatatcatgtgtaggacatttcttatccattttttctcttttacttgcatagttgctatgtgtttctcattgtaaaaggctgccgctgggtggcagaagccaagagaccttattaactaggctatatttttcttaacttgatctgaaatccacaattagaccacaatgcacctttggttgtatccataaaggatgctagcctgccttgtactaatgttttatatatt

SEQ ID NO: 1407 - protein, 473 aa, Homo sapien
MGRKKIQITRIMDERNRQVTFTKRKFGLMKKAYELSVLCDCEIALIIFNSTNKLFQYASTDMDKVLLKYTEYNEPHESRTNSDIVETLRKKGLNGCDSPDPDADDSVGHSPESEDKYRKINEDIDLMISRQRLCAVPPPNFEMPVSIPVSSHNSLVYSNPVSSLGNPNLLPLAHPSLQRNSMSPGVTHRPPSAGNTGGLMGGDLTSGAGTSAGNGYGNPRNSPGLLVSPGNLNKNMQAKSPPPMNLGMNNRKPDLRVLIPPGSKNTMPSVSEDVDLLLNQRINNSQSAQSLATPVVSVATPTLPGQGMGGYPSAISTTYGTEYSLSSADLSSLSGFNTASALHLGSVTGWQQQHLHNMPPSALSQLGACTSTHLSQSSNLSLPSTQSLNIKSEPVSPPRDRTTTPSRYPQHTRHEAGRSPVDSLSSCSSSYDGSDREDHRNEFHSPIGLTRPSPDERESPSVKRMRLSEGWAT

SEQ ID NO: 1408 - DNA, 2636 bp, Homo sapien
  Unsure 372-394: Unknown base
ataacggtcctaaggtagcgatatatatgtttaaaagatatttcagtctaggaaagattttccttctcttggaatgtgaagatctgtcgattcatctccaatcatatgcattgacatacacagcaaagaagatataggcagtaatatcaacactgctatatcatgtgtaggacatttcttatccattttttctcttttacttgcatagttgctatgtgtttctcattgtaaaaggctgccgctgggtggcagaagccaagagaccttattaactaggctatatttttcttaacttgatctgaaatccacaattagaccacaatgcaccttggttgtatccataaaggatgctagcctgccttgtactaatgnnnnnnnnnnnnnnnnnnnnnnntctatcaaccatttcatatatatcccactactcaaggtatccatggaacatgaaagaataacatttatgcagaggaaaaacaaaaacatccctgaaaatatacacactcatacacacacacgcacaggggaataaaataagaaaatcattttcctcaccatagacttgatcccatccttacaacccatccttctaacttgatgtgtataaaatatgcaaacatttcacaaatgttctttgtcatttcaaaatactttagtatatcaatatcagtagataccagtgggtgggaaagggtcattacatgaaaatatgaagaaatagccatattagttttttaacctgcaatttgcctcagcaacaaagaaaaagtgaatttttaatgctgaagataaagtaagctaaagtaccagcagaagccttggctatttatagcagttctgacaatagttttataagaacatgaagagaacagaatcacttgaaaatggatgccagtcatctcttgttcccactactgaattcttataaagtggtggcaagatagggaagggataatctgagaatttttaaaagatgatttaatgagaagaagcacaattttgattgtgatgagtcactttctgtaaacaatcttggtctatctttacccttataccttatctgtaatttaccatttattgtatttgcaaagctagtatggtttttaatcacagtaaatcctttgtattccagactttagggcagagccctgagggagtattattttacataacccgtcctagagtaacattttaggcaacattcttcattgcaagtaaaagatccataagtggcattttacacggctgcgagtattgttatatctaatcctattttaaaagatttttggtaatatgaagcttgaatactggtaacagtgatgcaatatacgcaagctgcacaacctgtatattgtatgcattgctgcgtggaggctgtttatttcaacctttttaaaaattgtgttttttagtaaaatggcttattttttcccaaaggtggaatttagcattttgtaatgatgaatataaaaatacctgtcatccccagatcatttaaaagttaactaaagtgagaatgaaaaaacaaaattccaagacactttttaaaagaatgtctgccctcacacacttttatggatttgtttttcttacatacccatcttttaacttagagatagcattttttgccctctttattttgttgtttgtttctccagagagtaaacgctttgtagttctttctttaaaaaacattttttttaaagaagaagaagccacttgaaccctcaataaaggctgttgcctaagcatggcatacttcatctgttctcatttgtgccatctgccgtgatgtcgtcacttttatggcgttaatttcctgccactacagatcttttgaagattgctggaatactggtgtctgttagaatgcttcagactacagatgtaattaaaggcttttcttaatatgttttaaccaaagatgtggagcaatccaagccacatatcttctacatcaaatttttccattttggttattttcataatctggtattgcattttgccttccctgttcatacctcaaattgattcatacctcagtttaattcagagaggtcagttaagtgacggattctgttgtggtttgaatgcagtaccagtgttctcttcgagcaaagtagacctgggtcactgtaggcataggacttggattgcttcagatggtttgctgtatcatttttcttctttttcttttcctggggacttgtttccattaaatgagagtaattaaaatcgcttgtaaatgagggcatacaagcatttgcaacaaatattcaaatagaggctcacagcggcataagctggactttgtcgccactagatgacaagatgttataactaagttaaaccacatctgtgtatctcaagggacttaattcagctgtctgtagtgaataaaagtgggaaattttcaaaagtttctcctgctggaaataaggtataatttgtattttgcagacaattcagtaaagttactggctttcttagtgatgcagtgtccgtggtgcatttttttaaattaatgttttgctgtttaaatttattcaattttattgtgttttttaaaaagcagcttatgccacaagcacaaatgagctttctcagttttcaactcaaaatattatatgaaaagatgg

SEQ ID NO: 1409 - protein, 44 aa, Homo sapien
NGPKVAIYMFKRYFSLGKIFLLLECEDLSIHLQSYALTYTAKKI

SEQ ID NO: 1410 - DNA, 1209 bp, Homo sapien
cagactcgagcagtctctggaacacgctgcggggctcccgggcctgagccaggtctgttctccacgcaggtgttccgcgcgccccgttcagccatgtcgtccggcatccatgtagcgctggtgactggaggcaacaagggcatcggcttggccatcgtgcgcgacctgtgccggctgttctcgggggacgtggtgctcacggcgcgggacgtgacgcggggccaggcggccgtacagcagctgcaggcggagggcctgagcccgcgcttccaccagctggacatcgacgatctgcagagcatccgcgccctgcgcgacttcctgcgcaaggagtacgggggcctggacgtgctggtcaacaacgcgggcatcgccttcaaggttgctgatcccacaccctttcatattcaagctgaagtgacgatgaaaacaaatttctttggtacccgagatgtgtgcacagaattactccctctaataaaaccccaagggagagtggtgaacgtatctagcatcatgagcgtcagagcccttaaaagctgcagcccagagctgcagcagaagttccgcagtgagaccatcactgaggaggagctggtggggctcatgaacaagtttgtggaggatacaaagaagggagtgcaccagaaggagggctggcccagcagcgcatacggggtgacgaagattggcgtcaccgttctgtccaggatccacgccaggaaactgagtgagcagaggaaaggggacaagatcctcctgaatgcctgctgcccagggtgggtgagaactgacatggcgggacccaaggccaccaagagcccagaagaaggtgcagagacccctgtgtacttggcccttttgcccccagatgctgagggtccccatggacaatttgtttcagagaagagagttgaacagtggtgagctgggctcacagctccatccatgggccccattttgtaccttgtcctgagttggtccaaagggcatttacaatgtcataaatatccttatataagaaaaaaaatgatctcttatcaattagcactcactaatgtactactaattgagcaacctacgcactcagttgactacgtaaatctgtcaggtcttttgtgatttcctctgatgcaggagaggaaaaattgtaattgatgaaaataatgaatgaaaatcaacagatgaataaatggttctttataagtg

SEQ ID NO: 1411 - protein, 277 aa, Homo sapien
MSSGIHVALVTGGNKGIGLAIVRDLCRLFSGDVVLTARDVTRGQAAVQQLQAEGLSPRFHQLDIDDLQSIRALRDFLRKEYGGLDVLVNNAGIAFKVADPTPFHIQAEVTMKTNFFGTRDVCTELLPLIKPQGRVVNVSSIMSVRALKSCSPELQQKFRSETITEEELVGLMNKFVEDTKKGVHQKEGWPSSAYGVTKIGVTVLSRIHARKLSEQRKGDKILLNACCPGWVRTDMAGPKATKSPEEGAETPVYLALLPPDAEGPHGQFVSEKRVEQW

SEQ ID NO: 1412 - DNA, 1571 bp, Homo sapien
cgggaggtcagaaaaccgggccgcgggcggcaccgacagctggggcccgggtcagggacacgcggaggtcaggccggtgaaggcggcaggaagctggagcacgatcccaggaggaacaatcctgcaccatgactcaacagccacttcgaggagtgaccagcctgcgtttcaaccaagaccaaagctgcttttgctgcgccatggagacaggtgtgcgcatctacaacgtggagcccttgatggagaaggggcatctggaccacgagcaggtgggcagcatgggcttggtggagatgctgcaccgctccaaccttctggccttggtgggcggtggtagtagtcccaagttctcagagatctcagtgctgatctgggacgatgcccgggagggcaaggactccaaggagaagctggtgctggagttcaccttcaccaagccagtgctttctgtgcgcatgcgccatgacaagatcgtgatcgtgctgaagaaccgcatctatgtgtactccttccccgacaatccccgaaagctgtttgagtttgatacccgggacaaccccaaggggctctgtgacctctgccccagcctggagaagcaactgctagtgttcccgggacacaagtgtgggagtctgcaacttgtggacctggcgagcacaaagcctggcacctcgtctgctccattcacgatcaatgcacatcagagtgacatagcctgtgtgtctctaaaccagccaggcactgtagtggcctcagcctcccagaagggtacccttattcgcctctttgacacacaatccaaggagaaactggtggagctgcgccgaggcactgaccctgccaccctctactgcattaacttcagccacgactcctccttcctctgcgcttccagtgataagggtactgtccatatctttgctctcaaggatacccgcctcaaccgccgctccgcgctggctcgcgtgggcaaggtggggcctatgattgggcagtacgtggactctcagtggagcctggcgagcttcactgtgcctgctgagtcagcttgcatctgcgccttcggtcgcaatacttccaagaacgtcaactctgtcattgccatctgcgtagatgggaccttccacaaatatgtcttcactcctgatggaaactgcaacagagaggctttcgacgtgtaccttgacatctgtgatgatgatgacttttaaggaccctgggggctgtgctagggacctgcagtggcagaactgcagagctgagccttggcagtggggcgtgcttggaagccaccagccagcaagcattaatggggctggtgcccactttccactcagcagagctatgtctaaataaagagctcacttccccccagcacttcttgatgactgtgtgccccaagggccaggccagagacccaggaaggcagcgaccccttgggatccctaacctggaggaaattgccagggacccagagggagtgccctaatccaacctggggattttttaaaagcttcctaggaagagatgatctccgatgtgatgaatacgaataaaaggcccttaatggc

SEQ ID NO: 1413 - protein, 360 aa, Homo sapien
MTQQPLRGVTSLRFNQDQSCFCCAMETGVRIYNVEPLMEKGHLDHEQVGSMGLVEMLHRSNLLALVGGGSSPKFSEISVLIWDDAREGKDSKEKLVLEFTFTKPVLSVRMRHDKIVIVLKNRIYVYSFPDNPRKLFEFDTRDNPKGLCDLCPSLEKQLLVFPGHKCGSLQLVDLASTKPGTSSAPFTINAHQSDIACVSLNQPGTVVASASQKGTLIRLFDTQSKEKLVELRRGTDPATLYCINFSHDSSFLCASSDKGTVHIFALKDTRLNRRSALARVGKVGPMIGQYVDSQWSLASFTVPAESACICAFGRNTSKNVNSVIAICVDGTFHKYVFTPDGNCNREAFDVYLDICDDDDF

SEQ ID NO: 1414 - DNA, 2277 bp, Homo sapien
acgccctatacaacttggcttcacatacttttacactaactttatatgatttttaaaaactggtctgatcggacttctcgtcctgggacactgtttactggagtctggccggctctccgtgctcctcttggtacctcattttggggagaaccttaaacccactcgagcagataatctccgccttgaccggtgccaccaaagaagggttggaaccatgtggacttttctgggcattgccactttcacctatttttataagaagttcggggacttcatcactttggccaacagggaggtcctgttgtgcgtgctggtgttcctctcgctgggcctggtgctctcctaccgctgtcgccaccgaaacgggggtctcctcgggcgccagcggagcggctcccagttcgccctcttctcggatattctctcaggcctgcctttcattggcttcttctgggccaaatccccccctgaatcagaaaataaggagcagctcggggccaggaggcgcagaaaaggaaccaatatttcagaaacaagcttaataggaacagctgcctgtacatcaacatcttctcagaatgacccagaagttatcatcgtgggagctggcgtgcttggctctgctttggtagctgtgctttccagagatggaagaaaggtgacagtcattgagagagacttaaaagagcctgacagaatagttggagaattcctgcagccgggtggttatcatgttctcaaagaccttggtcttggagatacagtggaaggtcttgatgcccaggttgtaaatggttacatgattcatgatcaggaaagcaaatcagaggttcagattccttaccctctgtcagaaaacaatcaagtgcagagtggaagagctttccatcacggaagattcatcatgagtctccggaaagcagctatggcagagcccaatgcaaagtttattgaaggtgttgtgttacagttattagaggaagatgatgttgtgatgggagttcagtacaaggataaagagactggagatatcaaggaactccatgctccactgactgttgttgcagatgggcttttctccaagttcaggaaaagcctggtctccaataaagtttctgtatcatctcattttgttggctttcttatgaagaatgcaccacagtttaaagcaaatcatgctgaacttattttagctaacccgagtccagttctcatctaccggatttcatccagtgaaactcgagtacttgttgacattagaggagaaatgccaaggaatttaagagaatacatggttgaaaaaatttacccacaaatacctgatcacctgaaagaaccattcttagaagccactgacaattctcatctgaggtccatgctagcaagcttccttcctccttcatcagtgaagaaacgaggtgttcttcttttgggagacgcatataatatgaggcatccacttactggtggaggaatgactgttgcttttaaagatataaaactatggagaaaactgctaaagggtatccctgacctttatgatgatgcagctattttcgaggccaacaaatcattttactgggcaagaaaaacatctcattcctttgtcgtgaatatccttgctcaggctctttatgaattattttctgccacagatgattccctgcatcaactaagaaaagcctgttttctttatttcaaacttggtggcgaatgtgttgcgggtcctgttgggctgctttctgtattgtctcctaaccctctagctttaattggacacttctttgctgttgcaatctatgccgtgtatttttgctttaagtcagaaccttggattacaaaacctcgagcccttctcagtagtagtgctgtattgtacaaagcgtgttctgtaatatttcctctaatttactcagaaatgaagtatatggttcattaagcttaaaggggaaccatttgtgaatgaatatttggaacttaccaagtcctaagagacttttggaagaggatatatatagcatagtaccataccacttataaagtggaaactcttggaccaagatttggattaatttgtttttgaagttttttgtatataaatatgtaaatacatgctttaatttgcaatttaaaatgaaggggttaaataagttagacatttgaaagaaatgattgttaccataaattagtgctaatgctgaggagaactacagtttttcttttgaatttagtatttgagatgagttgttgggacatgcaaataaaatgaagaatgac

SEQ ID NO: 1415 - protein, 574 aa, Homo sapien
MWTFLGIATFTYFYKKFGDFITLANREVLLCVLVFLSLGLVLSYRCRHRNGGLLGRQRSGSQFALFSDILSGLPFIGFFWAKSPPESENKEQLGARRRRKGTNISETSLIGTAACTSTSSQNDPEVIIVGAGVLGSALVAVLSRDGRKVTVIERDLKEPDRIVGEFLQPGGYHVLKDLGLGDTVEGLDAQVVNGYMIHDQESKSEVQIPYPLSENNQVQSGRAFHHGRFIMSLRKAAMAEPNAKFIEGVVLQLLEEDDVVMGVQYKDKETGDIKELHAPLTVVADGLFSKFRKSLVSNKVSVSSHFVGFLMKNAPQFKANHAELILANPSPVLIYRISSSETRVLVDIRGEMPRNLREYMVEKIYPQIPDHLKEPFLEATDNSHLRSMLASFLPPSSVKKRGVLLLGDAYNMRHPLTGGGMTVAFKDIKLWRKLLKGIPDLYDDAAIFEANKSFYWARKTSHSFVVNILAQALYELFSATDDSLHQLRKACFLYFKLGGECVAGPVGLLSVLSPNPLALIGHFFAVAIYAVYFCFKSEPWITKPRALLSSSAVLYKACSVIFPLIYSEMKYMVH

SEQ ID NO: 1416 - DNA, 719 bp, Homo sapien
cagccttataagctgagggagtggagaggcccggggccaggaaagcagagacagacaaagcgttaggagaagaagagaggcagggaagacaagccaggcacgatggccaccttcccaccagcaaccagcgccccccagcagcccccaggcccggaggacgaggactccagcctggatgaatctgacctctatagcctggcccattcctacctcggaggtggaggccggaaaggtcgcaccaagagagaagctgctgccaacaccaaccgccccagccctggcgggcacgagaggaaactggtgaccaagctgcagaattcagagaggaagaagcgaggggcacggcgctgagacagagctggagatgaggccagaccatggacactacacccagcaatagagacgggactgcggaggaaggaggacccaggacaggatccaggccggcttgccacaccccccacccctaggacttattcccgctgactgagtctctgaggggctaccaggaaagcgcctccaaccctagcaaaagtgcaagatggggagtgagaggctgggaatggaggggcagagccaggaagatcccccagaaaagaaagctacagaagaaactggggctcctccagggtggcagcaacaataaatagacacgcacggcagccacagcttgggtgtgtgttcatccttgttaaaaaaaaaaaaaaaaaaaaaaaaaa

SEQ ID NO: 1417 - protein, 82 aa, Homo sapien
MATFPPATSAPQQPPGPEDEDSSLDESDLYSLAHSYLGGGGRKGRTKREAAANTNRPSPGGHERKLVTKLQNSERKKRGARR

SEQ ID NO: 1418 - DNA, 8776 bp, Homo sapien
ctgaggaaacttggctgtaacttcaaaagaagatttgattctttatttctggactgcatatatatatataacaaggccattaaaatgtcgggagcctcagtgaaggtggctgtccgggtaaggcccttcaattctcgagagaccagcaaggaatccaaatgcatcattcagatgcaaggcaactcgaccagtattattaacccaaagaatccaaaggaagctccaaagtccttcagcttcgactattcctactggtctcatacctcacccgaagatccctgttttgcatctcaaaaccgtgtgtacaatgacattggcaaggaaatgctcttacacgcctttgagggatataatgtctgtatttttgcctatgggcagactggtgctggaaaatcttatacaatgatgggtaaacaagaagaaagccaggctggcatcattccacagttatgtgaagaactttttgagaaaatcaatgacaactgtaatgaagaaatgtcttactctgtagaggtgagctacatggaaatttactgtgaaagagtacgagatttgctgaatccaaaaaacaagggtaatttgcgtgtgcgtgaacacccacttcttggaccctatgtggaggatctgtccaagttggcagttacttcctacacagacattgctgacctcatggatgctgggaacaaagccaggacagtggcagctacaaacatgaatgaaacaagtagccgttcccacgctgtgtttacgattgttttcacccagaagaaacacgataatgagaccaacctttccactgagaaggtcagtaaaatcagcttggtggatctagcaggaagtgaacgagctgattcaactggtgccaaagggactcgattaaaggaaggagcaaatattaataagtctcttacaactttgggcaaagtcatttcagccttggccgaggtggataactgcactagcaagagtaaaaagaagaagaaaacagattttattccctacagggattctgtacttacttggctccttcgagaaaatttaggtggcaattctcggactgcaatggttgctgctctgagccccgcggatatcaactacgatgagactttgagcactctgagatatgcagatcgtgcaaaacaaattaaatgcaatgctgttatcaatgagggccccaatgccaagctggttcgtgaattaaaggaggaggtgacacggctgaaggaccttcttcgtgctcagggcctgggagatattattgatattgatccactgatcgatgattactctggaagtggaagcaaatatctgaaagattttcagaacaataagcatagatacttgctagcctctgagaatcaacgccctggccatttttccacagcatccatggggtccctcacttcatccccatcttcctgctcactcagtagtcaggtgggcttgacgtctgtgaccagtattcaagagaggatcatgtctacacctggaggagaggaagctattgaacgtttaaaggaatcagagaagatcattgctgagttgaatgaaacttgggaagagaagcttcgtaaaacagaggccatcagaatggagagagaggctttgttggctgagatgggagttgccattcgggaagatggaggaaccctaggggttttctcacctaaaaagaccccacatcttgttaacctcaatgaagacccactaatgtctgagtgcctactttattacatcaaagatggaattacaagggttggccaagcagatgctgagcggcgccaggacatagtgctgagcggggctcacattaaagaagagcattgtatcttccggagtgagagaagcaacagcggggaagttatcgtgaccttagagccctgtgagcgctcagaaacctacgtaaatggcaagagggtgtcccaacctgttcagctgcgctcaggaaaccgtatcatcatgggtaaaaaccatgttttccgctttaaccacccggaacaagcacgagctgagcgagagaagactccttctgctgagaccccctctgagcctgtggactggacatttgcccagagggagcttctggaaaaacaaggaattgatatgaaacaagagatggagaaaaggctacaggaaatggagatcttatacaaaaaggagaaggaagaagcagatcttcttttggagcagcagagactggactatgagagtaaattgcaggccttgcagaagcaggttgaaacccgatctctggctgcagaaacaactgaagaggaggaagaagaagaagaagttccttggacacagcatgaatttgagttggcccaatgggccttccggaaatggaagtctcatcagtttacttcattacgggacttactctggggcaatgccgtgtacctaaaggaggccaatgccatcagtgtggaactgaaaaagaaggtgcagtttcagtttgttctgctgactgacacactgtactcccctttgcctcctgaattacttcccactgagatggaaaaaactcatgaggacaggcctttccctcgcacagtggtagcagtagaagtccaggatttgaagaatggagcaacacactattggtctttggagaaactcaagcagaggctggatttgatgcgagagatgtatgatagggcaggggagatggcctccagtgcccaagacgaaagcgaaaccactgtgactggcagcgatcccttctatgatcggttccactggttcaaacttgtggggagctcccccattttccacggctgtgtgaacgagcgccttgccgaccgcacaccctcccccactttttccacggccgattccgacatcactgagctggctgacgagcagcaagatgagatggaggattttgatgatgaggcattcgtggatgacgccggctctgacgcagggacggaggagggatcagatctcttcagtgacgggcatgacccgttttacgaccgatccccttggttcattttagtgggaagggcatttgtttacctgagcaatctgctgtatcccgtgcccctgatccacagggtggccatcgtcagtgagaaaggtgaagtgcggggatttctgcgtgtggctgtacaggccatcgcagcggatgaagaagctcctgattatggctctggaattcgacagtcaggaacagctaaaatatcttttgataatgaatactttaatcagagtgacttttcgtctgttgcaatgactcgttctggtctgtccttggaggagttgaggattgtggaaggacagggtcagagttctgaggtcatcactcctccagaagaaatcagtcgaattaatgacttggatttgaagtcaagcactttgctggatggtaagatggtaatggaagggttttctgaagagattggcaaccacctgaaactgggcagtgccttcactttccgagtaacagtgttgcaggccagtggaatcctcccagagtatgcagatatcttctgtcagttcaactttttgcatcgccatgatgaagcattctccacggagcccctcaaaaacaatggcagaggaagtcccctggccttttatcatgtgcagaatattgcagtggagatcactgaatcatttgtggattacatcaaaaccaagcctattgtatttgaagtctttgggcattatcagcagcacccacttcatctgcaaggacaggagcttaacagtccgcctcagccgtgccgccgattcttccctccacccatgccactgtccaagccagttccagccaccaagttaaacacgatgagcaaaaccagccttggccagagcatgagcaagtatgacctcctggtttggtttgagatcagtgaactggagcctacaggagagtatatcccagctgtggttgaccacacagcaggcttgccttgccaggggacatttttgcttcatcagggcatccagcgaaggatcacagtgaccattatccatgagaaggggagcgagctccattggaaagatgttcgtgaactggtggtaggtcgtattcggaataagcctgaggtggatgaagctgcagttgatgccatcctctccctaaatattatttctgccaagtacctgaagtcttcccacaactctagcaggaccttctaccgctttgaggctgtgtgggatagctctctgcataactcccttcttctgaaccgagtgacaccctatggagaaaagatctacatgaccttgtcggcctacctagagctggatcattgcatccagccggctgtcatcaccaaggatgtgtgcatggtcttctactcccgagatgccaagatctcaccaccacgctctctgcgtagcctctttggcagcggctactcaaagtcaccagattcgaatcgagtcactggcatttacgaactcagcttatgcaaaatgtcagacacaggtagtccaggtatgcagagaaggagaagaaaaatcttagatacgtcagtggcatatgtgcggggagaagagaacttagcaggctggcggccccgtggagacagcctcatccttgagcaccagtgggagctggagaagctggagctcctacatgaggtggaaaaaacccgccactttttgctgctgcgtgagagacttggtgacagcatccccaaatccctgagcgactcgttatcccccagcctcagcagtgggaccctcagcacctccaccagtatctcctctcagatctcaaccactacctttgaaagcgccatcacacctagcgagagcagtggctatgattcaggagacatcgaaagcctggtggaccgagagaaagagctggctaccaagtgcctgcaacttctcacccacactttcaacagagaattcagccaggtgcacggcagcgtcagtgactgtaagttgtctgatatctctccaattggacgggatccctctgagtccagtttcagcagtgccaccctcactccctcctccacctgtccctctctggtagactctaggagcaactctctggatcagaagaccccagaagccaattcccgggcctctagtccctgcccagaatttgaacagtttcagattgtcccagctgtggaaacaccatatttggcccgagcaggaaaaaacgaatttctcaatcttgttccagatattgaagaaattagaccaagctcagtggtctctaagaaaggataccttcatttcaaggagcctctttacagtaactgggctaaacattttgttgtcgtccgtcggccttatgtcttcatctataacagtgacaaagaccctgtggagcgtggaatcattaacctgtccacagcacaggtggagtacagtgaggaccagcaggccatggtgaagacaccaaacacctttgctgtctgcacaaagcaccgtggggtccttttgcaggccctcaatgacaaagacatgaacgactggttgtatgccttcaacccacttctagctggcacaatacgaccaggtcatctggcttccgagatcatcagagaagataagtctgtctctttcagctgccagtaagttttccaggatgagaggggaaaaagaaagcctccagtgacttcagttgctttgccagttgtcttgggattgttttacaccatcctttacttcccttgctcagacctctctgtttcaccattgctcaggcattcaggaaagtatctgctcactcccacttggtgagtcctcggccttgaggttgctgactctcaggcgttaggcagctggatgacttcccgcttcacgcagcaaaggccaggggcttgcgcgcctctgcagagttgttgctagggagacttgtgtcatcatccacaaccttgtttctcacttcctggttgggctcatctctgaagaacaggtctcccagcttcgctccttatcactgcattgtgaagaggaggaaaagtgaatcacggagagagaaaggaaaggatagaatcacaggctgcgtctgcacctgaaaagtgacccgcggaaactctatggcggattttttttttaactttcttcttcctgttaaaacataggtcactaactgtgatgttatttgttttctaagtggtatgtgagattttctaatgtagttagaagtttcattgtctgatggacacaatatgcccttccggttctattcaaaccagcaggatctgtcggtgcttagagatggctgcctggactggaatcaaatctaatttcagggaaatgaagatggaatttgaaggtcacttttaaaattaagtcattgatgctgctgttacagagtgtgacagaggatccatgtctgtgacacaggacggtgggaagcctgagagagagtgaaattatgtgatacactgaaatgacttttgtttttcttctaactcatacaaaactggtttggaaagtctttgctttggaagcgtcagacattagaacaggccaaactggactgtctgttcatagcgtgcctgaataagaaggcctcttagggagccagagggagcagagtggtcgtgtcctgcgtgctcttcaccctctggggcgcccctgctgcggctggcaggtgcagacagcctttgctggtccccagcacgtccagggtgggtgctcccttgcccgacagaaccatccccactgtgaggctgtgagagatttgtggcaggaactgtttatgaggctctagttgttgctgttgtggcgggaaagttaagaaacatagcccttaaggaaaccacctttatgtattttcttaaagcacgcctttaaataagcaaaaactttaaaaggcaggaaagagaattcttaggcaaattcagagaaataagtgctagttaatactaatcacctcctcctctgtctctcatcctcctttctcccatcaaagcaaaatatggcctcaccaccagccccaaatcagtgctcagaccctctctgtgtctgtgtgccctcctgggagtcagtcagcgctcaggccaggactgtgcagggccagccagcccatgcgctagtcaggagcacaggcaaggggtgcttgtggcagtggccgggcacctgagccccagctcgttgttaaacgtgctgacggcaaggggcaatggagtgagtttcccaactaagaaaccactattatatattttttcccttcagtcacatagacttcagacaactctcctattttttatggatttttcagctcatttcagatgaaggaactaagtcattgtgaactgtctcttgagatctaaaaacaagatgacttttcctggcacatattccaaagcaaagactttgttgcctgctgcttattgtctaatttacagggatatttaattttgtcaggtctatgtatatttatccagctatacttacttgcacagtggattggagagaaaggattctccagtgtgcacactcatcggtactctttctgcatttccctcgtgctgtgtcccgctcgggttccaatggacagtatcagggcttgtttgacttaggtctttcagttttcctttcggttcccttttaaaaatgtgattgttaacctgcctcttgaaagattcaaccgggtgtggtggctcacgcctgtaatcccagcacattgggaggccaaggcaggtggatcacctgaggtcagaagtttgagaccagcctggccaacatggtgaaaccccgtctctactaaaaatacaaaaggtagccaggcgtggtggcgtgtgcctgtggtcccagctacttgggaggctgaggcaggagaatggcttgaacctgggaggtggaggctgcagtgagttgagactgcgccattgcactccagcctgggtgacaaagcaggactccgtctcaaaaaaaaagaaaagattcatgatgctgctgctcccagaaggtttgctggatgtgtttacataggactctaacttgtgtgcactacagttgttcaccagggccagtgattcaccccagtgtgtggccagaccatgactgtgtagcaggaatgttttaatttgtgcttccttagtaaattgaaatatcagctgagagattatttgctgctgttattcaaaaggccatttatgaagttagtatttgagccccataagatctttaaaaagcctccaatcatttaaaggaagaaatcagagttgctataaaattcagtaaaaagctcatagccaaacggctgtgctcagatggaaagtctgagctgaggttggtctcttgccaaaccgtggctgttgtgtgttgttcttcatgtcttcgagttcattttttttcattctgcctattctggcatcagctcacttgaggagtccctcagccttcttgtatttaaggcatcgtcttagactttgtggctctaaagtacctgtctgttgagatttcaagtctcttgtcaccatcctcacacatgacaacaaaacccataatgcataagtggcctttttgaaccaagactttgcaaactgatctctcccccgtgaaggagttgagcacattagcaacaatgtacattaattttggattttcattttcatgttttattttgtaaatattatctgatgtttggagcttgagtatacagactgtaaatatagttcttgtatttgtactaattctgattcttttgctgtatagccttagatgtgcaatgcagacactatctaactgtgtgtggtaaccttgcgtcacggagctgttagtgaacgaggtaaaaataataaaggtacagccagtgcaaaaaaaaaaaaaaaaaaaaaaaaaa

SEQ ID NO: 1419 - protein, 1388 aa, Homo sapien
MGSLTSSPSSCSLSSQVGLTSVTSIQERIMSTPGGEEAIERLKESEKIIAELNETWEEKLRKTEAIRMEREALLAEMGVAIREDGGTLGVFSPKKTPHLVNLNEDPLMSECLLYYIKDGITRVGQADAERRQDIVLSGAHIKEEHCIFRSERSNSGEVIVTLEPCERSETYVNGKRVSQPVQLRSGNRIIMGKNHVFRFNHPEQARAEREKTPSAETPSEPVDWTFAQRELLEKQGIDMKQEMEKRLQEMEILYKKEKEEADLLLEQQRLDYESKLQALQKQVETRSLAAETTEEEEEEEEVPWTQHEFELAQWAFRKWKSHQFTSLRDLLWGNAVYLKEANAISVELKKKVQFQFVLLTDTLYSPLPPELLPTEMEKTHEDRPFPRTVVAVEVQDLKNGATHYWSLEKLKQRLDLMREMYDRAGEMASSAQDESETTVTGSDPFYDRFHWFKLVGSSPIFHGCVNERLADRTPSPTFSTADSDITELADEQQDEMEDFDDEAFVDDAGSDAGTEEGSDLFSDGHDPFYDRSPWFILVGRAFVYLSNLLYPVPLIHRVAIVSEKGEVRGFLRVAVQAIAADEEAPDYGSGIRQSGTAKISFDNEYFNQSDFSSVAMTRSGLSLEELRIVEGQGQSSEVITPPEEISRINDLDLKSSTLLDGKMVMEGFSEEIGNHLKLGSAFTFRVTVLQASGILPEYADIFCQFNFLHRHDEAFSTEPLKNNGRGSPLAFYHVQNIAVEITESFVDYIKTKPIVFEVFGHYQQHPLHLQGQELNSPPQPCRRFFPPPMPLSKPVPATKLNTMSKTSLGQSMSKYDLLVWFEISELEPTGEYIPAVVDHTAGLPCQGTFLLHQGIQRRITVTIIHEKGSELHWKDVRELVVGRIRNKPEVDEAAVDAILSLNIISAKYLKSSHNSSRTFYRFEAVWDSSLHNSLLLNRVTPYGEKIYMTLSAYLELDHCIQPAVITKDVCMVFYSRDAKISPPRSLRSLFGSGYSKSPDSNRVTGIYELSLCKMSDTGSPGMQRRRRKILDTSVAYVRGEENLAGWRPRGDSLILEHQWELEKLELLHEVEKTRHFLLLRERLGDSIPKSLSDSLSPSLSSGTLSTSTSISSQISTTTFESAITPSESSGYDSGDIESLVDREKELATKCLQLLTHTFNREFSQVHGSVSDCKLSDISPIGRDPSESSFSSATLTPSSTCPSLVDSRSNSLDQKTPEANSRASSPCPEFEQFQIVPAVETPYLARAGKNEFLNLVPDIEEIRPSSVVSKKGYLHFKEPLYSNWAKHFVVVRRPYVFIYNSDKDPVERGIINLSTAQVEYSEDQQAMVKTPNTFAVCTKHRGVLLQALNDKDMNDWLYAFNPLLAGTIRPGHLASEIIREDKSVSFSCQ

SEQ ID NO: 1420 - DNA, 6941 bp, Homo sapien
ggcggctgtcgcggggaccggaggcggaggctgcagcgggcactgcggcgccgaggcgcggcggcaggacgggaaccacgcgagctgcagccagctaggtcttgactccactaacggggacttctcatacggctttgaacttggaccttggtgcataagcaaatgtaactcagcgaattgtaatggaaagcatatggacaggtctacgccacatcacttaggtgctaagagatgccgtttgcaggcctcatctctgcttgagaatcgggggctccaggcactagaagagccggctgatcctgggctcctagcttgaataagccttcacttccagctgctctccccaacggctgtgtaaactactcgtttctcttaatgatgggtattggtaagaataccacatccaaatcaatggaggctggaagttcaacagaaggcaaatacgaagacgaggcaaagcacccagctttcttcactcttccggtggtgataaatggaggcgccacctccagcggtgagcaggacaatgaggacactgagctcatggcgatctacactacggaaaacggcattgcagaaaagagctctctcgctgagaccctggatagcactggcagtctggacccccagcgatcagacatgatttataccatagaagatgttcctccctggtacctgtgtatatttctggggctacagcactacctgacatgcttcagcggcacgatcgcagtgcccttcctgttggctgatgccatgtgtgtggggtacgaccagtgggccaccagccagctcattgggaccattttcttctgtgtgggaatcactactttgctacagacaacgtttggatgcaggttacccctgtttcaggccagtgcttttgcatttttggcccctgctcgagccatcctgtctttagataaatggaaatgtaacaccacagatgtttcagttgccaatggaacagcagagctgttgcacacagaacacatctggtatccccggatccgagagatccagggggccatcatcatgtcctcactgatagaagtagtcatcggcctcctcggcctgcctggggctctactgaagtacatcggtcccttgaccattacacccacggtggccctaattggcctctctggtttccaggcagcgggggagagagccgggaagcactggggcattgccatgctgacaatattcctagtattactgttttctcaatacgccagaaatgttaaatttcctctcccgatttataaatccaagaaaggatggactgcgtacaagttacagctgttcaaaatgttccctatcatcctggccatcctggtatcctggctgctctgcttcatcttcacggtgacagatgtcttccctcccgacagcacaaagtatggcttctatgctcgcacagatgccaggcaaggcgtgcttctggtagccccgtggtttaaggttccatacccatttcagtggggactgcccaccgtgtctgcggccggtgtcatcggcatgctcagtgccgtggtcgccagcatcatcgagtctattggtgactactacgcctgtgcacggctgtcctgtgccccacccccccccatccacgcaataaacaggggaattttcgtggaaggcctctcctgtgttcttgatggcatatttggtactgggaatggctctacttcatccagtcccaacattggagttttgggaattacaaaggtcggcagccgccgcgtgatacagtgcggagcagccctcatgctcgctctgggcatgatcgggaagttcagcgccctctttgcgtcccttccggatcctgtgctgggagccctgttctgcacgctctttggaatgatcacagctgttggcctctctaacctgcagttcattgatttaaattcttcccggaacctctttgtgcttggattttcgatcttctttgggctcgtccttccaagttacctcagacagaaccctctggtcacagggataacaggaatcgatcaagtgttgaacgtccttctcacaactgctatgtttgtagggggctgtgtggcttttatcctggataacaccatcccaggcactccagaggaaagaggaatccggaaatggaagaagggtgtgggcaaagggaacaaatcactcgacggcatggagtcgtacaatttgccatttggcatgaacattataaaaaaatacagatgcttcagctacttacccatcagcccaacctttgtgggctacacatggaaaggcctcaggaagagcgacaacagccggagttcagatgaagactcccaggccacgggatagcctttgctgtgccctgtggcctggccgcagtgaggcatgtatctgtagttccttgctgagtaacaagaagtaaaatacatgtttgtatatctacatttacattctgcgccccagagctaagacagactgcgaatcacttttctgctgtgagggtgatggtgcctgatgcggtgtctcgcctatctccttatttaagcccttaactccttgccctttgagagtgtccattgctggccatggtcactaaatttgaagttccagtcctccctttggagtggacatttaaaatctgcagccattccttgcttcagttcccttccaccacccagggctggctttcctataagccacctccagggtccaggggctttctctctctctccgaagcccctggacctgtttccttgtcatttgaccctcgtctgtgcccgcggagacctcctctgaccaaggggcactagtatgccttgcgctatcatgactgactggcccagtatgattctgttgtcgctgatctcccggaggaggaggctgttgacctgaaaacagtggcgtggctcccctgtgcccagatctggccatgggtgaggcctgcacagatgttgaatgaacatctgtttggggcattggagggaaaaggaaaggaccctgaagccaatatctgattctcggctgcaccttctcttggccaccctggccctgaccgggccagcacgtgcacactggcctcttttcatttcactagtggccgagacaccctctctggcatttatcactgttggccggtgtgatgagtatagagtgccacccaaggcaccagtcacacaagctgatgggcgtcttggctctgccgtcatgtggatgttattgtcgcgcgcgtctataattacaaggttttattcctatttaatgttattgactatagcagattttggaaatcagtgttttccatgtgaccctctttccttgcatccctattccttgtcccccacccactcttccccccatcaagaaaagaaccagcatttgtaaagctgtggacaccatcagggaagcttgttgtaacggcttttgaaggccagtaaccattgttgtggttgtgttttgtattgcttgataccatgaaagtgtaaatactgtaatgcctaatctatttatcaaaactgactactggaccggagcccagaaaccatgggtcaagttacacgtgaatttgttttgtgaagaagggaagctggggcaggtaacacgcagagccgccacgtggaacggtctgtccgccggtctgtcccgcttgccgggcttctgttgcaagtcttggcttaaggagacttcctgtgggttgccatgtcgcacgtccgttagatcttgattttacaggtgagggtggttgccaaaggtgataagaaaagcagccaacaggctccctctcacttaagagagttctaattaataacactaaattcttcctgagaaatgactcctcttggtttggtttgaagtttttcagtgaaggaaaaggcctgagataggaagcagtgccctcgcttcatgaggtggcacatcttcggtggccgttggcctggtcgagctttggtcagctgcgtgggtgcctgtctcctgtctccagcggcagggcatggttcttggcagcctggtgtccacacggtgcattcctgtccccctcggccccaggctggctcagctctccagtgctgcggcgctgtctttgcagcattgccatgtcaccgtagcccccttcactcttggaagtttggggcttcaaggtttattctggcaagaacacctcggagccactgcattgttttgccaaaaacttactgcagattaagtaaagaacttagatgctaaattacatctaattttgtatgtttttttaaatgtgtctttgatgcatactttagaagcacactggctcgcggtttccatccctcttgccttgggacactcttgaggctggcagccctcctgcaatgagttgctctcagttccttctgtttggattttgctcaacatctccagtttctctgctctgaaaaatggggaaaactgctaaacatcccagagatttgcaatcttctagctctccaggtgagcagaaagaccaaatatccaaataaaagcctgaaagccattggtgatccaggggcaccttctcttcagcttgactgggcgtcttccgctgcataacactcaaggtgtctgctctagtcatccagaaacccactcccttctgaagcccctccttgggccgggttgtatcaggaggattcaaccccgctaacatgtggggtgccctctgtaggccttcacacagggaaggaagccctaccctttcaactcctgttggagtgagagtttcctgttctgattccactgtggccaacccaataattctgtccgaggaggggtaagggaataggaggtggggagcaaagagggcagcctgactagatgcccctgctgaatctggtactttctgcacagccttgagtgattggagtcccctaatgactaataaacttgaacatgtaacacacacacacacacacacacacaccattttaggaagtggttctcctactggaaaatatgctacagaatgaaagtttgtaattgaaagaaaaagaatgtattcatctgcttcttgggtttaagcacacacctgaaggggagatattgggggacacggtggccactcgcggtctgtgtcatgacacttcccattcacatcattggcctgcgttgctggggctttgaaccaccaccccgtactttgttttgcctgtagagtgttgtaaaatattttggatgtgaatgtccttgcaggccggttagtctccagtttccacagagaccacctacccaccaccttcccaggtcacctgcctggtccctgaaagaaagcatttgtgtgggcaatcccaacatgaaatgtagacagcgtgaatacggacaggaggtgatgccatattcacagtgggggatggagggcccccacccctgcttcacagaataatgggaagtgactctagtctttgtaagcaattttcattctcattaggaagttaaatgtagattcacagatacatttactttcagaatcctcaagaggatttcaaatgctaacttttagtttcttgggattgatcaaggcaagagaagtggctttaaccatgccagccagaatgaagcatcatgggtcctgatggtttcccgttttcatggtaacaaattcgcacagaggttttgctttatgctgtagaataccgactttcatgatgacaacttggtttatgcatgaatattgcagtatttccatatagcaaaataacatttctacccaggataatagtcacagttttccagggagggaatgatataattttcatgacaatgtcatgtgatgatagaatttctccattgatgaatctctagtatgtgtgtatactttatttacccatacgtatattttatgaccatgagctaagttgttatttctttcattcatatccctgctgaaatattggtactagcaacttaaagttggcaagtctcatcttcagtaatacggatgccatgggagtggccaggccagattgaaggtgaatatggagcagtagcagaagcctcattccagaacccatctggccagagaagcagcagcatcctgggggatggccgtgcatggggtgtacactcgctataggcataggcccggcatggctgtcgctggacgccagctgtgcacacccagccacacctgctgcacgccgcgttagtgtgcggctccgggcctgagcattcgcaaagctcgcttctccagggagcctcctcttggctttggaaaagagcccagggacttaacgtgctgcctgttgtactctgtcccctcatgactttttagacacagggactaggacatcgaccaccctctgcccctcctgcagtcagaacccgagtagtgcaagaacggccacccggttttgccagcgttcagcgtctgcccatggacccataaggcacattagcgttgggggtctcttttcagcagcctcacagacattcccgtcctttctggttggtgttgactgtgtttcagcatcactctaccctcccatgtccttagcattgctgtgcgtgtttccaggcacttaggacacccttccccacgttgccatcttactgacagttcaaatgactctccttttttgttcgttagtaacaatcttcatttgacaccttaatacatttctgactgttcttaaaacagtggggatgcctatattttccttgagtttttgtgactgactttggctatatatacctttctggggttttgtttgttttttatttttattttgattaccgagggtatttggggtggggttgttttttgagatgtgtaattcttttatggagtttttaaaaagaattttcatattgtttttctaacatggcttcattaaacgtttaagtattttaaaaatatgtaatatttggaccagatgttgtgaataatagtagagataaagctattttattctgtatttttaaaactgttccgtacaaataaaagctctcctggacac

SEQ ID NO: 1421 - DNA, 1350 bp, Homo sapien
atgcgtgagtgcatctccatccacgttggccaggctggtgtccagattggcaatgcctgctgggagctctactgcctggaacacggcatccagcccgatggccagatgccaagtgacaagaccattgggggaggagatgattccttcaacaccttcttcagtgaaacgggtgctggcaagcatgtgccccgggcagtgtttgtagacttggaacccacagtcattgatgaagttcgcactggcacttaccgccagctcttccaccctgagcaactcatcacaggcaaggaagatgctgccaataactatgcccgagggcactacaccattggcaaggagatcattgacctcgtgttggaccgaattcgcaagctggctgaccagtgcaccggtcttcagggcttcttggttttccacagctttggtgggggaactggttctgggttcacctcgctgctcatggaacgtctctcagttgattatggcaagaagtccaagctggagttctccatttacccggcgccccaggtttccacagctgtagttgagccctacaactccatcctcaccacccacaccaccctggagcactctgattgtgccttcatggtagacaatgaggccatctatgacatctgtcgtagaaacctcgatatcgagcgcccaacctacactaaccttaaccgccttattagccagattgtgtcctccatcactgcttccctgagatttgatggagccctgaatgttgacctgacagaattccagaccaacctggtgccctacccccgcatccacttccctctggccacatatgcccctgtcatctctgctgagaaagcctaccatgaacagcttactgtagcagagatcaccaatgcttgctttgagccagccaaccagatggtgaaatgtgaccctcgccatggtaaatacatggcttgctgcctgttataccgtggtgacgtggttcccaaagatgtcaatgctgccattgccaccatcaaaaccaagcgtaccatccagtttgtggattggtgccccactggcttcaaggttggcattaattaccagcctcccactgtggtgcctggcggagacctggccaaggtacagagagctgtgtgcatgctgagcaataccacagctgttgccgaggcctgggctcgcctggaccacaagtttgacctgatgtatgccaagcgtgcctttgttcactggtacgtgggtgaggggatggaggaaggcgagttttcagaggcccgtgaggacatggctgcccttgagaaggattatgaggaggttggagcagatagtgctgacggagaggatgagggtgaagagtattaa

SEQ ID NO: 1422 - protein, 449 aa, Homo sapien
MRECISIHVGQAGVQIGNACWELYCLEHGIQPDGQMPSDKTIGGGDDSFNTFFSETGAGKHVPRAVFVDLEPTVIDEVRTGTYRQLFHPEQLITGKEDAANNYARGHYTIGKEIIDLVLDRIRKLADQCTGLQGFLVFHSFGGGTGSGFTSLLMERLSVDYGKKSKLEFSIYPAPQVSTAVVEPYNSILTTHTTLEHSDCAFMVDNEAIYDICRRNLDIERPTYTNLNRLISQIVSSITASLRFDGALNVDLTEFQTNLVPYPRIHFPLATYAPVISAEKAYHEQLTVAEITNACFEPANQMVKCDPRHGKYMACCLLYRGDVVPKDVNAAIATIKTKRTIQFVDWCPTGFKVGINYQPPTVVPGGDLAKVQRAVCMLSNTTAVAEAWARLDHKFDLMYAKRAFVHWYVGEGMEEGEFSEAREDMAALEKDYEEVGADSADGEDEGEEY

SEQ ID NO: 1423 - DNA, 3246 bp, Homo sapien
  Unsure 2530: Unknown base
agtgtggttttagtttttcctaagaagtggcgtggtttggggctttatatccgggaggagcatatgtacgcaaatcctggggcgtttgcaaacccggatccggggcgtctggccccatgcccggccgggcgtttgagggctactgccacgcagcgtttctggagcctgccggctggtgccctggtggcctttatctctgtccccctttgtcctctttatctcaggctctccaggaggccggggggcccactccgcctatcgctcccctcggctacgctgccactccaatgccccgcaggtcgcgagctgctgttctttcgaaggcgccggagaaccaggggcgtcccgcgccacctctgactcggagcagcgccgagcactgacgctcccgcccttgggcaaggacgccagtgcgcccgcgcgcgtccctctgcgcggcagcccgtcgcgggccctcaaggggaagcccaggccaggatggccccgggtcgcgcggtggccgggctcctgttgctggcggccgccggcctcggaggagtggcggaggggccagggctagccttcagcgaggatgtgctgagcgtgttcggcgcgaatctgagcctgtcggcggcgcagctccagcacttgctggagcagatgggagccgcctcccgcgtgggcgtcccggagcctggccagctgcacttcaaccagtgtttaactgctgaagagatcttttcccttcatggcttttcaaatgctacccaaataaccagctccaaattctctgtcatctgtccagcagtcttacagcaattgaactttcacccatgtgaggatcggcccaagcacaaaacaagaccaagtcattcagaagtttggggatatggattcctgtcagtgacgattattaatctggcatctctcctcggattgattttgactccactgataaagaaatcttatttcccaaagattttgaccttttttgtggggctggctattgggactcttttttcaaatgcaattttccaacttattccagaggcatttggatttgatcccaaagtcgacagttatgttgagaaggcagttgctgtgtttggtggattttacctacttttcttttttgaaagaatgctaaagatgttattaaagacatatggtcagaatggtcatacccactttggaaatgataactttggtcctcaagaaaaaactcatcaacctaaagcattacctgccatcaatggtgtgacatgctatgcaaatcctgctgtcacagaagctaatggacatatccattttgataatgtcagtgtggtatctctacaggatggaaaaaaagagccaagttcatgtacctgtttgaaggggcccaaactgtcagaaatagggacgattgcctggatgataacgctctgcgatgccctccacaatttcatcgatggcctggcgattggggcttcctgcaccttgtctctccttcagggactcagtacttccatagcaatcctatgtgaggagtttccccacgagttaggagactttgtgatcctactcaatgcagggatgagcactcgacaagccttgctattcaacttcctttctgcatgttcctgctatgttgggctagcttttggcattttggtgggcaacaatttcgctccaaatattatatttgcacttgctggaggcatgttcctctatatttctctggcagatatgtttccagagatgaatgatatgctgagagaaaaggtaactggaagaaaaaccgatttcaccttcttcatgattcagaatgctggaatgttaactggattcacagccattctactcattaccttgtatgcaggagaaatcgaattggagtaatagaaaatggaagatggtgttgttaataaaggcatttaatagataaaaacatctccaaaaaggattttgaagctgatcctatttagttaaaaagataattttgctttcaactgtaggtccagaaaactaattattggcatcagtctgtgaaatagtccattatttgttgttaaaaatgcttcaaaaggttttcagtgtcagtctgagatgcctggtatataggagcctttgggaaatacttatttttcagtattccatgcatattagatatcaccatgaagcaagagacatgcattctataatcatgtagacactcagactcaggggaaaatacaagttatatcctgaaagcctttaaaactctatggtaggatcaaagattcaaatggtttcagagaggttttatttcaattaatttgttctagtgctttcaagagcaagtacatcaaaatgtagaaggtaaaatgtatgcaacactaatataaattattccaagtctttaaggagccaaagaaaaaaaagatttctcacagctttttgttctgttttgtatttcaattaggaacttgcagtattattttgaaaaccattctaaaataataggagttaggaaataaataaagttttgctagccctgctaagttcaggcttagaggcttatcgctaagtntaaacttcaccagattccacgaaaagctggatagctttttttctgacttatgttgtggttgcacccctcacaaatggcagaacagtatgtaaagctggtaacacctcggtttcagtgcaccatgtgtttgctttgtgaaggtgaagaatatgttggtttagagaaagaaattggatgtaattttatgcaatttacttttaaagacaaacataactatttagcagagaatattttaataaatgcaaaacaacagctggactgctgtacatcaaggacagattaactggaaaacatatgttccttatgtgtgattgagagccattcagaaaagacttcctttgtgttcagcctatacttttccatatggtataccttgaaaaaaattagcacaccatggttatttttctaccttttataaaagacagagcctgtttactcatttagaagatagagaaaattggtctaaaattgaacatcctagattcacactcccaagtcacttaaggtgatttgatggtgaggaaaatgattgacaaagcccaacaatgatctcaggaattacattttccaacagaccaaaaaatgttttcatgtagcagcaatgcagatttggtgaatatttaatatatattttagtatgtatttcactttatgactgacaattaaaaaatattgtttggccaaatagtaaacacccttttgaaaccatgaaaaaa

SEQ ID NO: 1424 - protein, 460 aa, Homo sapien
MAPGRAVAGLLLLAAAGLGGVAEGPGLAFSEDVLSVFGANLSLSAAQLQHLLEQMGAASRVGVPEPGQLHFNQCLTAEEIFSLHGFSNATQITSSKFSVICPAVLQQLNFHPCEDRPKHKTRPSHSEVWGYGFLSVTIINLASLLGLILTPLIKKSYFPKILTFFVGLAIGTLFSNAIFQLIPEAFGFDPKVDSYVEKAVAVFGGFYLLFFFERMLKMLLKTYGQNGHTHFGNDNFGPQEKTHQPKALPAINGVTCYANPAVTEANGHIHFDNVSVVSLQDGKKEPSSCTCLKGPKLSEIGTIAWMITLCDALHNFIDGLAIGASCTLSLLQGLSTSIAILCEEFPHELGDFVILLNAGMSTRQALLFNFLSACSCYVGLAFGILVGNNFAPNIIFALAGGMFLYISLADMFPEMNDMLREKVTGRKTDFTFFMIQNAGMLTGFTAILLITLYAGEIELE

SEQ ID NO: 1425 - DNA, 4398 bp, Homo sapien
ggccaaaggtcaagatacttctctgggaaatgttgctgctgatgctgctttacaaagtcatacaatgagtgtttggtttaagaaagattttcatacttaaaagattttcatcttggaaatacatcaagtgaaaattaaattcttttgggaaacattttccttctgatatattatacttgtaatgggcgacatggcaaacaactcagttgcttacagtggtgtgaaaaactctttgaaggaagctaatcatgatggagactttggaattacgctcgcagagctgcgggctctcatggagctcaggtccacagatgcattacgaaaaatacaggaaagctatggagatgtctatggaatttgcaccaaattgaaaacatctcccaatgaaggtttaagtggaaaccctgcagatttagaaagaagagaagcagtgtttggaaagaattttatacctcctaaaaagccaaaaacctttcttcaattagtatgggaagcattacaagatgtcactttaattatattagaaattgcagccatagtatcattgggcctttctttttatcagcctccagaaggggataatgcactttgtggagaagtttctgttggggaggaagaaggtgaaggtgaaactgggtggattgaaggagctgcaatcctcttgtctgtagtgtgtgtggtgttagtaacagctttcaatgactggagtaaggagaaacagtttagaggtttgcagagccgaattgaacaagaacagaagttcactgtcatcaggggtggtcaggtcattcagatacctgtagctgacattactgttggagatattgctcaagtgaaatatggtgatcttcttccagctgacggcatacttattcaaggcaacgatcttaaaattgatgaaagctcattgactggtgaatcagatcatgttaaaaagtctttagataaggatcccttacttctatcaggtactcatgtaagggaaggctctggaagaatggtagttacagctgtaggtgtaaattctcaaactggaattatctttaccttacttggagctggaggtgaagaggaagagaagaaagatgagaagaaaaaggaaaagaaaaataagaaacaagatggagctattgagaatcgcaacaaagcaaaagcccaggatggtgcagccatggaaatgcagccattgaagagtgaagaaggtggagatggtgatgaaaaagataaaaagaaagcaaatttgccaaaaaaggaaaaatctgttttacaagggaaacttacaaaactggctgttcagattggcaaagcaggtctgttgatgtctgccatcacagttatcattctagtattatattttgtcattgacaccttctgggttcagaaaagaccatggcttgctgagtgcacaccaatttatatacaatactttgtgaagttcttcattattggagttacagttttagtggtcgcagtgccagaaggtcttccacttgcagtcacgatctcactggcttattcagtcaaaaaaatgatgaaagataataacttagtaaggcatctggatgcttgtgaaaccatgggaaatgctacagctatttgttcagataaaacaggaactttgacaatgaacagaatgacagtcgttcaagcttacataaatgaaaaacattataaaaaggttcctgaaccagaagctattccaccaaatattttgtcctatcttgtaacaggaatttctgtgaattgtgcttatacatcaaaaatattgccaccagagaaagagggtggattacctcgtcacgttggtaataaaactgaatgtgccttgttgggacttcttttggatttaaaacgggattatcaggatgttagaaatgaaataccagaagaagcactgtacaaagtctacaccttcaattctgttaggaagtccatgagtactgtcctgaaaaattcagatggaagttatcgaatattcagcaagggtgcatctgagataattctgaaaaagtgtttcaaaatcttgagtgctaatggtgaggcaaaagtattcagaccaagggaccgtgatgatattgtaaaaactgtgattgaaccgatggcatcagaaggcttgagaaccatatgtcttgcattcagagattttccagcaggagaaccagaaccagagtgggataatgaaaatgatattgtcaccggccttacatgcattgctgttgtggggattgaagatcctgtgagacctgaggtgccagatgcaattaaaaagtgtcagagggctggaattactgtgcggatggtcactggtgataatattaatactgctcgggccattgctaccaaatgtggtattttacatcctggggaagattttctgtgcctagaaggtaaagattttaacagaagaatacgaaatgaaaaaggagagattgagcaagagaggatagacaagatttggccaaaacttcgagtacttgcaagatcatctcctactgataagcatacactggttaaaggtataattgacagcactgtctcagaccaacgccaggttgtagctgtaactggtgatggtacaaatgatggcccagcactaaagaaagcagatgttggatttgcaatgggtattgctggaactgatgtagctaaagaagcatccgatattattctcacagatgacaactttacaagcattgttaaagcagttatgtggggacgaaatgtctatgacagcatctcaaaattccttcagttccaacttactgttaatgtagtagcagtgattgttgcttttacgggcgcctgcattactcaagactcaccgcttaaggctgtgcagatgctgtgggtaaacctcataatggatacactcgcttccctggctctggcaacggaaccacccactgagtctctcttgcttcggaaaccttatggtagaaataagcctctcatctcacgtacaatgatgaagaatattttgggtcatgcattctatcaacttgtagtagtctttacactcttatttgctggagaaaagttttttgacattgatagtggaagaaatgctcctttgcatgctcctccttcagaacattatactattgtttttaatacctttgtgctgatgcaacttttcaacgaaataaatgcccggaaaattcatggtgaaagaaatgtattcgaaggaatctttaacaatgccatcttctgcacaattgttttaggcacttttgtggtacagataataattgtgcagtttggtggaaaacctttcagttgttcagaactttcaatagaacagtggctatggtcaatattcctaggaatgggaacattactctggggccagcttatttcaacaattccaactagccgtttaaaattcctcaaagaagctggtcatggaacacaaaaggaagaaatacctgaggaggaattagcagaggatgttgaagagattgatcacgctgaaagggagttgcggcgtggccaaatcttgtggtttagaggtctgaacagaatccaaacacagattcgagtggtgaatgcatttcgtagttctttatatgaagggttagaaaaaccggaatcaagaagttcgattcacaactttatgacacatcctgagtttaggatagaagattcagagcctcatatcccccttattgatgacactgatgccgaagatgatgctcctacaaaacgtaactccagtcctccaccctctcccaacaaaaataacaatgctgttgacagtggaattcaccttacaatagaaatgaacaagtctgctacctcttcatccccaggaagcccactacatagtttggaaacatcactctgattgtaagctgaatgttaacacactagctgcattgtaaagaaacaaattgaaactgggtcttttcacatattgtgatggacaagctagtattcttgtctttggacttcaacagaagacacacttgtacgaatgtagatttatttttttaaaaaaaaaaaagcaaagctttctgccagactgagggtgctttttggggggtgggagaaatgaactgacagataaacagtaactcagcgtaagtgacctgtggatcatcagtagtacccaagcatggtcctgaacagtgtattagcagagctttagtttatctcagtcctggatgggagagagagggaggagtaaaactgggcaagacaaagagccctggatcgttgaattgatagtttaatttctgctgttggctgttaataatttggattatttatgtttataaatgatacagatctgtttacaaggtttgtagatactttttttgttcctgttcatagatgggaagcttccttataactgatgcagagaaaaattagtccttcaaatactgctgtattttcagg

SEQ ID NO: 1426 - protein, 1220 aa, Homo sapien
MGDMANNSVAYSGVKNSLKEANHDGDFGITLAELRALMELRSTDALRKIQESYGDVYGICTKLKTSPNEGLSGNPADLERREAVFGKNFIPPKKPKTFLQLVWEALQDVTLIILEIAAIVSLGLSFYQPPEGDNALCGEVSVGEEEGEGETGWIEGAAILLSVVCVVLVTAFNDWSKEKQFRGLQSRIEQEQKFTVIRGGQVIQIPVADITVGDIAQVKYGDLLPADGILIQGNDLKIDESSLTGESDHVKKSLDKDPLLLSGTHVREGSGRMVVTAVGVNSQTGIIFTLLGAGGEEEEKKDEKKKEKKNKKQDGAIENRNKAKAQDGAAMEMQPLKSEEGGDGDEKDKKKANLPKKEKSVLQGKLTKLAVQIGKAGLLMSAITVIILVLYFVIDTFWVQKRPWLAECTPIYIQYFVKFFIIGVTVLVVAVPEGLPLAVTISLAYSVKKMMKDNNLVRHLDACETMGNATAICSDKTGTLTMNRMTVVQAYINEKHYKKVPEPEAIPPNILSYLVTGISVNCAYTSKILPPEKEGGLPRHVGNKTECALLGLLLDLKRDYQDVRNEIPEEALYKVYTFNSVRKSMSTVLKNSDGSYRIFSKGASEIILKKCFKILSANGEAKVFRPRDRDDIVKTVIEPMASEGLRTICLAFRDFPAGEPEPEWDNENDIVTGLTCIAVVGIEDPVRPEVPDAIKKCQRAGITVRMVTGDNINTARAIATKCGILHPGEDFLCLEGKDFNRRIRNEKGEIEQERIDKIWPKLRVLARSSPTDKHTLVKGIIDSTVSDQRQVVAVTGDGTNDGPALKKADVGFAMGIAGTDVAKEASDIILTDDNFTSIVKAVMWGRNVYDSISKFLQFQLTVNVVAVIVAFTGACITQDSPLKAVQMLWVNLIMDTLASLALATEPPTESLLLRKPYGRNKPLISRTMMKNILGHAFYQLVVVFTLLFAGEKFFDIDSGRNAPLHAPPSEHYTIVFNTFVLMQLFNEINARKIHGERNVFEGIFNNAIFCTIVLGTFVVQIIIVQFGGKPFSCSELSIEQWLWSIFLGMGTLLWGQLISTIPTSRLKFLKEAGHGTQKEEIPEEELAEDVEEIDHAERELRRGQILWFRGLNRIQTQIRVVNAFRSSLYEGLEKPESRSSIHNFMTHPEFRIEDSEPHIPLIDDTDAEDDAPTKRNSSPPPSPNKNNNAVDSGIHLTIEMNKSATSSSPGSPLHSLETSL

SEQ ID NO: 1427 - DNA, 3089 bp, Homo sapien
gggggccctccgcaggttcagtcctcgcgtcggccgccccgcgctcagtcgcgcgcaccttctctcgcggccgggggaccgcagcgcggggctagcccggagacccggccaccggcctggggcgccttcacgccgtctcggagcggataatgcggtgagcaggcaccacgccggcagactcggctggatctgcgcacagcggcagggattgcgtgcgcccgcgggaggcccggggcagcggctgggatcctcagcggcggccggtttgtcctggttgtggtcaagactggatgatgtaactggctctctaggaagcctcacttggccgtaacctcaggaaggttctctttgaccccatctcatttcgaagccacttctgaagccacttgagaaaaatgatgtgacagttcctatcaaaaaggattcagaaacatataccatctgtgaagaaagtggccctttctcccgcttgcaaaatagacattctcaaattccaaaatgccagccaagaccccaatttacctgaaagcagccaataacaagaaaggaaagaaatttaaactgagggacattctgtctcctgatatgatcagtcccccgcttggagactttcgccacaccatccacattggcaaagagggccagcacgatgtctttggagatatttcctttcttcaagggaactacgagcttttacctggaaaccaggagaaagcacacctgggccagttccctgggcataatgagttcttccgggccaacagcacctcggactctgtgttcacagaaacgccctccccggtgctcaaaaatgccatctccctcccgaccattggaggatcccaagctctcatgttgcccttattgtcaccagtgacatttaattccaaacaggagtccttcgggccagcaaagctgcccaggcttagctgcgagcccgtcatggaggaaaaagctcaggagaaaagcagtctgttggagaatgggacagtccaccagggagacacctcgtggggctccagcggttctgcatctcagtccagccaaggcagagacagccactcctccagcctgtccgaacagtaccccgactggccagccgaggacatgtttgaccatcccaccccatgcgagctcatcaagggaaagactaagtcagaggagtccctctctgaccttacaggttccctcctctccctgcagcttgatcttgggccctcacttttggatgaggtgctgaatgtaatggataaaaataagtaacaagatgccaacttttttcctttggggtaaaaggtacaaaaacaaactaaccacagttgaagagaagggcttccggagctgtatttgcagttttgtgttgggttttctaaaataatattcttacaaagtatttttttacctgttatgccctgtttgcaaaaacaatttagaaaaaaacaacaaagcaaaacctatcttggcaaaaaaaggaagtgagtcagagcccattttcaggaggcattggtgatgttcggctcacatattgtttgcagacacacaagaaatctggcttggccaggattggcactagctatgaagggctgagcgagtcacattaaggaacttcacggaactttatagcactccgacattttctgagcaagaggaagtcaaaatttatttaacacctaagcctttttgtagactcttttctatatattgcttaggctcaccatagtgaattctccagtgttaaaacttttctgttttcacatttgaactttatgggttttggggattttcttgtagttcttatatatccctatatattatatctatattgcaaaattttgactgtcagctacatgttggtaagacacaggcaaagtattactgtaactaagttatttttaaagttaaaatatatttttacgtgcctttggctttttattgcagagtctacattttatagattctacatcagatgttgtcacttatttccattgggattccattgtaagctgtgtatgtgcgtgtttggaaaagtgtattcatacttagtttttttttcttcatctgttatcatacttttaacagcaaccaataacggattgtaaagtgtaaaggcacaggttactcatgatgcttctgcagagactgtgggctacaccacatatgttatttggaaatataggtattttagtacagtacatacttgcattacataggtacttcaagcaacacaataaaaagtaaatgataaagtgaacttgcttgtttatagtaataaacaagaccataagagaataagtatagctagagaaattgcttctctgaaatgtacatgagcccttaaggtaagagatgatttccatctactctcattttgattacttccttatggtttgagaggctagaaactgagcctctctacttttggaaaaatgaacatgtgaggtcagatttttttttttttttaagtcagcactgatgccaccctctcagtggtcatttctgagcatcttcctgacttgaacaccttctacagcaaactcttgcaagtccagtttcatccctgtaaggcaaatgtcttttcacgcagaaagtgccatatagacgagataaaggcagctaaaacgagggcagtagagagcacttacccgaccccaaggtgccagagatgccctgaggatggtggttaaggaaacaggagcaggaaatgtacacacagattcctgtccctttgccaactactccttccccatcaaagaaaaacacttgcacacagtaactaccagctccttctctcaaacttgtatttctcctggaaatgtatctcagaaatgacctcctctcccaaccacttcaacgattctttctttgggtttggggttcttgcagttctatcatctaaaataacctttggactgcaggtaaaatgcaattaggacaactaaccaagtagacgaaacaagttcccctaggcaggggtgtccaatattttagcttccctggaccgcattggaagaattttcttgggccacatgtaaaacacactaacactaaccatagttgatgagcttaaaaaaataaaaatagaaaattgc

SEQ ID NO: 1428 - protein, 225 aa, Homo sapien [sequence omitted]

SEQ ID NO: 1429 - DNA, 1551 bp, Homo sapien
ggcgcccaagccgccgccgccagatcggtgccgattcctgccctgccccgaccgccagcgcgaccatgtcccatcactgggggtacggcaaacacaacggacctgagcactggcataaggacttccccattgccaagggagagcgccagtcccctgttgacatcgacactcatacagccaagtatgacccttccctgaagcccctgtctgtttcctatgatcaagcaacttccctgaggatcctcaacaatggtcatgctttcaacgtggagtttgatgactctcaggacaaagcagtgctcaagggaggacccctggatggcacttacagattgattcagtttcactttcactggggttcacttgatggacaaggttcagagcatactgtggataaaaagaaatatgctgcagaacttcacttggttcactggaacaccaaatatggggattttgggaaagctgtgcagcaacctgatggactggccgttctaggtatttttttgaaggttggcagcgctaaaccgggccttcagaaagttgttgatgtgctggattccattaaaacaaagggcaagagtgctgacttcactaacttcgatcctcgtggcctccttcctgaatccctggattactggacctacccaggctcactgaccacccctcctcttctggaatgtgtgacctggattgtgctcaaggaacccatcagcgtcagcagcgagcaggtgttgaaattccgtaaacttaacttcaatggggagggtgaacccgaagaactgatggtggacaactggcgcccagctcagccactgaagaacaggcaaatcaaagcttccttcaaataagatggtcccatagtctgtatccaaataatgaatcttcgggtgtttccctttagctaagcacagatctaccttggtgatttggaccctggttgctttgtgtctagttttctagacccttcatctcttacttgatagacttactaataaaatgtgaagactagaccaattgtcatgcttgacacaactgctgtggctggttggtgctttgtttatggtagtagtttttctgtaacacagaatataggataagaaataagaataaagtaccttgactttgttcacagcatgtagggtgatgagcactcacaattgttgactaaaatgctgcttttaaaacataggaaagtagaatggttgagtgcaaatccatagcacaagataaattgagctagttaaggcaaatcaggtaaaatagtcatgattctatgtaatgtaaaccagaaaaaataaatgttcatgatttcaagatgttatattaaagaaaaactttaaaaattattatatatttatagcaaagttatcttaaatatgaattctgttgtaatttaatgacttttgaattacagagatataaatgaagtattatctgtaaaaattgttataattagagttgtgatacagagtatatttccattcagacaatatatcataacttaataaatattgtattttagatatattctctaataaaattcagaattct

SEQ ID NO: 1430 - protein, 260 aa, Homo sapien
MSHHWGYGKHNGPEHWHKDFPIAKGERQSPVDIDTHTAKYDPSLKPLSVSYDQATSLRILNNGHAFNVEFDDSQDKAVLKGGPLDGTYRLIQFHFHWGSLDGQGSEHTVDKKKYAAELHLVHWNTKYGDFGKAVQQPDGLAVLGIFLKVGSAKPGLQKVVDVLDSIKTKGKSADFTNFDPRGLLPESLDYWTYPGSLTTPPLLECVTWIVLKEPISVSSEQVLKFRKLNFNGEGEPEELMVDNWRPAQPLKNRQIKASFK

SEQ ID NO: 1431 - DNA, 1378 bp, Homo sapien
agcgtcggactaccgttggtttccgcaacttcctggattatcctcgccaaggactttgcaatatatttttccgccttttctggaaggatttcgctgcttcccgaagtcttggacgagcgctctagctctgtgggaaggttttgggctctctggctcggattttgcaatttctccctggggactgccgtggagccgcatccactgtggattataattgcaacatgacgctggaagagctcgtggcgtgcgacaacgcggcgcagaagatgcagacggtgaccgccgcggtggaggagcttttggtggccgctcagcgccaggatcgcctcacagtgggggtgtacgagtcggccaagttgatgaatgtggacccagacagcgtggtcctctgcctcttggccattgacgaggaggaggaggatgacatcgccctgcaaatccacttcacgctcatccagtccttctgctgtgacaacgacatcaacatcgtgcgggtgtcgggcatgcagcgcctggcgcagctcctgggagagccggccgagacccagggcaccaccgaggcccgagacctgcattgtctcctggtcacgaaccctcacacggacgcctggaagagccacggcttggtggaggtggccagctactgcgaagaaagccggggcaacaaccagtgggtcccctacatctctcttcaggaacgctgaggcccttcccagcagcagaatctgttgagttgctgccacaaacaaaaaatacaataaatatttgaaccccctcccccccagcacaacccccccaaaacaacccaacccacgaggaccatcgggggcagagtcgttggagactgaagaggaagaggaggaggagaaggggagtgagcggtccgcccccagggacgctctccaggagctggcggccgccgatcagatggagaaggggggacccaggccagcaggagacaggacccccgaagctgaggccttgggatggagcagaagccggagtggcggggcacgctgccgccttccccatcacggagggtccagactgtccactcgggggtggagtgagactgactgcaagccccaccctccttgagactggagctggcgtctgcatacgagagacttggttgaacttggttggtccttgtctgcaccctcgacaagaccacactttgggacttgggagctggggctgaagttgctctgtacccatgaactcccagtttgcgaattatagagacaatctattttgttacttgcacttgttattcgaaccactgagagcgagatgggaagcatagatatctatatttttatttctactatgagggccttgtaataaatttctaaagcctctgaaaaaaaaaaaaaaa

SEQ ID NO: 1432 - protein, 160 aa, Homo sapien
MTLEELVACDNAAQKMQTVTAAVEELLVAAQRQDRLTVGVYESAKLMNVDPDSVVLCLLAIDEEEEDDIALQIHFTLIQSFCCDNDINIVRVSGMQRLAQLLGEPAETQGTTEARDLHCLLVTNPHTDAWKSHGLVEVASYCEESRGNNQWVPYISLQER

SEQ ID NO: 1433 - DNA, 1343 bp, Homo sapien
gctctttccaacgctgtaaaaaggacagaggctgttccctatggcagaaggcaaccacagaaaaaagccacttaaggtgttggaatccctgggcaaagatttcctcactggtgttttggataacttggtggaacaaaatgtactgaactggaaggaagaggaaaaaaagaaatattacgatgctaaaactgaagacaaagttcgggtcatggcagactctatgcaagagaagcaacgtatggcaggacaaatgcttcttcaaaccttttttaacatagaccaaatatcccccaataaaaaaggtgataaattgggtcacagaggcagaaatcacaatttatgttctgcaatatcctgcagctcatccgaatatggaggctggaccacctgagtcaggagaatctacagatgccctcaagctttgtcctcatgaagaattcctgagactatgtaaagaaagagctgaagagatctatccaataaaggagagaaacaaccgcacacgcctggctctcatcatatgcaatacagagtttgaccatctgcctccgaggaatggagctgactttgacatcacagggatgaaggagctacttgagggtctggactatagtgtagatgtagaagagaatctgacagccagggatatggagtcagcgctgagggcatttgctaccagaccagagcacaagtcctctgacagcacattcttggtactcatgtctcatggcatcctggagggaatctgcggaactgtgcatgatgagaaaaaaccagatgtgctgctttatgacaccatcttccagatattcaacaaccgcaactgcctcagtctgaaggacaaacccaaggtcatcattgtccaggcctgcagaggtgcaaaccgtggggaactgtgggtcagagactctccagcatccttggaagtggcctcttcacagtcatctgagaacctggaggaagatgctgtttacaagacccacgtggagaaggacttcattgctttctgctcttcaacgccacacaacgtgtcctggagagacagcacaatgggctctatcttcatcacacaactcatcacatgcttccagaaatattcttggtgctgccacctagaggaagtatttcggaaggtacagcaatcatttgaaactccaagggccaaagctcaaatgcccaccatagaacgactgtccatgacaagatatttctacctctttcctggcaattgaaaatggaagccacaagcagcccagccctccttaatcaacttcaaggagcaccttcattagtacagcttgcatatttaacattttgtatttcaataaaagtgaagacaaacg

SEQ ID NO: 1434 - protein, 286 aa, Homo sapien
MEAGPPESGESTDALKLCPHEEFLRLCKERAEEIYPIKERNNRTRLALIICNTEFDHLPPRNGADFDITGMKELLEGLDYSVDVEENLTARDMESALRAFATRPEHKSSDSTFLVLMSHGILEGICGTVHDEKKPDVLLYDTIFQIFNNRNCLSLKDKPKVIIVQACRGANRGELWVRDSPASLEVASSQSSENLEEDAVYKTHVEKDFIAFCSSTPHNVSWRDSTMGSIFITQLITCFQKYSWCCHLEEVFRKVQQSFETPRAKAQMPTIERLSMTRYFYLFPGN

SEQ ID NO: 1435 - DNA, 1665 bp, Homo sapien
cacgaggaagacgtggatggcgggaattctcgcttctggcctgggtgagctagaagggagaagcaaggacattggagtccctatcaccggttgcctagacaacttcatgggaaggcccttgggaatctgagatggagcaggcgaaccctttacgtccagatggcgagtccaaaggaggtgttttagctcacttggaaaggctagagacccaagtgagcagatcccgtaaacagtctgaagagctgcagagcgtgcaggcccaggaaggtgctcttggaaccaagattcataaactaaggcgtctgcgagatgagctgagggctgtggtgcggcaccggcgagccagcgtgaaagcatgtattgccaatgtagaacccaaccaaacagtggagatcaatgagcaagaagcattggaagagaaattggaaaatgtgaaagccattctgcaggcatatcattttacaggcctcagtggtaaactgaccagccgaggagtttgtgtctgcatcagtactgcttttgaggggaacctattggattcctattttgtggaccttgtcatacagaaaccactccggatacatcaccattcagtcccagtcttcattcccctggaagagatagctgcaaaatatttacagaccaacatccagcacttcctgttcagtctctgcgagtacctgaatgcttactctgggaggaagtaccaggcagaccggcttcagagtgactttgcagccctcctgactgggcccttgcagagaaacccactgtgtaacttgctgtcatttacttacaaactggatccagggggtcagtccttcccgttctgtgctagattgctgtataaggacctcacagcaactcttcccactgacgtcaccgtgacatgtcaaggagtggaagtattatccacttcatgggaggagcaacgagcatctcatgaaactctgttctgtacgaagcccttgcatcaagtgtttgcctcatttacaagaaaaggagaaaagttggatatgagtctggtctcctaatagattgttttcactgcactgggagcacatcagagaaataaatcccccctcccctgccaggtgaaaggaaatattgcactttctgttctcatgactaaggggacaggagttccagaagaacctttcaagatgatcaggaacaccaggacgagggccgtctcacctcactcggaccacatggagacctcccttcaaaatgggagccatgtcctgccccaccaagccctgtctgaagtggagcttccccgcctgtgctccctccacagtcccggaaagcccagcggcaaaggcagctttgtcccagctctgccaccctcctgctcacagtggtcagggcccctcaggggcaaggacggcagggattggaacgagggctctggaaggactgttcagccctatgcctaagacccctatgctggggacactacaggcacacagaggaatagcagggccaccctcagagctcacacatccacgaacaaatgaaggctgaggaggtttctaaacctaaagtccatgagtgtgcacttcaatccaggaaggtcgggacttccttcagtttcaaaaaataaattctcccttccggtttggactgttaaaaaaaaaaaaaaaaaaaaaaaaaaaaaaaaaa

SEQ ID NO: 1436 - protein, 300 aa, Homo sapien
MEQANPLRPDGESKGGVLAHLERLETQVSRSRKQSEELQSVQAQEGALGTKIHKLRRLRDELRAVVRHRRASVKACIANVEPNQTVEINEQEALEEKLENVKAILQAYHFTGLSGKLTSRGVCVCISTAFEGNLLDSYFVDLVIQKPLRIHHHSVPVFIPLEEIAAKYLQTNIQHFLFSLCEYLNAYSGRKYQADRLQSDFAALLTGPLQRNPLCNLLSFTYKLDPGGQSFPFCARLLYKDLTATLPTDVTVTCQGVEVLSTSWEEQRASHETLFCTKPLHQVFASFTRKGEKLDMSLVS

SEQ ID NO: 1437 - DNA, 3377 bp, Homo sapien
gggagccgcgcgggagcagcgcagctacggcggcggcagcggcggcgcggttgcgattccgagccgttgagacgcctctgcggcagctggtggcgcaggtggcttgcgtggacgcgggtagaggcgaccggccagcaaccgcagcgtcggcgcccgcggccccggcagcaggcgcgtcgggacgccccgaggcatcctcccccgcccgcgggcccggtagctgggcccgcgtccgccgcccgcatccccgcgccgccgcatctcctcgccgcctcccgggcttcggacccccggtctcgcccccggaaacatgactcgcgatttcaaacctggagacctcatcttcgccaagatgaaaggttatccccattggccagctcgagtagacgaagttcctgatggagctgtaaagccacccacaaacaaactacccattttcttttttggaactcatgagactgcttttttaggaccaaaggatatatttccttactcagaaaataaggaaaagtatggcaaaccaaataaaagaaaaggttttaatgaaggtttatgggagatagataacaatccaaaagtgaaattttcaagtcaacaggcagcaactaaacaatcaaatgcatcatctgatgttgaagttgaagaaaaggaaactagtgtttcaaaggaagataccgaccatgaagaaaaagccagcaatgaggatgtgactaaagcagttgacataactactccaaaagctgccagaagggggagaaagagaaaggcagaaaaacaagtagaaactgaggaggcaggagtagtgacaacagcaacagcatctgttaatctaaaagtgagtcctaaaagaggacgacctgcagctacagaagtcaagattccaaaaccaagaggcagacccaaaatggtaaaacagccctgtccttcagagagtgacatcattactgaagaggacaaaagtaagaaaaaggggcaagaggaaaaacaacctaaaaagcagcctaagaaggatgaagagggccagaaggaagaagataagccaagaaaagagccggataaaaaagaggggaagaaagaagttgaatcaaaaaggaaaaatttagctaaaacaggggttacttcaacctccgattctgaagaagaaggagatgatcaagaaggtgaaaagaagagaaaaggtgggaggaactttcagactgctcacagaaggaatatgctgaaaggccaacatgagaaagaagcagcagatcgaaaacgcaagcaagaggaacaaatggaaactgagcagcagaataaagatgaaggaaagaagccagaagttaagaaagtggagaagaagcgagaaacatcaatggattctcgacttcaaaggatacatgctgagattaaaaattcactcaaaattgataatcttgatgtgaacagatgcattgaggccttggatgaacttgcttcacttcaggtcacaatgcaacaagctcagaaacacacagagatgattactacactgaaaaaaatacggcgattcaaagttagtcaggtaatcatggaaaagtctacaatgttgtataacaagtttaagaacatgttcttggttggtgaaggagattccgtgatcacccaagtgctgaataaatctcttgctgaacaaagacagcatgaggaagcgaataaaaccaaagatcaagggaagaaagggccaaacaaaaagctagagaaggaacaaacagggtcaaagactctaaatggaggatctgatgctcaagatggtaatcagccacaacataacggggagagcaatgaagacagcaaagacaaccatgaagccagcacgaagaaaaagccatccagtgaagagagagagactgaaatatctctgaaggattctacactagataactaggttgacatacctggaatatagagaacacttgagaagtttgtaatggttttcatttgaaatagactgctggaagtttaaatttttataagcataggtttgatgttgaaaacttgttttgagggagaaaatccctttgttttaaagtaaagtaaacattatcgctaagtgtaacttgtgcagtattaacagctacattatacagtaaatgtgggataaaatccatttagaaaatgttaaactgcttttccagacatggttgtagcatattttcaattagtgtgtgtatgttaatgtgtaattgatagtagaacaaagttacatttttaaaactgctacttgtataaaccttgcctcttttcccaaatactgtgggttttgtgcatagtttttacaaaccttggatttaccagactgtcttttcactgtttgtgggttttgtagaagttacacatttttatggtagataaaatgttacttctatacaagtactcactccctttttatcaaaagttaattttaatctcacagtctacattgtgctacattatccagcttctttggaacaatgtgtgctctgtatggttttttttggtatgacaactaattaagcaactgacattgaactgagaattctacaaactataaaacattaatttttgaaggtaatttagttttgtggctgggcattcagtgaagtcttaggacttctttgcagacaactgactgggtatatataggaatgaatctggctttagggttaaatcatttaaggtccttttataggcaggcactagtaactaaaactgaaaactaagtaagtttatttttgaggaatgttgttaaaaatgtctttaggaagtcactaaaacttaattggaagaaaaaatcatgatgcttatacaataaatatgaataaatgttatataaggaaactcacctatttgaaatcatggctatattgtttttattttctagattccaaaaatacaaacactagttgttccagcattgtactttgataagtctgtacattgacgtgtatggactaaatccagggtaaaatcaatgttacaaaatttaagggtatgttaactaaaggatagcatttctaagatattttgaatattagggtcatttggcacttctcagcaagtaggatacttctcatgtttttgaaattatatgaatatggaaaaaaatggcttaagaccagcgtctctgtatgacattgtgtggttgaccctctgagataactgttttcatctacagaattgcatttttgcttttaaagaggtcttataatggaactaggaatcaccgttttgagagaacctgcatatataccagtcattatctgtttggtccttatacagttttaacttacttagatttattctagttaagccataagttcaacgtgtaaacttgttttcattaaagaatttttctatcaaaaaaaaaaaaaaaaaaaaaa

SEQ ID NO: 1438 - protein, 530 aa, Homo sapien
MTRDFKPGDLIFAKMKGYPHWPARVDEVPDGAVKPPTNKLPIFFFGTHETAFLGPKDIFPYSENKEKYGKPNKRKGFNEGLWEIDNNPKVKFSSQQAATKQSNASSDVEVEEKETSVSKEDTDHEEKASNEDVTKAVDITTPKAARRGRKRKAEKQVETEEAGVVTTATASVNLKVSPKRGRPAATEVKIPKPRGRPKMVKQPCPSESDIITEEDKSKKKGQEEKQPKKQPKKDEEGQKEEDKPRKEPDKKEGKKEVESKRKNLAKTGVTSTSDSEEEGDDQEGEKKRKGGRNFQTAHRRNMLKGQHEKEAADRKRKQEEQMETEQQNKDEGKKPEVKKVEKKRETSMDSRLQRIHAEIKNSLKIDNLDVNRCIEALDELASLQVTMQQAQKHTEMITTLKKIRRFKVSQVIMEKSTMLYNKFKNMFLVGEGDSVITQVLNKSLAEQRQHEEANKTKDQGKKGPNKKLEKEQTGSKTLNGGSDAQDGNQPQHNGESNEDSKDNHEASTKKKPSSEERETEISLKDSTLDN

SEQ ID NO: 1439 - DNA, 2332 bp, Homo sapien
ggcacgaggctgtgctcccggcgctgacgtgtctgggcggtcggcttccactccttcaggcgtcggcagccactagtcgtggcgagaggggcggggtggccggggctggcgctccacttggcccccgctcccggcccgccccgccgccgcggccccccggatgagggtatatattcggagcgagcgcgggacgccgatgagtggccgcgcggaaggagctggagacggtcgtagctgcggtcgcgccgagaaaggtttacaggtacatacattacacccctatttctacaaagcttggctattagagcattatgaacattaatgacctcaaactcacgttgtccaaagctgggcaagagcacctactacgtttctggaatgagcttgaagaagcccaacaggtagaactttatgcagagctccaggccatgaactttgaggagctgaacttctttttccaaaaggccattgaaggttttaaccagtcttcttaccaaaagaatgtggatgcacgaatggaacctgtgcctcgagaggtattaggcagtgctacaagggatcaagatcagctccaggcctgggaaagtgaaggacttttccagatttctcagaataaagtagcagttcttcttctagctggtgggcaggggacaagactcggcgttgcatatcctaaggggatgtatgatgttggtttgccatcccgtaagacactttttcagattcaagcagagcgtatcctgaagctacagcaggttgctgaaaaatattatggcaacaaatgcattattccatggtatataatgaccagtggcagaacaatggaatctacaaaggagttcttcaccaagcacaagtactttggtttaaaaaaagagaatgtaatcttttttcagcaaggaatgctccccgccatgagttttgatgggaaaattattttggaagagaagaacaaagtttctatggctccagatgggaatggtggtctttatcgggcacttgcagcccagaatattgtggaggatatggagcaaagaggcatttggagcattcatgtctattgtgttgacaacatattagtaaaagtggcagacccacggttcattggattttgcattcagaaaggagcagactgtggagcaaaggtggtagagaaaacgaaccctacagaaccagttggagtggtttgccgagtggatggagtttaccaggtggtagaatatagtgagatttccctggcaacagctcaaaaacgaagctcagacggacgactgctgttcaatgcggggaacattgccaaccatttcttcactgtaccatttctgagagatgttgtcaatgtttatgaacctcagttgcagcaccatgtggctcaaaagaagattccttatgtggatacccaaggacagttaattaagccagacaaacccaatggaataaagatggaaaaatttgtctttgacatcttccagtttgcaaagaagtttgtggtatatgaagtattgcgagaagatgagttttccccactaaagaatgctgatagtcagaatgggaaagacaaccctactactgcaaggcatgctttgatgtcccttcatcattgctgggtcctcaatgcagggggccatttcatagatgaaaatggctctcgccttccagcaattccccgcttgaaggatgccaatgatgtaccaatccaatgtgaaatctctcctcttatctcctatgctggagaaggattagaaagttatgtggcagataaagaattccatgcacctctaatcatcgatgagaatggagttcatgagctggtgaaaaatggtatttgaaccagataccaagttttgtttgccacgataggaatagcttttatttttgatagaccaactgtgaacctacaagacgtcttggacaactgaagtttaaatatccacagggttttattttgcttgttgaactcttagagctattgcaaacttcccaagatccagatgactgaatttcagatagcatttttatgattcccaactcattgaaggtcttatttatataattttttccaagccaaggagaccattggccatccaggaaatttcgtacagctgaaatataggcaggatgttcaacatcagtttacttgcagctggaagcatttgtttttgaagttgtacatagtaataatatgtcattgtacatgttgaaaggtttctatggtactaaaagtttgttttattttatcaaacattaagcttttttaagaaaataattgggcagtgaaataaatgtatcttcttgtctctggaaaaaaaaaaaaaaaaaaaaaaaaaaaaaa

SEQ ID NO: 1440 - protein, 505 aa, Homo sapien
MNINDLKLTLSKAGQEHLLRFWNELEEAQQVELYAELQAMNFEELNFFFQKAIEGFNQSSYQKNVDARMEPVPREVLGSATRDQDQLQAWESEGLFQISQNKVAVLLLAGGQGTRLGVAYPKGMYDVGLPSRKTLFQIQAERILKLQQVAEKYYGNKCIIPWYIMTSGRTMESTKEFFTKHKYFGLKKENVIFFQQGMLPAMSFDGKIILEEKNKVSMAPDGNGGLYRALAAQNIVEDMEQRGIWSIHVYCVDNILVKVADPRFIGFCIQKGADCGAKVVEKTNPTEPVGVVCRVDGVYQVVEYSEISLATAQKRSSDGRLLFNAGNIANHFFTVPFLRDVVNVYEPQLQHHVAQKKIPYVDTQGQLIKPDKPNGIKMEKFVFDIFQFAKKFVVYEVLREDEFSPLKNADSQNGKDNPTTARHALMSLHHCWVLNAGGHFIDENGSRLPAIPRLKDANDVPIQCEISPLISYAGEGLESYVADKEFHAPLIIDENGVHELVKNGI

SEQ ID NO: 1441 - DNA, 3517 bp, Homo sapien
tgctgctgtcctggagggaaatggagcaggctgtggagctctgtgggcgggtaggagactcatttgggtttcggaacttaccaagggggtgagattttgtgctcccacttttcactttctcatcaaacactgggtcgatctctgtcaaaaatcaggtgttcctcaccatgctttgagcttaactggaccagctgaaaagaggccaagagagtagccagtgaagggagcccctctgtggccagatgcaagagctgcatgaatggacagagatggtccaggtttaaataagaagcaagggttaggttcccttggggaaaagccaagaccatttcctgttaggaagggcattggatggatgatcaacactccctcttgtcgaaggtttttgactaattttgttgggatgctaaatccataggaaataaaaggtctaggcagaaagtctcagggcagcgtaaatcagatgtcaccaaaaaaagttaattatgaaggcaaaggaaatacatgtgacttaatgaacctcacacaaactgaaggttgaagtcaggctccggggctttttcctggacttatcctctgttttcccctgtgtacttgggcaaggatcttcacctgtgtcttagtatcgatttttatgaatcagtactgatggagtatatgtgtgtttaatggtgaatattaaccatagaagggctgagtgctcctccccatcttgggactcataatctgtgaaataaaacagtctgggcctccctgcccgggtagcatcaggatagacagatgaagagaagagaaagtaatgtgtcttgggcatcttctgtatgccaggcaccatgccagaggctttaagtacttcatcttacttgactcctcagatggccctgttagaagcctattttatgcaaaaggaaactgtagctgggggtaagtaacttgccaaggggtcacacagctagaaagcggtggaccctagatgcaggcgcagggcattcagaccccacagtccacattcctttgagccagtccattgagggtcctcagggaatgtggcgggtcccctggtctcgctcccccgcagatcttgcatctcagcatgcgcctaccacatcagttgacattagcacagcttttccattaggagaacgaagtgaaactcctggtagaacggatgatggctctgcagaccgacattgtggacttacagaggagccccatgggccggaagcaggggggaacgctggacgacctagaggagcaagcaagggagctgtacaggagactaagggaaaaacctcgagaccagcgaactgagggtgacagtcaggaaatggtacggctgctgcttcaggcaattcagagcttcgagaagaaagtgcgagtgatctatacgcagctcagtaaaactgtggtttgcaagcagaaggcgctggaactgttgcccaaggtggaagaggtggtgagcttaatgaatgaggatgagaagactgttgtccggctgcaggagaagcggcagaaggagctctggaatctcctgaagattgcttgtagcaaggtccgtggtcctgtcagtggaagcccggatagcatgaatgcctctcgacttagccagcctgggcagctgatgtctcagccctccacggcctccaacagcttacctgagccagccaagaagagtgaagaactggtggctgaagcacataacctctgcaccctgctagaaaatgccatacaggacactgtgagggaacaagaccagagtttcacggccctagactggagctggttacagacggaagaagaagagcacagctgcctggagcaggcctcatgatgtggggggactcgaccccctgacatggggcagcccatagcaggccttgtgcggtggggggactcgaccccctgacatggggctgcctggagcaggccgcgtgacgtggggctgcctggccgcggctctcacatggtggttcctgctgcactgatggcccaggggtctctggtatccagatggagctctcgcttcctcagcagctgtgactttcacccaggacccaggacgcagccctccgtgggcactgccggcgccttgtctgcacactggaggtcctccattacagaggcccagcgcacatcgctggccccacaaacgttcaggggtacagccatggcagctccttcctctgccgtgagaaaagtgcttggagtacggtttgccacacacgtgactggacagtgtccaattcaaatctttcagggcagagtccgagcagcgcttggtgacagcctgtcctctcctgctctccaaaggccctgctccctgtcctctctcactttacagcttgtgtttcttctggattcagcttctcctaaacagacagtttaattatagttgcggcctggccccatcctcacttcctctttttatttcactgctgctaaaattgtgtttttacctactactttggtggttgtcctcttttcggcaaagttggagcgagtgccaagctctccatctgtggtcctttctgccaagagcgactcatagtaaccaggatgggagagcagctgccttattctgaatcccaaaaattacttgggggtgattgtcacagaggagggacagaaagggtatctgctgaccaccagcctgcctacccatgcccatgtctccattcctgctcaagcgtgtgtgctgggccggggagtccctgtctctcacagcatctagcagtattattaaatggattcattttaaaaatagctcctatattttgtaacatgtctcaaacactcatactgggttccacaatccactgttagaatacctatggttagggcttctgaactaaaataatggaaaattttaacaatttgtatagtgcctggatcattactagtgccataaccctgcttcttcaacatttcacagaacttctcttttatataaaggcaagagcacaaaatgagttcagatgatcacaaacaggtgagttttgttggagaagaaagttggagtaggagactttcacaagtggtttccatggagatagaatgaagcattctgtggtcaagtaagtttagggagctattcatgtttcacttgctttgtggagattcacactatgcactgggaaagtatctgaaaagtcttataataaagaaacaggcttaactttgtgtaagaacactgtttatcaatgtcatttggctatagaaacattttctcctgctgattgtgtgtgtgaaacatgtattaacattccaatgaactagcatttaataaagcacaattttggaaaccctggtaaatgacagtgggaaataacacccgaaaggcaaggacgggcagattggggagggaaaggatgttgggctaagggctgtgagcttatgttacaggcaactgagccactgaagaattttgacgaagaaaatgccaaccaaagcagtcattttaaaagtttatggctgttcagttacaggacaagttgtgaaaagaaagaaaaaaaaatgg

SEQ ID NO: 1442 - protein, 220 aa, Homo sapien
MMALQTDIVDLQRSPMGRKQGGTLDDLEEQARELYRRLREKPRDQRTEGDSQEMVRLLLQAIQSFEKKVRVIYTQLSKTVVCKQKALELLPKVEEVVSLMNEDEKTVVRLQEKRQKELWNLLKIACSKVRGPVSGSPDSMNASRLSQPGQLMSQPSTASNSLPEPAKKSEELVAEAHNLCTLLENAIQDTVREQDQSFTALDWSWLQTEEEEHSCLEQAS

SEQ ID NO: 1443 - DNA, 2049 bp, Homo sapien
gagcccagccgagcgtccgccgctgcccgtgcgcctctgcgctccgcgccatggccggcctcaactccctggaggcggtgaaacgcaagatccaggccctgcagcagcaggcggacgaggcggaagaccgcgcgcagggcctgcagcgggagctggacggcgagcgcgagcggcgcgagaaagctgaaggtgatgtggccgccctcaaccgacgcatccagctcgttgaggaggagttggacagggctcaggaacgactggccacggccctgcagaagctggaggaggcagaaaaagctgcagatgagagtgagagaggaatgaaggtgatagaaaaccgggccatgaaggatgaggagaagatggagattcaggagatgcagctcaaagaggccaagcacattgcggaagaggctgaccgcaaatacgaggaggtagctcgtaagctggtcatcctggagggtgagctggagagggcagaggagcgtgcggaggtgtctgaactaaaatgtggtgacctggaagaagaactcaagaatgttactaacaatctgaaatctctggaggctgcatctgaaaagtattctgaaaaggaggacaaatatgaagaagaaattaaacttctgtctgacaaactgaaagaggctgagacccgtgctgaatttgcagagagaacggttgcaaaactggaaaagacaattgatgacctggaagagaaacttgcccaggccaaagaagagaacgtgggcttacatcagacactggatcagacactaaacgaacttaactgtatataagcaaaacagaagagtcttgttccaacagaaactctggagctccgtgggtctttctcttctcttgtaagaagttccttttgttattgccatcttcgctttgctggaaatgtcaagcaaattatgaatacatgaccaaatattttgtatcggagaagctttgagcaccagttaaatctcattccttccctttttttttcaaatggcaccagctttttcagctctcttattttttccttaagtagcatttattcctaaggtaggcagggtatttcctagtaagcatactttcttaagacggaggccatttggttcctgggagaataggcagccccacactttgaagaatacagaccccagtatctagtcgtggatataattaaaacgctgaagaccataaccttttgggtcaactgttggtcaaactataggagagaccagggaccatcacatgggtagggattttccatccagagccaataaaaggactggtgggggccgggggtggctattgtgggaagtcataacccacagatagatcaacctaagaatcctggcccttctccactctccaccatgcaggacaaacatcttctcaagcagtcaacgtagaatgcttgggaaatagtcataattacccacatatagtaattaatagatggtaattaattgatccttgatgtgatgttcttttgcatatttccttcattctaaagttgttccctggccgggagcgtttgctttcgcctgtaatcccaacactttgggaggccaggacagatcacttgaggtcaggagttcgagaccagcccagccaacatggcgaaaccatgtctctactaaaaatacaaaaattatggtgacgcctgcctgtagtcccagctactcgggaggctgaggcaggaggatcgcttgaacccaggaagtggagactgcagtgagccgatatcgcaccacagcgctccagcctggtcgacagagtgagactccatctcaagaaaaaataaaaataaagttgttctctgaagagcaaatgtctcattccagtaatgacccactcagcaggaatatggtggagttcagtccaattcaggtcagccatatccaaaagaccacaagtcattactaagttgagcaaaagagtttttatctattagcagaaagggcctctctggcagcagagattaaaaactggcccaacttcatttccatacttcagggaacagcaaattgaggatttacttatctaggactt

SEQ ID NO: 1444 - protein, 248 aa, Homo sapien
MAGLNSLEAVKRKIQALQQQADEAEDRAQGLQRELDGERERREKAEGDVAALNRRIQLVEEELDRAQERLATALQKLEEAEKAADESERGMKVIENRAMKDEEKMEIQEMQLKEAKHIAEEADRKYEEVARKLVILEGELERAEERAEVSELKCGDLEEELKNVTNNLKSLEAASEKYSEKEDKYEEEIKLLSDKLKEAETRAEFAERTVAKLEKTIDDLEEKLAQAKEENVGLHQTLDQTLNELNCI

SEQ ID NO: 1445 - DNA, 4185 bp, Homo sapien
cggccgcgagcgcagtggtgtggagcgcgccgggtcccggagccggctgtctgagggatggacgagacgagcccactagtgtcccccgagcgggcccaacccccggactacaccttcccgtcgggctcgggcgctcactttccgcaggtgcccgggggcgcggtccgagtggcggcggcggccggctcgggcccctctccgccaggctcgccgggccacgaccgcgagcggcagccactgttggatcgggcccggggcgcggcggcccagggccagacccaaaccgtggcggcgcaggcccaggctctggccgctcaggccgcggcggcagcccacgccgctcaggcccaccgcgagcggaacgagttcccggaggatcctgagttcgaggcggtggtgcggcaggccgagctggccatcgagcgctgcatctttcccgagcgcatctaccagggctccagcggaagctacttcgtcaaggaccctcaggggaggatcattgctgtcttcaaacccaagaatgaagagccctatgggcatcttaatcctaagtggaccaagtggctgcagaagctgtgctgtccttgctgctttggccgtgactgccttgtccttaaccagggctatctctcagaagcaggggccagcctggtggaccaaaaactggaactcaacattgttccccgtacaaaggtagtatacctggccagtgagaccttcaactatagtgccattgaccgagtgaagtccaggggcaagcggcttgcactagagaaagtgccaaaagttggacagcggtttaaccgcatcgggctaccaccaaaggttggttcattccagctctttgttgaaggctacaaagatgcagactattggctgcggcgttttgaagcagaacctcttcctgagaacactaaccggcaactactgctccagtttgagcggttggtggtgctggattacatcatccgcaacactgatcgaggcaatgacaactggctgattaaatatgactgtccaatggatagttctagctctcgggacacagactgggtggtggtgaaggagcctgttatcaaggtggctgccatagacaatgggctggccttcccactgaagcatcctgactcctggagggcatatcctttttactgggcctggttgccccaggcgaaagtcccattttctcaggagatcaaagatctgatccttccaaagatatcggaccctaacttcgtcaaggacttggaagaggacctatatgaactcttcaagaaagatcctggtttcgacaggggccagttccataagcagattgctgtcatgcggggccagatcttaaatctgacccaggccttgaaagacaacaagagtcccctgcacctcgtccagatgccacctgtgattgtcgagacggcccgttcccaccagcggtcttctagcgagtcctacacacagagctttcagagccggaagcccttcttttcatggtggtagctccagaggcaggcagaggaaatattgtcagagactggtgggaggaagcctggggagtggggtgcaggaaaagccagagaagccggtggagagcagcacctttaagagccctctctctctgcttgccaccctgctcagagctttccacccacagggagaagcacaatcaggaacagtgagtgctcctcgcccttctgatgtgggggaggctggagctccatgcacgtagtccagatgcctgggaaggaacatctcccttccagcatctgctggtagcaggctgggacagtcccttccttccctgaaaccctgctctattgcaattccctattatattctgcatcagaaaaacaaacaaaacaaaaacaactttaaatgcttgtagcagaaccccgggtcatctcatgtcagaaacctttaatccaggcctaaatttgcatagacctgacattcagctgccttgcagttgcttcctcccatgagccaaggtggtgtcagagggcaactggatgactcgcagtaccacagcactgggacagacagaagccacacctttcttttgggtttttgccaagcctcctccatctcccatcagtgctgtgggctggctgcaagcctcgaaacagttctcctggaagggaggtttttgctttacccccgccagcacttccgcacacaatcatagagaacctctctgctctctgctggcctacagcttgtctgtttctcaagcagaggcaggaagagctagtcttagcatttatattttaataggaagttgactcccagcatgtaaaagtgatccacgcagccggagtgtatgccgggagctaagtggtctatgggtgaacatatcccaccttgcttcctgagtccttggtcccaatcttctcatttgttcctctcgttttaaattttttccccccaactcttttgatgtaagagttcagtttgtcttcgggagtgggtctctgcaagggctctgggatgagtcttggcttccaagaggacaggctattaggttcttggacttttttctgtgctaccgctgctgcttggtggaagtaacaggacgtggattctgcctcataagtggcagtttcccttttctctctgacttgtcctaggccgatttctctatggcttccctgagaaaggtgaggcccaaaggagagaggccttcaaactgtcccaggtcctgcgcagctcagtgcgtatcttcttgcttccatgtgtcttttcccctgctgcctcactccccacccccacttgccaggtgtttgagccatttctacaccaaagcaaagtacggcctcaggagggagtaaaaagggtgccatctgtgtctggaggggcagctgtgttcatgccctgtgctactggacatttcacaattctggcaccttgcgattggtcagtcaacctcagaaagtaactatcttgaaggtttgaaaaacaaccaaagaaagggagtgaggactatggctgcatgtcctctgcttgcccggctgcagagcagagatgtgcagccctctggtcagctggtccaggctggtccccgccggtccccttccagtccagccaccaagagtccacttgtcccgggcttccacctggctgacaggaagaatttctgagagctggatgtgcatgccctgtggacgaaggtacagctcgcctgcctgccccaatcccagccccgacaatcacatgcagctgactcggacactggccttgggaacaatgttcgagagaacacttgccccttgactgtaggagccagaaggggacccaggtgtgcatagctctctgtagacatttttacccaaacctgttggtaaagtgcccatctggtgctcaagagagcctgggggtctaacagggagcccggctgcctcacctggccacagcctccacaccagatctccacattgtcttgatccagaccagctctgtgatcagaaggaaattgggtccagtgtaggagagagctggtcctgggcctggcaggcaagagtgtgggcatcctttcctggcctttctccactctccctcaagcctgtgctcaggttgccttgaatgtggactctggaagagccaggggcccagaatgccgggggaggcttctgagtggcactcatggaacaccgtccctctgccagccataggccctgcctccagtgtcagggaatggaggctgggctgcgagagtgttgctgccccctgtgtcattcttctaatccaatgtagaaattgtacgtaatgtatttaaatcaacgcaaatgtatgaataacaaatacagttctgaccttttttgtccagtttctttgggggaaggaagacaaagaaggtaggaacggaattttgagggcaaagaaacctgtgtttccatggaattgctgagacgtggctcctggggctatttctccctaataaaggatgatccaggtcctcatttccaaagtcccaatgctctgaaaaccaaaagtattttcataacccatttgaaaccaaacctgacctgaacttacactgataggaagctatgggtaattatgatgtgttccttttagtgtgattctttgttgcagaaatgtcaatatattttatgacatggttccctactagggattatacagtatttgctgactacttcctaagagccaaaaataaaaaatctgaattcc

SEQ ID NO: 1446 - protein, 479 aa, Homo sapien
MDETSPLVSPERAQPPDYTFPSGSGAHFPQVPGGAVRVAAAAGSGPSPPGSPGHDRERQPLLDRARGAAAQGQTQTVAAQAQALAAQAAAAAHAAQAHRERNEFPEDPEFEAVVRQAELAIERCIFPERIYQGSSGSYFVKDPQGRIIAVFKPKNEEPYGHLNPKWTKWLQKLCCPCCFGRDCLVLNQGYLSEAGASLVDQKLELNIVPRTKVVYLASETFNYSAIDRVKSRGKRLALEKVPKVGQRFNRIGLPPKVGSFQLFVEGYKDADYWLRRFEAEPLPENTNRQLLLQFERLVVLDYIIRNTDRGNDNWLIKYDCPMDSSSSRDTDWVVVKEPVIKVAAIDNGLAFPLKHPDSWRAYPFYWAWLPQAKVPFSQEIKDLILPKISDPNFVKDLEEDLYELFKKDPGFDRGQFHKQIAVMRGQILNLTQALKDNKSPLHLVQMPPVIVETARSHQRSSSESYTQSFQSRKPFFSWW

SEQ ID NO: 1447 - DNA, 4185 bp, Homo sapien; identical to SEQ ID NO: 1445

SEQ ID NO: 1448 - protein, 479 aa, Homo sapien; identical to SEQ ID NO: 1446

SEQ ID NO: 1449 - DNA, 4246 bp, Homo sapien
  Unsure 3300: Unknown base
atcttttttcatcttctagctgtagctcgggctgcttgtcggcttggctccccctcccccctttgctctctgcctcgtctttccccaggacttcgctattttgcttttttaaaaaaaggcaagaaagaactaaactcccccctccctctcctccagtcgggctgcacctctgccttgcactttgcacagaggtagagagcgcgcgagggagagagaggaaagaaaaaaaataataaagagagccaagcagaagaggaggcgagaagcatgaagtgttaactcccccgtgccaaggcccgcgccgcccggacagacgcccgccgcgccttccagccccgagcggacgccgcgcgccgccctgcctgcagcccgggccggcgacggcgagcccttccttatgcaaagcgcgccagcagcgcgaaggcgggacgccgcgcaccgggccgggctcctccagcttcgccgccgcagccaccaccgccgccaccgcagctcgcggaggatcttcccgagcctgaagccgccggctcggcgcgcaaggaggcgagcgcaaggaggggccggggcgagcgagggagcacattggcgtgagcaggggggagggagggcgggcgcggggggcgcgggcagggcgggggggtgtgtgtgtgagcgcgcttggaggtttcgggccagccaccgccgcgcaagctagaagcgccccagcccggcaagctggctcacccgctggccacccagcacagcccgctggcccctctcctgcagcccatctggcggagcggcggcggcggcggcggcggcaggagaatggcatcagaactggcaatgagcaactccgacctgcccaccagtcccctggccatggaatatgttaatgacttcgatctgatgaagtttgaagtgaaaaaggaaccggtggagaccgaccgcatcatcagccagtgcggccgtctcatcgccgggggctcgctgtcctccacccccatgagcacgccgtgcagctcggtgcccccttcccccagcttctcggcgcccagcccgggctcgggcagcgagcagaaggcgcacctggaagactactactggatgaccggctacccgcagcagctgaaccccgaggcgctgggcttcagccccgaggacgcggtcgaggcgctcatcagcaacagccaccagctccagggcggcttcgatggctacgcgcgcggggcgcagcagctggccgcggcggccggggccggtgccggcgcctccttgggcggcagcggcgaggagatgggccccgcggccgccgtggtgtccgccgtgatcgccgcggccgccgcgcagagcggcgcgggcccgcactaccaccaccaccaccaccacgccgccggccaccaccaccacccgacggccggcgcgcccggcgccgcgggcagcgcggccgcctcggccggtggcgctgggggcgcgggcggcggtggcccggccagcgctgggggcggcggcggcggcggcggcggcggaggcggcgggggcgcggcgggggcggggggcgccctgcacccgcaccacgccgccggcggcctgcacttcgacgaccgcttctccgacgagcagctggtgaccatgtctgtgcgcgagctgaaccggcagctgcgcggggtcagcaaggaggaggtgatccggctgaagcagaagaggcggaccctgaaaaaccgcggctatgcccagtcctgccgcttcaagagggtgcagcagagacacgtcctggagtcggagaagaaccagctgctgcagcaagtcgaccacctcaagcaggagatctccaggctggtgcgcgagagggacgcgtacaaggagaaatacgagaagttggtgagcagcggcttccgagaaaacggctcgagcagcgacaacccgtcctctcccgagtttttcatgtgagtctgacacgcgattccagctagccaccctgataagtgctccgcgggggtccggctcgggtgtgggcttgctagttctagagccatgctcgccaccacctcaccacccccacccccaccgagtttggcccccttggccccctacacacacacaaacccgcacgcacacaccacacacacacacacacacacacacacacaccccacaccctgctcgagtttgtggtggtggtggctgttttaaactggggagggaatgggtgtctggctcatggattgccaatctgaaattctccataacttgctagcttgttttttttttttttttttacacccccccgccccaccccccggacttgcacaatgttcaatgatctcagcagagttcttcatgtgaaacgttgatcacctttgaagcctgcatcattcacatattttttcttcttcttccccttcagttcatgaactggtgttcattttctgtgtgtgtgtgtgttttattttgtttggatttttttttttaattttacttttagagcttgctgtgcttgcccacctcttttccaacctccaccctcactccttctcaacccatctcttccgagatgaaagaaaaaaaaaagcaaagtttttttttcttctcctgagttcttcagtgagattgagcttgcaaaggaaaaaaaaatgtgaaatgttatagacttgcagcgtgccgagttccatcgggttttttttttagcattgttatgctaaaatagagaaaaaaatcctcatgaaccttccacaatcaagcctgcatcaaccttctgggtgtgacttgtgagttttggccttgtgatgccaaatctgagagtttagtctgccattaaaaaaactcattctcatctcatgcattattatgcttgctactttgtcttagcaacaatgaactataactgtttcaaagactttatggaaaagagacattatattaataaaaaaaaaagcctgcatgctggacatatatggtataattattttttcctttttttttccttttggcttggaaatggacgttcgaagacttatagcatggcattcatacttttgttttattgcctcatgacttttttgagtttagaacaaaacagtgcaaccgtagagccttcttcccatgaaattttgcatctgctccaaaactgctttgagttactcagaacttcaacctcccaatgcactgaaggcattccttgtcaaagataccagaatgggttacacatttaacctggcaaacattgaagaactcttaatgttttctttttaataagaatgacgcccactttggggactaaaattgtgctattgccgagaagcagtctaaaatttatttttnaaaaagagaaactgccccattatttttggtttgttttatttttattttatattttttggcttttggtcattgtcaaatgtggaatgctctgggtttctagtatataatttaattctagtgtttataatctgttagcccagttaaaatgtatgctacagataaaggaatgttatagataaatttgaaagagttaggtctgtttagctgtagattttttaaacgattgatgcactaaattgtttactattgtgatgttaaggggggtagagtttgcaaggggactgtttaaaaaaagtagcttatacagcatgtgcttgcaacttaaatataagttgggtatgtgtagtctttgctataccactgactgtattgaaaaccaaagtattaagaggggaaacgcccctgtttatatctgtaggggtattttacattcaaaaatgtatgtttttttttcttttcaaaattaaagtatttgggactgaattgcactaagatataacctgcaagcatataatacaaaaaaaaattgcaaaactgtttagaacgctaataaaatttatgcagttataaaaatggcattactgcacagttttaagatgatgcagatttttttacagttgtattgtggtgcagaactggattttctgtaacttaaaaaaaatccacagttttaaaggcaataatcagtaaatgttattttcagggactacatcctgtctttaaaaagaaatgaaaagtaaatcttaccacaataaatataaaaaaatcttgtcagttacttttcttttacatattttgctgtgcaaaattgttttatatcttgagttactaactaaccacgcgtgttgttcctatgtgcttttctttcattttcaattctggttatatcaagaaaagataatctacaataataaacggcatttttttttgattctgtaaaaaaaaa

SEQ ID NO: 1450 - protein, 373 aa, Homo sapien
MASELAMSNSDLPTSPLAMEYVNDFDLMKFEVKKEPVETDRIISQCGRLIAGGSLSSTPMSTPCSSVPPSPSFSAPSPGSGSEQKAHLEDYYWMTGYPQQLNPEALGFSPEDAVEALISNSHQLQGGFDGYARGAQQLAAAAGAGAGASLGGSGEEMGPAAAVVSAVIAAAAAQSGAGPHYHHHHHHAAGHHHHPTAGAPGAAGSAAASAGGAGGAGGGGPASAGGGGGGGGGGGGGGAAGAGGALHPHHAAGGLHFDDRFSDEQLVTMSVRELNRQLRGVSKEEVIRLKQKRRTLKNRGYAQSCRFKRVQQRHVLESEKNQLLQQVDHLKQEISRLVRERDAYKEKYEKLVSSGFRENGSSSDNPSSPEFFM

SEQ ID NO: 1451 - DNA, 1451 bp, Homo sapien
ggcacgaggggaaggtggccgagcgcccgcgctgcccactcgctcgctcgcgcactcagacgcgcgccacaacagcgcgccccaagctgcgcagctctgcaaaagtttctgctcgggatctggctctcttccccttggactttagaacgatttagggttgacagaggaaagcagaggcgcgcaggaggagcagaaaacaccaccttctgcagttggaggcaggcagccccggctgcactctagccgccgcgcccggagccggggccgacccgccactatccgcagcagcctcggccaggaggcgacccgggcgcctgggtgtgtggctgctgttgcgggacgtcttcgcggggcgggaggctcgcgccgcagccagcgccatgcaaaactacaagtacgacaaagcgatcgtcccggagagcaagaacggcggcagcccggcgctcaacaacaacccgaggaggagcggcagcaagcgggtgctgctcatctgcctcgacctcttctgcctcttcatggcgggcctccccttcctcatcatcgagacaagcaccatcaagccttaccaccgagggttttactgcaatgatgagagcatcaagtacccactgaaaactggtgagacaataaatgacgctgtgctctgtgccgtggggatcgtcattgccatcctcgcgatcatcacgggggaattctaccggatctattacctgaagaagtcgcggtcgacgattcagaacccctacgtggcagcactctataagcaagtgggctgcttcctctttggctgtgccatcagccagtctttcacagacattgccaaagtgtccatagggcgcctgcgtcctcacttcttgagtgtctgcaaccctgatttcagccagatcaactgctctgaaggctacattcagaactacagatgcagaggtgatgacagcaaagtccaggaagccaggaagtccttcttctctggccatgcctccttctccatgtacactatgctgtatttggtgctatacctgcaggcccgcttcacttggcgaggagcccgcctgctccggcccctcctgcagttcaccttgatcatgatggccttctacacgggactgtctcgcgtatcagaccacaagcaccatcccagtgatgttctggcaggatttgctcaaggagccctggtggcctgctgcatagttttcttcgtgtctgacctcttcaagactaagatgacgctctccctgcctgcccctgctatccggaaggaaatcctttcacctgtggacattattgacaggaacaatcaccacaacatgatgtaggtgccacccacctcctgagctgtttttgtaaaatgactgctgacagcaagttcttgctgctctccaatctcatcagacagtagaatgtagggaaaaacttttgcccgactgatttttaaaaaaaaaaaaaaaaaa

SEQ ID NO: 1452 - protein, 311 aa, Homo sapien
MQNYKYDKAIVPESKNGGSPALNNNPRRSGSKRVLLICLDLFCLFMAGLPFLIIETSTIKPYHRGFYCNDESIKYPLKTGETINDAVLCAVGIVIAILAIITGEFYRIYYLKKSRSTIQNPYVAALYKQVGCFLFGCAISQSFTDIAKVSIGRLRPHFLSVCNPDFSQINCSEGYIQNYRCRGDDSKVQEARKSFFSGHASFSMYTMLYLVLYLQARFTWRGARLLRPLLQFTLIMMAFYTGLSRVSDHKHHPSDVLAGFAQGALVACCIVFFVSDLFKTKMTLSLPAPAIRKEILSPVDIIDRNNHHNMM

SEQ ID NO: 1453 - DNA, 1837 bp, Homo sapien
acaaccgtaacagccaccagacaagcttcagtggccggcccttcacatccagacttgcctgagaggacccacctctgagtgtccagtggtcagttgccccaggatggggaccacagccagagcagccttggtcttgacctatttggctgttgcttctgctgcctctgagggaggcttcacggctacaggacagaggcagctgaggccagagcactttcaagaagttggctacgcagctcccccctccccacccctatcccgaagcctccccatggatcaccctgactcctctcagcatggccctccctttgagggacagagtcaagtgcagccccctccctctcaggaggccacccctctccaacaggaaaagctgctacctgcccaactccctgctgaaaaggaagtgggtccccctctccctcaggaagctgtccccctccaaaaagagctgccctctctccagcaccccaatgaacagaaggaaggaacgccagctccatttggggaccagagccatccagaacctgagtcctggaatgcagcccagcactgccaacaggaccggtcccaagggggctggggccaccggctggatggcttcccccctgggcggccttctccagacaatctgaaccaaatctgccttcctaaccgtcagcatgtggtatatggtccctggaacctaccacagtccagctactcccacctcactcgccagggtgagaccctcaatttcctggagattggatattcccgctgctgccactgccgcagccacacaaaccgcctagagtgtgccaaacttgtgtgggaggaagcaatgagccgattctgtgaggccgagttctcggtcaagacccgaccccactggtgctgcacgcggcagggggaggctcggttctcctgcttccaggaggaagctccccagccacactaccagctccgggcctgccccagccatcagcctgatatttcctcgggtcttgagctgcctttccctcctggggtgcccacattggacaatatcaagaacatctgccacctgaggcgcttccgctctgtgccacgcaacctgccagctactgaccccctacaaagggagctgctggcactgatccagctggagagggagttccagcgctgctgccgccaggggaacaatcacacctgtacatggaaggcctgggaggatacccttgacaaatactgtgaccgggagtatgctgtgaagacccaccaccacttgtgttgccgccaccctcccagccctactcgggatgagtgctttgcccgtcgggctccttaccccaactatgaccgggacatcttgaccattgacatcagtcgagtcacccccaacctcatgggccacctctgtggaaaccaaagagttctcaccaagcataaacatattcctgggctgatccacaacatgactgcccgctgctgtgacctgccatttccagaacaggcctgctgtgcagaggaggagaaattaaccttcatcaatgatctgtgtggtccccgacgtaacatctggcgagaccctgccctctgctgttacctgagtcctggggatgaacaggtcaactgcttcaacatcaattatctgaggaacgtggctctagtgtctggagacactgagaacgccaagggccagggggagcagggctcaactggaggaacaaatatcagctccacctctgagcccaaggaagaatgagtcaccccagagccctagagggtcagatggggggaaccccaccctgccccacccatctgaacactcattacactaaacacctcttggatttggaaaaaaaaaaaaaaaaaa

SEQ ID NO: 1454 - protein, 415 aa, Homo sapien
MGTTARAALVLTYLAVASAASEGGFTATGQRQLRPEHFQEVGYAAPPSPPLSRSLPMDHPDSSQHGPPFEGQSQVQPPPSQEATPLQQEKLLPAQLPAEKEVGPPLPQEAVPLQKELPSLQHPNEQKEGTPAPFGDQSHPEPESWNAAQHCQQDRSQGGWGHRLDGFPPGRPSPDNLNQICLPNRQHVVYGPWNLPQSSYSHLTRQGETLNFLEIGYSRCCHCRSHTNRLECAKLVWEDTLDKYCDREYAVKTHHHLCCRHPPSPTRDECFARRAPYPNYDRDILTIDISRVTPNLMGHLCGNQRVLTKHKHIPGLIHNMTARCCDLPFPEQACCAEEEKLTFINDLCGPRRNIWRDPALCCYLSPGDEQVNCFNINYLRNVALVSGDTENAKGQGEQGSTGGTNISSTSEPKEE

SEQ ID NO: 1455 - DNA, 1925 bp, Homo sapien
agtggagtgggacaggtatataaaggaagtacagggcctggggaagaggccctgtctaggtagctggcaccaggagccgtgggcaagggaagaggccacaccctgccctgctctgctgcagccagaatgggtgtgaaggcgtctcaaacaggctttgtggtcctggtgctgctccagtgctgctctgcatacaaactggtctgctactacaccagctggtcccagtaccgggaaggcgatgggagctgcttcccagatgcccttgaccgcttcctctgtacccacatcatctacagctttgccaatataagcaacgatcacatcgacacctgggagtggaatgatgtgacgctctacggcatgctcaacacactcaagaacaggaaccccaacctgaagactctcttgtctgtcggaggatggaactttgggtctcaaagattttccaagatagcctccaacacccagagtcgccggactttcatcaagtcagtaccgccattcctgcgcacccatggctttgatgggctggaccttgcctggctctaccctggacggagagacaaacagcattttaccaccctaatcaaggaaatgaaggccgaatttataaaggaagcccagccagggaaaaagcagctcctgctcagcgcagcactgtctgcggggaaggtcaccattgacagcagctatgacattgccaagatatcccaacacctggatttcattagcatcatgacctacgattttcatggagcctggcgtgggaccacaggccatcacagtcccctgttccgaggtcaggaggatgcaagtcctgacagattcagcaacactgactatgctgtggggtacatgttgaggctgggggctcctgccagtaagctggtgatgggcatccccaccttcgggaggagcttcactctggcttcttctgagactggtgttggagccccaatctcaggaccgggaattccaggccggttcaccaaggaggcagggacccttgcctactatgagatctgtgacttcctccgcggagccacagtccatagaaccctcggccagcaggtcccctatgccaccaagggcaaccagtgggtaggatacgacgaccaggaaagcgtcaaaagcaaggtgcagtacctgaaggataggcagctggcaggcgccatggtatgggccctggacctggatgacttccagggctccttctgcggccaggatctgcgcttccctctcaccaatgccatcaaggatgcactcgctgcaacgtagccctctgttctgcacacagcacgggggccaaggatgccccgtccccctctggctccagctggccgggagcctgatcacctgccctgctgagtcccaggctgagcctcagtctccctcccttggggcctatgcagaggtccacaacacacagatttgagctcagccctggtgggcagagaggtagggatggggctgtggggatagtgaggcatcgcaatgtaagactcgggattagtacacacttgttgatgattaatggaaatgtttacagatccccaagcctggcaagggaatttcttcaactccctgccccctagccctccttatcaaaggacaccattttggcaagctctatcaccaaggagccaaacatcctacaagacacagtgaccatactaattataccccctgcaaagccagcttgaaaccttcacttaggaacgtaatcgtgtcccctatcctacttccccttcctaattccacagctgctcaataaagtacaagagtttaacagtgtgttggcgctttgctttggtctatctttgagcgcccactagacccactggactcacctcccccatctcttctgggttccttcctctgagccttgggacccctgagcttgcagagatgaaggccgccatgtt

SEQ ID NO: 1456 - protein, 383 aa, Homo sapien
MGVKASQTGFVVLVLLQCCSAYKLVCYYTSWSQYREGDGSCFPDALDRFLCTHIIYSFANISNDHIDTWEWNDVTLYGMLNTLKNRNPNLKTLLSVGGWNFGSQRFSKIASNTQSRRTFIKSVPPFLRTHGFDGLDLAWLYPGRRDKQHFTTLIKEMKAEFIKEAQPGKKQLLLSAALSAGKVTIDSSYDIAKISQHLDFISIMTYDFHGAWRGTTGHHSPLFRGQEDASPDRFSNTDYAVGYMLRLGAPASKLVMGIPTFGRSFTLASSETGVGAPISGPGIPGRFTKEAGTLAYYEICDFLRGATVHRTLGQQVPYATKGNQWVGYDDQESVKSKVQYLKDRQLAGAMVWALDLDDFQGSFCGQDLRFPLTNAIKDALAAT

SEQ ID NO: 1457 - DNA, 2496 bp, Homo sapien
ggcacgagggcgggagagacggaggtagagggaggacacagagccgcgccgcccgcaccacagaccttcgcctcgccccgccggttcctcaccctcggggagcaacatggcagataatctcagtgataccttgaagaagctgaagataacagctgttgacaagactgaggatagtttagaaggatgcttggattgtctgcttcaagccctggctcaaaataatacggaaacaagtgaaaaaatccaagcaagtggaatacttcagctgtttgcaactctgttgactccacagtcttcctgcaaagccaaagtagctaacatcatagcagaagtagccaaaaatgagtttatgcgaattccatgtgtggatgctggattgatttcaccactggtgcagctgctaaatagcaaagaccaggaagtgctgcttcaaacgggcagggctctaggaaacatatgttacgatagccatgagggcagaagtgcagttgaccaagcaggtggtgcacagattgtaattgaccatttaaggtcactgtgcagtataacagatcccgccaatgagaagctcttgactgtcttttgtggcatgctgatgaactatagcaatgagaatgattcgcttcaagctcagcttatcaatatgggtgttattcctaccttagtgaaattactgggcatccactgccaaaatgcagctcttacagaaatgtgtcttgttgcatttggtaatttagcagaacttgagtcaagtaaagaacagtttgccagtacaaacattgctgaagagctagtaaaactcttcaagaaacaaatagaacatgataagagagaaatgatttttgaagttcttgctccattggcagaaaatgatgctattaaactacagctggttgaagcaggcctagtagagtgtctactagagattgttcagcaaaaagtggatagtgacaaagaagatgatattactgagctcaaaactggttcagatctcatggttttattacttcttggagatgaatccatgcagaagttatttgaaggaggaaaaggtagtgtatttcaaagggtactctcttggatcccatcaaataaccaccagctacagcttgctggagcattggcaattgcaaattttgccagaaatgatgcaaattgtattcatatggtagacaatgggattgtagaaaaacttatggatttactggacagacatgtagaagatggaaatgtaacagtacagcatgcagcactaagtgccctcagaaacctggccattccagttataaataaagcaaagatgttatcagctggggtcacagaggcagttttgaaatttcttaaatctgaaatgcctcctgttcagttcaaacttctgggaacattaagaatgttaatagatgcacaagaagctgctgaacaattgggaaagaatgttaagttagtggagcgtttggtggaatggtgtgaagccaaagatcatgctggtgtgatgggggagtcaaacagactgctgtctgcccttatacgacacagtaaatcaaaagatgtaattaaaaccattgtgcagagtggtggcatcaagcatctagttaccatggcaactagtgaacatgtaataatgcagaatgaagctcttgttgctttggcattaatagcagctttagaattgggcactgctgagaaagatctagaaagtgctaaacttgtacagattttacatagactgctagcagatgagagaagtgctcctgaaatcaaatataattccatggtcctgatatgtgctcttatgggatctgaatgtctacacaaggaagtacaggatttggcttttctagatgtcgtatccaaacttcgcagtcatgagaacaaaagtgttgcccagcaggcctctctcacagagcagagacttactgtggaaagctgagaactgcccgatacacggcatcatcccatctctaatttcccctctgtcctccatccagcggcttcttccgcttcattctctaccataccacttgtgcatgcatgtgatgttctaataccaattgaagaaccgctgtaggtacctccctaataagatttctaaacctatagttagtgtgatcatgactttgtcaaaggcaagtctccacccataaccgttctcttgtattcctgttgcttgagctacattaagtagaatgtgcatgttgtagtcctatgatgatgtaaacttggtactacataatgacttgctccacacatgcagtaaactacataatgatgtactggtaaactagaaacaaagaatgcagcaggatctgtctagcttattaaagatgaaactgaattggaaaaatagctccattttttggtgcttgggaagcacagtgaccaaaaaagttgtatggctgcttattcattagtctttcctactgatgtcaaatccatggtacctagagttaaataaaattccaatgctcttactctttaaaaaaaaaaaaaaaaaaa

SEQ ID NO: 1458 - protein, 406 aa, Homo sapien
MCLVAFGNLAELESSKEQFASTNIAEELVKLFKKQIEHDKREMIFEVLAPLAENDAIKLQLVEAGLVECLLEIVQQKVDSDKEDDITELKTGSDLMVLLLLGDESMQKLFEGGKGSVFQRVLSWIPSNNHQLQLAGALAIANFARNDANCIHMVDNGIVEKLMDLLDRHVEDGNVTVQHAALSALRNLAIPVINKAKMLSAGVTEAVLKFLKSEMPPVQFKLLGTLRMLIDAQEAAEQLGKNVKLVERLVEWCEAKDHAGVMGESNRLLSALIRHSKSKDVIKTIVQSGGIKHLVTMATSEHVIMQNEALVALALIAALELGTAEKDLESAKLVQILHRLLADERSAPEIKYNSMVLICALMGSECLHKEVQDLAFLDVVSKLRSHENKSVAQQASLTEQRLTVES

SEQ ID NO: 1459 - DNA, 2745 bp, Homo sapien
ggcacgagggcgaccgctccccggcgggagccagcgaaggtttccatgtcagaggccgatggagaactgaagattgccacctacgcacaaaggccattgagacacttcgtgtagctggaagacaccaacttcctgacaggagctttatttcatttgggatttcaagtttacagatggtatcttctcaaaagttggaaaaacctatagagatgggcagtagcgaaccccttcccatcgcagatggtgacaggaggaggaagaagaagcggaggggccgggccactgactccttgccaggaaagtttgaagatatgtacaagctgacctctgaattgcttggagagggagcctatgccaaagttcaaggtgccgtgagcctacagaatggcaaagagtatgccgtcaaaatcatcgagaaacaagcagggcacagtcggagtagggtgtttcgagaggtggagacgctgtatcagtgtcagggaaacaagaacattttggagctgattgagttctttgaagatgacacaaggttttacttggtctttgagaaattgcaaggaggttccatcttagcccacatccagaagcaaaagcacttcaatgagcgagaagccagccgagtggtgcgggacgttgctgctgcccttgacttcctgcataccaaagacaaagtctctctctgtcacctaggctggagtgctatggcgccatcagggctcactgcagccccaacctccctgggctccagtgatcctcccacctcagcctcccaagtagctgggactacaggcattgctcatcgtgatctgaaaccagaaaatatattgtgtgaatctccagaaaaggtgtctccagtgaaaatctgtgactttgacttgggcagtgggatgaaactgaacaactcctgtacccccataaccacaccagagctgaccaccccatgtggctctgcagaatacatggcccctgaggtagtggaggtcttcacggaccaggccacattctacgacaagcgctgtgacctgtggagcctgggcgtggtcctctacatcatgctgagtggctacccacccttcgtgggtcactgcggggccgactgtggctgggaccggggcgaggtctgcagggtgtgccagaacaagctgtttgaaagcatccaggaaggcaagtatgagtttcctgacaaggactgggcacacatctccagtgaagccaaagacctcatctccaagctcctggtgcgagatgcaaagcagagacttagcgccgcccaagttctgcagcacccatgggtgcaggggcaagctccagaaaagggactccccacgccgcaagtcctccagaggaacagcagcacaatggacctgacgctcttcgcagctgaggccatcgcccttaaccgccagctatctcagcacgaagagaacgaactagcagaggagccagaggcactagctgatggcctctgctccatgaagctttcccctccctgcaagtcacgcctggcccggagacgggccctggcccaggcaggccgtggtgaagacaggagcccgcccacagcactctgaaatgctccagtcacaccttataggccctaggcctggccaggcattgtcccctggaaacctgtgtggctaaagtctgctgagcaggcagcagcctctgctctgtggctccattcaggctttttcatctacgaaggccctgaggttcccatcaacccccatttccctagggtcctggaggaaaaagctttttccaaaggggttgtctttgaaaaggaaagcaatcacttctcactttgcataattgcctgcagcaggaacatctcttcactgggctccacctgctcacccgcctgcagatctgggatccagcctgctctcaccgctgtagctgtggcggctggggctgcagcctgcagggagaagcaagaagcatcagttgacagaggctgccgacacgtgcctcttccctctcttctctgtcaccctcctctggcggtccttccaccttcctctgtcctccggatgtcctctttgcccgtcttctcccttggctgagcaaagccatcccctcaattcagggaagggcaaggagccttcctcattcaggaaatcaaatcagtcttccggtctgcagcacggaaaagcacataatctttctttgctgtgactgaaatgtatccctcgtttatcatcccctttgtttgtgattgctgctaaagtcagtagtatcgtttttttaaaaaaaaagtttggtgtttttaaccatgctgttccagcaaagatgataccttaaactcccactgcaagcccatgaacttcccagagagtggaacggcttgctcttctttctagaatgtccatgcacttgggttttaatcagcagttccctattattctgattttaagctgttcctgtgatgaacttagagacagcatcggtgtctgctgctgtgtccccaggtcttgtgtgggtggcacagatctgggcagttagatagtgctctgtgcctaaggtgaagccacactagggtgaagcctcacttccctgtttgagcaatgcagtgcctgctgcccgtgtgcatgaaggtacagccattcagataagtggaactattgagttacataaagaaaatagatttgcatttgtcaggcagacgtttatacaacaccacggtgcttttatacattgtgcttattttaataaaactgaaattctaaaaaaaaaaaaaaaaaa

SEQ ID NO: 1460 - protein, 465 aa, Homo sapien
MVSSQKLEKPIEMGSSEPLPIADGDRRRKKKRRGRATDSLPGKFEDMYKLTSELLGEGAYAKVQGAVSLQNGKEYAVKIIEKQAGHSRSRVFREVETLYQCQGNKNILELIEFFEDDTRFYLVFEKLQGGSILAHIQKQKHFNEREASRVVRDVAAALDFLHTKDKVSLCHLGWSAMAPSGLTAAPTSLGSSDPPTSASQVAGTTGIAHRDLKPENILCESPEKVSPVKICDFDLGSGMKLNNSCTPITTPELTTPCGSAEYMAPEVVEVFTDQATFYDKRCDLWSLGVVLYIMLSGYPPFVGHCGADCGWDRGEVCRVCQNKLFESIQEGKYEFPDKDWAHISSEAKDLISKLLVRDAKQRLSAAQVLQHPWVQGQAPEKGLPTPQVLQRNSSTMDLTLFAAEAIALNRQLSQHEENELAEEPEALADGLCSMKLSPPCKSRLARRRALAQAGRGEDRSPPTAL

SEQ ID NO: 1461 - DNA, 4611 bp, Homo sapien
tggaagaagatggcggaaggcggagcggcggatctggacacccagcggtctgacatcgcgacgctgctcaaaacctcgctccggaaaggggacacctggtacctagtcgatagtcgctggttcaaacagtggaaaaaatatgttggctttgacagttgggacaaataccagatgggagatcaaaatgtgtatcctggacccattgataactctggacttctcaaagatggtgatgcccagtcacttaaggaacatcttattgatgaattggattacatactgttgccaactgaaggttggaataaacttgtcagctggtacacattgatggaaggtcaagagccaatagcacgaaaggtggttgaacagggtatgtttgtaaagcactgcaaagtagaagtatatctcacagaattgaagctatgtgaaaatggaaacatgaataatgttgtaactcgaagatttagcaaagctgacacaatagatacaattgaaaaggaaataagaaaaatcttcagtattccagatgaaaaggagaccagattgtggaacaaatacatgagtaacacatttgaaccactgaataaaccagacagcaccattcaggatgctggtttataccaaggacaggtattagtgatagaacagaaaaatgaagatggaacatggccaaggggtccttctactcctaatgtgaaaaactcaaattactgtcttccatcatataccgcttataagaactatgattattcggaacctggaagaaacaatgaacagccaggcctctgtggcctaagtaacttgggaaatacgtgtttcatgaactcagctattcagtgtttgagcaacacacctccacttactgagtatttcctcaatgataagtatcaagaagaactgaattttgacaatcccttaggaatgagaggtgaaatagctaaatcttatgccgaactgatcaagcaaatgtggtctggaaagtttagctacgtcaccccaagagcctttaagacacaggtaggacgttttgcacctcagttctctggatatcagcagcaagactgtcaagaactgttagctttcctattagatggattacatgaggatttgaatagaattaggaaaaaaccatatatacaattaaaagatgcagatggaaggccagataaggtggttgccgaagaagcctgggaaaaccatttaaaacgaaatgattctatcatagtagatatatttcatggccttttcaaatcaactttagtttgtcctgagtgtgctaagatttcagtaacatttgatcctttttgttacttgacacttccattgcccatgaaaaaagaacgcaccttggaagtttacttagttagaatggatccgcttaccaaacctatgcagtacaaagtggttgtccccaaaattggaaacatattagatctttgtacagcattgtctgctttgtcaggaatacctgcagataagatgatagttactgatatatacaatcatagatttcacagaatattcgctatggatgaaaaccttagtagtattatggaacgggatgatatttatgtgtttgaaattaacatcaataggacagaagatacagagcacgtgattattcctgtttgcctaagagaaaaattcagacactcgagttatacccaccatactggttcttcactttttggtcagccctttcttatggctgtaccacgaaacaatactgaagacaaactttataatctcctgctcttgagaatgtgccgatatgtcaaaatatctactgaaactgaagaaactgaaggatccctacactgctgtaaggaccaaaatattaatgggaatggcccaaatggcatacatgaagaaggctcaccaagtgaaatggaaacagatgagccagatgatgaatccagccaggatcaagaacttccctcagagaatgaaaacagtcagtctgaagattcagttggaggagataatgattctgaaaatggattatgtactgaggatacttgcaaaggtcaactcacgggacacaaaaaacgattgtttacattccagttcaacaacttaggcaatactgatatcaactacatcaaagatgataccaggcatataagatttgatgataggcagcttaggctagatgaaagatcttttcttgctttggattgggatcctgatttgaaaaaaagatattttgatgaaaatgctgctgaggactttgaaaaacatgaaagtgtggagtataaacctcctaaaaaaccctttgtgaaattaaaagattgcattgaactttttacaacaaaagaaaagctaggtgctgaagatccctggtattgtccgaattgtaaagaacatcagcaagccacaaagaaattggatttatggtccctgcctccagtacttgtagtacatctcaagcgattttcttacagtcgatacatgagagacaagttggataccttagttgattttcctatcaatgacttggatatgtcggaattcttaattaatccaaatgcaggtccttgccgctataatctgattgctgtttccaaccactatggagggatgggaggaggacactatactgcttttgcaaaaaataaagatgatggaaaatggtactattttgatgacagtagtgtctccactgcatctgaagaccaaattgtgtccaaagcagcatatgtactcttctaccagagacaagacactttcagtggaactggcttttttcctcttgaccgagaaactaaaggtgcttcagctgccactggcatcccattagaaagtgatgaagatagcaatgataatgacaatgatatagaaaatgaaaactgtatgcacactaactaatgaaagtcctagaagccataaaagagacactttcctgctggtggtatctatggaaatgatgaagttacccaccacattaaaacaaaagtctgagatggggagtttcagataaccgaatgtaaatcctttatcagattttaacttgtgcagtacttgaagtgaaacacaatgaaaactttaacagaaattgtctcttaatacatttacagtcttgtatttacaagctaaatatatataggaaatcacaaataaatcccttttaagtttgctgctgttttgattaattatgtttcctttaattttttggatgtgagttgatgacaaatgttaaatttgtggatgttggtcatttattttgctctaataatactgcaagaaaactatggctgaacttagtttttggataatctagttcatgtgcattaggctgccgtatatactactatgatatttagctgcagtatcaatgtggcataaatactgcggcagcattcttcgaaaaccgcattttcaaatttatccccgtaatcaatgtgggcctattaaaaaaccaaatcatgatacaagaaacaaccttggaaaagttatttccctttgtaatacctttaaaaatccagagtattatattcattttactgccactgtggaaacaggttctagatttcatactccatctaaagtcatttttcagttacatgtaagtattatttactgctattgggatctattcttcagatattcaaaaacattttttgctttaaaatgcatatctttaattgggtgttggtccaaaattaaaatttttgctgtctgtttttctctaccccattttgtggtaatttggcaacttgagctctcccaattattgtaatataaggacagacataatagtattctgtacccatagtaataattgcatcaagcttagatgagaaatttttttcatatactggcctttaaatcattaatggacaattggctataaaggtaggtctgttaactttctttgtgtgttcctgatggaattcaccatagccttacagcttttctcagaaggtaacttgttataagagaaatggcatttgcatgttccagagtcagaacctgtacagtatataaagcataaacaccttgaatttgattttagttcaccacattcaaggatccaggatgccaaaaatatgtgtgaacatttgaaacatttttatttgctgctttttccctttgatatagttgaaagaatgtattgtaaattggcatacaatactgcctttaatagaaaacctaaatgctggggcacatttcacatatcgactacctgagaaattgctttgtgtcccactgttattaaagcaaaaagtataatgttcttcacttgaactaatcaaatacaatagattataaattgtgtattgtaaataaaagttcactctgtgagtgcacattttggtaaattatttatttatgttagcatttaaaagtttaaaaaaaatgcatttgaccaggataaatgaggtatgttgatcatggctttgctttatatcttgatattaaagctggtttatcatcctggtattttaaaagctgctttggggttttttttttcttttttttttttttaatgtaaactaacctcctgcatgacagaggttaaaattttgtctgcacttgagttcacttgagtttacatttgaaatgtgcatgtttatttatatagatttcaataaagctattcaaggcctt

SEQ ID NO: 1462 - protein, 952 aa, Homo sapien
MAEGGAADLDTQRSDIATLLKTSLRKGDTWYLVDSRWFKQWKKYVGFDSWDKYQMGDQNVYPGPIDNSGLLKDGDAQSLKEHLIDELDYILLPTEGWNKLVSWYTLMEGQEPIARKVVEQGMFVKHCKVEVYLTELKLCENGNMNNVVTRRFSKADTIDTIEKEIRKIFSIPDEKETRLWNKYMSNTFEPLNKPDSTIQDAGLYQGQVLVIEQKNEDGTWPRGPSTPNVKNSNYCLPSYTAYKNYDYSEPGRNNEQPGLCGLSNLGNTCFMNSAIQCLSNTPPLTEYFLNDKYQEELNFDNPLGMRGEIAKSYAELIKQMWSGKFSYVTPRAFKTQVGRFAPQFSGYQQQDCQELLAFLLDGLHEDLNRIRKKPYIQLKDADGRPDKVVAEEAWENHLKRNDSIIVDIFHGLFKSTLVCPECAKISVTFDPFCYLTLPLPMKKERTLEVYLVRMDPLTKPMQYKVVVPKIGNILDLCTALSALSGIPADKMIVTDIYNHRFHRIFAMDENLSSIMERDDIYVFEININRTEDTEHVIIPVCLREKFRHSSYTHHTGSSLFGQPFLMAVPRNNTEDKLYNLLLLRMCRYVKISTETEETEGSLHCCKDQNINGNGPNGIHEEGSPSEMETDEPDDESSQDQELPSENENSQSEDSVGGDNDSENGLCTEDTCKGQLTGHKKRLFTFQFNNLGNTDINYIKDDTRHIRFDDRQLRLDERSFLALDWDPDLKKRYFDENAAEDFEKHESVEYKPPKKPFVKLKDCIELFTTKEKLGAEDPWYCPNCKEHQQATKKLDLWSLPPVLVVHLKRFSYSRYMRDKLDTLVDFPINDLDMSEFLINPNAGPCRYNLIAVSNHYGGMGGGHYTAFAKNKDDGKWYYFDDSSVSTASEDQIVSKAAYVLFYQRQDTFSGTGFFPLDRETKGASAATGIPLESDEDSNDNDNDIENENCMHTN

SEQ ID NO: 1463 - DNA, 3336 bp, Homo sapien
ccagggccggtgtctccaggagagggccgagcgcacagcagctctaggacctcgcaggcgcctcggcgcggcactcacgtagagcccaaggagcagtccccgacctctcctcggagggccgtgcaggcttccccggcggtccctacctgcgcctccgcccgccagcggcgctggggaaggggaggagcggcccggacgctgcccgccgcgcgcagggagccgcccgccgcaggccttgccgccgcccgcccgcgctctccccgcgagccccggagggcgggtctgcggccgagccagcggcggcggaggggcagcgcagacctctgcggcccgggcgggcgcggcgcgggagtcctgggccgctggcgggcaacgcctctgcccgacctcgctggggaaggctggcgctgctgcccggccggagccaggggcaggctgcgcaaaggtgacttagggagaccttgcgggccgccctgggtcgcgcctcccggatcggctcgcctcggctcgactggaggggaggaggaggagcaggccgagcgcattcgcgctggagcttgcgaggagcgcagggtggagcgcgccagccggggtcctcggatctggcccaggtgaggaattttaaattggaacaagagcaagaaaaaaacaaaatcttgtcagaagcactggagacgctggccactgaacatcatgaattagagcagtctctggtgaaaggctctccacccgccagcatccttagcgaggacgagttctatgatgcgctgtcagattccgagtccgaaaggtccctgagtagattggaagcagtgacagcacgctcctttgaagaggaaggagagcatttgggcagtagaaaacacagaatgtccgaagaaaaagactgtggtggcggagatgctctctccaatggcatcaagaaacacagaacaagtttgccttctcctatgttttccagaaatgacttcagtatctggagcatcctcagaaaatgtattggaatggaactatccaagatcacgatgccagttatatttaatgagcctctgagcttcctacagcgcctaactgaatacatggagcatacttacctcatccacaaggccagttcactctctgatcctgtggaaaggatgcagtgtgtagctgcgtttgctgtatctgctgttgcttctcagtgggaacggactggaaaacctttcaacccactgctgggagagacttatgaattagtgcgagatgaccttggatttagactcatctccgaacaggtcagccatcacccaccaatcagtgcatttcatgctgaaggattaaacaatgacttcatctttcatggctctatctatcccaaactgaaattctgggggaagagtgtagaagcagaacccaaaggaaccatcaccttggagctccttgaacacaatgaggcatatacatggacaaatcccacctgctgtgtgcataatatcattgtgggtaaactgtggatcgaacagtatggcaatgtggaaattataaaccacaagactggggacaaatgtgtgttgaattttaagccatgtggcctttttggtaaggaattacacaaagttgaaggctacattcaagataaaagcaaaaagaagctctgtgccctctatgggaagtggactgaatgtttatacagtgttgaccctgccacgtttgacgcttacaaaaaaaatgataagaaaaatacagaagagaagaagaacagcaaacagatgagcacctctgaggagttggatgaaatgccagtgccggattctgaaagtgtattcattatccctggaagcgttcttctatggcgaatagccccacggcctccaaattctgcccagatgtataattttactagttttgcaatggttttgaatgaagtagacaaagacatggagagtgtgattcccaagacagactgcaggttacggcctgacatcagagccatggaaaatggagagatagatcaagctagtgaagaaaaaaaacgacttgaggaaaaacaaagagcagcccgcaaaaacaggtccaagtcagaagaggactggaagacgaggtggttccatcaaggtcctaatccctacaatggagcacaggactggatttactctggcagctactgggacagaaattacttcaatttgcctgacatttattaaaatgcatacaagtcagggtgtttggctaatctacaaataagtcttaaacctatgtttttaaatttttttcccttggtttctacttatcttttaaaaaaaaaatgaaaaaacactcatgagataactgcatttcacccaacaaaagcagggtataaggcgatattggtgatgaaagtcttaggaaaaatgcataattttgctataaaatgtacttatttggaatactattttatatagaggtaagagaacactgctggggaatatgctttttatggttgctgttgccatatttactgaaggtttatacctaaatgtaactttagctttatggaactatatagtaatcccaaatcaagttattttgaatatttttatgctgtcatgcttgaatgttttagatgtaacctttgacatatttagaactctcctcctatacaatgtttattctcagatatagaggttatgtcattttataaagacttcattgataagatggcttttattcatactaatcctcccaatgttaccccttccatcttccaagaagaaaaaaaatgcctgaatattcagaatagatatttctgatttgaaaattctaaagaattaaactggaaaagtatttcatttacttagtgctctgaatttacttttacagttttctgcagtcagtatcattaaaatggttaagtttacatttgaactgaaaatatgtataaaatctagcaattcacaaaaatgccctagaaatatagattttaatcaccattacataatgacaaaccttgttaaatgcttccacttccagtggcaaatgccactagggaaagtaagttgcactcatgtaagtatcaaactatataaaaggaggccttgtgcatttcaagtttgcaaagtacctgtgtacttaaaatatgtgtggagacctactgtacagtagttttgcccctttaattggggcacattcatcttaaatcttatagtatttatccacccaaaccccagactgagatactgctcccaggggcctaggtagctgccagtccgtgattttaattgctgtcttgaagttaacaagtgttataatgaaataatctacctgatgctaaataaaggctttagaatgttccccaaaaaaaaaaaaaaaaaaaaaaaa

SEQ ID NO: 1464 - protein, 437 aa, Homo sapien
MSEEKDCGGGDALSNGIKKHRTSLPSPMFSRNDFSIWSILRKCIGMELSKITMPVIFNEPLSFLQRLTEYMEHTYLIHKASSLSDPVERMQCVAAFAVSAVASQWERTGKPFNPLLGETYELVRDDLGFRLISEQVSHHPPISAFHAEGLNNDFIFHGSIYPKLKFWGKSVEAEPKGTITLELLEHNEAYTWTNPTCCVHNIIVGKLWIEQYGNVEIINHKTGDKCVLNFKPCGLFGKELHKVEGYIQDKSKKKLCALYGKWTECLYSVDPATFDAYKKNDKKNTEEKKNSKQMSTSEELDEMPVPDSESVFIIPGSVLLWRIAPRPPNSAQMYNFTSFAMVLNEVDKDMESVIPKTDCRLRPDIRAMENGEIDQASEEKKRLEEKQRAARKNRSKSEEDWKTRWFHQGPNPYNGAQDWIYSGSYWDRNYFNLPDIY

SEQ ID NO: 1465 - DNA, 1622 bp, Homo sapien
ggcacgaggaagctactcagataagaggctccaagaggacatttttggatgtgaaaaacaatgagaaggaggacaacacacatttacaatcgtcttaattttgtactcagaaaaaggatgtgaagacaatgcacagggaatacaatagtttcagatctgtgtacagtttccttttgcttcatctcctgcaacaatgtaatgaagacaccatgatatcattaacatttcacacaaaaggaaaatgaggctgaaatggtgtgggcaaggcccaggaatctggagcatccctaaccaagcagcagagcacctgggatagagaaagtgctcaagaatgttcacttactgattactacaatcaaaaaaagatacgacactaatttaccacattcttcttacttattttatgagatactattcttccaaggtggagaaagtggagaaagtagagtgacgcagctaagggagtaaatcgaccctcagccaacaagtggcaaaagcctgaagaaagtgatcaagatcactgatgaccccgcggcccatctccaagggggcgggtatcacaaccccgacgccacaccacgtatcattccgcaaaactcccgcgcctcccacgcagaactggcaagagggaaggcgagacagcagtgaacagctggtacgcagcacccacagcaccgcggcagcagctagtgccgactcccgcctagctcttttgactctgttcgcgggaagaatggggaaacagtaaggttgcggcgcctcccgcgagacgaggtacctgaggctggccccgcagtcccccgccgcaccagcaccggagcttcacaccccacttccggggtcaagtcaccgccgggaatcctgtgatcgcagaaaggtagtctcaggttccgcccctatccaagtcccgcctccactgcctctcgccctgtatctgtcaacttccgggacgccgcgcgtcactaagcagccaatctccacttccggactcatccagccccttctccacccctttcagagacagcgcgattgcgatttaggtttccgcgcatttaattggcgaagctggagcgctagtcttcgctgattggtgccgagaaatctgccccatagacacccgcggggcgcacagtttcagtcgtccgtgggtttcccgccagccgcagtcttggaccataatcatggtggacatgatggacttgcccaggtcgcgcatcaacgccggcatgctagctcaattcatcgacaagcctgtctgcttcgtagggaggctggaaaagattcatcccaccggaaaaatgtttattctttcagatggagaaggaaaaaatggaaccatcgagttgatggaaccccttgatgaagaaatctctggaattgtggaagtggttggaagagtaaccgccaaggccaccatcttgtgtacatcttatgtccagtttaaagaagatagccatccttttgatcttggactttacaatgaagctgtgaaaattatccatgacttccctcagttttatcctttagggattgtgcaacatgattgatcttgatggattttcatacgattgtaaatgagctatattaaagtctattaaaggaaaaaaaaaaaaaaaaaaaaa

SEQ ID NO: 1466 - protein, 121 aa, Homo sapien
MVDMMDLPRSRINAGMLAQFIDKPVCFVGRLEKIHPTGKMFILSDGEGKNGTIELMEPLDEEISGIVEVVGRVTAKATILCTSYVQFKEDSHPFDLGLYNEAVKIIHDFPQFYPLGIVQHD

SEQ ID NO: 1467 - DNA, 2496 bp, Homo sapien
gttttgaaagttgatggagcgaactgcttttccaaagactcttttgaaaaactttttaagtaggccattctgactttaacatttctctttgtcttaacattagacaaaaagtaaccttcctgaagaggacatgtgattggaagttgtcaattgttgaagcattggtaactccagtctctaacgttttagaaaatcataacaagcggttctctaccctgtaaaggtgaactactgagttcttcattatgtctgatggagattatgattacctcatcaagtttttagctttgggagactctggtgtagggaagaccagtgtactttaccaatatacagatggtaaatttaactccaaatttatcacaacagtgggcattgatttcagggaaaaaagagtggtgtacagagccagtgggccggatggagccactggcagaggccagagaatccacctgcagttatgggacacagcagggcaggagaggtttcgtagcttaacgacagcgttcttcagagatgctatgggttttcttctactttttgatctgacaaatgagcaaagtttcctcaatgtcagaaactggataagccagctacagatgcatgcatattgtgaaaacccagatatagtgctgtgtggaaacaagagtgatctggaggaccagagagtagtgaaagaggaggaagccatagcactcgcagagaaatatggaatcccctactttgaaactagtgctgccaatgggacaaacataagccaagcaattgagatgcttctggacctgataatgaagcgaatggaacggtgtgtggacaagtcctggattcctgaaggagtggtgcgatcaaatggtcatgcctctacggatcagttaagtgaagaaaaggagaaaggggcatgtggctgttgagaagtcaagtaagtgacatagtagttcaggtggcccatgcctgggatcttctctatgattgatacatggcacagtgagagattaatgggcattgtgtacaaattgcttctcaccatccccattagacctacgaataaagcatccggttctaaaattaatttgttgcagctttgtaaatatttctttaagattcagcctgagagttaggagaaatatttcagagccaaaagtgccttatacaaccttagcctattatagtaaatcattcaaggattcagaattttgcagtcacagaagagtgtatttattatgtagaatgaatgagggtactgtcacctgccttaatgtaggtaggcccagagtcttacatttaagatcttacatgcagttataaaaccgccacagtcttcaatccagatttgaagactcatgccataggtgacattctaaaataccattaaagccacttaaatgttaaataagaatatacatgcacatcagctcaatgtctttgagtattaattttatgtaagcattctatttaacatgaatataggacaaatcatggctatatctatagaccttggataaactggattgaccaattatacactcacggtgacttttttattggtgggaaggggattggggtggggcaggctggcttaatgtaatatgagcaaccaaagtgggacttctgtctccccgctatattcccattgctctgaatggttgattgaagggtcagggaactagattttatggctttagttcactgtgattgtacatttatacttggcctatgtgctggccgcacctgaacatagctggtgcttatgccgagttatttgtgatgagtaaatatttagtttctttttcttcatatttataatgttgatctggcatcctcaggctgcagctttattagcttataaattactcatctctgtctttaccagcaggctctgtattgttgatatttgcaacttgttttgcttttccattggtggaattgaaataattagtttttaattacataagatgcctgtttgctatttggtggaagatagatgttcatattgaagcagtcacatttgtactgtagttcaataaaagaaaaatgaagtattctgtagcctatatttttcatagagctcatgagcatttactgtacttgctgggtcttgccaagatcatttattccgctgcattgccaaagtgtcttcataccaaattaaaggtggttttaatatatgtttcatggaagttgtttataaaattcaaaggtatttcatttaggtgaaaagtcttatttattaaagtggtttgaataaagtagatcaaaacttccagagatcttaatggctatataggaagaaatatcactcaccataatttaaataaagaataaaaatacatgtattttatggtggcaaatgtttggtagaactgtaattagaaaaatacaagtatatttgcgtgatggttacactagaagcccagactttacgactacacaatatattcatgtatctaaactgtacttgtaccccctaaatttatttttaaaaaaaaaaaaaaaaaa

SEQ ID NO: 1468 - protein, 221 aa, Homo sapien
MSDGDYDYLIKFLALGDSGVGKTSVLYQYTDGKFNSKFITTVGIDFREKRVVYRASGPDGATGRGQRIHLQLWDTAGQERFRSLTTAFFRDAMGFLLLFDLTNEQSFLNVRNWISQLQMHAYCENPDIVLCGNKSDLEDQRVVKEEEAIALAEKYGIPYFETSAANGTNISQAIEMLLDLIMKRMERCVDKSWIPEGVVRSNGHASTDQLSEEKEKGACGC

SEQ ID NO: 1469 - DNA, 1973 bp, Homo sapien
agccgccgcctcgccgcttcccctcgtcggagcggccgctcgtccgcccggcttgaggcccgcggggagcgcggcgcaattcgtcggcccgcgggggggcggcctcccggcatcttcgcggcgaccaaggactaccaggaaggggagcggctgggatggcgcgtccgcggccccgcgagtacaaagcgggcgacctggtcttcgccaagatgaagggctacccgcactggccggcccggattgatgaactcccagagggcgctgtgaagcctccagcaaacaagtatcctatcttcttttttggcacccatgaaactgcatttctaggtcccaaagacctttttccatataaggagtacaaagacaagtttggaaagtcaaacaaacggaaaggatttaacgaaggattgtgggaaatagaaaataacccaggagtaaagtttactggctaccaggcaattcagcaacagagctcttcagaaactgagggagaaggtggaaatactgcagatgcaagcagtgaggaagaaggtgatagagtagaagaagatggaaaaggcaaaagaaagaatgaaaaagcaggctcaaaacggaaaaagtcatatacttcaaagaaatcctctaaacagtcccggaaatctccaggagatgaagatgacaaagactgcaaagaagaggaaaacaaaagcagctctgagggtggagatgcgggcaacgacacaagaaacacaacttcagacttgcagaaaaccagtgaagggacctaactaccataatgaatgctgcatattaagagaaaccacaagaaggttatatgtttggttgtctaatattcttggatttgatatgaaccaacacatagtccttgttgtcattgacagaaccccagtttgtatgtacattattcatattcctctctgttgtgtttcggggggaaaagacattttagccttttttaaaagttactgatttaatttcatgttatttggttgcatgaagttgcccttaaccactaaggattatcaagatttttgcgcagacttatacatgtctaggatccttttatcaaggcagttatgatcatcgttttcctgccttgaccccaccatcatcaaacactcagttaaatataaattaacattttttagatgaccactcaacataatgcttaagaatggaatttcctctctgtgacagaacccaggaattaattcctaaatacataacgttggtatattgaagacgaaattaaaattgtccttcagttttgaggccatgtgtaaagtttaaccatattgtaaaatatctattccgtattagaaatagctagttgacagcttatacttctcaaaattcatattgttatgtacacaaactaagtttctatatgtgaagttagtgagtctttttgtgttactccaaaataaaggcaatgatttatttttttcccagtgccaatacaattttgagctaagcactcaaggtggatactttacattttaaagctggaatcagcaacagccctatgggaaaccagacaaagcattgacttttaaatgtagacttttaaaataaactgttttcttttggaactacaattagaatagttaatattcatccttaaaccattattatgtgtacattattgttgctattgtgataatagagaattttatttatttttatgccagcttatattgtgagaacacatttagtcagtttgggttttatcaatcctgttaatgcttgtccttggaacatctttcgcgtattcacggtttgtagttgaaaagtttactgtaaaaaaatcaaaaacaaaaaaatgtattgtttttacagaataaatttattgggatgtgtactgggagtaagatttgaggttgtaagcaaactaagttagtgtaatttggcttcatatatgtaacgtgaggtattaatgtaattcatatattaaagcaaaaattgttcgcagc

SEQ ID NO: 1470 - protein, 203 aa, Homo sapien
MARPRPREYKAGDLVFAKMKGYPHWPARIDELPEGAVKPPANKYPIFFFGTHETAFLGPKDLFPYKEYKDKFGKSNKRKGFNEGLWEIENNPGVKFTGYQAIQQQSSSETEGEGGNTADASSEEEGDRVEEDGKGKRKNEKAGSKRKKSYTSKKSSKQSRKSPGDEDDKDCKEEENKSSSEGGDAGNDTRNTTSDLQKTSEGT

SEQ ID NO: 1471 - DNA, 10156 bp, Homo sapien
gcggccgctcccccggagcggctaaagcggcggcgaccgaggcgagcaatgggcacggcagtctcggcagagcacaggcgcttcaccgcggctgctcgggctccgcgctgacctgcccgggcggccgcctattgtctttctccgcggcgaaggtgaagagttgtcccagctcggcccgcgggggagccccgggagccgcacgtgtcctgggtcatgaaacttaatccacagcaagctcccttatatggtgattgtgttgttacagtgctgcttgctgaagaggacaaagctgaagatgatgtagtgttttacttggtatttttgggttccaccctccgtcactgtacaagtactcggaaggtcagttctgatacattggagaccattgctcctggtcatgattgttgtgaaacagtgaaggtgcagctctgtgcttccaaagagggccttcccgtgtttgtggtggctgaagaagactttcatttcgtccaggatgaagcgtatgatgcagctcaattcctagcaaccagtgctggaaatcagcaggctttgaactttacccgttttcttgaccagtcaggacccccatctggggatgtgaattcccttgataagaagttggtgctggcattcaggcacctgaagctgcccacggagtggaatgtattggggacagatcagagtttgcatgatgctggcccgcgagagacattgatgcattttgctgtgcggctgggactgctgaggttgacgtggttcctgttgcagaagccaggtggccgcggagctctcagtatccacaaccaggaaggggcgacgcctgtgagcttggccttggagcgaggctatcacaagctgcaccagcttctaaccgaggagaatgctggagaaccagactcctggagcagtttatcctatgaaataccgtatggagactgttctgtgaggcatcatcgagagttggacatctatacattaacctctgagtctgattcacatcatgaacacccatttcctggagacggttgcactggaccaatttttaaacttatgaacatccaacagcaactaatgaaaacaaacctcaagcagatggacagtcttatgcccttaatgatgacagcacaggatccttccagtgccccagagacagatggccagtttcttccctgtgcaccggagcccacggaccctcagcgactttcttcttctgaagagactgagagcactcagtgctgcccagggagccctgttgcacagactgaaagtccctgtgatttgtcaagcatagttgaggaggagaatacagaccgttcctgtaggaagaaaaataaaggcgtggaaagaaaaggggaagaggtggagccagcacctattgtggactctggaactgtatctgatcaagacagctgccttcagagcttgcctgattgtggagtaaagggcacggaaggcctttcgtcctgtggaaacagaaatgaagaaactggaacaaaatcttctggaatgcccacagaccaggagtccctgagcagtggagatgctgtgcttcagagagacttggtcatggagccaggcacagcccagtattcctctggaggtgaactgggaggcatttcaacaacaaatgtcagtaccccagacactgcaggggaaatggaacatgggctcatgaacccagatgccactgtttggaagaatgtgcttcagggaggggaaagtacaaaggaaagatttgagaactctaatattggcacagctggagcctctgacgtgcacgtcacaagtaagcctgtggataaaatcagtgttccaaactgtgcccctgctgccagttccctggatggtaacaaacctgctgagtcttcacttgcatttagtaatgaagaaacctccactgaaaaaacagcagaaacggaaacttcacgaagtcgtgaggagagtgctgatgctccagtagatcagaattctgtggtgattccagctgctgcaaaagacaagatttcagatggattagaaccttatactctcttagcagcaggcataggtgaggcaatgtcaccctcagatttagcccttcttgggctggaagaagatgtaatgccacaccagaactcagaaacaaattcatctcatgctcaaagccaaaagggcaaatcctcacccatttgttctacaactggagacgataaactttgtgcagactctgcatgtcaacagaacacagtgacttctagtggcgatttggttgcaaaactgtgtgataacatagttagcgagtccgaaagcaccacagcaaggcaacccagctcacaagatccacccgatgcctcccactgtgaagacccacaggctcatacagtcacctctgaccctgtaagggatacccaggaacgtgcggatttttgtcctttcaaagtggtggataacaaaggccaacgaaaagatgtgaaactagataaacctttaacaaatatgcttgaggtggtttcacatccacatccagttgtccctaaaatggagaaagaactggtgccagaccaggcagtaatatcagacagtactttctctctggcaaacagtccaggcagtgaatcagtaaccaaggatgacgcactttcttttgtcccctcccagaaagaaaagggaacagcaactcctgaactacatacagctacagattatagagatggcccagatggaaattcgaatgagcctgatacgcggccactagaagacagggcagtaggcctgtccacatcctccactgctgcagagcttcagcacgggatggggaataccagtctcacaggacttggtggagagcatgagggtcccgcccctccagcaatcccagaagctctgaatatcaaggggaacactgactcttccctgcaaagtgtgggtaaggccactttggctttagattcagttttgactgaagaaggaaaacttctggtggtttcagaaagctctgcagctcaggaacaagataaggataaagcggtgacctgttcctctattaaggaaaatgctctctcttcaggaactttgcaggaagagcagagaacaccacctcctggacaagatactcaacaatttcatgaaaaatcaatctcagctgactgtgccaaggacaaagcacttcagctaagtaattcaccgggtgcatcctctgcctttcttaaggcagaaactgaacataacaaggaagtggccccacaagtctcactgctgactcaaggtggggctgcccagagcctggtgccaccaggagcaagtctggccacagagtcaaggcaggaagccttgggggcagagcacaacagctccgctctgttgccatgtctgttgccagatgggtctgatgggtccgatgctcttaactgcagtcagccttctcctctggatgttggagtgaagaacactcaatcccagggaaaaactagtgcctgtgaggtgagtggagatgtgacggtggatgttacaggggttaatgctctacaaggtatggctgagcccagaagagagaatatatcacacaacacccaagacatcctgattccaaacgtcttgttgagccaagagaagaatgccgttctaggtttgccagtggctctacaggacaaagctgtgactgacccacagggagttggaaccccagagatgatacctcttgattgggagaaagggaagctggagggagcagaccacagctgtaccatgggtgacgctgaggaagcccaaatagacgatgaagcacatcctgtcctactgcagcctgttgccaaggagctccccacagacatggagctctcagcccatgatgatggggccccagctggtgtgagggaagtcatgcgagccccgccttcaggcagggaaaggagcactccctctctaccttgcatggtctctgcccaggacgcacctctgcctaagggggcagacttgatagaggaggctgccagccgtatagtggatgctgtcatcgaacaagtcaaggccgctggagcactgcttactgagggggaggcctgtcacatgtcactgtccagccctgagttgggtcctctcactaaaggactagagagtgcttttacagaaaaagtgagtactttcccacctggggagagcctaccaatgggcagtactcctgaggaagccacggggagccttgcaggatgttttgctggaagggaggagccagagaagatcattttacctgtccaggggcctgagccagcagcagaaatgccagacgtgaaagctgaagatgaagtggattttagagcaagttcaatttctgaagaagtggctgtagggagcatagctgctacactgaagatgaagcaaggcccaatgacccaggcgataaaccgagaaaactggtgtacaatagagccatgccctgatgcagcatctcttctggcttccaagcagagcccagaatgtgagaacttcctggatgttggactgggcagagagtgtacctcaaaacaaggtgtacttaaaagagaatctgggagtgattctgacctctttcactcacccagtgatgacatggacagcatcatcttcccaaagccagaggaagagcatttggcctgtgatatcaccggatccagttcatccaccgatgacacggcttcactggaccgacattcttctcatggcagtgatgtgtctctctcccagattttaaagccaaacaggtcaagagatcggcaaagccttgatggattctacagccatgggatgggagctgagggtcgagaaagtgagagtgagcctgctgacccaggcgacgtggaggaggaggagatggacagtatcactgaagtgcctgcaaactgctctgtcctaaggagctccatgcgctctctttctcccttccggaggcacagctgggggcctgggaaaaatgcagccagcgatgcagaaatgaaccaccggagttcaatgcgagttcttggggatgttgtcaggagacctcccattcataggagaagtttcagtctagaaggcttgacaggaggagctggtgtcggaaacaagccatcctcatctctagaagtaagctctgcaaatgccgaagagctcagacacccattcagtggtgaggaacgggttgactctttggtgtcactttcagaagaggatctggagtcagaccagagagaacataggatgtttgatcagcagatatgtcacagatctaagcagcagggatttaattactgtacatcagccatttcctctccattgacaaaatccatctcattaatgacaatcagccatcctggattggacaattcacggcccttccacagtaccttccacaataccagtgctaatctgactgagagtataacagaagagaactataatttcctgccacatagcccctccaagaaagattctgaatggaagagtggaacaaaagtcagtcgtacattcagctacatcaagaataaaatgtctagcagcaagaagagcaaagaaaaggaaaaagaaaaagataagattaaggagaaggagaaagattctaaagacaaggagaaagataagaagactgtcaacgggcacactttcagttccattcctgttgtgggtcccatcagctgtagccagtgtatgaagcccttcaccaacaaagatgcctatacttgtgcaaattgcagtgcttttgtccacaaaggctgccgagaaagtctagcctcctgtgcaaaggtcaaaatgaagcagcccaaagggagccttcaggcacatgacacatcatcactgcccacggtcattatgagaaacaagccctcacagcccaaggagcgtcctcggtccgcagtcctcctggtggatgaaaccgctaccaccccaatatttgccaatagacgatcccagcagagtgtctcgctctccaaaagtgtctccatacagaacattactggagttggcaatgatgagaacatgtcaaacacctggaaattcctgtctcattcaacagactcactaaataaaatcagcaaggtcaatgagtcaacagaatcacttactgatgagggagtaggtacagacatgaatgaaggacaactactgggagactttgagattgagtccaaacagctggaagcagagtcttggagtcggataatagacagcaagtttctaaaacagcaaaagaaagatgtggtcaaacggcaagaagtaatatatgagttgatgcagacagagtttcatcatgtccgcactctcaagatcatgagtggtgtgtacagccaggggatgatggcggatctgctttttgagcagcagatggtagaaaagctgttcccctgtttggatgagctgatcagtatccatagccaattcttccagaggattctggagcggaagaaggagtctctggtggataaaagtgaaaagaactttctcatcaagaggataggggatgtgcttgtaaatcagttttcaggtgagaatgcagaacgtttaaagaagacatatggcaagttttgtgggcaacataaccagtctgtaaactacttcaaagacctttatgccaaggataagcgttttcaagcctttgtaaagaagaagatgagcagttcagttgttagaaggcttggaattccagagtgcatattgcttgtaactcagcggattaccaagtacccagttttattccaaagaatattgcagtgtaccaaagacaatgaagtggagcaggaagatctagcacagtccttgagcctggtgaaggatgtgattggagctgtagacagcaaagtggcaagttatgaaaagaaagtgcgtctcaatgagatttatacaaagacagatagcaagtcaatcatgaggatgaagagtggtcagatgtttgccaaggaagatttgaaacggaagaagcttgtacgtgatgggagtgtgtttctgaagaatgcagcaggaaggttgaaagaggttcaagcagttcttctcactgacattttagttttccttcaagaaaaagaccagaagtacatctttgcatcattggaccagaagtcaacagtgatctctttaaagaagctgattgtgagagaagtggcacatgaggagaaaggtttattcctgatcagcatggggatgacagatccagagatggtagaagtccatgccagctccaaagaggaacgaaacagctggattcagatcattcaggacacaatcaacaccctgaacagagatgaagatgaaggaattcctagtgagaatgaggaagaaaagaaaatgttggacaccagagcccgagaattaaaagaacaacttcaccagaaggaccaaaaaatcctactcttgttggaagagaaggagatgattttccgggacatggctgagtgcagcacccctctcccagaggattgctccccaacacatagccctagagttctcttccgctccaacacagaagaggctctcaaaggaggacctttaatgaaaagtgcaataaatgaggtggagatccttcagggtttggtgagtggaaatctgggaggcacacttgggccgactgtcagcagccccattgagcaagatgtggtcggtcccgtttccctgccccggagagcagagacctttggaggatttgacagccatcagatgaatgcttcaaaaggaggcgagaaggaagagggagatgatggccaagatcttaggagaacggaatcagatagtggcctaaaaaagggtggaaatgctaacctggtatttatgcttaaaagaaacagtgagcaggttgtccagagcgttgttcatctctacgagctcctcagcgctctgcagggtgtggtgctgcagcaggacagctacattgaggaccagaaactggtgctgagcgagagggcgctcactcgcagcttgtcccgcccgagctccctcattgagcaggagaagcagcgcagcctggagaagcagcgccaggacctggccaacctgcagaagcagcaggcccagtacctcgaggagaagcgcaggcgcgagcgtgagtgggaagctcgtgagagggagctgcgggagcgggaggccctcctggcccagcgcgaggaggaggtgcagcaggggcagcaggacctggaaaaggagcgggaggagctccagcagaagaagggcacataccagtatgacctggagcgactgcgtgctgcccagaaacagcttgagagggaacaggagcagctgcgccgggaggcagagcggctcagccagcggcagacagaacgggacctgtgtcaggtttcccatccacataccaagctgatgaggatcccatcgttcttccccagtcctgaggagcccccctcgccatctgcaccttccatagccaaatcagggtcattggactcagaactttcagtgtccccaaaaaggaacagcatctctcggacacacaaagataaggggccttttcacatactgagttcaaccagccagacaaacaaaggaccagaagggcagagccaggcccctgcgtccacctctgcctctacccgcctgtttgggttaacaaagccaaaggaaaagaaggagaaaaaaaagaagaacaaaaccagccgctctcagcccggtgatggtcccgcgtcagaagtatcagcagagggtgaagagatcttctgctgaccctcttcctctctgctgaggcagctgcctcctgatcctggccagcccacctctcctgctgtccccgcgtgcacaagtctcttacactggacgcccactgctcctcagcgtccagtcctcctgggcggccccaggtcctggacaataagcaacagatgatattgagtgtcgggtggggaaggaggcccagactctgcttcggccatgatttgtgactgcccaggactctcaggttgggctggccctactcaggattacactgaaagtaatggcctcgtaagtacaggtgatggttttggacacgtcaggaattcctaaaggctgaaagagtgtatccaagtaaggtctgaacctccgactgccttttatttgggggaacacaaaaccaaacagcagatgttttggacttgatctgtgtacgtacatggggacctgtctgcatatacacacggggaatgccagaagaaggcccagtctgcaccaggcgtctggtcaacttagcacaagggcagtgcctggacggacccggagcccccgcatatcagcagttcacccagtactcctcagagactggtttccctctaaacccatcccgggcacataccacccctgttttgcatgtatttctcatttcattttagggatgacaaacatttgtgaaaccagtgagagaaggcttgatgtgtataaaagacgtgatgtgcaccacctcgatctcggtgtttcaggcactaaagcaacaaaacaacccatagtatctcattttgtcatcagatccagaagaaatatcctggttttccagcatgtttacccacatgttttgggcatggataaagtgaagaggcctactcaccattatccctgcagcgtgacaccttttgattgtcactgaccactcagaaggggccacggcctcctggctgtgttcctgagcccccgtcgtgcctctcccagacagcagctgtctggcccttgctgggtgagggcacaccactgccaggggtcagcctcgcacccaggccaggcagaagctgtgctctgaagctaggacagctggctgagaagtgggttcaggcgaagggtgaagccatgtgtagcagttcctgccagtgcagatctggagaggagctggcccggaaggcgtggttgtgaaagcgcccttcttatgttaggaggccttggcaaaattggatttcttcaaaaatacatgtaaaggtctgttgttgaattgtactctgcccctggaagcagatacagatggctgcctgctgctcggctttgcttttgcttttcccaccgtgttttcatctttgttcacttgaggctttccccagctggtgtgtgcaggacagttcatggtaatgttgccctctgaggccccgtacaccagaagggaggccctggaaaattttgtgcttccaacgtggccttcaattcttgcttttttgcccctcggaagcatggggcttttgagcacacttaaaaaaaaaaaccggaattc

SEQ ID NO: 1472 - protein, 2000 aa, Homo sapien
MKLNPQQAPLYGDCVVTVLLAEEDKAEDDVVFYLVFLGSTLRHCTSTRKVSSDTLETIAPGHDCCETVKVQLCASKEGLPVFVVAEEDFHFVQDEAYDAAQFLATSAGNQQALNFTRFLDQSGPPSGDVNSLDKKLVLAFRHLKLPTEWNVLGTDQSLHDAGPRETLMHFAVRLGLLRLTWFLLQKPGGRRALSIHNQEGATPVSLALERGYHKLHQLLTEENAGEPDSWSSLSYEIPYGDCSVRHHRELDIYTLTSESDSHHEHPFPGDGCTGPIFKLMNIQQQLMKTNLKQMDSLMPLMMTAQDPSSAPETDGQFLPCAPEPTDPQRLSSSEETESTQCCPGSPVAQTESPRDLSSIVEEENTDRSCRKKNKGVERKGEEVEPAPIVDSGTVSDQDSCLQSLPDCGVKGTEGLSSCGNRNEETGTKSSGMPTDQESLSSGDAVLQRDLVMEPGTAQYSSGGELGGISTTNVSTPDTAGEMEHGLMNPDATVWKNVLQGGESTKERFENSNIGTAGASDVHVTSKPVDKISVPNCAPAASSLDGNKPAESSLAFSNEETSTEKTAETETSRSCEESADAPVDQNSVVIPAAAKDKISDGLEPYTLLAVGIGETMSPPDLALLGLEEDVMPHQNSETNSSHAQSQKGKSSPICSTTGDDKLCADSACQQNTVTSSGDLVAKLCDNIVSESESTTARQPSSQDPPDASHCEDPQAHTVTSDPVRDTQERADFCPFKVVDNKGQRKDVKLDKPLTNMLEVVSHPHPVVPKMEKELVPDQAVISDSTFSLANSPGSESVTKDDALSFVPSQKEKGTATPELHTATDYRDGPDGNSNEPDTRPLEDRAVGLSTSSTAAELQHGMGNTSLTGLGGEHEGPAPPAIPEALNIKGNTDSSLQSVGKATLALDSVLTEEGKLLVVSESSAAQEQDKDKAVTCSSIKENALSSGTLQEEQRTPPPGQDTQQFHEKSISADCAKDKALQLSNSPGASSAFLKAETEHNKEVAPQVSLLTQGGAAQSLVPPGASLATESRQEALGAEHNSSALLPCLLPDGSDGSDALNCSQPSPLDVGVKNTQSQGKTSACEVSGDVTVDVTGVNALQGMAEPRRENISHNTQDILIPNVLLSQEKNAVLGLPVALQDKAVTDPQGVGTPEMIPLDWEKGKLEGADHSCTMGDAEEAQIDDEAHPVLLQPVAKELPTDMELSAHDDGAPAGVREVMRAPPSGRERSTPSLPCMVSAQDAPLPKGADLIEEAASRIVDAVIEQVKAAGALLTEGEACHMSLSSPELGPLTKGLESAFTEKVSTFPPGESLPMGSTPEEATGSLAGCFAGREEPEKIILPVQGPEPAAEMPDVKAEDEVDFRASSISEEVAVGSIAATLKMKQGPMTQAINRENWCTIEPCPDAASLLASKQSPECENFLDVGLGRECTSKQGVLKRESGSDSDLFHSPSDDMDSIIFPKPEEEHLACDITGSSSSTDDTASLDRHSSHGSDVSLSQILKPNRSRDRQSLDGFYSHGMGAEGRESESEPADPGDVEEEEMDSITEVPANCSVLRSSMRSLSPFRRHSWGPGKNAASDAEMNHRSSMRVLGDVVRRPPIHRRSFSLEGLTGGAGVGNKPSSSLEVSSANAEELRHPFSGEERVDSLVSLSEEDLESDQREHRMFDQQICHRSKQQGFNYCTSAISSPLTKSISLMTISHPGLDNSRPFHSTFHNTSANLTESITEENYNFLPHSPSKKDSEWKSGTKVSRTFSYIKNKMSSSKKSKEKEKEKDKIKEKEKDSKDKEKDKKTVNGHTFSSIPVVGPISCSQCMKPFTNKDAYTCANCSAFVHKGCRESLASCAKVKMKQPKGSLQAHDTSSLPTVIMRNKPSQPKERPRSAVLLVDETATTPIFANRRSQQSVSLSKSVSIQNITGVGNDENMSNTWKFLSHSTDSLNKISKVNESTESLTDEGVGTDMNEGQLLGDFEIESKQLEAESWSRIIDSKFLKQQKKDVVKRQEVIY

SEQ ID NO: 1473 - DNA, 5111 bp, Homo sapien
ctgcggtccagtctagggggtctcagattggcggggatgggcagcagcggcaggtggccttggcttttgctgcagccgtcaacgacctatcatcggggtcctgcgtaaggtccggctggctgggacttggctgtgggtgggatggactggctgccggaccgagtgccctgcagttggtaggagtatgaggcagagtgatgcacacccgggcgcccagcatcgttctaattgccggagacattgcctcagactgtgcgctgctagaggctgcgttcctgagcaggaagcccgtttcctgggattggaactacccttcttggccagcgggaagtccccaaggacggagtcgaaaggtcaaatcttatctgtcagtgctgtgtgacagcatcgcaacgggatctgcagaacctgaactcgatccgtaatgcctcctgcctgcctctttcaagatggaggtgaaacctgtgggagaacctactcaagaggtgtctaaattcaaactttccaccaaggtagaaagcacgggacactggctggtggaagatcatgttcgaatatgggaagttttaaagacagaggagagctcgattcaggactggggtgaagaggtagaggaaggagctgtttaccatgtcaccctcaaaagagtccagattcaacaggctgccaataaaggagcaagatggctaggggttgaaggggaccagctgcctccaggacacacagtcagtcaatatgaaacctgtaagatcaggaccataaaagctggcaccttggagaagcttgtggagaacctgctgacagcttttggggacaatgactttacctatatcagcatctttctttcaacgtacagaggctttgcctccactaaagaagtgctggaactactgctggacaggtatggaaacctgacaagcccaaactgtgaagaagatggaagccaaagttcatcagagtccaaaatggtgatcaggaatgcaatcgcttccatactaagggcctggcttgaccagtgtgcagaagacttccgagagccccctcacttcccttgcttacagaaactgctggattatctcacacggatgatgccgggctctgacccagaaagaagagcacaaaatcttcttgagcagtttcagaagcaagaagtggaaactgacaatgggcttcccaacacgatctccttcagcctggaagaggaagaggaactggagggtggagagtcagcagaattcacgtgcttctcagaagatctcgtggcagagcagctgacctacatggatgcacaactcttcaagaaagtagtgcctcaccactgcctgggctgcatttggtctcgaagggataagaaggaaaacaaacatttggctcctacgatccgtgccaccatctctcagtttaataccctcaccaaatgtgttgtcagcaccatcctggggggcaaagaactcaaaactcagcagagagccaaaatcattgagaagtggatcaacatcgctcatgaatgtagactcctgaagaatttttcctccttgagggccatcgtttcggcactgcagtctaattccatctatcggttaaaaaagacttgggctgccgtcccaagggaccgaatgctgatgtttgaagaactttcagatatcttctcagaccataataaccatttgaccagccgagaactactgatgaaggaaggaacctcaaaatttgcaaacctggacagcagtgtgaaagaaaaccagaagcgtacccagaggcggctgcagctccagaaggacatgggtgtgatgcagggaactgtgccctacctgggcaccttcctgactgacctgaccatgcttgacactgcccttcaggactacatcgagggtggactgataaactttgagaaaaggagaagggaatttgaagtgattgcccagataaagctcttacagtctgcctgcaacagctattgcatgaccccagaccaaaagttcatccagtggttccagaggcagcagctcctgacagaggaggagagctatgccctgtcatgtgagattgaagcagctgctgacgccagcaccacctcgcccaagcctcggaagagcatggtgaagagactcagcctactgtttctagggtctgacatgatcaccagtcccactcccaccaaagagcagcccaagtccactgccagcgggagctctggtgaaagcatggactctgtcagcgtgtcatcctgcgagtcgaaccactcagaggctgaggagggctccattactcccatggacacccctgatgagcctcaaaaaaagctctctgagtcctcctcatcctgttcttctatccattccatggacacaaattcctcagggatgtcttccttaatcaaccccctctcctcccctccgtcctgcaacaacaaccccaaaatccacaagcgctctgtctcggtgacgtccattacctcgactgtgctgcctcctgtttacaaccaacagaatgaagacacctgcataatccgcatcagtgtggaagacaataacggcaacatgtacaagagcatcatgttgacgagccaggataaaacccccgctgtgatccagagagccatgctgaagcacaatctggactcagaccccgccgaggagtacgagctggtgcaggtcatctcggaggacaaagaacttgtgattccagactcagcaaatgtcttttatgccatgaacagccaagtgaactttgacttcattttgcgcaaaaagaactccatggaagaacaagtgaaactgcgtagccggaccagcttgacgttgcccaggacagctaaacggggctgctggagttacagacacagcaaaatcaccctctgaagggagggmccagtggccccttgtttgccaaaggcagagtggggctgagaaacaggctgcggtgattgcaattaccatccggtgttcgaggatcattggtgaagtcagcagatatttattgagttcctgtggtgtgcaaagcattatgataggcaccgtggggaaactggaaatgaatttgacatgaaaaggatgaacgattcactgattctctttgactcatttgagactaaaatgcagaattaccaacatttaaaacatatatatgcacatgtatttggtatgcatgtgtatctatataaaaatatataagagggactttatgggatagtatggactatggaaaaacaaatttgcacaatggcctgggaagttgaggtcactttttacagggaaatagaagaaactgagaacctagtctcgtatattctgagtaaatggaatcagtcctgggaatagagagtgtcctttgtgccagtattacaagaagcccaaactttatttttataaagggagaggatgactttctcaatcaagtgccaccagataaaaacaactgcagaggctggaactgccacaggctgtatgaaaggccactttggaaagggtttggatgagctggtggccttcaacctctgcctgcatctgccactttctgctaccctagggaggccaggaggagcttcggaggaccatcgccccactggtctagccatcatgacacctctggaggtgtcaagctcctgaaacaagctcatttcagtttctggcaaccccgtgtatttccgttttccccctaaagaacatatcataatcattgcacaaataaccatgttctttggtaatgaagccagaaaagaaagcgcaaaagaatggtgactcatttggactcttatctgtcttggaatgtcactgcttcattgccttctctgattgccttttgcatgtaaaactatgtgtctggagtcttttgccatctggatcttagtacctctttattatgtgcaatttattcctcaggtgtggaaatttctactgcaattgactgacgtktgattattttgagcttgtgaaagatttctgaacagtgattgtcccgttaatagcccctcagaagatgttccctgctgataacagcatcctattttacttacttttatagcattactgtgcctagtcgtggggaaagagatggggctgtatagattatctgaatcatttgtctaagaggtacattcttccagatggaatcaataacttttttttttccaggttcccgtgcttgctatcacagtatcattgttaagtgacacttttgtctctcataacaccatcacactcttccttccaagtctgagctgtgctggggtttgaactaaaagccatatgtggaatattgacatgtgtaagaagcactttcagaatgttgtcctttttaagaaatgattctcaaaataccagtttttattccaaaaatttagagaacaaacccggaatatgaagtgcagattgtaacatggagctatttttttttcctaatcccataatacagctcctaaaagttgtgtgggatttgcgttgcataaatagccatgtgaattccacaagaagcaccagggaaagtttagagatttgcggcaatggaccgaagaacgggccaggaagtcctccaatttcctttggtctttccaggagattggactacacattgtaaagactgactgggtttcaactagtcaaaaagcactttcttctgttttcaatccctgttcgatttgtgcttctgtgcttgtaggagagatggccagggtggcagccctcatgcaggttgaagtatatgtagcctcagcctgatattcttggtgcgaaggtaaaaaaaaaaaaaataaataaaaccattggcctggttgagggcgtgaccaccaagacatatatgttgtgcccgtgttcatcctgtgtatttatactgtatatgtagagtctagatttatatactgcaatgtaaaatatatatatatttaccttttttaaagacaatggaaattccaagtagctaaaacttagcttcatttatttaatgccactttaaatgtcttaaatttgtttcctggtggacagccgggtaatgcttttagctgctcgcatgcttgtctttctgcatctccatcatctgtttaccttttggttaaactaataaactagtttgggacttggctggcatgtgctgccagacccaaagggaaaaaaaaa

SEQ ID NO: 1474 - protein, 803 aa, Homo sapien
MEVKPVGEPTQEVSKFKLSTKVESTGHWLVEDHVRIWEVLKTEESSIQDWGEEVEEGAVYHVTLKRVQIQQAANKGARWLGVEGDQLPPGHTVSQYETCKIRTIKAGTLEKLVENLLTAFGDNDFTYISIFLSTYRGFASTKEVLELLLDRYGNLTSPNCEEDGSQSSSESKMVIRNAIASILRAWLDQCAEDFREPPHFPCLQKLLDYLTRMMPGSDPERRAQNLLEQFQKQEVETDNGLPNTISFSLEEEEELEGGESAEFTCFSEDLVAEQLTYMDAQLFKKVVPHHCLGCIWSRRDKKENKHLAPTIRATISQFNTLTKCVVSTILGGKELKTQQRAKIIEKWINIAHECRLLKNFSSLRAIVSALQSNSIYRLKKTWAAVPRDRMLMFEELSDIFSDHNNHLTSRELLMKEGTSKFANLDSSVKENQKRTQRRLQLQKDMGVMQGTVPYLGTFLTDLTMLDTALQDYIEGGLINFEKRRREFEVIAQIKLLQSACNSYCMTPDQKFIQWFQRQQLLTEEESYALSCEIEAAADASTTSPKPRKSMVKRLSLLFLGSDMITSPTPTKEQPKSTASGSSGESMDSVSVSSCESNHSEAEEGSITPMDTPDEPQKKLSESSSSCSSIHSMDTNSSGMSSLINPLSSPPSCNNNPKIHKRSVSVTSITSTVLPPVYNQQNEDTCIIRISVEDNNGNMYKSIMLTSQDKTPAVIQRAMLKHNLDSDPAEEYELVQVISEDKELVIPDSANVFYAMNSQVNFDFILRKKNSMEEQVKLRSRTSLTLPRTAKRGCWSYRHSKITL

SEQ ID NO: 1475 - DNA, 2412 bp, Homo sapien
ctccactgaccgtcccgacgatgctacgcgcgcccggctgcctcctccggacctccgtagcgcctgccgcggccctggctgcggcgctgctctcgtcgcttgcgcgctgctctcttctagagccgagggacccggtggcctcgtcgctcagcccctatttcggcaccaagactcgctacgaggatgtcaaccccgtgctattgtcgggccccgaggctccgtggcgggaccctgagctgctggaggggacctgcaccccggtgcagctggtcgccctcattcgccacggcacccgctaccccacggtcaaacagatccgcaagctgaggcagctgcacgggttgctgcaggcccgcgggtccagggatggcggggctagtagtaccggcagccgcgacctgggtgcagcgctggccgactggcctttgtggtacgcggactggatggacgggcagctagtagaaaagggacggcaggatatgcgacagctggcgctgcgtctggcctcgctcttcccggcccttttcagccgtgagaactacggccgcctgcggctcatcaccagttccaagcaccgctgcatggatagcagcgccgccttcctgcaggggctgtggcagcactaccaccctggcttgccgccgccggacgtcgcagatatggagtttggacctccaacagttaatgataaactaatgagattttttgatcactgtgagaagtttttaactgaagtagaaaaaaatgctacagctctttatcacgtggaagccttcaaaactggaccagaaatgcagaacattttaaaaaaagttgcagctactttgcaagtgccagtaaatgatttaaatgcagatttaattcaagtagcctttttcacctgttcatttgacctggcaattaaaggtgttaaatctccttggtgtgatgtttttgacatagatgatgcaaaggtattagaatatttaaatgatctgaaacaatattggaaaagaggatatgggtatactattaacagtcgatccagctgcaccttgtttcaggatatctttcagcacttggacaaagcagttgaacagaaacaaaggtctcagccaatttcttctccagtcatcctccagtttggtcatgcagagactcttcttccactgctttctctcatgggctacttcaaagacaaggaacccctaacagcgtacaattacaaaaaacaaatgcatcggaagttccgaagtggtctcattgtaccttatgcctcgaacctgatatttgtgctttaccactgtgaaaatgctaagactcctaaagaacaattccgagtgcagatgttattaaatgaaaaggtgttacctttggcttactcacaagaaactgtttcattttatgaagatctgaagaaccactacaaggacatccttcagagttgtcaaaccagtgaagaatgtgaattagcaagggctaacagtacatctgatgaactatgagtaactgaagaacatttttaattctttaggaatctgcaatgagtgattacatgcttgtaataggtaggcaattccttgattacaggaagcttttatattacttgagtatttctgtcttttcacagaaaaacattgggtttctctctgggtttggacatgaaatgtaagaaaagatttttcactggagcagctctcttaaggagaaacaaatctatttagagaaacagctggccctgcaaatgtttacagaaatgaaattcttcctacttatataagaaatctcacactgagatagaattgtgatttcataataacacttgaaaagtgctggagtaacaaaatatctcagttggaccatccttaacttgattgaactgtctaggaactttacagattgttctgcagttctctcttcttttcctcaggtaggacagctctagcattttcttaatcaggaatattgtggtaagctgggagtatcactctggaagaaagtaacatctccagatgagaatttgaaacaagaaacagagtgttgtaaaaggacaccttcactgaagcaagtcggaaagtacaatgaaaataaatatttttggtatttatttatgaaatatttgaacattttttcaataattcctttttacttctaggaagtctcaaaagaccatcttaaattattatatgtttggacaattagcaacaagtcagatagttagaatcgaagtttttcaaatccattgcttagctaactttttcattctgtcacttggcttcgatttttatattttcctattatatgaaatgtatcttttggttgtttgatttttctttctttctttgtaaatagttctgagttctgtcaaatgccgtgaaagtatttgctataataaagaaaattcttgtgactttaaaaaaaaaaaaaaaaaaa

SEQ ID NO: 1476 - protein, 487 aa, Homo sapien
MLRAPGCLLRTSVAPAAALAAALLSSLARCSLLEPRDPVASSLSPYFGTKTRYEDVNPVLLSGPEAPWRDPELLEGTCTPVQLVALIRHGTRYPTVKQIRKLRQLHGLLQARGSRDGGASSTGSRDLGAALADWPLWYADWMDGQLVEKGRQDMRQLALRLASLFPALFSRENYGRLRLITSSKHRCMDSSAAFLQGLWQHYHPGLPPPDVADMEFGPPTVNDKLMRFFDHCEKFLTEVEKNATALYHVEAFKTGPEMQNILKKVAATLQVPVNDLNADLIQVAFFTCSFDLAIKGVKSPWCDVFDIDDAKVLEYLNDLKQYWKRGYGYTINSRSSCTLFQDIFQHLDKAVEQKQRSQPISSPVILQFGHAETLLPLLSLMGYFKDKEPLTAYNYKKQMHRKFRSGLIVPYASNLIFVLYHCENAKTPKEQFRVQMLLNEKVLPLAYSQETVSFYEDLKNHYKDILQSCQTSEECELARANSTSDEL

SEQ ID NO: 1477 - DNA, 3086 bp, Homo sapien
actgccacctcggtcggtcggtgcttacttcgctgccagctggtctgtcgccatgaacccggacctgcgcagggagcgggattccgccagcttcaacccggagctgcttacacacatcctggacggcagccccgagaaaacgcggcgccgccgagagatcgagaacatgatcctgaacgacccagacttccagcatgaggacttgaacttcctaactcgcagccagcgttatgaggtggctgtcaggaaaagtgccatcatggtgaagaagatgagggagtttggcatcgctgaccctgatgaaattatgtggtttaaaaaactacatttggtcaattttgtggaacctgtgggcctcaattactccatgtttattcctaccttgctgaatcagggcaccactgctgagaaagagaaatggctgctttcatccaaaggactccagataattggcacctacgcccagacggaaatgggccacggaactcaccttcgaggcttggaaaccacagccacgtatgaccctgaaacccaggagttcattctcaacagtcctactgtgacctccattaaatggtggcctggtgggcttggaaaaacttcaaatcatgcaatagtccttgcccagctcatcactaaggggaaatgctatggattacatgcctttatcgtacctatccgtgaaatcgggacccataagcctttgccaggaattaccgttggtgacatcgggcccaaatttggttatgatgagatagacaatggctacctcaaaatggacaaccatcgtattcccagagaaaacatgctgatgaagtatgcccaggtgaagcctgatggcacatacgtgaaaccgctgagtaacaagctgacttacgggaccatggtgtttgtcaggtccttccttgtgggagaagctgctcgggctctgtctaaggcgtgcaccattgccatccgatacagcgctgtgaggcaccagtctgaaatgaagccaggtgaaccagaaccacagattttggattttcaaacccagcagtataaactctttccactcctggccactgcctatgccttccagtttgtgggcgcatacatgaaggagacctatcaccggattaacgaaggcattggtcaaggggacctgagtgaactgcctgagcttcatgccctcaccgctggactgaaggctttcacctcctggactgcaaacactggcattgaagcatgtcggatggcttgtggtgggcatggctattctcattgcagtggtcttccaaatatttatgtcaatttcaccccaagctgtacctttgagggagaaaacactgtcatgatgctccagacggctaggttcctgatgaaaagttatgatcaggtgcactcaggaaagttggtgtgtggcatggtgtcctatttgaacgacctgcccagtcagcgcatccagccacagcaggtagcagtctggccaaccatggtggatatcaacagccccgaaagcctaaccgaagcatataaactccgtgcagccagattagtagaaattgctgcaaaaaaccttcaaaaagaagtgattcacagaaaaagcaaggaggtagcttggaacctaacttctgttgaccttgttcgagcaagtgaggcacattgccactatgtggtagttaagctcttttcagaaaaactcctcaaaattcaagataaagccattcaagctgtcttaaggagtttatgtctgctgtattctctgtatggaatcagtcagaacgcgggggatttccttcaggggagcatcatgacagagcctcagattacacaagtaaaccagcgtgtaaaggagttactcactctgattcgctcagatgctgttgctttggttgatgcatttgattttcaggatgtgacacttggctctgtgcttggccgctatgatgggaatgtgtatgaaaacttgtttgagtgggctaagaactccccactgaacaaagcagaggtccacgaatcttaccacaagcacctgaagtcactgcagtccaagctctgaagtgtcacaaggacaagtttaatctgcttcagaaagcgcctgtgtgcaactcaaattttgtggaatcttttcgaattcaaatagctatagagcaaatgataaattgacccctttttataaatggagggaaaaaatgaacagatttcagagattaaatgaaaaaaagcagatgtgttttaagtgcaattaacactgaaagagacctgttaaaccattcagaaaaagcttaagaaatgcgatatgacttccttttgtaatgctgctgatcccagtagactatgacttttgataattagcagaatttaactactgagtagttgattattttcacattttaattgctaatcactggctatataagtgtttttaagcaagggtatttttgaagtggtgtagaacccttccacgctttcctgctcagtgttctaccagacaagaaaagggacttggggaaggaaacttattggaaacttgatgcgaattaggttcttctttgcacaaactctgcctgcttgctctcccttgctgatgggttgcaattctcaaactattcatgctagcaatttttccacgggggggcctttttcccacgggggcctctataggggcccatttctccggtaaataggaatttcccctttaaggggtgccagtagtaggagtatagggaacctctcagctgtggcactgttgtagctttggagtcagagtgtactctgggcaatcagatttccacatattctgcatcttggataagcattaaaagttgggatactaatttggataaaaaaatgcactaggcaaactccagcgagacagaaagtatagggaaacctctcagctgtggcactgttgtagctttggagtgcagagtgtaactctggcgacaatcagatttcacatattctgtcatcttggcataagccattaaaagcttggagattactgtatttggcattaaaaaaaaatgtcacttaggtcagcactcccagacgtagcacagaaaaaccctttgacacaaaccatgtgttctgatttttggttcaga

SEQ ID NO: 1478 - protein, 661 aa, Homo sapien [sequence omitted]

SEQ ID NO: 1479 - DNA, 1412 bp, Homo sapien
gtgacggggaggcggtgcccggggcatctccgcggcggaactcagcctgtgagaagtcactgctttggggagacctgatctggctgtgccagatggacactgagaaagaagtagaagactcagaattagaagaggaacatggagctgatccaggacacctcccgcccgccactggagtacgtgaagggggtcccgctcatcaagtactttgcagaggcactggggcccctgcagagcttccaagcccgacctgatgacctgctcatcaacacctaccccaagtctggcaccacctgggtgagccagatactggacatgatctaccagggcggcgacctagagaagtgtaaccgggctcccatctacgtacgggtgcccttccttgaggtcaatgatccaggggaaccctcagggctggagactctgaaagacacaccgcccccacggctcatcaagtcacacctgcccctggctctgctccctcagactctgttggatcagaaggtcaaggtggtctatgttgcccgaaacccaaaggacgtggcggtctcctactaccatttccaccgtatggaaaaggcgcaccctgagcctgggacctgggacagcttcctggaaaagttcatggctggagaagtgtcctacgggtcctggtaccagcacgtgcaggagtggtgggagctgagccgcacccaccctgttctctacctcttctatgaagacatgaaggagaaccccaaaagggagattcaaaagatcctggagtttgtggggcgctccctgccagaggagaccatggacttcatggttcagcacacgtcgttcaaggagatgaagaagaaccctatgaccaactacaccaccgtcccccaggagctcatggaccacagcatctcccccttcatgaggaaaggcatggctggggactggaagaccaccttcaccgtggcgcagaatgagcgcttcgatgcggactatgcggagaagatggcaggctgcagcctcagcttccgctctgagctgtgagaggggctcctggagtcactgcagagggagtgtgcgaatctaccctgaccaatgggctcaagaataaagtatgatttttgagtcaggcacagtggctcatgtctgcaatcccagcgatttgggaggttgagctggtaggatcacaataggccacgaatttgagaccagcctggtaaaatagtgagacctcatctctacaaagatgtaaaaaaattagccacatgtgctggcacttacctgtagtcccagctacttgggaagcagaggctggaggatcatttcagcccaggaggttgtggatacagtgagttatgacatgcccattcactacagcctggatgacaagcaagaccctccctccaaagaaaataaagctcaattaaaat

SEQ ID NO: 1480 - protein, 295 aa, Homo sapien
MELIQDTSRPPLEYVKGVPLIKYFAEALGPLQSFQARPDDLLINTYPKSGTTWVSQILDMIYQGGDLEKCNRAPIYVRVPFLEVNDPGEPSGLETLKDTPPPRLIKSHLPLALLPQTLLDQKVKVVYVARNPKDVAVSYYHFHRMEKAHPEPGTWDSFLEKFMAGEVSYGSWYQHVQEWWELSRTHPVLYLFYEDMKENPKREIQKILEFVGRSLPEETMDFMVQHTSFKEMKKNPMTNYTTVPQELMDHSISPFMRKGMAGDWKTTFTVAQNERFDADYAEKMAGCSLSFRSEL

SEQ ID NO: 1481 - DNA, 1490 bp, Homo sapien
ggggcagcgcagggcagacggcggcaggagaagcaagatgaatgcaggctcagatcctgtggtcatcgtctcggcggcgcggaccatcataggttccttcaatggtgccttagctgctgttcctgtccaggacctgggctccactgtcatcaaagaagtcttgaagagggccactgtggctccggaagatgtgtctgaggtcatctttggacatgtcttggcagcaggctgtgggcagaatcctgttagacaagccagtgtgggtgcaggaattccctactctgttccagcatggagctgccagatgatctgtgggtcaggcctaaaagctgtgtgccttgcagtccagtcaatagggataggagactccagcattgtggttgcaggaggcatggaaaatatgagcaaggctcctcacttggcttacttgagaacaggagtaaagataggtgagatgccactgactgacagtatactctgtgatggtcttacagatgcatttcacaactgtcatatgggtattacagctgaaaatgtagccacaaaatggcaagtgagtagagaagatcaggacaaggttgcagttctgtcccagaacaggacagagaatgcacagaaagctggccattttgacaaagagattgtaccagttttggtgtcaactagaaaaggtcttattgaagttaaaacagatgagtttcctcgccatgggagcaacatagaagccatgtccaagctaaagccttactttcttactgatggaacgggaacagtcaccccagccaatgcttcaggaataaatgatggtgctgcagctgttgctcttatgaagaagtcagaagctgataaacgtgggcttacacctttagcacggatagtttcctggtcccaagtgggtgtggagccttccattatgggaataggaccaattccagccataaagcaagctgttacaaaagcaggttggtcactggaagatgttgacatatttgaaatcaatgaagcctttgcagctgtctctgctgcaatagttaaagaacttggattaaacccagagaaggtcaatattgaaggaggggctatagccttgggccaccctcttggagcatctggctgtcgaattcttgtgaccctgttacacacactggagagaatgggcagaagtcgtggtgttgcagccctgtgcattgggggtgggatgggaatagcaatgtgtgttcagagagaatgacaatgtgtgttcagagagaatgaattgcttaaactttgaacaacctcaatttctttttaaactaataaagtactaggttgcaatatgtgaaatcagaggaccaaagtacagatggaaaccatttcctacatcacaaaaacccaagtttacagcttgtactttactttaatgtgtaatactcaactcacggtacaagacaattgcatttaacattgttataaataaaaggaacatcagatcaatcattaaaaaaaaaaaa

SEQ ID NO: 1482 - protein, 397 aa, Homo sapien
MNAGSDPVVIVSAARTIIGSFNGALAAVPVQDLGSTVIKEVLKRATVAPEDVSEVIFGHVLAAGCGQNPVRQASVGAGIPYSVPAWSCQMICGSGLKAVCLAVQSIGIGDSSIVVAGGMENMSKAPHLAYLRTGVKIGEMPLTDSILCDGLTDAFHNCHMGITAENVATKWQVSREDQDKVAVLSQNRTENAQKAGHFDKEIVPVLVSTRKGLIEVKTDEFPRHGSNIEAMSKLKPYFLTDGTGTVTPANASGINDGAAAVALMKKSEADKRGLTPLARIVSWSQVGVEPSIMGIGPIPAIKQAVTKAGWSLEDVDIFEINEAFAAVSAAIVKELGLNPEKVNIEGGAIALGHPLGASGCRILVTLLHTLERMGRSRGVAALCIGGGMGIAMCVQRE

SEQ ID NO: 1483 - DNA, 3741 bp, Homo sapien
ccgttcacgcgttcggtcctccttggctgactcaccgccctcgccgccgcaccatggacgcccccaggcaggtggtcaactttgggcctggtcccgccaagctgccgcactcagtgttgttagagatacaaaaggaattattagactacaaaggagttggcattagtgttcttgaaatgagtcacaggtcatcagattttgccaagattattaacaatacagagaatcttgtgcgggaattgctagctgttccagacaactataaggtgatttttctgcaaggaggtgggtgcggccagttcagtgctgtccccttaaacctcattggcttgaaagcaggaaggtgtgctgactatgtggtgacaggagcttggtcagctaaggccgcagaagaagccaagaagtttgggactataaatatcgttcaccctaaacttgggagttatacaaaaattccagatccaagcacctggaacctcaacccagatgcctcctacgtgtattattgcgcaaatgagacggtgcatggtgtggagtttgactttatacccgatgtcaagggagcagtactggtttgtgacatgtcctcaaacttcctgtccaagccagtggatgtttccaagtttggtgtgatttttgctggtgcccagaagaatgttggctctgctggggtcaccgtggtgattgtccgtgatgacctgctggggtttgccctccgagagtgcccctcggtcctggaatacaaggtgcaggctggaaacagctccttgtacaacacgcctccatgtttcagcatctacgtcatgggcttggttctggagtggattaaaaacaatggaggtgccgcggccatggagaagcttagctccatcaaatctcaaacaatttatgagattattgataattctcaaggattctacgtttgtccagtggagccccaaaatagaagcaagatgaatattccattccgcattggcaatgccaaaggagatgatgctttagaaaaaagatttcttgataaagctcttgaactcaatatgttgtccttgaaagggcataggtctgtgggaggcatccgggcctctctgtataatgctgtcacaattgaagacgttcagaagctggccgccttcatgaaaaaatttttggagatgcatcagctatgaacacatcctaaccaggatatactctgttcttgaacaacatacaaagtttaaagtaacttggggatggctacaaaaagttaacacagtatttttctcaaatgaacatgtttattgcagattcttcttttttgaaagaacaacagcaaaacatccacaactctgtaaagctggtgggacctaatgtcaccttaattctgacttgaactggaagcattttaagaaatcttgttgcttttctaacaaattcccgcgtattttgcctttgctgctactttttctagttagatttcaaacttgcctgtggacttaataatgcaagttgcgattaattatttctggagtcatgggaacacacagcacagagggtaggggggccctctaggtgctgaatctacacatctgtggggtctcctgggttcagtggctgttgattcaaggtcaacattgaccattggaggagtggtttaagagtgccaggcgaagggcaaactgtagatcgatctttatgctgttattacaggagaagtgacatactttatatatgtttatattagcaaggtctgtttttaataccatatactttatatttctatacatttatatttctaataatacagttatcactgatatatgtagacacttttagaatttattaaatccttgaccttgtgcattatagcattccattagcaagagttgtaccccctccccagtcttcgccttcctctttttaagctgttttatgaaaaagacctagaagttcttgattcatttttaccattctttccataggtagaagagaaagttgattggttggttgtttttcaattatgccattaaactaaacatttctgttaaattaccctatcctttgttctctactgttttctttgtaatgtatgactacgagagtgatactttgctgaaaagtctttcccctattgtttatctattgtcagtattttatgttgaatatgtaaagaacattaaagtcctaaacacggttctaagctaagtgaaggggaagatctgagagcgtgctgtttgtggctgttgatgcatattcgtgatgtaacaggtcctggggcctcactttaccccatttgtaaaatggggctaatgtcacctgcctcttacctacctcagagggatttggtgaagcaaactgttaatcttcgaaaacgaccatttcacttcttggatatcaagtgctaacccagtatgttcttcttttttatgtaagggacagctttctccacagagtcctttctgctggtgaggacagcatttctgagcagggctttgttctctatgtgcattaggacttttatcatgcccttgttctgtgtgtagttacttgacagcatcaaatgccgcctcttcctaatgtccttcaagttttcatgaactagcaaccccaccttccaccatggttctgggcgcctgattttgctgtgactcccagacccagccactgtttctgccaccctgtaacaggccattaaagctccccagtgttcagcctccttcactcccttgttttccctgttgctatgtgtcacctgggccctacagacaggggcacacgcttatggatgtgtgtaccattgagatgagaatgggtagatggaacggagaccatcaagccacacccccttcttaaaactggggacatgagcctgagcagaaagggtgaagaagagccatgggacacagagttgacccagccagggggaaagcccagctctctttaaaccagctaagccattccagtctcctgtgaagccaaaagggaccaggaaccgtgcaaaggaaactggaaacttttccccgctgggtagagcatgttgctgatactcttctgttttcaagggaaacaatcacattgtttgattccaaatggtaaatgaacactcactattcttcaggcttcagtaaatctttttttcttccttcatatatatatacacaacacacacacacatatgtatatctatacacacatgtgtgttgtgtatatgcatgtgtgtgtgtgcgtgtgtgtatagttttagctccaagccaagcaagtttgtgtttggatagaggggaacttaactattaactacaagttgtatgtctgtggtatcttgattttcccatttctaaagatgaatttcacaaagccataaagcgtgaaattagagctggacttaagactcattggccgaccatcctgtgtcctggcctggccctgcagtaagaagcgtgtctgggtctggagaagggtgcttccgagagtgtgcaggtggcccttccccttggaggcgagaagagagaatgtgctgtctatcttcctggttttcagtccacagagtcggtagaccaggggttacgtgactggggaaaatctcacatctccttgtctgaaaacatttcccctgctgttctctttctaacatgttgtggtaaatctgttcagatactgctcatctgactgttttgtacatgtgacaattgccttaaaacctagcacagtcctcagaaatgaataccgtgtttccactggaaaaaaaaaaaaaaaaaaaaaaaaaaa

SEQ ID NO: 1484 - protein, 370 aa, Homo sapien
MDAPRQVVNFGPGPAKLPHSVLLEIQKELLDYKGVGISVLEMSHRSSDFAKIINNTENLVRELLAVPDNYKVIFLQGGGCGQFSAVPLNLIGLKAGRCADYVVTGAWSAKAAEEAKKFGTINIVHPKLGSYTKIPDPSTWNLNPDASYVYYCANETVHGVEFDFIPDVKGAVLVCDMSSNFLSKPVDVSKFGVIFAGAQKNVGSAGVTVVIVRDDLLGFALRECPSVLEYKVQAGNSSLYNTPPCFSIYVMGLVLEWIKNNGGAAAMEKLSSIKSQTIYEIIDNSQGFYVCPVEPQNRSKMNIPFRIGNAKGDDALEKRFLDKALELNMLSLKGHRSVGGIRASLYNAVTIEDVQKLAAFMKKFLEMHQL

SEQ ID NO: 1485 - DNA, 1717 bp, Homo sapien
gcacgagccatggcggacaacgagaaactggacaaccaacggctcaagaatttcaagaacaaaggccgcgacttggagactatgagaagacaacgaaatgaagttgtagttgaattaaggaagaataaaagagatgaacatctcttaaagagaaggaatgtaccacatgaagatatctgtgaagactctgatatagatggtgattatagagtgcaaaatacctctctagaagctattgttcaaaatgcttcaagtgataaccaaggaattcaattaagtgcagttcaagctgctaggaagcttttgtccagtgatcgaaatccaccaattgatgacttaataaaatctggaatattgcccattttagtccattgtcttgaaagagatgacaatccttctttacagtttgaagctgcatgggctttgacaaacattgcatctggaacttctgaacaaactcaagcagtagttcagtccaatgctgtgccacttttcctgaggcttctccattcaccccatcagaatgtctgtgagcaagcagtgtgggcattgggaaatatcataggtgatgggccccagtgtagagattatgtcataagtcttggagttgtgaaacctttactttccttcataagtccatctattcctataacattcttaagaaatgttacttgggttatggtcaacttatgtcgccacaaagacccaccaccaccaatggaaaccattcaggagattcttccagccctttgtgttttaattcatcacacagatgtaaatatactggtagacacagtctgggccctctcttaccttactgatgctggcaatgaacaaatacagatggtaatagactctggaatagttcctcatttggttcctctgctcagccaccaggaagttaaagttcagactgctgcacttagagctgtgggcaacattgttactggaactgatgagcaaacacaagtagttttgaactgtgatgctctttcacacttcccagcactcctgacacatcccaaagagaaaattaataaagaagcagtgtggttcctctccaacatcactgcaggaaatcagcagcaggtacaggcagtaattgatgccaatcttgtaccaatgataatacaccttttggataagggggattttggcactcaaaaagaagctgcttgggccataagtaacttaacaattagtggaaggaaagatcaagtggcttaccttatccaacaaaatgttatcccacctttttgcaacttgctgactgtaaaagatgcacaagttgtgcaagtagtactcgatggactaagtaatatattaaaaatggctgaagatgaggcagaaaccataggcaatcttatagaagaatgtggagggctggagaaaattgaacaacttcaaaatcatgaaaatgaagacatctacaaattggcctatgagatcattgatcagttcttctcttcagatgatattgatgaagaccctagccttgttccagaggcaattcaaggcggaacatttggtttcaattcatctgccaatgtaccaacagaagggttccagttttagaaagatgttgtggaagttaggtacaatgcagcactgagatatatatatatatatgtgtgtgtgtatatatatatatatatacatatatataaaaaggtttgatccatcaaaaaaaaaaaaaaaaaaaaaaaaaaaaaaaaaa

SEQ ID NO: 1486 - protein, 521 aa, Homo sapien
MADNEKLDNQRLKNFKNKGRDLETMRRQRNEVVVELRKNKRDEHLLKRRNVPHEDICEDSDIDGDYRVQNTSLEAIVQNASSDNQGIQLSAVQAARKLLSSDRNPPIDDLIKSGILPILVHCLERDDNPSLQFEAAWALTNIASGTSEQTQAVVQSNAVPLFLRLLHSPHQNVCEQAVWALGNIIGDGPQCRDYVISLGVVKPLLSFISPSIPITFLRNVTWVMVNLCRHKDPPPPMETIQEILPALCVLIHHTDVNILVDTVWALSYLTDAGNEQIQMVIDSGIVPHLVPLLSHQEVKVQTAALRAVGNIVTGTDEQTQVVLNCDALSHFPALLTHPKEKINKEAVWFLSNITAGNQQQVQAVIDANLVPMIIHLLDKGDFGTQKEAAWAISNLTISGRKDQVAYLIQQNVIPPFCNLLTVKDAQVVQVVLDGLSNILKMAEDEAETIGNLIEECGGLEKIEQLQNHENEDIYKLAYEIIDQFFSSDDIDEDPSLVPEAIQGGTFGFNSSANVPTEGFQF

SEQ ID NO: 1487 - DNA, 3982 bp, Homo sapien
ctgggtcctgtgtgtgccacaggggtggggtgtccagcgagcggtctcctcctcctgctagtgctgctgcggcgtcccgcggcctccccgagtcgggcgggaggggagagcgggtgtggatttgtcttgacggtaattgttgcgtttccacgtctcggaggcctgcgcgctgggttgctccttcttcgggagcgagctgttctcagcgatcccactcccagccggggctccccacacacactgggctgcgtgcgtgtggagtgggacccgcgcacacgcgtgtctctggacagctacggcgccgaaagaactaaaattccagatggcaaactcaatgaatggcagaaaccctggtggtcgaggaggaaatccccgaaaaggtcgaattttgggtattattgatgctattcaggatgcagttggaccccctaagcaagctgccgcagatcgcaggaccgtggagaagacttggaagctcatggacaaagtggtaagactgtgccaaaatcccaaacttcagttgaaaaatagcccaccatatatacttgatattttgcctgatacatatcagcatttacgacttatattgagtaaatatgatgacaaccagaaacttgcccaactcagtgagaatgagtactttaaaatctacattgatagccttatgaaaaagtcaaaacgggcaataagactctttaaagaaggcaaggagagaatgtatgaagaacagtcacaggacagacgaaatctcacaaaactgtcccttatcttcagtcacatgctggcagaaatcaaagcaatctttcccaatggtcaattccagggagataactttcgtatcacaaaagcagatgctgctgaattctggagaaagttttttggagacaaaactatcgtaccatggaaagtattcagacagtgccttcatgaggtccaccagattagctctagcctggaagcaatggctctaaaatcaacaattgatttaacttgcaatgattacatttcagtttttgaatttgatatttttaccaggctgtttcagccttggggctctattttgcggaattggaatttcttagctgtgacacatccaggttacatggcatttctcacatatgatgaagttaaagcacgactacagaaatatagcaccaaacccggaagctatattttccggttaagttgcactcgattgggacagtgggccattggctatgtgactggggatgggaatatcttacagaccatacctcataacaagcccttatttcaagccctgattgatggcagcagggaaggattttatctttatcctgatgggaggagttataatcctgatttaactggattatgtgaacctacacctcatgaccatataaaagttacacaggaacaatatgaattatattgtgaaatgggctccacttttcagctctgtaagatttgtgcagagaatgacaaagatgtcaagattgagccttgtgggcatttgatgtgcacctcttgccttacggcatggcaggagtcggatggtcagggctgccctttctgtcgttgtgaaataaaaggaactgagcccataatcgtggacccctttgatccaagagatgaaggctccaggtgttgcagcatcattgacccctttggcatgccgatgctagacttggacgacgatgatgatcgtgaggagtccttgatgatgaatcggttggcaaacgtccgaaagtgcactgacaggcagaactcaccagtcacatcaccaggatcctctccccttgcccagagaagaaagccacagcctgacccactccagatcccacatctaagcctgccacccgtgcctcctcgcctggatctaattcagaaaggcatagttagatctccctgtggcagcccaacaggttcaccaaagtcttctccttgcatggtgagaaaacaagataaaccactcccagcaccacctcctcccttaagagatcctcctccaccgccacctgaaagacctccaccaatcccaccagacaatagactgagtagacacatccatcatgtggaaagcgtgccttccagagacccgccaatgcctcttgaagcatggtgccctcgggatgtgtttgggactaatcagcttgtgggatgtcgactcctaggggagggctctccaaaacctggaatcacagcgagttcaaatgtcaatggaaggcacagtagagtgggctctgacccagtgcttatgcggaaacacagacgccatgatttgcctttagaaggagctaaggtcttttccaatggtcaccttggaagtgaagaatatgatgttcctccccggctttctcctcctcctccagttaccaccctcctccctagcataaagtgtactggtccgttagcaaattctctttcagagaaaacaagagacccagtagaggaagatgatgatgaatacaagattccttcatcccaccctgtttccctgaattcacaaccatctcattgtcataatgtaaaacctcctgttcggtcctgtgataatggtcactgtatgctgaatggaacacatggtccatcttcagagaagaaatcaaacatccctgacttaagcatatatttaaagggagatgtttttgattcagcctctgatcccgtgccattaccacctgccaggcctccaactcgggacaatccaaagcatggttcttcactcaacaggacgccctctgattatgatcttctcatccctccattaggtgaagatgcttttgatgccctccctccatctctcccacctcccccacctcctgcaaggcatagtctcattgaacattcaaaacctcctggctccagtagccggccatcctcaggacaggatctttttcttcttccttcagatccctttgttgatctagcaagtggccaagttcctttgcctcctgctagaaggttaccaggtgaaaatgtcaaaactaacagaacatcacaggactatgatcagcttccttcatgttcagatggttcacaggcaccagccagaccccctaaaccacgaccgcgcaggactgcaccagaaattcaccacagaaaaccccatgggcctgaggcggcattggaaaatgtcgatgcaaaaattgcaaaactcatgggagagggttatgcctttgaagaggtgaagagagccttagagatagcccagaataatgtcgaagttgcccggagcatcctccgagaatttgccttccctcctccagtatccccacgtctaaatctatagcagccagaactgtagacaccaaaatggaaagcaatcgatgtattccaagagtgtggaaataaagagaactgagatggaattcaagagagaagtgtctcctcctcgtgtagcagcttgagaagaggcttgggagtgcagcttctcaaaggagaccgatgcttgctcaggatgtcgacagctgtggcttccttgtttttgctagccatatttttaaatcagggttgaactgacaaaaataatttaaagacgtttacttcccttgaactttgaacctgtgaaatgctttaccttgtttacaatttggcaaagttgcagtttgttcttgtttttagtttagttttgttttggtgttttgatacctgtactgtgttcttcacagaccctttgtagcgtggtcaggtctgctgtaacatttcccaccaactctcttgctgtccacatcaacagctaaatcatttattcatatggatctctaccatccccatgccttgcccaggtccagttccatttctctcattcacaagatgctttgaaggttctgattttcaactgatcaaactaatgcaaaaaaaaaaagtatgtattcttcactactgagtttcttctttggaaaccatcactattgagagatgggaaaaacctgaatgtataaagcatttatttgtcaataaactgccttttgtaaggggttttcacataaaaaaaaaaaaa

SEQ ID NO: 1488 - protein, 982 aa, Homo sapien [sequence omitted]

SEQ ID NO: 1489 - DNA, 1308 bp, Homo sapien
  Unsure 36: Unknown base
aatcctcagtctggtctatattgttacttgcctgtntccactagaaggagtcacccaggcatttagtgaatgataatcctagaagttgagtctgagtacatcagagtttggcattatttgcaacatcccaggaatgagctataagactccattgctttctggactttagtgaccagctgatcttcccttggatcctccaataaaggggaaaaaatacttgtcttatgttgttttagcaagggagttcagccaagtgacaggaaagattccctggtctgcatctaaacattagtcaacagaaggaaaaggctcttttccttggagattttcaagttgaaaaagtacagctgcttggatggagtttctctcatcagaatagaaatatgctaggtggtcttcaagacctttttgaacctacagattctaaaccttagaggaagccagaatatgtgatcataccaggtgaggaaagttaggagatattcatcttaagagatatcctatttggcagtcacatgttacacttgagcaacaattgtctaggctagaaatatagaaccacacaatatttatcatcattgggtcaatttctccccctctatcaagtgaggagattaaggcttaaagaaaggaaaggacttgccagccaccacagggctcatgaggggcttgaacccatgtcgtgtgtctctaccacagctgactctcagctggctaatggagaaaatgtgaggaattacctgtcaaattagattgagctcagagtaaatagatgagcacatttataactctaaattagactttctatcaaatgggaccaaacatatggaaggggctgctgtcctgcctcaatttagccaagacttgtcttgtctcaaagccaagactcagcagtacatggattctgagaagtccagggtctgaattgttgtctctgattactggaaggacaggttaactgaatgtctgtgatcactaacaggtgatgggctttgtgcccactccagagatattgtgggagacaaattcttttaacagcctgtcctcccggcatcaggagtcattgaacaatcatggattgttgtgtttgggattttttttttttttggctttgtttttggtttttgtgtgtgtgtgtgtgtgctgcatgcacatgcgtccaagacttacgggtggtttaggggaaagtgctagcaacagtgtcaatgtcattgttaactatatttcatatttgaggtctcattgttttcaaataaacagtgttttccatgaaaaaaaaaaaaaaaaaaattcctgcggccgtcaagg

SEQ ID NO: 1490 - protein, 107 aa, Homo sapien
MGFVPTPEILWETNSFNSLSSRHQESLNNHGLLCLGFFFFLALFLVFVCVCVCCMHMRPRLTGGLGESASNSVNVIVNYISYLRSHCFQINSVFHEKKKKKNSCGRQ

SEQ ID NO: 1491 - DNA, 921 bp, Homo sapien
gtgggaggaggcaccggccgcgcggcgggaggaggtgccggccgagcaccgcagacagcgccgggaagatgagcacggaaggtggtggccgtcgctgccaggcacaagtgtcccgccgcatctccttcagcgcgagccaccgattgtacagtaaatttctaagtgatgaagaaaacttgaaactgtttgggaaatgcaacaatccaaatggccatgggcacaattataaagttgtggtgacagtacatggagagattgaccctgctacgggaatggttatgaatctggctgatctcaaaaaatatatggaggaggcgattatgcagccccttgatcataagaatctggatatggatgtgccatactttgcagatgtggtgagcacgactgaaaatgtagctgtttatatctgggacaacctccagaaagttcttcctgtaggagttctttataaagtaaaagtatacgaaactgacaataatattgtggtttataaaggagaatagctattggggttagcattgcacaaagcccagtttctttctgtgtttgaaaaagattttgatccccttggaatattaagaggtcaacacgtgattgttgtacgtacacattgtgctctggagtgcctatttattgaaatcattgtaagacctgttataaatttaagtctatttaaaactaaacttgtaatatacatcctgaaaatcatttagagagtcttttatttataaattaaaaatcacttcattttcacaaaatgttttggtgtgggattatttgaaagcaaaagaaatctaattttgttttctccattacctcattttagtattaatttttacttggtataatatacatggttaaaatgcttatgtgacttcgagtaggtgaatcttaaagaaataaaattcaagtgaccac

SEQ ID NO: 1492 - protein, 145 aa, Homo sapien
MSTEGGGRRCQAQVSRRISFSASHRLYSKFLSDEENLKLFGKCNNPNGHGHNYKVVVTVHGEIDPATGMVMNLADLKKYMEEAIMQPLDHKNLDMDVPYFADVVSTTENVAVYIWDNLQKVLPVGVLYKVKVYETDNNIVVYKGE

SEQ ID NO: 1493 - DNA, 1527 bp, Homo sapien
ggcctggcccagttgcaccacgagcgctgcggacactcggggcggcagtcggtctgtcagtcctcccgccaggtcccgcggcccgcacctgccgcccgcacctgcagctccgcacctgcggccagtgcctactgccctctcttgccgcccgcacctgcagccccgcacctgccgcttgcacctgcagccccgcgctctacccggttcaagcatggctgaccaggcgcccttcgacacggacgtcaacaccctgacccgcttcgtcatggaggagggcaggaaggcccgcggcacgggcgagttgacccagctgctcaactcgctctgcacagcagtcaaagccatctcttcggcggtgcgcaaggcgggcatcgcgcacctctatggcattgctggttctaccaacgtgacaggtgatcaagttaagaagctggacgtcctctccaacgacctggttatgaacatgttaaagtcatcctttgccacgtgtgttctcgtgtcagaagaagataaacacgccatcatagtggaaccggagaaaaggggtaaatatgtggtctgttttgatccccttgatggatcttccaacatcgattgccttgtgtccgttggaaccatttttggcatctatagaaagaaatcaactgatgagccttctgagaaggatgctctgcaaccaggccggaacctggtggcagccggctacgcactgtatggcagtgccaccatgctggtccttgccatggactgtggggtcaactgcttcatgctggacccggccatcggggagttcattttggtggacaaggatgtgaagataaaaaagaaaggtaaaatctacagccttaacgagggctacgccagggactttgaccctgccgtcactgagtacatccagaggaagaagttccccccagataattcagctccttatggggcccggtatgtgggctccatggtggctgatgttcatcgcactctggtctacggagggatatttctgtaccccgctaacaagaagagccccaatggaaagctgagactgctgtacgaatgcaaccccatggcctacgtcatggagaaggctgggggaatggccaccactgggaaggaggccgtgttagacgtcattcccacagacattcaccagagggcgccggtgatcttgggatcccccgacgacgtgctcgagttcctgaaggtgtatgagaagcactctgcccagtgagcacctgccctgcctgcatccggagaattgcctctacctggaccttttgtctcacacagcagtaccctgacctgctgtgcaccttacattcctagagagcagaaataaaaagcatgactatttccaccatcaaatgctgtagaatgcttggcactccctaaccaaatgctgtctccataatgccactggtgttaagatatattttgagtggatggaggagaaataaacttattcctccttaaaaaaaaaaaaaaaaaaaaaaaaaaaaaaaaaaaaaaaaaaaaaaaaaaaaaaaaaaa

SEQ ID NO: 1494 - protein, 338 aa, Homo sapien [sequence omitted]

SEQ ID NO: 1495 - DNA, 2356 bp, Homo sapien
ggcacgagggagcaatggagcttaccatctttatcctgagactggccatttacatcctgacatttcccttgtacctgctgaactttctgggcttgtggagctggatatgcaaaaaatggttcccctacttcttggtgaggttcactgtgatatacaacgaacagatggcaagcaagaagcgggagctcttcagtaacctgcaggagtttgcgggcccctccgggaaactctccctgctggaagtgggctgtggcacgggggccaacttcaagttctacccacctgggtgcagggtgacctgtattgaccccaaccccaactttgagaagtttttgatcaagagcattgcagagaaccgacacctgcagtttgagcgctttgtggtagctgccggggagaacatgcaccaggtggctgatggctctgtggatgtggtggtctgcaccctggtgctgtgctctgtgaagaaccaggagcggattctccgcgaggtgtgcagagtgctgagaccgggaggggctttctatttcatggagcatgtggcagctgagtgttcgacttggaattacttctggcaacaagtcctggatcctgcctggcaccttctgtttgatgggtgcaacctgaccagagagagctggaaggccctggagcgggccagcttctctaagctgaagctgcagcacatccaggccccactgtcctgggagttggtgcgccctcatatctatggatatgctgtgaaatagtgtgagctggcagttaagagctgaatggctcaaagaatttaaagcttcagttttacatttaaaatgctaagtgggagaagagaaaccttttttttggggggcggtttttttggtttgttgttggttttttttttttttttggcgggaagaaagagttttgctcttgttgcccaggctggagtgcaatggcgtggtctccgctcactgcaacctccacctcgcgggtttaggcgattcttctgcctcagcctccctagtagctgggattacaggtgcccaccaccatgcccagctaatttgtatttttagttgagacagggtttcactacgttggccaggctggtcttgaactcctgatctcaggcaatccacccacctcagcctcccaaagtgctgggatgacaggcgtgagcaaccgcacccagcttaaggtttttttgttttgttttgagacggagttttcgctcttgttgcccaggctggagtgcaatgctgtgatctcagcttaccacaacctccacctcccgggttcaggtgattcacctgcctcagcctcctgagtggctggtattacaggcatgcgtcaccacgccggctaattttgtacttttagtagagatggtgtttccccacgttggtcagtctggtctcaaattcctgacctcaggtgatctgcctgcctcggcctcccaaagtgctgtgattacagacgtcagccaccatgcctggcctgaaaccttttttaggtaaagttgaattccatccttaaaagtttctgttatatcctatttagccattttctattgtctcccaaagaattcacatcaaaaaaacagctttgaactcccccttcaaaggaaacagtcgactttcataattagcatctaccattatccccaaatcttattttattcattgacttgaaattttttccaattgctttttttttttttttttttaaggttaagagcagaggtttactaggccaaagaaagagaatagctctctgttgcagagaggggtcctggagaaatgggttaccccagttgtcttatttaaatggttacccatcagattttaattttatcttctctttgagagcttggtaataagaagcacttaaatcactccaaagaagactttaaaaagggagcagtgaaaaggtcttaataatttattgattgaattaagaaatactagctaattaagaatctgagtctaaacagcacagattttttctttctgcttttaaattgtgttttaaaaaaagagacagggggctgggcgtggtggctcacgcctgtaatcctagcactttgggaggccgaggcgggtggatcacgaggtaggagttaaagaccagcctggccaacatggcaaaaccctactaaagatacaaaaaaaaaaaaaaattggccaggcgtggtggtgggtgcctgtaatcccaggtacttggaaggctgaggcaggagaatctcttgaacccagaaggcgaaggttgcagtgaaccgagatcatgccattgtactctagcctgggtgacaagagcaagactccgtctcaaaaaaaaaaaaaaaaaaaaaaaaaaaaaaaaaaaaaaaaaaaaa

SEQ ID NO: 1496 - protein, 244 aa, Homo sapien; identical to SEQ ID NO: 1228

SEQ ID NO: 1497 - DNA, 1534 bp, Homo sapien
aagcttgcacgaggccgacagcctcagccgggctgcgactgtcttggcaactgtgttgctcttgtccttcggcagcgtggccgctagtcatatcgaggatcaagcagaacaattctttagaagtggccatacaaacaactgggctgttctggtgtgtacatcccgattctggtttaattatcgacatgttgcaaataccctttctgtttatagaagtgtcaagaggctaggtattcctgacagtcacattgtcctaatgcttgcagatgatatggcctgtaatcctagaaatcccaaaccagctacagtgtttagtcacaagaatatggaactaaatgtgtatggagatgatgtggaagtggattatagaagttatgaggtaactgtggagaattttttacgggtattaactgggaggatcccacctagtactcctcggtcaaaacgtcttctttctgatgacagaagcaatattctaatttatatgacagggcatggtggaaatggtttcttaaaatttcaagattctgaagaaattaccaacatagaactcgcggatgcttttgaacaaatgtggcagaaaagacgctacaatgagctactgtttattattgatacttgccaaggagcatccatgtatgaacgattttattctcctaacataatggctctagctagtagtcaagtgggagaagattcactctcgcatcaacctgatcctgcaattggagtccatcttatggatagatacacattttatgtcttggaatttttggaagaaattaacccagctagccaaactaatatgaatgacctttttcaggtatgtcccaaaagtctgtgtgtgtctactcctggacatcgcactgatctttttcagagggatcctaaaaatgtactgataactgatttctttggaagtgtacggaaagtggaaattacaacagagactattaaattgcaacaggattcagaaatcatggaaagcagctataaggaagaccagatggatgagaaactaatggaacctctgaaatatgctgaacaacttcctgtagctcagataatacaccagaaaccgaagctgaaagactggcatcctcctgggggctttattctgggattatgggcacttattatcatggttttcttcaaaacttatggaattaagcatatgaagttcattttttagacttgatgatgaatgaagaatgcatggaggactgcaaacttggataataatttatgtcattatatatttttaaaaatgtgtttctcttgtatgaattggaaataagtataaggaaactaaatttgaatcaactattaattttataacttaaagaaaaataattgttaatgcaactgcttaatggcactaaatatattccagttttgtattttgtgtattataaaagcgaatgagacagagatcagaatacattgactgtttttgaaaatagtaatttccccttatccccttttcatttggaaaagaaacaattgtgaagacattaaattctcactaacagaa

SEQ ID NO: 1498 - protein, 396 aa, Homo sapien
SLHEADSLSRAATVLATVLLLSFGSVAASHIEDQAEQFFRSGHTNNWAVLVCTSRFWFNYRHVANTLSVYRSVKRLGIPDSHIVLMLADDMACNPRNPKPATVFSHKNMELNVYGDDVEVDYRSYEVTVENFLRVLTGRIPPSTPRSKRLLSDDRSNILIYMTGHGGNGFLKFQDSEEITNIELADAFEQMWQKRRYNELLFIIDTCQGASMYERFYSPNIMALASSQVGEDSLSHQPDPAIGVHLMDRYTFYVLEFLEEINPASQTNMNDLFQVCPKSLCVSTPGHRTDLFQRDPKNVLITDFFGSVRKVEITTETIKLQQDSEIMESSYKEDQMDEKLMEPLKYAEQLPVAQIIHQKPKLKDWHPPGGFILGLWALIIMVFFKTYGIKHMKFIF

SEQ ID NO: 1499 - DNA, 3939 bp, Homo sapien; identical to SEQ ID NO: 1193

SEQ ID NO: 1500 - protein, 554 aa, Homo sapien; identical to SEQ ID NO: 1194

SEQ ID NO: 1501 - DNA, 4130 bp, Homo sapien
ggcacgaggctgcgcctcgggggtcggcgtccaggctcggagcgcggcacggagacggcggcagcgctggactaggtggcaggccctgcatcatggaaactctttctaatgcaagtggtacttttgccatacgccttttaaagatactgtgtcaagataacccttcgcacaacgtgttctgttctcctgtgagcatctcctctgccctggccatggttctcctaggggcaaagggaaacaccgcaacccagatggcccaggcactgtctttaaacacagaggaagacattcatcgggctttccagtcgcttctcactgaagtgaacaaggctggcacacagtacctgctgagaacggccaacaggctctttggagagaaaacttgtcagttcctctcaacgtttaaggaatcctgtcttcaattctaccatgctgagctgaaggagctttcctttatcagagctgcagaagagtccaggaaacacatcaacacctgggtctcaaaaaagaccgaaggtaaaattgaagagttgttgccgggtagctcaattgatgcagaaaccaggctggttcttgtcaatgccatctacttcaaaggaaagtggaatgaaccgtttgacgaaacatacacaagggaaatgccctttaaaataaaccaggaggagcaaaggccagtgcagatgatgtatcaggaggccacgtttaagctcgcccacgtgggcgaggtgcgcgcgcagctgctggagctgccctacgccaggaaggagctgagcctgctggtgctgctgcctgacgacggcgtggagctcagcacggtggaaaaaagtctcacttttgagaaactcacagcctggaccaagccagactgtatgaagagtactgaggttgaagttctccttccaaaatttaaactacaagaggattatgacatggaatctgtgcttcggcatttgggaattgttgatgccttccaacagggcaaggctgacttgtcggcaatgtcagcggagagagacctgtgtctgtccaagttcgtgcacaagagttttgtggaggtgaatgaagaaggcaccgaggcagcggcagcgtcgagctgctttgtagttgcagagtgctgcatggaatctggccccaggttctgtgctgaccaccctttccttttcttcatcaggcacaacagagccaacagcattctgttctgtggcaggttctcatcgccataaagggtgcacttaccgtgcactcggccatttccctcttcctgtgtccccagatccccactacagctccaagaggatgggcctagaaagccaagtgcaaagatgagggcagattccttacctgtctgccctcatgatttgccagcatgaattcatgatgctccacactcgcttatgctacttaatcagaatcttgagaaaatagaccataatgattccctgttgtattaaaattgcagtccaaatcccataggatggcaagcaaagttcttctagaattccacatgcaattcactctggcgaccctgtgctttcctgacactgcgaatacattccttaacccgctgcctcagtggtaataaatggtgctagatattgctactattttatagatttcctggtgcttagccttataaaaaaggttgtaaaatgtacatttatattttatcttttttttttttttttttctgagacgcagtctggctctctgtcgcccaggctggagtgcagtggctcgatctctgctcactgcaagctccgcctcccgggttcacgccattctcctgcctcagcctcccgagtagctgggactacaggcgcccgccaccacgcccggctaattttttgtatttttagtagagacggggtttcaccgtgttagccaggatggtgtcgatctcctgacctcgtgatccacccgcctcggcctcccaaagtgctgggattacaggcttgagccaccgcgcccggctatattttatcttttatctttttctttgacatttaccaatcaccaagcatgcaccaaacactgctttaggcactggggacacaaaggggacagagccatcctcctttgacacctggtcttcagttctgtgcccaacgtatatagttttgacaatgaccaggttggactgtttaatgtctttcaacttaccacgtaatcctcttgtagggatcacatctttctttatgatattgtatttctctacctctaacagtaaaaattccattcaacccttaaagctcacttcaaattcttctttgagaagtttttcctttctccgcaaccagatgtacatatttgaactctctttgtacttggagggcacttctttcgtggtagttcttttatttttattaatctctgtatccttagatagtcctccaacaaccaaaggttgggactctgtcttacatatctgggtgcccctcatagtgcagtaataagtaagttgattatatacgagctatgtaacttatattttttaatggttggatatcactgagtttttttttttaagaatttttttattgaggtaaacttcacataacataaaattaactattttaaagtgagaagttcagtgccacttagtattgttaacaatgttgcataaccaccacctttatttaaagttccaaaaaaaatgttctcctctaaaaggaaaccccatcccattaagcagatactctccattccttccttcctccagcccccagcaaccaccaatctgctttctgtctctatggttttatctattcttgctattttatataaatcgaattgtatgagaccttttgtgtctggcttctttcacttagtacaagtttttgagatttatttacatagtagcatgtatcaacacttcatttttatggccaaataaaattgtattatgtgtttatagcacaatttatttatccactcattcattgatggactttgggttgtttctgacttttggctattgggaatagtgctgctatgaatgtttgtgtacctgtatttgtttgaatgcctattttgcattctcttgggtatatatctaggagtggaactgctgggtcatatgttaattctatgtttagctttttgaggaacagacaaactgttttccacagcagttgaaccattccacattcccaccagcaatgtatgagaattccaatttctgtccacttcctcaccaacacttattattttccttttcctttttttaaaaaaaataagttatggccatcttagtgggtgtgaagtggtatctcattgtgttttttatttgcatttcctatgtaatgagctagaaactaaagtacaaactagatgggacatccagtccctttgatagataatgctgagtaaaaaatgagatgaaagacatttgtttgtttttagaacatgagtgacagtttgttaaaaagctttagaggaggaatgaaaacaaagtgaagtacacttagaaaagggccaagtggacatcttggatgtcaagtgcctagttcagtatcttttttttttttttttttttttttgagacagtgcctcactctgtcacccaggctggagtgtagtggcatgatctgggctcactgcaacctcctcctcctggattcaagcaattctcttgcttcagcctcccaagtagctgagactacaagcacccaccaccacacccggctaattttgtatttttcagtagagacggggtttcgccacattggccgtgttggtcttgaactcctggcctcaagcaatccgcctacctcagcctcccaaagtgctaggattacaggcataagccactgagcccagccctagttcagtatcttttatgtaaattataaacatctgcaacattatgtatcatatgcagatacttattgcatttcttttattagtggtgaaagtgttctatgcatttattggctcttgaatttcctcatctatgaattgtcattcacacacctacttttctgcttcgtttttacatatgtctttgcctattaaagatattatccctctgttttatattttctctcattcttgtattgccttttaaattttgttatgatgtttcattaataaacagtgttttgttttcctctataaaaaaaaaaaaaaaa

SEQ ID NO: 1502 - protein, 376 aa, Homo sapien
METLSNASGTFAIRLLKILCQDNPSHNVFCSPVSISSALAMVLLGAKGNTATQMAQALSLNTEEDIHRAFQSLLTEVNKAGTQYLLRTANRLFGEKTCQFLSTFKESCLQFYHAELKELSFIRAAEESRKHINTWVSKKTEGKIEELLPGSSIDAETRLVLVNAIYFKGKWNEPFDETYTREMPFKINQEEQRPVQMMYQEATFKLAHVGEVRAQLLELPYARKELSLLVLLPDDGVELSTVEKSLTFEKLTAWTKPDCMKSTEVEVLLPKFKLQEDYDMESVLRHLGIVDAFQQGKADLSAMSAERDLCLSKFVHKSFVEVNEEGTEAAAASSCFVVAECCMESGPRFCADHPFLFFIRHNRANSILFCGRFSSP

SEQ ID NO: 1503 - DNA, 3906 bp, Homo sapien
gtagctgctttgcaggtacatcatgtgacagtggaattatagaagatgtgaagaaaacaacacacactccaacactaaaagcatgatgtagctgctttgcaggtaaaagaagcagctacatcatgcttttagtgttggagtgtgtgttgttttctgtggctcaggggtattttagaatggactcttctgcaacccagtttcacatagagactcatgagaacacatcaggactttggtcaatatggtaccgcaaccattttgaccgtagtgttgtattaaatgatgtgtttctttccaaggagaccaagcacatgttaaagattctgaatttcactggccctttatttctacctccaggctgttggaatatattttctttgaaacttgctgttaaagacattgccataaatctattcaccaatgtatttttgactacaaacataggtgccatttttgcaatacctctacagatttattcagcaccaaccaaggaagggagtctgggttttgaagtgatagcacattgtggcatgcattatttcatgggaaaatcaaaagcaggaaatcctaattggaatgggagcctttctctggatcaatctacctggaatgtggattctgaacttgcaaataaattgtatgaaagatggaagaaatataaaaatggtgacgtctgcaagaggaatgttttgggaacaactcgatttgctcacttgaagaaatccaaggagtcagagtcctttgttttctttttgcctcgtttgatcgcagagcctggcctcatgttaaacttcagcgcaactgcccttaggagcaggatgatcaagtactttgtggtgcagaacccgtcctcttggccggtctccttgcagctcctgcctctctccttgtaccctaaacccgaagccctagtgcacctgctccacagatggtttggcactgatatgcagatgattaatttcacaactggtgaattccagctcaccgaagcttgcccttacctgggtacgcattctgaggaatccaggtttggcatcctccacttacatctgcagcctttggaaatgaaaagggttggcgtagttttcacacctgctgactatggaaaagttacctcactcatactaatccggaataacttgactgttattgacatgattggcgtggaaggatttggagcaagagagttattaaaagtgggtggaagacttcctggtgcaggaggctcactccgatttaaggtgcccgagtccacgctgatggactgccgtagacaactgaaagacagtaagcaaattttatctattacaaagaactttaaagttgagaatattggacctcttcctataactgtttcgtctctgaaaattaatgggtataactgccaaggttatggattcgaggtgctggattgtcatcagttttccctggacccaaacacatcccgcgatatcagcattgtgttcactccagactttacctcctcctgggtaattcgggacctaagtcttgtaaccgcagcggacctagaatttcgcttcactctcaatgtgactctccctcatcacctgttgcccttgtgtgcagacgtggttccaggacccagctgggaggagtcattttggaggctcacggtcttctttgtcagtttgtccctgttgggtgtgattttaatagccttccaacaagcacagtacattctcatggaattcatgaaaacaagacagaggcaaaatgctagctcctcttcacagcaaaacaatggtcctatggatgtaatcagcccccattcttacaaaagcaattgcaagaactttctcgatacatatggcccctctgataaaggcagggggaagaactgccttccagtgaacactccccaaagcaggatccagaatgctgcaaagaggagcccagccacctatggtcattctcagaagaagcacaaatgctcagtgtattacagtaaacacaaaaccagcacagctgcggccagcagcaccagcacgactactgaggaaaaacagacttcacccctgggcagctcactgcctgctgctaaagaggacatttgcactgatgccatgcgtgagaactggatcagcctcagatatgcaagtggcataaatgtcaacctgcagaagaatttaacccttcccaaaaacttactgaataaagaagaaaacacactgaaaaacacaattgttttcagtaatccttcttcagaatgtagtatgaaggagggaatacagacatgtatgtttcctaaggaaactgacattaaaacttcagagaacacagccgagttcaaggaacgggagctctgtccactgaagacctccaagaaactacctgaaaaccatttaccaagaaactcacctcagtaccaccagccagacttgccagaaatttccaggaaaaataatgggaataaccagcaagtacctgtcaagaatgaagtagatcattgtgaaaatttgaagaaggtggacacaaagccttcttcagaaaagaagattcacaaaacatctagagaagacatgttttctgagaaacaggacatacctttcgtagagcaagaagatccttataggaagaaaaagcttcaggagaaaagagaaggaaatttacaaaatttaaattggagtaaaagtcgaacatgtagaaagaacaagaaaaggggtgttgctccagtctcaaggcctcctgaacagagtgatctaaagcttgtgtgcagtgactttgagaggtctgagctgagcagtgacatcaatgtaagaagctggtgtatacaggaaagcactagggaggtttgtaaagcagatgccgaaattgcaagcagtttacctgctgcccagagagaggcagaaggttactaccagaagcctgagaagaaatgtgtggacaagttctgctccgattccagctctgactgtgggagctcctctggcagcgtgcgtgccagccggggcagctgggggagctggagcagcaccagcagctccgacggggataagaagcccatggtggacgcccagcacttcctgccggccggagacagtgtttcacaaaatgattttccttctgaagctcccatctccttgaatctttctcataacatctgcaatcccatgaccgtgaatagtctcccacaatacgcagagccttcctgtcccagccttcctgccgggcccacaggtgttgaagaagataaaggtctttactcacctggagacctgtggcccactccgccagtgtgtgtgacaagcagcttaaactgcaccctggagaacggcgtgccttgtgtgattcaggagtcggccccggttcataatagtttcattgattggagtgcaacatgcgaaggccagttttccagcgcatactgtccattggaattgaacgattacaatgcctttccagaagaaaacatgaactatgccaatggcttcccctgtcctgcagatgttcagacagactttattgatcacaactctcagtctacctggaacaccccacccaacatgcctgctgcctggggacatgccagtttcatcagctctccgccctacctcacaagcacccgaagcttgtctccaatgtctggactttttggttccatctgggccccgcaaagcgatgtgtatgaaaattgctgccccatcaaccccaccacggaacattcgacccacatggaaaaccaagcggtcgtgtgcaaggaatactacccggggttcaacccgtttcgcgcctatatgaacctggacatatggactaccacagcgaataggaatgcaaatttcccactgtctagagactcgagttactgtgggaatgtgtgaaaataattggatttttaaacaatgtgaataaagaggcttgtgttttgaaaaaaaaaaaaaaaaa

SEQ ID NO: 1504 - protein, 1239 aa, Homo sapien
MLLVLECVLFSVAQGYFRMDSSATQFHIETHENTSGLWSIWYRNHFDRSVVLNDVFLSKETKHMLKILNFTGPLFLPPGCWNIFSLKLAVKDIAINLFTNVFLTTNIGAIFAIPLQIYSAPTKEGSLGFEVIAHCGMHYFMGKSKAGNPNWNGSLSLDQSTWNVDSELANKLYERWKKYKNGDVCKRNVLGTTRFAHLKKSKESESFVFFLPRLIAEPGLMLNFSATALRSRMIKYFVVQNPSSWPVSLQLLPLSLYPKPEALVHLLHRWFGTDMQMINFTTGEFQLTEACPYLGTHSEESRFGILHLHLQPLEMKRVGVVFTPADYGKVTSLILIRNNLTVIDMIGVEGFGARELLKVGGRLPGAGGSLRFKVPESTLMDCRRQLKDSKQILSITKNFKVENIGPLPITVSSLKINGYNCQGYGFEVLDCHQFSLDPNTSRDISIVFTPDFTSSWVIRDLSLVTAADLEFRFTLNVTLPHHLLPLCADVVPGPSWEESFWRLTVFFVSLSLLGVILIAFQQAQYILMEFMKTRQRQNASSSSQQNNGPMDVISPHSYKSNCKNFLDTYGPSDKGRGKNCLPVNTPQSRIQNAAKRSPATYGHSQKKHKCSVYYSKHKTSTAAASSTSTTTEEKQTSPLGSSLPAAKEDICTDAMRENWISLRYASGINVNLQKNLTLPKNLLNKEENTLKNTIVFSNPSSECSMKEGIQTCMFPKETDIKTSENTAEFKERELCPLKTSKKLPENHLPRNSPQYHQPDLPEISRKNNGNNQQVPVKNEVDHCENLKKVDTKPSSEKKIHKTSREDMFSEKQDIPFVEQEDPYRKKKLQEKREGNLQNLNWSKSRTCRKNKKRGVAPVSRPPEQSDLKLVCSDFERSELSSDINVRSWCIQESTREVCKADAEIASSLPAAQREAEGYYQKPEKKCVDKFCSDSSSDCGSSSGSVRASRGSWGSWSSTSSSDGDKKPMVDAQHFLPAGDSVSQNDFPSEAPISLNLSHNICNPMTVNSLPQYAEPSCPSLPAGPTGVEEDKGLYSPGDLWPTPPVCVTSSLNCTLENGVPCVIQESAPVHNSFIDWSATCEGQFSSAYCPLELNDYNAFPEENMNYANGFPCPADVQTDFIDHNSQSTWNTPPNMPAAWGHASFISSPPYLTSTRSLSPMSGLFGSIWAPQSDVYENCCPINPTTEHSTHMENQAVVCKEYYPGFNPFRAYMNLDIWTTTANRNANFPLSRDSSYCGNV

SEQ ID NO: 1505 - DNA, 2431 bp, Homo sapien
gttttgcctgctagcatctccctgtaactctcccaatcttgaggagtgatccctgtcccagcccctggaaaggggcaggaacgacaaactcaaagtccaggatgttcaccatgacaagagccatggaagaggctctttttcagcacttcatgcaccagaagctggggatcgcctatgccatacacaagccatttcccttctttgaaggcctcctagacaactccatcatcactaagagaatgtacatggaatctctggaagcctgtagaaatttgatccctgtatccagagtggtgcacaacattctcacccaactggagaggacttttaacctgtctcttctggtgacattgttcagtcaaattaacctgcgtgaatatcccaatctggtgacgatttacagaagcttcaaacgtgttggtgcttcctatgaacggcagagcagagacacaccaatcctacttgaagccccaactggcctagcagaaggaagctccctccataccccactggcgctgcccccaccacaaccccctcaaccaagctgttcaccctgtgcgccaagagtcagtgagcctggaacatcctcccagcaaagcgatgagatcctgagtgagtcgcccagcccatctgaccctgtcctgcctctccctgcactcatccaggaaggaagaagcacttcagtgaccaatgacaagttaacatccaaaatgaatgcggaagaagactcagaagagatgcccagcctcctcactagcactgtgcaagtggccagtgacaacctgatcccccaaataagagataaagaagaccctcaagagatgccccactctcccttgggctctatgccagagataagagataattctccagaaccaaatgacccagaagagccccaggaggtgtccagcacaccttcagacaagaaaggaaagaaaagaaaaagatgtatctggtcaactccaaaaaggagacataagaaaaaaagcctcccaagagggacagcctcatctagacacggaatccaaaagaagctcaaaagggtggatcaggttcctcaaaagaaagatgactcaacttgtaactccacggtagagacaagggcccaaaaggcgagaactgaatgtgcccgaaagtcgagatcagaggagatcattgatggcacttcagaaatgaatgaaggaaagaggtcccagaagacgcctagtacaccacgaagggtcacacaaggggcagcctcacctgggcatggcatccaagagaagctccaagtggtggataaggtgactcaaaggaaagacgactcaacctggaactcagaggtcatgatgagggtccaaaaggcaagaactaaatgtgcccgaaagtccagatcgaaagaaaagaaaaaggagaaagatatctgttcaagctcaaaaaggagatttcagaaaaatattcaccgaagaggaaaacccaaaagtgacactgtggattttcactgttctaagctccccgtgacctgtggtgaggcgaaagggattttatataagaagaaaatgaaacacggatcctcagtgaagtgcattcggaatgaggatggaacttggttaacaccaaatgaatttgaagtcgaaggaaaaggaaggaacgcaaagaactggaaacggaatatacgttgtgaaggaatgaccctaggagagctgctgaagcggaaaaactcggatgaatgcgaggtgtgctgtcaagggggacaacttctctgctgcggtacttgtccacgagtcttccatgaggactgtcacatcccccctgtggaagccaagaggatgctgtggagttgcaccttctgcaggatgaagaggtcttcaggaagccaacagtgccatcatgtatctaagaccctggagaggcagatgcagcctcaggaccagctgaaatgtgagttcctcctcttgaaggcctactgtcatccacaaagctccttttttacgggcatcccatttaatattcgagattacggtgagccctttcaggaagcaatgtggttggacctggttaaggaaaggctgattacggaaatgtacacggtggcatggtttgtgcgagacatgcgcctgatgtttcgcaaccataaaacattttacaaggcttctgactttggccaggtaggacttgacttagaggcagaatttgaaaaagatctcaaagacgtgctcggttttcatgaagccaatgacggcggtttctggactcttccttgaccctgttctgtaaagactgaagcatccccacctcaggattcagctgatgggaccctggcttggactgttgattgccagtgagtctgggatgtaattggctgccctcaggacccaaacccagacacttcataggattatcacaccctccatctttattctttctttttacctttaaaagtctatatcta

SEQ ID NO: 1506 - protein, 713 aa, Homo sapien
MFTMTRAMEEALFQHFMHQKLGIAYAIHKPFPFFEGLLDNSIITKRMYMESLEACRNLIPVSRVVHNILTQLERTFNLSLLVTLFSQINLREYPNLVTIYRSFKRVGASYERQSRDTPILLEAPTGLAEGSSLHTPLALPPPQPPQPSCSPCAPRVSEPGTSSQQSDEILSESPSPSDPVLPLPALIQEGRSTSVTNDKLTSKMNAEEDSEEMPSLLTSTVQVASDNLIPQIRDKEDPQEMPHSPLGSMPEIRDNSPEPNDPEEPQEVSSTPSDKKGKKRKRCIWSTPKRRHKKKSLPRGTASSRHGIQKKLKRVDQVPQKKDDSTCNSTVETRAQKARTECARKSRSEEIIDGTSEMNEGKRSQKTPSTPRRVTQGAASPGHGIQEKLQVVDKVTQRKDDSTWNSEVMMRVQKARTKCARKSRSKEKKKEKDICSSSKRRFQKNIHRRGKPKSDTVDFHCSKLPVTCGEAKGILYKKKMKHGSSVKCIRNEDGTWLTPNEFEVEGKGRNAKNWKRNIRCEGMTLGELLKRKNSDECEVCCQGGQLLCCGTCPRVFHEDCHIPPVEAKRMLWSCTFCRMKRSSGSQQCHHVSKTLERQMQPQDQLKCEFLLLKAYCHPQSSFFTGIPFNIRDYGEPFQEAMWLDLVKERLITEMYTVAWFVRDMRLMFRNHKTFYKASDFGQVGLDLEAEFEKDLKDVLGFHEANDGGFWTLP

SEQ ID NO: 1507 - DNA, 6475 bp, Homo sapien
gccgggcagtgggcaggtatggctgagggcgtgtgagcgccgagcgctaagggccgccgccaccatgccagggggcgcaggcgccgccaggctctgcttgctggcgtttgccctgcagcccctccggccgcgggcggcgcgggagcctggatggacaagaggaagtgaggaaggcagccccaagctgcagcatgaacttatcatacctcagtggaagacttcagaaagccccgtgagagaaaagcatccactcaaagctgagctcagggtaatggctgaggggcgagaactgatcctggacctggagaagaatgagcaactttttgctccttcctacacagaaacccattatacttcaagtggtaaccctcaaaccaccacacggaaattggaggatcactgcttttaccacggcacggtgagggagacagaactgtccagcgtcacgctcagcacttgccgaggaattagaggactgattacggtgagcagcaacctcagctacgtcatcgagcccctccctgacagcaagggccaacaccttatttacagatctgaacatctcaagccgcccccgggaaactgtgggttcgagcactccaagcccaccaccagggactgggctcttcagtttacacaacagaccaagaagcgacctcgcaggatgaaaagggaagatttaaactccatgaagtatgtggagctttacctcgtggctgattatttagagtttcagaagaatcgacgagaccaggacgccaccaaacacaagctcatagagatcgccaactatgttgataagttttaccgatccttgaacatccggattgctctcgtgggcttggaagtgtggacccacgggaacatgtgtgaagtttcagagaatccatattctaccctctggtcctttctcagttggaggcgcaagctgcttgcccagaagtaccatgacaacgcccaattaatcacgggcatgtccttccacggcaccaccatcggcctggcccccctcatggccatgtgctctgtgtaccagtctggaggagtcaacatggaccactccgagaatgccattggcgtggctgccaccatggcccacgagatgggccacaactttggcatgacccatgattctgcagattgctgctcggccagtgcggctgatggtgggtgcatcatggcagctgccactgggcacccctttcccaaagtgttcaatggatgcaacaggagggagctggacaggtatctgcagtcaggtggtggaatgtgtctctccaacatgccagacaccaggatgttgtatggaggccggaggtgtgggaacgggtatctggaagatggggaagagtgtgactgtggagaagaagaggaatgtaacaacccctgctgcaatgcctctaattgtaccctgaggccgggggcggagtgtgctcacggctcctgctgccaccagtgtaagctgttggctcctgggaccctgtgccgcgagcaggccaggcagtgtgacctcccggagttctgtacgggcaagtctccccactgccctaccaacttctaccagatggatggtaccccctgtgagggcggccaggcctactgctacaacggcatgtgcctcacctaccaggagcagtgccagcagctgtggggacccggagcccgacctgcccctgacctctgcttcgagaaggtgaatgtggcaggagacacctttggaaactgtggaaaggacatgaatggtgaacacaggaagtgcaacatgagagatgcgaagtgtgggaagatccagtgtcagagctctgaggcccggcccctggagtccaacgcggtgcccattgacaccactatcatcatgaatgggaggcagatccagtgccggggcacccacgtctaccgaggtcctgaggaggagggtgacatgctggacccagggctggtgatgactggaaccaagtgtggctacaaccatatttgctttgaggggcagtgcaggaacacctccttctttgaaactgaaggctgtgggaagaagtgcaatggccatggggtctgtaacaacaaccagaactgccactgcctgccgggctgggccccgcccttctgcaacacaccgggccacgggggcagtatcgacagtgggcctatgccccctgagagtgtgggtcctgtggtagctggagtgttggtggccatcttggtgctggcggtcctcatgctgatgtactactgctgcagacagaacaacaaactaggccaactcaagccctcagctctcccttccaagctgaggcaacagttcagttgtcccttcagggtttctcagaacagcgggactggtcatgccaacccaactttcaagctgcagacgccccagggcaagcgaaaggtgatcaacactccggaaatcctgcggaagccctcccagcctcctccccggccccctccagattatctgcgtggtgggtccccacctgcaccactgccagctcacctgagcagggctgctaggaactccccagggcccgggtctcaaatagagaggacggagtcgtccaggaggcctcctccaagccggccaattccccccgcaccaaattgcatcgtttcccaggacttctccaggcctcggccgccccagaaggcactcccggcaaacccagtgccaggccgcaggagcctccccaggccaggaggtgcatccccactgcggccccctggtgctggccctcagcagtcccggcctctggcagcacttgccccaaagtttccagaatacagatcacagagggctggagggatgattagctcgaaaatctagacctgtccaaggggcttctccctttccttgagctctctggacactgcagaggacccatgaccatggaaccctgaagaagcatgtctggccgcctctgagctcctcccaccctcctccaggaacctccacatctccaaaaatctccctgttgactcagtgcctcctcggcttccttggaagcccagagggactatgatctgatggcctctaggtgttgttttgtgcaatatacagccccaggtagggaggggagagtatgaggagggtgactggcagcttctcctccagactcctagccccgaggtgctgatggagatgctcaaggccagcaagcccctcaggccagcacttcgcttgcagaagccatccattcactcctggggtgcagggcacgcaagagagcttcccattgcttctgctctcctcagaggtcccgggctggatggaggtggtacttacccaccccttttagcttttagggattaaggaagggtcaagccagccactgctgtggccctgcccagggcttggttgagggaacggcttctggctgtatggctgcatgtgacaagccacgtcccctcccacctctccccaaacccctgcatccctgtattcacacgggtcactctgactcagacaggtactattcgtaggcagtgtagacagcaggaggagcaccgggcttgggcttcctctgagccgtgatgccaaaggttgcgactcctgactctggataatttttagttgctctttgttttctctgccgcactttcctggtgccccacgcttttctctcttccttcccctctcattctccctctaatgtgtggtgctttggtgagcaaaccctcagcagtcctgaccttcgggtgaccaggtgcttgtgacctacaagtcagagtccactctcacagtcggccactggatttccctcactggctctcaggagtgtgaccagagtagactcggggcatggccattggggtcatatgtttatttttcattgtgttttgtgacctcagcagggtgggggtcttcctccttactctaagctaaatctaggtgaggtttccccttagggagcccagctatttacaaagtacacacgagggagcaggctggtcattgacttcgggctggaccgttgccctctgagcagagaacagacccattttctgggagctgcccgagatcactggagaaggcagccagcagcagctgcactggaacagtcagagcagggagcctcttcctcaacccagctttttgtcattcacttccttttgttctctctctggtcactgcccttacctgaccctcacagaaagagagctctgagcaggtgagggggtctgcggtggctcctgtcttccctgcagcagggaaggagggccgtgtggtgctttgctagataggacggtttttgcaaagcacctggagatgtttgctgggagatagactcccactccacaaaggtgctgggtggctctccggacaggagctggcctgactctcactcctctgaggctttcctggggcctcctcccatcctgccatgagcaattgtttgctcttgaaaacctcactgcaaggctgaagctgacttctgattcaccaccccagggcctccttatagttctctgcacacaataggtgcttcttggatgttcttgggtttggaaataagtggaaaatacgggatgtacccctgggggaaaagcctgggttgggtttagaaagatctcaggaaaatgagtttctcttccctcagggtggctgtgatacaggttccccatgtccttgccgtgggtcatccttgctgtgggtcatccttgctgtggagatccattccccacctttcctgtggcccaaccttttatttaaatgtgctaccctctgcctcaaggcttggttcctggaaagtaaaggtgaaaacatcccctttcacccctctgcaaaacaaacaagcaacatcctcaaaacccaaccccatgcctcacagagcttcctgtggcttctccagcctttctccctcacatcaggaggtagatagctctgaaatgacagcgccacagccatagtgactgcatgagccatctgaacctgcagtccaccctccctggaaccacaccagaaagagacctgggttgtcgttttcttgctttttgttttgttttgttttattattttcatatcacctccatcccataaagttgtactgtgaactggaagatggtggaatgttttggaatttgatagactttcggcaaccagttctactaatgcttcactcctggctctgttcagggaagctgcccaggaagaagactggccattatgcatccccttttctttccagtgcccagtatgctgtttttgaggtgtcaaatacaaataaatctgggcttagggaaggagagaccttattccaaagcatgattgcagaaggggaaagggaatattgcaaaagggagaggaaggggccttatgggaatagtgaaaaggctcagaccgaccgatggcaagatctgcaagcgtctcaaagcccaggcagaaaaggacttttcttttattggaagaagtaaacatggctagaaagaaccacgttcagggaatgacgttgtgcccagggtttttttttttttttttttttgtctccaggggaggggctgtttgctggctcaggctgaggatggcccaaagtccagggtctggtggggaggagggaagcttaactcaagtttgggttagtgagttagcaagctctttgtgcagatggggatgtaggtaaatctttttaaaagtgaaattaacctcctgccaattttacaacccaagaatttttttttaagggccttggagccatctctaaaacaaacctcaagggatttagtgccctgtctccctgtctctagaagccttagcctgggcacctggctcaatcttgtaactgcctgctagccatagattcctttcagccttgctgacttctccctataagagtaaagcctttttctgccccagctctgagacacttgcagatcttaaggtctgagacttgctgattttctggttggagtgtttttttgtattgccatagtcccttccccctgaagcaatagcccctccccacctcctgcaatacgcctttccaatctttattggaagtctctccctgcctacttcctaatttattcttatttgacagagggtatggaagacttgcaatttgaaaactggggaccagttccaaagtcagtaattgtgttaaccacgtgtataacagctctgctggacacccaagaaagccatgggaacaccaactggaaaggtccccttccccaggggagcctgcgaaggagaggttctgtagaatccaagcccacatttccaaagtcacccccaacgcgtcctctcacaccgtccactgtgcgtttgtatgtgtctgggatccagggcaatgtgaattttctttttatttgggagattgttcacggaaaacagatcttcttctctcttgtccacctattaattgtttacaatatttgtacatctatgcaaaatacttgaatgggccatggtgccttttttccttgttagtatttaattaaaaatgaattgtttgtcatttgcaatgttaaaaaaaaaaaa

SEQ ID NO: 1508 - protein, 918 aa, Homo sapien
MPGGAGAARLCLLAFALQPLRPRAAREPGWTRGSEEGSPKLQHELIIPQWKTSESPVREKHPLKAELRVMAEGRELILDLEKNEQLFAPSYTETHYTSSGNPQTTTRKLEDHCFYHGTVRETELSSVTLSTCRGIRGLITVSSNLSYVIEPLPDSKGQHLIYRSEHLKPPPGNCGFEHSKPTTRDWALQFTQQTKKRPRRMKREDLNSMKYVELYLVADYLEFQKNRRDQDATKHKLIEIANYVDKFYRSLNIRIALVGLEVWTHGNMCEVSENPYSTLWSFLSWRRKLLAQKYHDNAQLITGMSFHGTTIGLAPLMAMCSVYQSGGVNMDHSENAIGVAATMAHEMGHNFGMTHDSADCCSASAADGGCIMAAATGHPFPKVFNGCNRRELDRYLQSGGGMCLSNMPDTRMLYGGRRCGNGYLEDGEECDCGEEEECNNPCCNASNCTLRPGAECAHGSCCHQCKLLAPGTLCREQARQCDLPEFCTGKSPHCPTNFYQMDGTPCEGGQAYCYNGMCLTYQEQCQQLWGPGARPAPDLCFEKVNVAGDTFGNCGKDMNGEHRKCNMRDAKCGKIQCQSSEARPLESNAVPIDTTIIMNGRQIQCRGTHVYRGPEEEGDMLDPGLVMTGTKCGYNHICFEGQCRNTSFFETEGCGKKCNGHGVCNNNQNCHCLPGWAPPFCNTPGHGGSIDSGPMPPESVGPVVAGVLVAILVLAVLMLMYYCCRQNNKLGQLKPSALPSKLRQQFSCPFRVSQNSGTGHANPTFKLQTPQGKRKVINTPEILRKPSQPPPRPPPDYLRGGSPPAPLPAHLSRAARNSPGPGSQIERTESSRRPPPSRPIPPAPNCIVSQDFSRPRPPQKALPANPVPGRRSLPRPGGASPLRPPGAGPQQSRPLAALAPKFPEYRSQRAGGMISSKI

SEQ ID NO: 1509 - DNA, 913 bp, Homo sapien
agagccggcgccgtcaccgcccgcattgccgctcccagtcccgcgctcggcacgacatgaaatcccccgacgaggtgctacgcgagggcgagttggagaagcgcagcgacagcctcttccagctatggaagaagaagcgcggggtgctcacctccgaccgcctgagcctgttccccgccagcccccgcgcgcgccccaaggagctgcgcttccactccatcctcaaggtggactgcgtggagcgcacgggcaagtacgtgtacttcaccatcgtcaccaccgaccacaaggagatcgacttccgctgcgcgggcgagagctgctggaacgcggccatcgcgctggcgctcatcgatttccagaaccgccgcgccctgcaggactttcgcagccgccaggaacgcaccgcacccgccgcacccgccgaggacgccgtggctgccgcggccgccgcaccctccgagccctcggagccctccaggccatccccgcagcccaaaccccgcacgccatgagcccgccgcgggccatacgctggacgagtcggaccgaggctaggacgtggccggcgctctccagccctgcagcagaagaacttcccgtgcgcgcggatcctcgctccgttgcacgggcgccttaagttattggactatctaatatctatgtatttatttcgctggttctttgtagtcacatattttatagtcttaatatcttgtttttgcatcactgtgcccattgcaaataaatcacttggccagtttgcttttctaccatccggctgtggctcagtgagactcctgctgggagggtggaggcccaggaatgggcgggcaggacaccctcatccagtcctgcggggctggtgtgaaaggcgctgggaaccggctttgaatgaataaatgaatcgtgt

SEQ ID NO: 1510 - protein, 152 aa, Homo sapien
MKSPDEVLREGELEKRSDSLFQLWKKKRGVLTSDRLSLFPASPRARPKELRFHSILKVDCVERTGKYVYFTIVTTDHKEIDFRCAGESCWNAAIALALIDFQNRRALQDFRSRQERTAPAAPAEDAVAAAAAAPSEPSEPSRPSPQPKPRTP

SEQ ID NO: 1511 - DNA, 3175 bp, Homo sapien
tgcttaaaaaaacacaacaggattttcgaagaatcctttcttagaaaacaaacaaaaaaaccaaacaaaaacgtactttctccccactagtttacaccacaggaagcgagagagctgctgccactgctgctaccacaggaagacacagcagggagaagccctagtgcctctgccggctgcccaggacctggtatcggcccacagaccaagtcctccacagagggcgagccagggtggagaagagccagcccagtgacccaaacatccccgataaaacacccactgcttaagaggcaggctcggatggactatagctttgataccacagccgaagacccttgggttaggatttctgactgcatcaaaaacttatttagccccatcatgagtgagaaccatggccacatgcctctacagcccaatgccagcctgaatgaagaagaagggacacagggccacccagatgggaccccaccaaagctggacaccgccaatggcactcccaaagtttacaagtcagcagacagcagcactgtgaagaaaggtcctcctgtggctcccaagccagcctggtttcgccaaagcttgaaaggtttgaggaatcgtgcttcagagccaagagggctccctgatcctgccttgtccacccagccagcacctgcttccagggagcacctaggatcacacatccgggcctcctcctcctcctcctccatcaggcagagaatcagctcctttgaaacctttggctcctctcaactgcctgacaaaggagcccagagactgagcctccagccctcctctggggaggcagcaaaacctcttgggaagcatgaggaaggacggttttctggactcttggggcgaggggctgcacccactcttgtgccccagcagcctgagcaagtactgtcctcggggtcccctgcagcctccgaggccagagacccaggtgtgtctgagtcccctcccccagggcggcagcccaatcagaaaactttcccccctggcccggacccgctcctaaggctgctgtcaacacaggctgaggaatctcaaggcccagtgctcaagatgcctagccagcgagcacggagcttccccctgaccaggtcccagtcctgtgagacgaagctacttgacgaaaagaccagcaaactctattctatcagcagccaagtgtcatcggctgtcatgaaatccttgctgtgccttccatcttctatctcctgtgcccagactccctgcatccccaaggcaggggcatctccaacatcatcatccaacgaagactcagctgcaaatggttctgctgaaacatctgccttggacacggggttctcgctcaacctttcagagctgagagaatatacagagggtctcacggaagccaaggaagacgatgatggggaccacagttcccttcagtctggtcagtccgttatctccctgctgagctcagaagaattaaaaaaactcatcgaggaggtgaaggttctggatgaagcaacattaaagcaattagacggcatccatgtcaccatcttacacaaggaggaaggtgctggtcttgggttcagcttggcaggaggagcagatctagaaaacaaggtgattacggttcacagagtgtttccaaatgggctggcctcccaggaagggactattcagaagggcaatgaggttctttccatcaacggcaagtctctcaaggggaccacgcaccatgatgccttggccatcctccgccaagctcgagagcccaggcaagctgtgattgtcacaaggaagctgactccagaggccatgcccgacctcaactcctccactgactctgcagcctcagcctctgcagccagtgatgtttctgtagaatctacagcagaggccacagtctgcacggtgacactggagaagatgtcggcagggctgggcttcagcctggaaggagggaagggctccctacacggagacaagcctctcaccattaacaggattttcaaaggagcagcctcagaacaaagtgagacagtccagcctggagatgaaatcttgcagctgggtggcactgccatgcagggcctcacacggtttgaagcctggaacatcatcaaggcactgcctgatggacctgtcacgattgtcatcaggagaaaaagcctccagtccaaggaaaccacagctgctggagactcctaggcaggacatgctgaagccaaagccaataacacacagctaacacacagctcccataaccgctgattctcagggtctctgctgccgccccacccagatgggggaaagcacaggtgggcttcccagtggctgctgcccaggcccagaccttctaggacgccacccagcaaaaggttgttcctaaaataagggcagagtcacactggggcagctgatacaaattgcagactgtgtaaaaagagagcttaatgataatattgtggtgccacaaataaaatggatttattagaattccatatgacattcatgcctggcttcgcaaaatgtttcaagtactgtaactgtgtcatgattcacccccaaacagtgacatttatttttctcatgaatctgcaatgtgggcagagattggaatgggcagctcatctctgtcccacttggcatcagctggcgtcatgcaaagtcatgcaaaggctgggaccacctgagatcattcactcatacatctggccgttgatgttggctgggaactcacctggggctgctggcctgaatgcttataggtggcctctccttgtggcctgggctcctcacaacatggtgtctggattcccaggatgagcatcccaggatcgcaagagccacgtagaagctgcatcttgtttatacctttgccttggaagttgcatggcatcacctccaccatactccatcagttagagctgacacaaacctgcctgggtttaaggggagaggaaatattgctggggtcatttatgaaaaatacagtttgtcacatgaaacatttgcaaaattgtttttggttggattggagaagtaatcctagggaagggtggtggagccagtaaatagaggagtacaggtgaagcaccaagctcaaagcgtggacaggtgtgccgacagaaggaaccagcgtgtatatgagggtatcaaataaaattgctactacttacctacc

SEQ ID NO: 1512 - protein, 631 aa, Homo sapien [sequence omitted]

SEQ ID NO: 1513 - DNA, 5471 bp, Homo sapien
ccggggtcccctttcacccaagtgagccagctcaggctgtctgcaaagccggaggtgcgggcagctccgggcattgcattggtgcggaggcttttatatgccagagaaccctgagtgtgcccctgacatgacaaggagccgtcgtcgttaggactaccgaccagactcccggaaatcatgttggtaggatcccagtctttttcgcctggagggcccaatgggatcattagaagccagtcctttgcgggtttcagcggcctccaggaaaggcgatccaggtgtaactccttcattgaaaattcctccgctctcaagaagcctcaggccaaactgaagaaaatgcacaatttaggccacaaaaacaacaatccccccaaagagcctcagcctaaaagggtggaagaagtctacagggccttgaaaaatggacttgatgaatatctggaggttcaccagacggagctggacaagttgacagctcagttaaaagatatgaaaagaaactctcgcctgggtgtactgtatgacctagacaagcaaattaaaacaattgaaagatacatgagacgcctggagtttcatataagtaaggtagatgaactctatgaagcttattgtatccagcgacgcctccaggatggtgccagcaaaatgaagcaagccttcgcaacatcccctgccagcaaagctgcccgggagagtctgacagagatcaatcggagcttcaaggagtacacagagaatatgtgcaccattgaagtggagctagagaatctgctgggagaattctccatcaagatgaaaggtctggctggctttgcacgcctctgtcctggagatcaatatgaaattttcatgaagtatggccggcagcggtggaaactgaaaggcaaaatagaagtaaatggcaagcagagctgggatggagaagaaacagtttttctgcccctgatagttgggttcatctccatcaaggtcacggagctcaaagggctagcaactcacatcctggtaggtagcgtgacctgtgagaccaaagagctgtttgcagcccgacctcaggtagtggctgtcgacatcaatgaccttggtaccatcaaactgaacctggaaatcacctggtatccatttgacatggaggacatgaccgcatcctcaggcgctgggaacaaggcagcagcccttcagaggagaatgtccatgtacagccagggtaccccggaaacgcccaccttcaaagaccactccttctttaggtggctgcatccttccccagacaagcccaggcggctgtctgtcttgagtgccttgcaagacactttctttgccaagctgcaccgcagccgctccttcagtgacctgccctccctcaggccgagtcccaaggccgtgctagagctctattcaaatctacctgatgacatctttgaaaatggaaaggcagccgaggagaaaatgccactgtcgctcagcttcagtgacctgcccaacggggactgcgccctcacctcccactcaacaggctccccttccaactcaacaaatccagaaattaccatcacccctgcggagtttaacctcagcagcttggcctcccagaatgagggtatggatgacaccagctcagcatcttccaggaactccctgggagaaggccaagagccaaagtcacacctgaaggaggaagacccagaggagcccagaaaacctgcctcggccccatctgaggcttgccgccgacagtcctcaggtgctggggctgagcacctgttccttgagaatgatgttgcagaagcacttctgcaagagtctgaggaggcctctgagctcaagcctgtggaactggacacttcggaaggaaacatcacaaagcagctggtcaagaggctcacatctgcagaggtgccaatggccacagacaggctgctctctgagggttctgttggtggagaatctgaaggctgcagatcctttctagatggaagcttagaggatgcttttaatgggcttttacttgcattagaaccacataaagagcagtataaagagtttcaggatctgaaccaagaagtcatgaatttggatgatattctaaaatgcaagccagcagtaagccgcagcaggtcttccagtttaagtctcacagttgaaagtgctttagaaagctttgatttcctgaacacctctgattttgacgaggaggaggatggtgatgaggtttgtaatgttggcggaggtgctgactcagtattttcagacactgagactgagaaacacagttacaggtcggttcacccagaagccagggggcatctcagtgaagcgctcactgaagacacaggagttgggaccagtgtggcaggaagtcctctcccactgaccacaggcaacgagagcctggacatcaccatcgtcaggcacctccagtactgcacccaactcgtgcagcaaattgttttctcaagcaaaaccccatttgtggcaagaagtctcttagagaagctttctaggcagatccaagtgatggagaaactcgcagctgtcagtgatgagaacataggaaatatcagttctgttgtggaagccataccagaatttcacaaaaagctgtctttgctgtcattctggaccaagtgctgcagccctgttggtgtctaccacagcccagcggacagagtgatgaagcagctggaggccagctttgccagaactgtcaacaaagaatatccaggacttgcagacccagtgtttcgaaccctggtgtcccaaattctggaccaggctgagcctctgctttcctccagcctgtcctcggaagtcgtcactgttttccagtattacagttacttcaccagccacggcgtcagtgacctggagagttacctgagccagctggccaggcaagtttccatggttcagactctgcaatcactaagagatgaaaaactgctacaaaccatgagtgaccttgctcccagcaacctcctggcccagcaggaagtactcaggactctggctctgctattaaccagagaggacaacgaagttagcgaggctgtgacgctttacttggcagcagcctccaaaaatcagcatttcagggaaaaggccttgctctattactgtgaagcactaacaaagacaaacctccagctccagaaagcagcttgcctggctctgaaaatccttgaggctactgaaagcattaaaatgctggtgacattgtgtcaatctgatactgaagaaatcagaaatgtggcctcagaaaccctcttgtctctgggagaagatgggcggctggcatatgaacaattggacaaatttcctcgagactgtgttaaagtcggaggtcgtcatggaactgaagttgccacagccttttaattacagattaactgcctaacagctgtcttaatatctggcccttttcatcaggatggtgctgtggtttgggctggaaattgtttagagcctgagagacacgacaactgaaataaaaatgtaggccaggtgcagtggctcatgcctgtaatcccagtactttgggaggccaacgcaggagaattgcttaagcccaggaggttcaagaccaacctgggcaacatagcaaggccctgtctctacaaaaaaaatagtttaattagtcgggcgtggtggcatgcacctgtagtcccagctacttgggaggctaaggtgggaggattgcttgagcccagaagattcaggctgcagtgagccataattgccccactgcactccagactgggtgacagagcaaaaccctgtctcaaaaaacaaaacaacaacaacaactaaaaaaacatgttatagaaagaattcagagtctcgtttcacagtacctatctacttttcctttggccaatatagaatagggctatggtataattcaaatagattacatcgtcgattgtgtctaataatactcagtgaaagagtccatcttatcttaatatgtatgaaatttaaaaatagccatctttgtacttttttgcaagtttctctataagcttgaaatagtcatgtgatacttcgacaaacatcatatgccttgcagtttttctcggtcgtgttctcagggttgagtagtccccttagctacctaactttactttcaatacaaagcacaaaaaagaatacttcaaataaaagtttgcctgcagaacctggcaaaatgacccattatgagagtttagatgttttaattttatgtgctcccagctactctggagtctgaggtgggaggatcacttgaggcagaggttgcagtaagctgagattacactactgcactccagcccatgtgacagaggaatgagagccagtctcaaaaaaaaaaaacaaaaaactcccataatttattttgtttcttttccccatcctgaaaattcccaaatcatgtttccattatggaaaaatgataagtaaatgactaagaactacattaagattatgcctatacacttaaacaaaaaactcaaagcttatgctttttttttttaattaatgagagctattttttatgatattcttaccataggggtgttttgctgctaagacaaatcaaaaccaaaagctgtagattcacaaacctgtgatgctctttgaggtggaggaacctagaagtcagagaaatcctaatggagtaggagtggaggaacatttaaagtggtccctccttctgtaaaaatgaccgtgggattagaaagaaggacatcctgaggggtggttactgcccccagggaaatcactcactggtaggattccctggccaaatagttcaaacatcaggtcccattattgcttcagtatcagagatgcaagttcattaagcaaagtacaagaccattcagtagctcttattaaaatatcttttcttcctctaaagagtgtacaaggtggggtatgccaaggtatcaaaacaatatatgtgagtgtaatttaaactgtggaatatcaactgtactatggacgtgtttgtatcatttagatgtcattttaaatatttacattttagcaagacttttaaaaaggactcatttcatttcaaagtgcaaattgtttgccaggcttctggcaaatggttctttcaactgtgaacttatagtgtacatatctgtatatttataaatattatatatattcatacatccttcagtttaaaggtacattgtacagtctgtagttaggaggtatagcctatagcttatgttaaatggttgaaatggttctttttatagaaagtcaaacacagatgttacaggattttgtgtttggtttgtcatttttttattttttattttgactattgcatgagtaattaattccagatcttttgtattcacttctgtattttatgtttggttgaggggtgcttttagttgtgtggcatttgtattcattgatctttcagtcatgtaagttaaaataaaaattatttttgaattactagc

SEQ ID NO: 1514 - protein, 1068 aa, Homo sapien
MLVGSQSFSPGGPNGIIRSQSFAGFSGLQERRSRCNSFIENSSALKKPQAKLKKMHNLGHKNNNPPKEPQPKRVEEVYRALKNGLDEYLEVHQTELDKLTAQLKDMKRNSRLGVLYDLDKQIKTIERYMRRLEFHISKVDELYEAYCIQRRLQDGASKMKQAFATSPASKAARESLTEINRSFKEYTENMCTIEVELENLLGEFSIKMKGLAGFARLCPGDQYEIFMKYGRQRWKLKGKIEVNGKQSWDGEETVFLPLIVGFISIKVTELKGLATHILVGSVTCETKELFAARPQVVAVDINDLGTIKLNLEITWYPFDMEDMTASSGAGNKAAALQRRMSMYSQGTPETPTFKDHSFFRWLHPSPDKPRRLSVLSALQDTFFAKLHRSRSFSDLPSLRPSPKAVLELYSNLPDDIFENGKAAEEKMPLSLSFSDLPNGDCALTSHSTGSPSNSTNPEITITPAEFNLSSLASQNEGMDDTSSASSRNSLGEGQEPKSHLKEEDPEEPRKPASAPSEACRRQSSGAGAEHLFLENDVAEALLQESEEASELKPVELDTSEGNITKQLVKRLTSAEVPMATDRLLSEGSVGGESEGCRSFLDGSLEDAFNGLLLALEPHKEQYKEFQDLNQEVMNLDDILKCKPAVSRSRSSSLSLTVESALESFDFLNTSDFDEEEDGDEVCNVGGGADSVFSDTETEKHSYRSVHPEARGHLSEALTEDTGVGTSVAGSPLPLTTGNESLDITIVRHLQYCTQLVQQIVFSSKTPFVARSLLEKLSRQIQVMEKLAAVSDENIGNISSVVEAIPEFHKKLSLLSFWTKCCSPVGVYHSPADRVMKQLEASFARTVNKEYPGLADPVFRTLVSQILDQAEPLLSSSLSSEVVTVFQYYSYFTSHGVSDLESYLSQLARQVSMVQTLQSLRDEKLLQTMSDLAPSNLLAQQEVLRTLALLLTREDNEVSEAVTLYLAAASKNQHFREKALLYYCEALTKTNLQLQKAACLALKILEATESIKMLVTLCQSDTEEIRNVASETLLSLGEDGRLAYEQLDKFPRDCVKVGGRHGTEVATAF

SEQ ID NO: 1515 - DNA, 553 bp, Homo sapien
aagcagtggtaacaacgcagagtacgcgggaagcagtggtaacaacgcagagtacgcgggaagcagtggtaacaacgcagagtacgcgggaagcagtggtaacaacgcagagtacgcggaaagcagtggtaacaacgcagagtacgcggggccagcggaagtggctcctgtaaggcagcaaggtagcgtggccggcgcccgagctggggttgtgtccctgctgggctgccgttccagctggactgccgccatggaactcagcgccgaatacctccgcgagaagctgcagcgggacctggaggcggagcatgtggaggtggaggacacgaccctcaaccgttgctcctgtagcttccgagtcctggtggtgtcggccaagttcgaggggaaaccgctgcttcagagacacaggctggtgaacgcgtgcctagcagaagagctcccgcacatccatgcctttgaacagaaaaccctgaccccagaccagtgggcacgtgagcgacagaaatgagggactgggatctgcacagccattaaattataaatctggacg

SEQ ID NO: 1516 - protein, 86 aa, Homo sapien
MELSAEYLREKLQRDLEAEHVEVEDTTLNRCSCSFRVLVVSAKFEGKPLLQRHRLVNACLAEELPHIHAFEQKTLTPDQWARERQK

SEQ ID NO: 1517 - DNA, 1666 bp, Homo sapien
atttgctttctctttttcctttcttccggatgagaggctaagccataatagaaagaatggagaattattgattgaccgtctttattctgtgggctctgattctccaatgggaataccaagggatggttttccatactggaacccaaaggtaaagacactcaaggacagacatttttggcagagcatagatgaaaatggcaagttccctggctttccttctgctcaactttcatgtctccctcctcttggtccagctgctcactccttgctcagctcagttttctgtgcttggaccctctgggcccatcctggccatggtgggtgaagacgctgatctgccctgtcacctgttcccgaccatgagtgcagagaccatggagctgaagtgggtaagttccagcctaaggcaggtggtgaacgtgtatgcagatggaaaggaagtggaagacaggcagagtgcaccgtatcgagggagaacttcgattctgcgggatggcatcactgcagggaaggctgctctccgaatacacaacgtcacagcctctgacagtggaaagtacttgtgttatttccaagatggtgacttctatgaaaaagccctggtggagctgaaggttgcagcactgggttctaatcttcacgtcgaagtgaagggttatgaggatggagggatccatctggagtgcaggtccaccggctggtacccccaaccccaaatacagtggagcaacgccaagggagagaacatcccagctgtggaagcacctgtggttgcagatggagtgggcctatatgaagtagcagcatctgtgatcatgagaggcggctccggggagggtgtatcctgcatcatcagaaattccctcctcggcctggaaaagacagccagcatttccatcgcagaccccttcttcaggagcgcccagccctggatcgcagccctggcagggaccctgcctatcttgctgctgcttctcgccggagccagttacttcttgtggagacaacagaaggaaataactgctctgtccagtgagatagaaagtgagcaagagatgaaagaaatgggatatgctgcaacagagcgggaaataagcctaagagagagcctccaggaggaactcaagaggaaaaaatccagtacttgactcgtggagaggagtcttcgtccgataccaataagtcagcctgatgctctaatggaaaaatggccctcttcaagcctggtgaggaaatgcttcagatgaggctccaccttgttaaataaattggatgtatggaaaaatagactgcagaaaaggggaactcatttagctcacgagtggtcgagtgaagattgaaaattaacctctgagggccagcacagcagctcatgcctgtaatcctagcactttggaaggctgaggagggcggatcacaaggtcaggagatcaagaccatcctggctaacacggtgaaaccccgtctctactaaaaatacaaaaaataaaaaattagccgggcatggtgacgggcacctgtagtcccagctactcgggaggctgaggcaggagaatggcatgaacccggaaggcagagcttgcagtgagccgagatcacgccactgcactccagcctgggagacagagcgagactctgtctcaagaaaaaaaaaaaaaaaaaaaaa

SEQ ID NO: 1518 - protein, 319 aa, Homo sapien
MKMASSLAFLLLNFHVSLLLVQLLTPCSAQFSVLGPSGPILAMVGEDADLPCHLFPTMSAETMELKWVSSSLRQVVNVYADGKEVEDRQSAPYRGRTSILRDGITAGKAALRIHNVTASDSGKYLCYFQDGDFYEKALVELKVAALGSNLHVEVKGYEDGGIHLECRSTGWYPQPQIQWSNAKGENIPAVEAPVVADGVGLYEVAASVIMRGGSGEGVSCIIRNSLLGLEKTASISIADPFFRSAQPWIAALAGTLPILLLLLAGASYFLWRQQKEITALSSEIESEQEMKEMGYAATEREISLRESLQEELKRKKSST

SEQ ID NO: 1519 - DNA, 2164 bp, Homo sapien
ggctcgagtgcctggcgggctctggcttccgcgtccgcccctgctccggcttcgcccgcagctccgcgcccgcgggcaaccaagcccccagcgaagcccgcacagctccgggtgccaggacggggggccatgccgtgccggagggaggaggaagaggaagccggcgaggaggcggagggggaggaagaggaggacgacagcttcctcctgctgcagcagtcggtgacgctgggcagctcgggcgaggtggaccggctggtggcccagatcggcgagacgctgcagctggacgcggcgcaggacagcccggcctcgccgtgcgcgcccccgggggtgccgctgcgggccccggggcccctggctgcggcggtgccggcggacaaggcccggcccccggcggtgccgctgctgctgccgcccgcttcggctgagacggtgggcccggcgccctctggggccctgcgctgcgccctaggggaccgcggccgcgtgcgcggacgcgctgcgccctactgcgtggcggaggtcgccgcaggccccagcgcgctgccggggccgtgccggcgaggatggctcagggacgcggtcacctcccgccgcttgcagcagcgccgatggacccaagccggggcacgcgccggcgacgacgacccgcatcggctcctccagcagctcgtgctctcgggaaacctcatcaaggaagccgtgcggagactccaacgagccgtcgccgcggttgcagccacgggccccgcaagcgcccctgggcccgggggaggccgcagcggacctgaccgcattgccctgcagccctcaggctccttgctctgacgcaggcctcctggaggaggaagtggaggccgctgcgtagacccaacagcgtccagttcctactaactctgagctgaagccgacgtcgccagcctgggagcgaccactttggctgcggggaggcgcgtggggagagatctcaaccagagaagttaccagccgcggcgaggccgtcggagaaaacttaagcgtggagaaatgtatgcgccagggtgcttccgtggggcatgagaatttcccgggccatccaagcccaaggacctgggataaactgggagaactatggcagctacttgcatcgacttgtacctcacttagcccttgggggcgtcgtgagcttggattgtttaaggagggctcaggggtaggaatcgcgatggctttataacaatacttgaaaactaacgacacgcatacattttcttattttctggtggaggagcttagtaagtggtgctacaattgctgtgcaaagaaattccagaggggagaagaatgtaaaagtttggtggtgggtggcttggcattgcccctttttcccaccgattcggtggctggtgaaggtgggagatgtgaactccaattaagggactggagagaggtgaagaattttgcaggtgggagatttggatttgaatgtggacttgtaaatgacttgaccttgccatctgtgttcaaggtcacggtttgctgtggggttcctgggagagcttactcaccccggagtcttttctttctcttgctccaagaagagccctgttggtgctttaccaccgcttggagtctcccgaggacacaaacaggcagagagggacgtgtagggagagttctttcctgttttctgtgctttcctttttacaggactcccggaaggccactcatggccatgccaggagctttctcagaaacagtcataaacgatctcttgagtctctttcttgtcctcccagctgagctttcttattccaccctttctggtgtctataggaatgcatgagagaccctggacgtttttctgctctcttctggccctccatggagccatgggcctcggcctcggcggctcctcaccctcacaatttatttcctcctcccgtgccagcccttcttttgtgtctgaaaccggttttaaaatgtgactctcccagagaagaagccgctggctgtatgaaacttgacggcgcttttgtaaggtgccacccccaaactttaaggtagctaaaccaatttttaaaagattcaatggcttgttcatcctccagatgtagctattgatgtacacttcgcaacggagtgtctgaaattgtggtggtcctgatttataggatttcat

SEQ ID NO: 1520 - protein, 233 aa, Homo sapien
MPCRREEEEEAGEEAEGEEEEDDSFLLLQQSVTLGSSGEVDRLVAQIGETLQLDAAQDSPASPCAPPGVPLRAPGPLAAAVPADKARPPAVPLLLPPASAETVGPAPSGALRCALGDRGRVRGRAAPYCVAEVAAGPSALPGPCRRGWLRDAVTSRRLQQRRWTQAGARAGDDDPHRLLQQLVLSGNLIKEAVRRLQRAVAAVAATGPASAPGPGGGRSGPDRIALQPSGSLL

SEQ ID NO: 1521 - DNA, 1524 bp, Homo sapien
gcagagcacagcatcgtcgggaccagactcgtctcaggccagttgcagccttctcagccaaacgccgaccaaggaaaactcactaccatgagaattgcagtgatttgcttttgcctcctaggcatcacctgtgccataccagttaaacaggctgattctggaagttctgaggaaaagcagctttacaacaaatacccagatgctgtggccacatggctaaaccctgacccatctcagaagcagaatctcctagccccacagacccttccaagtaagtccaacgaaagccatgaccacatggatgatatggatgatgaagatgatgatgaccatgtggacagccaggactccattgactcgaacgactctgatgatgtagatgacactgatgattctcaccagtctgatgagtctcaccattctgatgaatctgatgaactggtcactgattttcccacggacctgccagcaaccgaagttttcactccagttgtccccacagtagacacatatgatggccgaggtgatagtgtggtttatggactgaggtcaaaatctaagaagtttcgcagacctgacatccagtaccctgatgctacagacgaggacatcacctcacacatggaaagcgaggagttgaatggtgcatacaaggccatccccgttgcccaggacctgaacgcgccttctgattgggacagccgtgggaaggacagttatgaaacgagtcagctggatgaccagagtgctgaaacccacagccacaagcagtccagattatataagcggaaagccaatgatgagagcaatgagcattccgatgtgattgatagtcaggaactttccaaagtcagccgtgaattccacagccatgaatttcacagccatgaagatatgctggttgtagaccccaaaagtaaggaagaagataaacacctgaaatttcgtatttctcatgaattagatagtgcatcttctgaggtcaattaaaaggagaaaaaatacaatttctcactttgcatttagtcaaaagaaaaaatgctttatagcaaaatgaaagagaacatgaaatgcttctttctcagtttattggttgaatgtgtatctatttgagtctggaaataactaatgtgtttgataattagtttagtttgtggcttcatggaaactccctgtaaactaaaagcttcagggttatgtctatgttcattctatagaagaaatgcaaactatcactgtattttaatatttgttattctctcatgaatagaaatttatgtagaagcaaacaaaatacttttacccacttaaaaagagaatataacattttatgtcactataatcttttgttttttaagttagtgtatattttgttgtgattatctttttgtggtgtgaataaatcttttatcttgaatgtaataagaatttggtggtgtcaattgcttatttgttttcccacggttgtccagcaattaataaaacataaccttttttactgcctaaaaaaaaaaaaaaaaaaaa

SEQ ID NO: 1522 - protein, 300 aa, Homo sapien
MRIAVICFCLLGITCAIPVKQADSGSSEEKQLYNKYPDAVATWLNPDPSQKQNLLAPQTLPSKSNESHDHMDDMDDEDDDDHVDSQDSIDSNDSDDVDDTDDSHQSDESHHSDESDELVTDFPTDLPATEVFTPVVPTVDTYDGRGDSVVYGLRSKSKKFRRPDIQYPDATDEDITSHMESEELNGAYKAIPVAQDLNAPSDWDSRGKDSYETSQLDDQSAETHSHKQSRLYKRKANDESNEHSDVIDSQELSKVSREFHSHEFHSHEDMLVVDPKSKEEDKHLKFRISHELDSASSEVN

SEQ ID NO: 1523 - DNA, 1037 bp, Homo sapien
cgcgagtgaaggaagacgaatgcgtgacccgaccggctgtggtgttccagtccccactgaccagtaggagcagcagggcgtcggcttgtgaggtggcttttcctcggggcaacccaggaaggccccaagaggacaatggattctggaactcgcccagttggtagctgctgtagcagccccgctgggctctcacgggagtacaaactagtgatgctgggtgctggtggtgtagggaagagtgccatgaccatgcagttcatcagccaccgattcccagaagatcatgatcccaccattgaagatgcttataagatcaggatccgtattgatgatgagcctgccaatctggacattttggatacagctggacaggcagagtttacagccatgcgggaccagtatatgagggcaggagaagggtttatcatctgttactctatcacggatcgtcgaagtttccatgaagttcgtgagtttaaacagcttatttatcgagtccgacgtactgacgatacacctgtggttcttgtgggaaacaagtcagacctcaaacagctaagacaggtcaccaaggaagaaggattggccttggcccgagaattcagctgtcccttttttgagacatctgctgcataccgctactatattgatgatgttttccatgcccttgtacgggagatacgtaggaaagaaaaggaggcagtactggccatggagaaaaaatctaagcccaaaaacagtgtatggaagaggctaaaatcaccattccggaagaagaaagattcagtaacttgaagagaagatgtgaagtgtttatctgtgaactgcagtgctgtatcaaagcagtccagtaacctgcagtactgagtatggtgcttgctctttcacttaactgataagagggacatgcctactaggagtttttaatgatgtggtatttaaagtattgtctcttagttaagtatgatttattaacccagtggagcactgtctgcttttaaattgtcacattagaatttgttctaccaaaaaaaaaa

SEQ ID NO: 1524 - protein, 219 aa, Homo sapien
MDSGTRPVGSCCSSPAGLSREYKLVMLGAGGVGKSAMTMQFISHRFPEDHDPTIEDAYKIRIRIDDEPANLDILDTAGQAEFTAMRDQYMRAGEGFIICYSITDRRSFHEVREFKQLIYRVRRTDDTPVVLVGNKSDLKQLRQVTKEEGLALAREFSCPFFETSAAYRYYIDDVFHALVREIRRKEKEAVLAMEKKSKPKNSVWKRLKSPFRKKKDSVT

SEQ ID NO: 1525 - DNA, 1399 bp, Homo sapien
attgcatttttattcacatacacattgttaatgtggaacaatttaacactaatctcatcagagagcgagatgaatgtggcaattgctcattttattttgcatatattaaattgagtaggttcagctctaacataccttaagaaaaatgcatatcggtgcactgtatgtatttcaaaatgcctttcctatgattgtcatgtcctcctttaaggcttttccctcaaatttattacaaatttagtatttttagtacttgatgactctaattacatgaatgcacctggaatgacatttgtaacagaagacggtctgacttgctttcagtattcacaagttctttccagtttccaagtcttttcctagcagtaatttaggggagacagaggagtttcatgtaaagagcatgcagtttggagtcagaacctgggtatgactctgtggccttgatgaagcaagttacttaaactcttgagttttagctttctcctttacaatgcatgaatgcctatccccctacaaaacaaagattaaatgtgatgatgtatgccaaggtgctttgtatattgtaaagtgctatataattataagatgttctaaattttcaaggatctaaaccagggattggcaaacgtttttccagggagtaaatattttacgctttgcatatataatttatggaggtgttgagaggatagattagacacttgaagtactcaggatagtgcctggcatgtaggaagcacctggaaaatattcgctgtgattaccatcagtccattttaccgaggaaggagccaaggtccaggcccactgaaggacttgcataacattacaatagcagtggcagaaccagccatgcttctgcaaatcacaacctctttgagcctctgtcacctgaactgcaaaatgagtgggttagacaaaatcatctgttgggacctcctagttccacgtgctatcattctactaactggcaccctaaggttgaaagtgcttatctgctttccaatgtggcttccttacagtctggaactgacaatatgcaggagcagtaaactggcagaaaaccaggaatcagagaaagaaaatataatttaactttaaagatgtaaattatatatatagtatattatatatatttttaaagctttatatgcctcaaatatcagggaaaggagccaagtccttggtatttagtttggtgaatacttgcattgaatacatgtcaagatgtcaagtcatttttgaatgtgtctcagggatttctatgctacacattcttttaacaaatcaagtatttatgtacacatgttcagattttttgacaaaatgattaaaataatgagatggaaaatgaaaaaaaatctatgtcgggtgcggagaaagaggtaatgaaatg

SEQ ID NO: 1526 - protein, 63 aa, Homo sapien
MSGLDKIICWDLLVPRAIILLTGTLRLKVLICFPMWLPYSLELTICRSSKLAENQESEKENII

SEQ ID NO: 1527 - DNA, 3410 bp, Homo sapien; identical to SEQ ID NO: 463

SEQ ID NO: 1528 - protein, 500 aa, Homo sapien; identical to SEQ ID NO: 464

SEQ ID NO: 1529 - DNA, 5828 bp, Homo sapien
cgccagatggctgagagctatcaaggaaaactcaggaccatgatggctcagtttcccacagctatgaatggagggccaaacatgtgggctattacctctgaagaacgtactaagcatgacaggcagtttgataacctcaaaccttcaggaggttacataacaggtgatcaagcacgtaattttttcctacaatcaggtctgccggcccctgttttagctgaaatatgggctttatcagacctaaacaaggatgggaagatggatcagcaagagttctccatagctatgaaactcatcaaactgaagcttcaaggccaacagttgcctgtggttctccctcctattatgaagcaaccccctatgttttctccattaatttctgctcgttttggaatgggaagcatgcccaatctgtccattcctcagccattgcctccagctgcacctataacatcattgtcttctgcgacttcagggaccaaccttcctcccttaatgatgcccactcccctagtgccttctgttagcacatcatcattaccaaatggaaccgccagtctcattcagcctttacccattccttattcttcttcaacattgcctcatgggtcatcttatagtctgatgatgggaggatttggaggtgctagtatacagaaagcgcagtctctgattgatttaggatctagtagctcaacttcctcgactgcttcactctcagggaactcacccaagactgggacctcagagtgggcagttcctcagcctacaagattaaaatatcggcaaaaatttaatactcttgacaaaagtatgagtggatatctctcaggttttcaagctagaaatgcccttcttcagtcaaatctttctcaaactcagctggctactatttggactctggctgacgttgatggtgatggacagctaaaagcagaagagtttattcttgcaatgcaccttactgacatggccaaagctggacagccattaccactgactttacctcctgagcttgttcctccatctttcagaggaggaaagcaaattgattccattaatggaactctgccttcatatcagaaaatgcaagaagaggagcctcagaagaaattaccagttacttttgaggacaaacggaaagccaactatgagcgagggaacatggagctggaaaagcgacgccaagccttgatggagcagcaacaaagggaggcagaacgtaaagcccagaaagaaaaggaagagtgggaacgaaaacagagagaattacaagaacaagaatggaagaaacaacttgaattagaaaaacgcttagagaagcaacgggaattggagagacaacgagaggaagaaaggagaaaagacatagaaagacgagaggcagcaaaacaggaacttgaacgacaacgtcgcttagaatgggagagaattcggcgacaggagcttctcaatcaaaagaatagagaacaagaagaaattgtcaggttaaactctaaaaagaagaatcttcatcttgagttggaagcactgaatggcaaacatcagcagatctcaggcagacttcaggatgtccgactcaaaaagcaaactcaaaagactgagctggaagttctggataagcagtgtgacttggaaattatggaaatcaagcaacttcaacaggaacttcaggaatatcagaataagcttatctatctggtacctgagaagcaattattaaatgaaagaattaaaaacatgcagttcagtaacacacctgattcaggggtcagtttacttcataaaaaatcattagaaaaggaagaattatgccaaagacttaaagaacagttagatgctcttgaaaaagaaactgcatctaagctgtcagaaatggattcttttaacaatcaactaaaggaactgagagaaacctacaacacacagcagttagcccttgaacagctttataagatcaaacgtgacaagttgaaggaaattgaaaggaaaagattagaactaatgcagaaaaagaaactagaagatgaggctgcaaggaaagcaaagcaaggaaaagaaaacttatggaaagaaaatcttagaaaggaggaagaagaaaaacaaaagcgactccaggaagaaaaaacacaagaaaaaattcaagaagaggaacggaaagctgaggagaaacaacgtaaggataaggatactttgaaagctgaggagaaaaaacgtgagacagctagtgttttggtgaattatagagcattatacccctttgaagcaaggaaccatgatgagatgagttttaattctggagatataattcaggttgatgaaaaaaccgtaggagaacctggttggctttatggtagttttcaaggaaattttggctggtttccatgcaattatgtagaaaaaatgccatcaagtgaaaatgaaaaagctgtatctccaaagaaggccttacttcctcctacagtttctttatctgctacctcaacttcctctgaaccactttcttcaaatcaaccagcatcagtgactgattatcaaaatgtatctttttcaaacctaactgtaaatacatcatggcagaaaaaatcagccttcactcgaactgtgtcccctggatctgtatcacctattcatggacagggacaagtggtagaaaacttaaaagcacaggccctttgttcctggactgcaaagaaagataaccacttgaacttctcaaaacatgacattattactgtcttggagcagcaagaaaattggtggtttggggaggtgcatggaggaagaggatggtttcccaaatcttatgtcaagatcattcctgggagtgaagtaaaacgggaagaaccagaagctttgtatgcagctgtaaataagaaacctacctcggcagcctattcagttggagaagaatatattgcactttatccatattcaagtgtggaacctggagatttgactttcacagaaggtgaagaaatattggtgacccagaaagatggagagtggtggacaggaagtattggagatagaagtggaatttttccatcaaactatgtcaaaccaaaggatcaagagagttttgggagtgctagcaagtctggagcatcaaataaaaaacctgagattgctcaggtaacttcagcatatgttgcttctggttctgaacaacttagccttgcaccaggacagttaatattaattctaaagaaaaatacaagtgggtggtggcaaggagagttacaggccagaggaaaaaagcgacagaaaggatggtttcctgccagtcatgttaaacttttgggtccaagtagtgaaagagccacacctgcctttcatcctgtatgtcaggtgattgctatgtatgactatgcagcaaataatgaagatgagctcagtttctccaagggacaactcattaatgttatgaacaaagatgatcctgattggtggcaaggagagatcaacggggtgactggtctctttccttcaaactacgttaagatgacgacagactcagatccaagtcaacagtggtgtgctgatctgcaaaccctggacacaatgcagccaattgagaggaaaagacagggctatattcatgagctgattcagaccgaagagcggtacatggctgaccttcagctcgtcgtcgaggtttttcagaaacgcatggcagagtcaggctttctcactgaaggggagatggccctgatttttgttaactggaaggagctcatcatgtccaacacaaagctgctgaaggctttgcgggtgcggaagaagaccgggggcgagaagatgccggtgcagatgattggggacatcctggccgctgagctgtcccacatgcaggcttacatcaggttctgcagctgccagcttaatggagcagctctgttacagcagaagacagatgaagacacagatttcaaagaatttttaaagaagctggcatctgacccgcggtgtaaaggaatgcccctctccagcttcctgctgaaacccatgcagaggatcacccgctacccactgctcatcagaagtattctggagaacaccccggagagccatgcagaccattcctccctaaagctggccctcgagcgggcagaggagctgtgctctcaagtgaatgagggagttcgggagaaggaaaactcggaccgactggagtggatccaggcgcacgtgcagtgtgaaggcctcgcggagcaacttattttcaactctctcaccaactgcctggggccccggaagctcttacacagtgggaaattatacaagaccaagagcaacaaggaactgcacggattcctcttcaatgacttcctgcttcttacctacatggtcaagcagtttgctgtttcctctggctctgagaaacttttcagctcgaagtccaatgctcaattcaaaatgtataaaacgcccattttcctgaatgaagtcttggtgaaactgcccacagacccttccagcgatgagcctgtcttccacatttcccacattgatcgggtctacaccctccgaacagacaacattaatgagaggaccgcctgggtgcagaagatcaaggcggcgtctgagcagtacatcgacaccgagaagaagcagcgtgagaaagcttaccaagcccgctcccaaaagacttcaggcattgggcgcctgatggtgcatgtcattgaagctacagaattaaaagcctgcaaaccaaatggaaagagcaacccatactgtgaaatcagcatgggctcccagagctacaccaccaggaccatccaggacacactcaatcccaagtggaattttaactgccagttctttattaaggatctctaccaagacgtgctgtgtctcaccctgtttgacagagaccagttttcaccagatgatttcctgggtcgtactgaaattccagtggcaaaaattcgaacagaacaggaaagcaaaggccctatgacccgccgactgctgctgcatgaggtccccaccggggaggtctgggtccgttttgacctgcagctttttgagcaaaaaactctcctgtaggggttctaaaggacagcaccagcgggacagcccacaaggctggggctggagaatgagagactgcgctctcttggggctgagggagcaccatgcagcttcacccctcacaaagccatgcacgctgggggctctgttttcctgcacactaaatagctagcaatctatgcaaacacctttcccataaagaaaccaaaccccatagtacagtgccttgtcctagtgttcacatgttcagctctgtttgtttagatgccaaggtttccattttcagggctataaaaagtattacttggaaatgaggcatcagaccaccagatgttaccgctcggttgaatgtgtccaccgtggagtggtttggtgacgctgtaaccattccacgccagtgacctctgctgggtcacagccactcaggaggggaagggtcaggatgagaggctgcagcctcgacacttggcgcggcctgatactgaaatagcgtctactcgtgcactgaataaaaacagaaacttgatcattttattcctgattagattttatcactctctgctaagacaatatagtctggagtataagtgggaaagcttgatttaaatactgtgaactctaataatgtggaaaatatttttcaactttaattttctgaagtataaattatttatgtaaattcattgtttttgcatatttcttaggacatgcatctttaagctttatcattgcccatatgtacagaaagagaataaagacatatgtttatggatgaaaaaaaaaaaaaaaaa

SEQ ID NO: 1530 - protein, 1681 aa, Homo sapien [sequence omitted]

SEQ ID NO: 1531 - DNA, 2000 bp, Homo sapien
cctgtgaacactatagcgctgagagagacagtctgaaagcagaggaagacatcgatcagtaacaccaagagacaccaaagttgaaagttttgttttctttccctctgttttatttttcccccgtgtgtccctactatggtcagaaagcctgttgtgtccaccatctccaaaggaggttacctgcagggaaatgttaacgggaggctgccttccctgggcaacaaggagccacctgggcaggagaaagtgcagctgaagaggaaagtcactttactgaggggagtctccattatcattggcaccatcattggagcaggaatcttcatctctcctaagggcgtgctccagaacacgggcagcgtgggcatgtctctgaccatctggacggtgtgtggggtcctgtcactatttggagctttgtcttatgctgaattgggaacaactataaagaaatctggaggtcattacacatatattttggaagtctttggtccattaccagcttttgtacgagtctgggtggaactcctcataatacgccctgcagctactgctgtgatatccctggcatttggacgctacattctggaaccattttttattcaatgtgaaatccctgaacttgcgatcaagctcattacagctgtgggcataactgtagtgatggtcctaaatagcatgagtgtcagctggagcgcccggatccagattttcttaaccttttgcaagctcacagcaattctgataattatagtccctggagttatgcagctaattaaaggtcaaacgcagaactttaaagacgccttttcaggaagagattcaagtattacgcggttgccactggctttttattatggaatgtatgcatatgctggctggttttacctcaactttgttactgaagaagtagaaaaccctgaaaaaaccattccccttgcaatatgtatatccatggccattgtcaccattggctatgtgctgacaaatgtggcctactttacgaccattaatgctgaggagctgctgctttcaaatgcagtggcagtgaccttttctgagcggctactgggaaatttctcattagcagttccgatctttgttgccctctcctgctttggctccatgaacggtggtgtgtttgctgtctccaggttattctatgttgcgtctcgagagggtcaccttccagaaatcctctccatgattcatgtccgcaagcacactcctctaccagctgttattgttttgcaccctttgacaatgataatgctcttctctggagacctcgacagtcttttgaatttcctcagttttgccaggtggctttttattgggctggcagttgctgggctgatttatcttcgatacaaatgcccagatatgcatcgtcctttcaaggtgccactgttcatcccagctttgttttccttcacatgcctcttcatggttgccctttccctctattcggacccatttagtacagggattggcttcgtcatcactctgactggagtccctgcgtattatctctttattatatgggacaagaaacccaggtggtttagaataatgtcagggttcctagcactgatgcctgcacaagcatgtgatatgtgaaataaaatggattcttctatagctaaatgagttccctctggggagagttctggtactgcaatcacaatgccagatggtgtttatgggctatttgtgtaagtaagtggtaagatgctatgaagtaagtgtgtttgttttcatcttatggaaactcttgatgcatgtgcttttgtatggaataaattttggtgcaatatgatgtcattcaactttgcattgaattgaattttggttgtatttatatgtattatacctgtcacgcttctagttgcttcaaccattttataaccatttttgtacatattttacttgaaaatattttaaatggaaatttaaataaacatttgatagtttacataataaaaaaaaaaaaaaaaaaa

SEQ ID NO: 1532 - protein, 494 aa, Homo sapien
MVRKPVVSTISKGGYLQGNVNGRLPSLGNKEPPGQEKVQLKRKVTLLRGVSIIIGTIIGAGIFISPKGVLQNTGSVGMSLTIWTVCGVLSLFGALSYAELGTTIKKSGGHYTYILEVFGPLPAFVRVWVELLIIRPAATAVISLAFGRYILEPFFIQCEIPELAIKLITAVGITVVMVLNSMSVSWSARIQIFLTFCKLTAILIIIVPGVMQLIKGQTQNFKDAFSGRDSSITRLPLAFYYGMYAYAGWFYLNFVTEEVENPEKTIPLAICISMAIVTIGYVLTNVAYFTTINAEELLLSNAVAVTFSERLLGNFSLAVPIFVALSCFGSMNGGVFAVSRLFYVASREGHLPEILSMIHVRKHTPLPAVIVLHPLTMIMLFSGDLDSLLNFLSFARWLFIGLAVAGLIYLRYKCPDMHRPFKVPLFIPALFSFTCLFMVALSLYSDPFSTGIGFVITLTGVPAYYLFIIWDKKPRWFRIMSGFLALMPAQACDM

SEQ ID NO: 1533 - DNA, 1939 bp, Homo sapien
ctcgaggccacgaaggcccccggggtcagcagaggggcgctcacgctctcgccacccacctcgctttctcaccccgcgcttcccggcctgggtttttagtcttccttggagcgctctctggcctccgcctccgccagggagcggaaggcggagacagcgagactggccaggggggaggaaagaggacgcgtgtgggcaagggggacaacgggatgtccacgggctcggtgagtgatccggaggagatggagcttcgggggctgcagcgggagtacccggtccccgcctccaagaggccgcccctccgcggcgtagagcgcagctacgcctcgcccagtgacaactcgtcggcagaggaggaggaccccgacggcgaggaggagcgctgcgctctgggcacagccggcagcgcggaaggctgcaagaggaagcggccccgtgtggctgggggcggcggcgcaggtggtagcgcgggcggtggtggcaagaagcccctcccggccaagggctcagccgcagagtgcaagcagtcgcagcggaacgcggccaacgcccgtgagcgtgcccggatgcgcgtgctgagcaaagccttctccaggctcaagaccagcctgccctgggtgccccccgacactaagctctccaagctggacacgctccggctggcttccagttacatcgctcacctgcggcagctgttgcaggaggaccgctatgagaacggctacgtgcacccagtgaacctgacatggccattcgtggtctcgggaagaccggcctctgcaccaaagaagtttccgcagccaacagactatgtggaaccaccgcttaaatcggactggaactcacttgatgggattattcgttaaatgcgagtgtttgggggccacggagagaagggagagctcgtgagatgggaagaagtttccgctggattctccttgacccttccccttgccctggaactgtgatcgtgacaggtggcgggtgtggctgtcactgcacagcgcccacggctacagctgcgccggatctgggcgaccacgttttgcctctccaaaaagagcttcctttcgtgacgagacgcggacgcaggtccaccctcgggccctagctctgtagactaactctcggctgctgccccagcccgcgccagacagcccacggatccgttctcagcggagccagattcatcgcacacgtgcgggacggttccacacagccccggcctttcgcggtgacacaatggttagggaacggttagacgcgctctacatccgctttaaagacagaggtctagacgtgagatccgcgtcgggacagggttttaagtgacaaagaagggcgagtggcttctctgggccgggttcgtactccagcacagcgcccttctaacgggcgggaggaaggccgctgctcgcagggctaggtggagacacacttcccagatcaccgcaggcgggttttacccggagagctctggccgttcggcctccctgccgggtggcttcttcaatcccgtctccttcccaagctcccggctttttctaatcaggcaggcgtctgtcaaccctctccacttctgggctgaagcctccccaagccccgtgcgccaacctgtgtggggtcttcttcgggcctccctctccgccccgctcctgctcctacctgcagcacccccagctccgactccagactctctgcatcaggtctccccactccacgctccgggcgccccaactccaacaccacgtcctgccgcgcaggttcttccccgcgcggaggagcgcgcagggtgggcggcttaccatagcaagtgatcctgcgatagggaacgcgcccttgccccgaggctgcactaccacaggaaataacggccttcgtggcctcgagttttttatgaataataaaacgcgctgtaaaaaccgtggacggaaaa

SEQ ID NO: 1534 - protein, 218 aa, Homo sapien
MSTGSVSDPEEMELRGLQREYPVPASKRPPLRGVERSYASPSDNSSAEEEDPDGEEERCALGTAGSAEGCKRKRPRVAGGGGAGGSAGGGGKKPLPAKGSAAECKQSQRNAANARERARMRVLSKAFSRLKTSLPWVPPDTKLSKLDTLRLASSYIAHLRQLLQEDRYENGYVHPVNLTWPFVVSGRPASAPKKFPQPTDYVEPPLKSDWNSLDGIIR

SEQ ID NO: 1535 - DNA, 1678 bp, Homo sapien
gcatatactgtcatcatcttggaaagaaaaggctgagaacgtaaaactgaggacagaggaggaaagcagggtgacccctgatgttgccctagaaaatggaaaacaaaacacagcaaaacagaaaaacagaagatctgactctgcctttagccaggaaaacagtttgggggagtaaaaagtattagggaaaagagtgggcattttgcctggaaaaaaggtttctagagccatctgggctttccgggaacctggaccagactctggcccagtaggatgtccccgtgtcctccccagcagagcaggaacagggtgatacagctgtccacttcagagctaggagagatggaactgacttggcaggagatcatgtccatcaccgagctgcagggtctgaatgctccaagtgagccatcatttgagccccaagccccagctccataccttggacctccaccacccacaacttactgcccctgctcaatccacccagattctggcttcccacttcctccaccaccttatgagctcccagcatccacatcccatgtcccagatcccccatactcctatggcaacatggccataccagtctccaagccactgagcctctcaggcctgctcagtgagccgctccaagaccccttagccctcctggacattgggctgccagcagggccacctaagccccaagaagacccagaatccgactcaggattatccctcaactatagcgatgctgaatctcttgagctggaggggacagaggctggtcggcggcgcagcgaatatgtagagatgtacccagtggagtacccctactcactcatgcccaactccttggcccactccaactataccttgccagctgctgagacccccttggccttagagccctcctcaggccctgtgcgggctaagcccactgcacggggggaggcagggagtcgggatgaacgtcgggccttggccatgaagattccttttcctacggacaagattgtcaacttgccggtagatgactttaatgagctattggcaaggtacccgctgacagagagccagctagcgctagtccgggacatccgacgacggggcaaaaacaaggtggcagcccagaactgccgcaagaggaagctggaaaccattgtgcagctggagcgggagctggagcggctgaccaatgaacgggagcggcttctcagggcccgcggggaggcagaccggaccctggaggtcatgcgccaacagctgacagagctgtaccgtgacattttccagcaccttcgggatgaatcaggcaacagctactctcctgaagagtacgcgctgcaacaggctgccgatgggaccatcttccttgtgccccgggggaccaagatggaggccacagactgagctggcccagaggggtggaactgctgatgggatttccttcattcccttctgataaaggtactccccaaccctgagtcccagaaggagctgagttctctagaccagaagaggatgacaatggcaacaagtgtttggaagttccaaggtgtgttcaaagaggcttgccttgagggagggctggaatctgtcttccctgactcggctcctcaggtctttagcctccaccttgtctaagctttggtctataaagtgcgctacagaaaaaaaaaaaaaaaaaaaaaaa

SEQ ID NO: 1536 - protein, 373 aa, Homo sapien
MSPCPPQQSRNRVIQLSTSELGEMELTWQEIMSITELQGLNAPSEPSFEPQAPAPYLGPPPPTTYCPCSIHPDSGFPLPPPPYELPASTSHVPDPPYSYGNMAIPVSKPLSLSGLLSEPLQDPLALLDIGLPAGPPKPQEDPESDSGLSLNYSDAESLELEGTEAGRRRSEYVEMYPVEYPYSLMPNSLAHSNYTLPAAETPLALEPSSGPVRAKPTARGEAGSRDERRALAMKIPFPTDKIVNLPVDDFNELLARYPLTESQLALVRDIRRRGKNKVAAQNCRKRKLETIVQLERELERLTNERERLLRARGEADRTLEVMRQQLTELYRDIFQHLRDESGNSYSPEEYALQQAADGTIFLVPRGTKMEATD

SEQ ID NO: 1537 - DNA, 3458 bp, Homo sapien
cttcctccctcccgctcgcttcttctcacgccgggagcaggctcgcgcctcgcaccgctgccccgcgagcagctcctcttctcccgaggcgcgcggggcgcccccgcgagccccgcggctgagaccccgcagcctggaggagggctgtccggggctttgggttgcacgttttcaaaaaatacctaatggtgaaaatgagacaatgattcctgtattgacatcaaaaaaagcaagtgaattaccagtcagtgaagttgcaagcattctccaagctgatcttcagaatggtctaaacaaatgtgaagttagtcataggcgagcctttcatggctggaatgagtttgatattagtgaagatgagccactgtggaagaagtatatttctcagtttaaaaatccccttattatgctgcttctggcttctgcagtcatcagtgttttaatgcatcagtttgatgatgccgtcagtatcactgtggcaatactattcgttgttacagttgcctttgttcaggaatatcgttcagaaaaatctcttgaagaattgagtaaacttgtgccaccagaatgccattgtgtgcgtgaaggaaaattggagcatacacttgcccgagacttggttccaggtgatacagtttgcctttctgttggggatagagttcctgctgacttacgcttgtttgaggctgtggatctttccattgatgagtccagcttgacaggtgagacaacgccttgttctaaggtgacagctcctcagccagctgcaactaatggagatcttgcatcgagaagtaacattgcctttatgggaacactggtcagatgtggcaaagcaaagggtgttgtcattggaacaggagaaaattctgaatttggggaggtttttaaaatgatgcaagcagaagaggcaccaaaaacccctctgcagaagagcatggacctcttaggaaaacaactttccttttactcctttggtataataggaatcatcatgttggttggctggttactgggaaaagatatcctggaaatgtttactattagtgtaagtttggctgtagcagcaattcctgaaggtctccccattgtggtcacagtgacgctagctcttggtgttatgagaatggtgaagaaaagggccattgtgaaaaagctgcctattgttgaaactctgggctgctgtaatgtgatttgttcagataaaactggaacactgacgaagaatgaaatgactgttactcacatatttacttcagatggtctgcatgctgaggttactggagttggctataatcaatttggggaagtgattgttgatggtgatgttgttcatggattctataacccagctgttagcagaattgttgaggcgggctgtgtgtgcaatgatgctgtaattagaaacaatactctaatggggaagccaacagaaggggccttaattgctcttgcaatgaagatgggtcttgatggacttcaacaagactacatcagaaaagctgaatacccttttagctctgagcaaaagtggatggctgttaagtgtgtacaccgaacacagcaggacagaccagagatttgttttatgaaaggtgcttacgaacaagtaattaagtactgtactacataccagagcaaagggcagaccttgacacttactcagcagcagagagatgtgtaccaacaagagaaggcacgcatgggctcagcgggactcagagttcttgctttggcttctggtcctgaactgggacagctgacatttcttggcttggtgggaatcattgatccacctagaactggtgtgaaagaagctgttacaacactcattgcctcaggagtatcaataaaaatgattactggagattcacaggagactgcagttgcaatcgccagtcgtctgggattgtattccaaaacttcccagtcagtctcaggagaagaaatagatgcaatggatgttcagcagctttcacaaatagtaccaaaggttgcagtattttacagagctagcccaaggcacaagatgaaaattattaagtcgctacagaagaacggttcagttgtagccatgacaggagatggagtaaatgatgcagttgctctgaaggctgcagacattggagttgcgatgggccagactggtacagatgtttgcaaagaggcagcagacatgatcctagtggatgatgattttcaaaccataatgtctgcaatcgaagagggtaaagggatttataataacattaaaaatttcgttagattccagctgagcacgagtatagcagcattaactttaatctcattggctacattaatgaactttcctaatcctctcaatgccatgcagattttgtggatcaatattattatggatggacccccagctcagagccttggagtagaaccagtggataaagatgtcattcgtaaacctcctcgcaactggaaagacagcattttgactaaaaacttgatacttaaaatacttgtttcatcaataatcattgtttgtgggactttgtttgtcttctggcgtgagctacgagacaatgtgattacacctcgagacacaacaatgaccttcacatgctttgtgttttttgacatgttcaatgcactaagttccagatcccagaccaagtctgtgtttgagattggactctgcagtaatagaatgttttgctatgcagttcttggatccatcatgggacaattactagttatttactttcctccgcttcagaaggtttttcagactgagagcctaagcatactggatctgttgtttcttttgggtctcacctcatcagtgtgcatagtggcagaaattataaagaaggttgaaaggagcagggaaaagatccagaagcatgtctggctctgggagaggagtggacagcagctggttgagatacatccccatctggagacaggactgccactgacagaagatgtgagctgtgtctaagtccagtcttgtgcccagccgtgtctgcgccttcactctttggaactctgcatacaacatcttagcaccatcttcctgcagctcttccttacctaaataaagaaacagcccaagggcagtatttctaaaagcactgtaacagcttttcattttctccacatatactacaaattctataaagaaagaaattaatttaaaaaaactaagatgtttttctcttctggcttcataaatgccttgctgtataaattgaaatattgatactgaactgtctttttaatgatgacctaactttattcaacccatcggaatttactttttccctgaaataagatcttttccactggtctactacctgaccataaacatgtctgcatttgaattctctaaaccctaaatctgtgtctatgaaaaatacaaatgactattaaatattattctctttactgttctctttcaccgaaaaaaaaaaaaaaaaaaaaaa

SEQ ID NO: 1538 - protein, 923 aa, Homo sapien [sequence omitted]

SEQ ID NO: 1539 - DNA, 1373 bp, Homo sapien
gggaggagagaaaagccatggccgacaaggtcctgaaggagaagagaaagctgtttatccgttccatgggtgaaggtacaataaatggcttactggatgaattattacagacaagggtgctgaacaaggaagagatggagaaagtaaaacgtgaaaatgctacagttatggataagacccgagctttgattgactccgttattccgaaaggggcacaggcatgccaaatttgcatcacatacatttgtgaagaagacagttacctggcagggacgctgggactctcagcagatcaaacatctggaaattaccttaatatgcaagactctcaaggagtactttcttcctttccagctcctcaggcagtgcaggacaacccagctatgcccacatcctcaggctcagaagggaatgtcaagctttgctccctagaagaagctcaaaggatatggaaacaaaagtcggcagagatttatccaataatggacaagtcaagccgcacacgtcttgctctcattatctgcaatgaagaatttgacagtattcctagaagaactggagctgaggttgacatcacaggcatgacaatgctgctacaaaatctggggtacagcgtagatgtgaaaaaaaatctcactgcttcggacatgactacagagctggaggcatttgcacaccgcccagagcacaagacctctgacagcacgttcctggtgttcatgtctcatggtattcgggaaggcatttgtgggaagaaacactctgagcaagtcccagatatactacaactcaatgcaatctttaacatgttgaataccaagaactgcccaagtttgaaggacaaaccgaaggtgatcatcatccaggcctgccgtggtgacagccctggtgtggtgtggtttaaagattcagtaggagtttctggaaacctatctttaccaactacagaagagtttgaggatgatgctattaagaaagcccacatagagaaggattttatcgctttctgctcttccacaccagataatgtttcttggagacatcccacaatgggctctgtttttattggaagactcattgaacatatgcaagaatatgcctgttcctgtgatgtggaggaaattttccgcaaggttcgattttcatttgagcagccagatggtagagcgcagatgcccaccactgaaagagtgactttgacaagatgtttctacctcttcccaggacattaaaataaggaaactgtatgaatgtctgtgggcaggaagtgaagagatcgttctgtaaaaggtttttggaattatgtctgctgaataataaactttttttgaaataataaatctggtagaaaaatgaaaaaaaaaaaaaaaaaa

SEQ ID NO: 1540 - protein, 404 aa, Homo sapien
MADKVLKEKRKLFIRSMGEGTINGLLDELLQTRVLNKEEMEKVKRENATVMDKTRALIDSVIPKGAQACQICITYICEEDSYLAGTLGLSADQTSGNYLNMQDSQGVLSSFPAPQAVQDNPAMPTSSGSEGNVKLCSLEEAQRIWKQKSAEIYPIMDKSSRTRLALIICNEEFDSIPRRTGAEVDITGMTMLLQNLGYSVDVKKNLTASDMTTELEAFAHRPEHKTSDSTFLVFMSHGIREGICGKKHSEQVPDILQLNAIFNMLNTKNCPSLKDKPKVIIIQACRGDSPGVVWFKDSVGVSGNLSLPTTEEFEDDAIKKAHIEKDFIAFCSSTPDNVSWRHPTMGSVFIGRLIEHMQEYACSCDVEEIFRKVRFSFEQPDGRAQMPTTERVTLTRCFYLFPGH

SEQ ID NO: 1541 - DNA, 2618 bp, Homo sapien
gcggggctggcacccgggccgaggctctgattctggggggaggccgactccaccctggctggaggaactgggtgctcctgcccgctggcccctcgcgcgtgaggatctatctcaggctaagaaatggcatttcaaaaggcagtgaaagggacgattcttgttggaggaggtgctcttgcaactgttttaggactttctcagtttgctcattacagaaggaaacaaatgaacctggcctatgttaaagcagcagactgcatttcagaaccagttaacagggagcctccttccagagaagctcagctactgactttgcaaaacacatctgaatttgatatccttgttattggaggaggagcaacaggaagtggctgtgcgctagatgctgtcaccagaggactaaaaacagcccttgtagaaagagatgatttctcatcagggaccagcagcagaagcactaaattgatccatggtggtgtgagatatctgcagaaggccatcatgaagttggatattgagcagtataggatggtaaaagaagcccttcatgagcgtgccaacctgctagaaattgctccccatttatcagctccattgcctataatgcttccagtttacaagtggtggcagttaccttactactgggtaggaatcaagctgtatgatttggttgcaggaagcaattgcctaaaaagcagttatgtcctcagcaaatcaagagcccttgaacatttcccaatgctccagaaggacaaactggtaggagcaattgtctactatgacggacaacataacgatgcacggatgaaccttgccattgctctgactgctgccaggtatggggctgccacagccaattacatggaggtagtgagcttgctcaagaagacagacccccagacagggaaagtgcatgtgagcggcgcacggtgcaaggatgtcctcacagggcaggaatttgacgtgagagccaaatgtgttatcaatgccacgggacctttcacggactctgtgcgcaaaatggatgataaagacgcagcagctatctgccagccaagtgctggtgtccatattgtgatgcctggttattacagcccagagagcatgggacttcttgacccagcgaccagtgatgggcgagttattttcttcttaccctggcaaaagatgacgatcgctggcactactgatactccaactgatgttacacaccatccaattccttcagaagaagatatcaacttcattttgaatgaagtgcgtaattacctgagttgtgatgttgaagtgagaagaggggatgtcctggcagcatggagtggaatccgtcctcttgttacagaccccaaatctgcagatactcagtctatctcccgaaatcatgttgttgatatcagtgagagtggccttattactatagcaggtggaaagtggacaacttatcggtctatggcagaagataccataaatgctgctgtcaaaactcataatttaaaagcaggaccaagtagaacagttgggcttttccttcaagggggtaaagattggagccccacactctacattaggcttgtgcaggattatggacttgaaagcgaggtggcacagcatcttgccgccacctatggtgataaggcctttgaggtggccaaaatggcaagtgtgactggcaaaaggtggcctattgttggagtacatcttgtgtcagaatttccatatattgaagcagaggtgaaatatgggattaaggagtatgcctgcactgctgtggatatgatttcacgtcgtactcgcctggcctttctaaatgtccaggcagcagaggaagccctacccaggattgttgaactgatgggcagggaactgaattgggatgattataagaagcaggaacaacttgaaacagccaggaagtttctatattatgaaatgggctataaatctcgatcagaacagttaacagatcgctctgaaattagcctactgccttcagacattgacaggtataagaagagatttcataagtttgatgcagaccagaaaggctttattaccattgttgatgttcagcgtgtattagagagtatcaatgtccaaatggatgaaaatacactccatgaaattctaaatgaagttgatttgaataaaaatggacaggttgaactcaatgaatttttgcagctgatgagtgctattcaaaaaggaagggtatctggaagccggcttgctatactaatgaaaactgcagaagagaacctcgacagaagagttccaattccagtggaccgtagttgtggaggattgtgagtctgggcagtaaatccacagccaacaaacatagaaacgacaaatcaccatgtaacaaccagagatgactgaaaccactctgaaataatgaatgtggatagctgccttttttaacactagaaaacattccaaaactttaaggtgttggtgtatttgccagctttatttgctgtactttatttgtatttgccattcagtctagcttttaagtatatttttttctttttctcattttcaatgcacattagttttgcatctgttttgtgacctgttagatgtgacacattctctttttgtttattcccttattc

SEQ ID NO: 1542 - protein, 727 aa, Homo sapien
MAFQKAVKGTILVGGGALATVLGLSQFAHYRRKQMNLAYVKAADCISEPVNREPPSREAQLLTLQNTSEFDILVIGGGATGSGCALDAVTRGLKTALVERDDFSSGTSSRSTKLIHGGVRYLQKAIMKLDIEQYRMVKEALHERANLLEIAPHLSAPLPIMLPVYKWWQLPYYWVGIKLYDLVAGSNCLKSSYVLSKSRALEHFPMLQKDKLVGAIVYYDGQHNDARMNLAIALTAARYGAATANYMEVVSLLKKTDPQTGKVHVSGARCKDVLTGQEFDVRAKCVINATGPFTDSVRKMDDKDAAAICQPSAGVHIVMPGYYSPESMGLLDPATSDGRVIFFLPWQKMTIAGTTDTPTDVTHHPIPSEEDINFILNEVRNYLSCDVEVRRGDVLAAWSGIRPLVTDPKSADTQSISRNHVVDISESGLITIAGGKWTTYRSMAEDTINAAVKTHNLKAGPSRTVGLFLQGGKDWSPTLYIRLVQDYGLESEVAQHLAATYGDKAFEVAKMASVTGKRWPIVGVHLVSEFPYIEAEVKYGIKEYACTAVDMISRRTRLAFLNVQAAEEALPRIVELMGRELNWDDYKKQEQLETARKFLYYEMGYKSRSEQLTDRSEISLLPSDIDRYKKRFHKFDADQKGFITIVDVQRVLESINVQMDENTLHEILNEVDLNKNGQVELNEFLQLMSAIQKGRVSGSRLAILMKTAEENLDRRVPIPVDRSCGGL

SEQ ID NO: 1543 - DNA, 1541 bp, Homo sapien
aaatggtgaaagggggggaggggagaaaagaaaaaaaaaaaaagaaaggggaaaggggggaaaaataagaaaaagcgagacagaggcgctgccgcgtccgctcgcggggaaggctggggtcggccgggtgctaggccggggccgaggccgaggccggggcgggatccagagcgggagccggcgcgggatctgggactcggagcgggatccggagcgggacccaggagccggcgcggggccatggcgaggcgcgggccagggtggcggccgcttctgctgctcgtgctgctggcgggcgcggcgcagggcggcctctacttccgccggggacagacctgctaccggcctctgcggggggacgggctggctccgctggggcgcacgacatacccccggcctcatgagtacctgtccccagcggatctgcccaagagctgggactggcgcaatgtggatggtgtcaactatgccagcatcacccggaaccagcacatcccccaatactgcggctcctgctgggcccacgccagcaccagcgctatggcggatcggatcaacatcaagaggaagggagcgtggccctccaccctcctgtccgtgcagaacgtcatcgactgcggtaacgctggctcctgtgaagggggtaatgacctgtccgtgtgggactacgcccaccagcacggcatccctgacgagacctgcaacaactaccaggccaaggaccaggagtgtgacaagtttaaccaatgtgggacatgcaatgaattcaaagagtgccacgccatccggaactacaccctctggagggtgggagactacggctccctctctgggagggagaagatgatggcagaaatctacgcaaatggtcccatcagctgtggaataatggcaacagaaagactggctaactacaccggaggcatctatgccgaataccaggacaccacatatataaaccatgtcgtttccgtggctgggtggggcatcagtgatgggactgagtactggattgtccggaattcatggggtgaaccatggggcgagagaggctggctgaggatcgtgaccagcacctataaggatgggaagggcgccagatacaaccttgccatcgaggagcactgtacatttggggaccccatcgtttaaggccatgtcactagaagcgcagtttaagaaaaggcatggtgacccatgaccagaggggatcctatggttatgtgtgccaggctggctggcaggaactggggtggctatcaatattggatggcgaggacagcgtggtactggctgcgagtgttcctgagagttgaaagtgggatgacttatgacacttgcacagcatgctctgcctcacaatgatgcagtcagccacctggtgaagaagtgacctgcaacacaggaaacgatgggacctcagtcttcttcagcagaggacttgatattttgtatttggcaactgtgggcaataatatggcatttaagaggtgaaagagttcagacttatcaccattcttatgtcactttagaatcaaggg

SEQ ID NO: 1544 - protein, 303 aa, Homo sapien
MARRGPGWRPLLLLVLLAGAAQGGLYFRRGQTCYRPLRGDGLAPLGRTTYPRPHEYLSPADLPKSWDWRNVDGVNYASITRNQHIPQYCGSCWAHASTSAMADRINIKRKGAWPSTLLSVQNVIDCGNAGSCEGGNDLSVWDYAHQHGIPDETCNNYQAKDQECDKFNQCGTCNEFKECHAIRNYTLWRVGDYGSLSGREKMMAEIYANGPISCGIMATERLANYTGGIYAEYQDTTYINHVVSVAGWGISDGTEYWIVRNSWGEPWGERGWLRIVTSTYKDGKGARYNLAIEEHCTFGDPIV

SEQ ID NO: 1545 - DNA, 1794 bp, Homo sapien
cgccgagatcgggtgcccgggatgagcctcatccggaaaaagggcttctacaagcaggacgtcaacaagaccgcctgggagctgcccaagacctacgtgtccccgacgcacgtcggcagcggggcctatggctccgtgtgctcggccatcgacaagcggtcaggggagaaggtggccatcaagaagctgagccgaccctttcagtccgagatcttcgccaagcgcgcctaccgggagctgctgctgctgaagcacatgcagcatgagaacgtcattgggctcctggatgtcttcaccccagcctcctccctgcgcaacttctatgacttctacctggtgatgcccttcatgcagacggatctgcagaagatcatggggatggagttcagtgaggagaagatccagtacctggtgtatcagatgctcaaaggccttaagtacatccactctgctggggtcgtgcacagggacctgaagccaggcaacctggctgtgaatgaggactgtgaactgaagattctggattttgggctggcgcgacatgcagacgccgagatgactggctacgtggtgacccgctggtaccgagcccccgaggtgatcctcagctggatgcactacaaccagacagtggatatctggtctgtgggctgtatcatggcagagatgctgacagggaaaactctgttcagggggaaagattacctggaccagctgacccagatcctgaaagtgaccggggtgcctggcacggagtttgtgcagaagctgaacgacaaagcggccaaatcctacatccagtccctgccacagacccccaggaaggatttcactcagctgttcccacgggccagcccccaggctgcggacctgctggagaagatgctggagctagacgtggacaagcgcctgacggccgcgcaggccctcacccatcccttctttgaacccttccgggaccctgaggaagagacggaggcccagcagccgtttgatgattccttagaacacgagaaactcacagtggatgaatggaagcagcacatctacaaggagattgtgaacttcagccccattgcccggaaggactcacggcgccggagtggcatgaagctgtagggactcatcttgcatggcaccgccggccagacactgcccaaggaccagtatttgtcactaccaaactcagcccttcttggaatacagcctttcaagcagaggacagaagggtccttctccttatgtgggaaatgggcctagtagatgcagaattcaaagatgtcggttgggagaaactagctctgatcctaacaggccacgttaaactgcccatctggagaatcgcctgcaggtggggccctttccttcccgccagagtggggctgagtgggcgctgagccaggccgggggcctatggcagtgatgctgtgttggtttcctagggatgctctaacgaattaccacaaacctggtggattgaaacagcagaacttgattcccttacagttctggaggctggaaatctgggatggaggtgttggcagggctgtggtccctttgaaggctctggggaagaatccttccttggctctttttagcttgtggcggcagtgggcagtccgtggcattccccagcttattgctgcatcactccagtctctgtctcttctgttctctcctcttttaacaacagtcattggatttagggcccaccctaatcctgtgtgatcttatcttgatccttattaattaaacctgcaaatactctagttccaaataaaaaaaaaaaaaaaa

SEQ ID NO: 1546 - protein, 365 aa, Homo sapien [sequence omitted]

SEQ ID NO: 1547 - DNA, 1805 bp, Homo sapien
ggcacgaggctgggaccggagtggggagcgcggcgtggaggtgccacccggcgcgggtggcggagagatcagaagcctcttccccaagccgagccaacctcagcggggacccgggctcagggacgcggcggcggcggcggcgactgcagtggctggacgatggcagcgtccgccggagccggggcggtgattgcagccccagacagccggcgctggctgtggtcggtgctggcggcggcgcttgggctcttgacagctggagtatcagccttggaagtatatacgccaaaagaaatcttcgtggcaaatggtacacaagggaagctgacctgcaagttcaagtctactagtacgactggcgggttgacctcagtctcctggagcttccagccagagggggccgacactactgtgtcgtttttccactactcccaagggcaagtgtaccttgggaattatccaccatttaaagacagaatcagctgggctggagaccttgacaagaaagatgcatcaatcaacatagaaaatatgcagtttatacacaatggcacctatatctgtgatgtcaaaaaccctcctgacatcgttgtccagcctggacacattaggctctatgtcgtagaaaaagagaatttgcctgtgtttccagtttgggtagtggtgggcatagttactgctgtggtcctaggtctcactctgctcatcagcatgattctggctgtcctctatagaaggaaaaactctaaacgggattacactggctgcagtacatcagagagtttgtcaccagttaagcaggctcctcggaagtccccctccgacactgagggtcttgtaaagagtctgccttctggatctcaccagggcccagtcatatatgcacagttagaccactccggcggacatcacagtgacaagattaacaagtcagagtctgtggtgtatgcggatatccgaaagaattaagagaatacctagaacatatcctcagcaagaaacaaaaccaaactggactctcgtgcagaaaatgtagcccattaccacatttagccttggagacccaggcaaggacaagtacacgtgtactcacagagggagagaaagatgtgtacaaaggatatgtataaatattctatttagtcatcctgatatgaggagccagtgttgcatgatgaaaagatggtatgattctacatatgtacccattgtcttgctgtttttgtactttcttttcaggtcatttacaattgggagatttcagaaacattcctttcaccatcatttagaaatggtttgccttaatggagacaatagcagatcctgtagtatttccagtagacatggccttttaatctaagggcttaagactgattagtcttagcatttactgtagttggaggatggagatgctatgatggaagcatacccagggtggcctttagcacagtatcagtaccatttatttgtctgccgcttttaaaaaatacccattggctatgccacttgaaaacaatttgagaagtttttttgaagtttttctcactaaaatatggggcaattgttagccttacatgttgtgtagacttactttaagtttgcacccttgaaatgtgtcatatcaatttctggattcataatagcaagattagcaaaggataaatgccgaaggtcacttcattctggacacagttggatcaatactgattaagtagaaaatccaagctttgcttgagaacttttgtaacgtggagagtaaaaagtatcggttttaaaaaaaaaaaaaaaaaaaaaaaaaaaaaaaa

SEQ ID NO: 1548 - protein, 269 aa, Homo sapien
MAASAGAGAVIAAPDSRRWLWSVLAAALGLLTAGVSALEVYTPKEIFVANGTQGKLTCKFKSTSTTGGLTSVSWSFQPEGADTTVSFFHYSQGQVYLGNYPPFKDRISWAGDLDKKDASINIENMQFIHNGTYICDVKNPPDIVVQPGHIRLYVVEKENLPVFPVWVVVGIVTAVVLGLTLLISMILAVLYRRKNSKRDYTGCSTSESLSPVKQAPRKSPSDTEGLVKSLPSGSHQGPVIYAQLDHSGGHHSDKINKSESVVYADIRKN

SEQ ID NO: 1549 - DNA, 1851 bp, Homo sapien
tgcagctgttttcactccgctgtgactcagagcgctccgggctgcaggagaggaagaaatcttgcatcaccatggtgcacttctgtggcctactcaccctccaccgggagccagtgccgctgaagagtatctctgtgagcgtgaacatttacgagtttgtggctggtgtgtctgcaactttgaactacgagaatgaggagaaagttcctttggaggccttctttgtgttccccatggatgaagactctgctgtttacagctttgaggccttggtggatgggaagaaaattgtagcagaattacaagacaagatgaaggcccgcaccaactatgagaaagccatctcccagggccaccaggccttcttattggagggggacagcagctccagggatgtcttctcttgcaatgtgggtaacctccaacctgggtcgaaggcggcagtcaccctgaagtatgtgcaggagctgcctctggaagcagatggggctctgcgctttgtgctcccagctgtcctgaatcctagataccagttctctgggtcgtctaaggacagttgccttaatgtgaagactcctatagtccctgtggaggacctgccctacacactcagcatggtcgccaccatagattcccagcatggcattgagaaggtccaatccaactgccccttgagtcctaccgagtacctaggagaggacaagacttctgctcaggtttccctggctgctggacacaagtttgatcgggacgtggaactcctgatttactacaatgaggtgcatacccccagcgtggttttggagatggggatgcctaacatgaagccaggtcatttgatgggagatccatctgcaatggtgagtttctatccaaatatcccagaagatcaaccatcaaatacctgtggagagtttatctttctcatggaccgctcgggaagtatgcagagccccatgagtagccaggatacatctcagctgcgaatacaggcagccaaggaaacactgattttgctgctgaagagtttacctataggctgttatttcaacatctatggatttggctcttcctatgaggcatgctttccggagagtgtgaagtacactcagcaaacaatggaggaggctctggggagagtgaagcttatgcaggccgacctagggggcactgaaatcttggcaccactccagaacatttacaggggaccctccatcccaggccaccccctacagctttttgtctttacagatggagaagttacagacacgtttagtgtaattaaagaagttaggatcaacagacagaaacacaggtaggaagaaaatgtgatttccgggtgattggtgctgagtagtgacacacagactctagtgctacatgatgccggtgttgaccttccttcaagaggaccaaatgatttcagaatttagttttagcagctgaaaatttatttctccctgtaaacgttaaaaacagttttccaaataacatcaacaacacagcaaaaccattgtttcttattctttctaaactacaacgaacacaagaattgaatagtaagatgttaattttttttactataaacatttttagagaagtaaaacatgctgaaaactacacaaattataagcatacaactggactcattatcacagtgaatgcactgtgtgatcgccacataggtaaaaactggaatggtcgtaggcctctccatctgtacccttttccatcatgtcctattccctgtcactacacactaaaactttcctgacttacaataccatgggttatttatgcttgtttttgaatgaaaataaataagttatacagtaaaaaaaaaaaaaaaaa

SEQ ID NO: 1550 - protein, 415 aa, Homo sapien
MVHFCGLLTLHREPVPLKSISVSVNIYEFVAGVSATLNYENEEKVPLEAFFVFPMDEDSAVYSFEALVDGKKIVAELQDKMKARTNYEKAISQGHQAFLLEGDSSSRDVFSCNVGNLQPGSKAAVTLKYVQELPLEADGALRFVLPAVLNPRYQFSGSSKDSCLNVKTPIVPVEDLPYTLSMVATIDSQHGIEKVQSNCPLSPTEYLGEDKTSAQVSLAAGHKFDRDVELLIYYNEVHTPSVVLEMGMPNMKPGHLMGDPSAMVSFYPNIPEDQPSNTCGEFIFLMDRSGSMQSPMSSQDTSQLRIQAAKETLILLLKSLPIGCYFNIYGFGSSYEACFPESVKYTQQTMEEALGRVKLMQADLGGTEILAPLQNIYRGPSIPGHPLQLFVFTDGEVTDTFSVIKEVRINRQKHR

SEQ ID NO: 1551 - DNA, 5068 bp, Homo sapien
atggctggcggagcctggggccgcctggcctgttacttggagttcctgaagaaggaggagctgaaggagttccagcttctgctcgccaataaagcgcactccaggagctcttcgggtgagacacccgctcagccagagaagacgagtggcatggaggtggcctcgtacctggtggctcagtatggggagcagcgggcctgggacctagccctccatacctgggagcagatggggctgaggtcactgtgcgcccaagcccaggaaggggcaggccactctccctcattcccctacagcccaagtgaaccccacctggggtctcccagccaacccacctccaccgcagtgctaatgccctggatccatgaattgccggcggggtgcacccagggctcagagagaagggttttgagacagctgcctgacacatctggacgccgctggagagaaatctctgcctcactcctctaccaagctcttccaagctccccagaccatgagtctccaagccaggagtcacccaacgcccccacatccacagcagtgctggggagctggggatccccacctcagcccagcctagcacccagagagcaggaggctcctgggacccaatggcctctggatgaaacgtcaggaatttactacacagaaatcagagaaagagagagagagaaatcagagaaaggcaggcccccatgggcagcggtggtaggaacgcccccacaggcgcacaccagcctacagccccaccaccacccatgggagccttctgtgagagagagcctctgttccacatggccctggaaaaatgaggattttaaccaaaaattcacacagctgctacttctacaaagacctcaccccagaagccaagatcccctggtcaagagaagctggcctgattatgtggaggagaatcgaggacatttaattgagatcagagacttatttggcccaggcctggatacccaagaacctcgcatagtcatactgcagggggctgctggaattgggaagtcaacactggccaggcaggtgaaggaagcctgggggagaggccagctgtatggggaccgcttccagcatgtcttctacttcagctgcagagagctggcccagtccaaggtggtgagtctcgctgagctcatcggaaaagatgggacagccactccggctcccattagacagatcctgtctaggccagagcggctgctcttcatcctcgatggtgtagatgagccaggatgggtcttgcaggagccgagttctgagctctgtctgcactggagccagccacagccggcggatgcactgctgggcagtttgctggggaaaactatacttcccgaggcatccttcctgatcacggctcggaccacagctctgcagaacctcattccttctttggagcaggcacgttgggtagaggtcctggggttctctgagtccagcaggaaggaatatttctacagatatttcacagatgaaaggcaagcaattagagcctttaggttggtcaaatcaaacaaagagctctgggccctgtgtcttgtgccctgggtgtcctggctggcctgcacttgcctgatgcagcagatgaagcggaaggaaaaactcacactgacttccaagaccaccacaaccctctgtctacattaccttgcccaggctctccaagctcagccattgggaccccagctcagagacctctgctctctggctgctgagggcatctggcaaaaaaagacccttttcagtccagatgacctcaggaagcatgggttagatggggccatcatctccaccttcttgaagatgggtattcttcaagagcaccccatccctctgagctacagcttcattcacctctgtttccaagagttctttgcagcaatgtcctatgtcttggaggatgagaaggggagaggtaaacattctaattgcatcatagatttggaaaagacgctagaagcatatggaatacatggcctgtttggggcatcaaccacacgtttcctattgggcctgttaagtgatgagggggagagagagatggagaacatctttcactgccggctgtctcaggggaggaacctgatgcagtgggtcccgtccctgcagctgctgctgcagccacactctctggagtccctccactgcttgtacgagactcggaacaaaacgttcctgacacaagtgatggcccatttcgaagaaatgggcatgtgtgtagaaacagacatggagctcttagtgtgcactttctgcattaaattcagccgccacgtgaagaagcttcagctgattgagggcaggcagcacagatcaacatggagccccaccatggtagtcctgttcaggtgggtcccagtcacagatgcctattggcagattctcttctccgtcctcaaggtcaccagaaacctgaaggagctggacctaagtggaaactcgctgagccactctgcagtgaagagtctttgtaagaccctgagacgccctcgctgcctcctggagaccctgcggttggctggctgtggcctcacagctgaggactgcaaggaccttgcctttgggctgagagccaaccagaccctgaccgagctggacctgagcttcaatgtgctcacggatgctggagccaaacacctttgccagagactgagacagccgagctgcaagctacagcgactgcagctggtcagctgtggcctcacgtctgactgctgccaggacctggcctctgtgcttagtgccagccccagcctgaaggagctagacctgcagcagaacaacctggatgacgttggcgtgcgactgctctgtgaggggctcaggcatcctgcctgcaaactcatacgcctggggctggaccagacaactctgagtgatgagatgaggcaggaactgagggccctggagcaggagaaacctcagctgctcatcttcagcagacggaaaccaagtgtgatgacccctactgagggcctggatacgggagagatgagtaatagcacatcctcactcaagcggcagagactcggatcagagagggcggcttcccatgttgctcaggctaatctcaaactcctggacgtgagcaagatcttcccaattgctgagattgcagaggaaagctccccagaggtagtaccggtggaactcttgtgcgtgccttctcctgcctctcaaggggacctgcatacgaagcctttggggactgacgatgacttctggggccccacggggcctgtggctactgaggtagttgacaaagaaaagaacttgtaccgagttcacttccctgtagctggctcctaccgctggcccaacacgggtctctgctttgtgatgagagaagcggtgaccgttgagattgaattctgtgtgtgggaccagttcctgggtgagatcaacccacagcacagctggatggtggcagggcctctgctggacatcaaggctgagcctggagctgtggaagctgtgcacctccctcactttgtggctctccaagggggccatgtggacacatccctgttccaaatggcccactttaaagaggaggggatgctcctggagaagccagccagggtggagctgcatcacatagttctggaaaaccccagcttctcccccttgggagtcctcctgaaaatgatccataatgccctgcgcttcattcccgtcacctctgtggtgttgctttaccaccgcgtccatcctgaggaagtcaccttccacctctacctgatcccaagtgactgctccattcggaaggccatagatgatctagaaatgaaattccagtttgtgcgaatccacaagccacccccgctgaccccactttatatgggctgtcgttacactgtgtctgggtctggttcagggatgctggaaatactccccaaggaactggagctctgctatcgaagccctggagaagaccagctgttctcggagttctacgttggccacttgggatcagggatcaggctgcaagtgaaagacaagaaagatgagactctggtgtgggaggccttggtgaaaccaggagatctcatgcctgcaactactctgatccctccagcccgcatagccgtaccttcacctctggatgccccgcagttgctgcactttgtggaccagtatcgagagcagctgatagcccgagtgacatcggtggaggttgtcttggacaaactgcatggacaggtgctgagccaggagcagtacgagagggtgctggctgagaacacgaggcccagccagatgcggaagctgttcagcttgagccagtcctgggaccggaagtgcaaagatggactctaccaagccctgaaggagacccatcctcacctcattatggaactctgggagaagggcagcaaaaagggactcctgccactcagcagctgaagtatcaacaccagcccttgacccttgagtcctggctttggctgacccttctttgggtctcagtttctttctctgcaaacaagttgccatctggtttgccttccagcactaaagtaatggaactttgatgatgcctttgctgggcattatgtgtccatgccagggatgccacagggggccccagtccaggtggcctaacagcatctcagggaatgtccatctggagctggcaagacccctgcagacctcatagagcctcatctggtggccacagcagccaagcctagagccctccggatcccatccaggcgcaaagaggaataggagggacatggaaccatttgcctctggctgtgtcacagggtgagccccaaaattggggttcagcgtgggaggccacgtggattcttggctttgtacaggaagatctacaagagcaagccaacagagtaaagtggaaggaagtttattcagaaaataaaggagtatcacagctcttttagaatttgtctagcaggctttccagtttttaccagaaaacccctataaattaaaaattttttacttaaatttaagaattaaaaaaatacaaaaaagaaaaaatgaaaataaaggaataagaagttacctactccaaaaaaaaaaa

SEQ ID NO: 1552 - protein, 1473 aa, Homo sapien
MAGGAWGRLACYLEFLKKEELKEFQLLLANKAHSRSSSGETPAQPEKTSGMEVASYLVAQYGEQRAWDLALHTWEQMGLRSLCAQAQEGAGHSPSFPYSPSEPHLGSPSQPTSTAVLMPWIHELPAGCTQGSERRVLRQLPDTSGRRWREISASLLYQALPSSPDHESPSQESPNAPTSTAVLGSWGSPPQPSLAPREQEAPGTQWPLDETSGIYYTEIREREREKSEKGRPPWAAVVGTPPQAHTSLQPHHHPWEPSVRESLCSTWPWKNEDFNQKFTQLLLLQRPHPRSQDPLVKRSWPDYVEENRGHLIEIRDLFGPGLDTQEPRIVILQGAAGIGKSTLARQVKEAWGRGQLYGDRFQHVFYFSCRELAQSKVVSLAELIGKDGTATPAPIRQILSRPERLLFILDGVDEPGWVLQEPSSELCLHWSQPQPADALLGSLLGKTILPEASFLITARTTALQNLIPSLEQARWVEVLGFSESSRKEYFYRYFTDERQAIRAFRLVKSNKELWALCLVPWVSWLACTCLMQQMKRKEKLTLTSKTTTTLCLHYLAQALQAQPLGPQLRDLCSLAAEGIWQKKTLFSPDDLRKHGLDGAIISTFLKMGILQEHPIPLSYSFIHLCFQEFFAAMSYVLEDEKGRGKHSNCIIDLEKTLEAYGIHGLFGASTTRFLLGLLSDEGEREMENIFHCRLSQGRNLMQWVPSLQLLLQPHSLESLHCLYETRNKTFLTQVMAHFEEMGMCVETDMELLVCTFCIKFSRHVKKLQLIEGRQHRSTWSPTMVVLFRWVPVTDAYWQILFSVLKVTRNLKELDLSGNSLSHSAVKSLCKTLRRPRCLLETLRLAGCGLTAEDCKDLAFGLRANQTLTELDLSFNVLTDAGAKHLCQRLRQPSCKLQRLQLVSCGLTSDCCQDLASVLSASPSLKELDLQQNNLDDVGVRLLCEGLRHPACKLIRLGLDQTTLSDEMRQELRALEQEKPQLLIFSRRKPSVMTPTEGLDTGEMSNSTSSLKRQRLGSERAASHVAQANLKLLDVSKIFPIAEIAEESSPEVVPVELLCVPSPASQGDLHTKPLGTDDDFWGPTGPVATEVVDKEKNLYRVHFPVAGSYRWPNTGLCFVMREAVTVEIEFCVWDQFLGEINPQHSWMVAGPLLDIKAEPGAVEAVHLPHFVALQGGHVDTSLFQMAHFKEEGMLLEKPARVELHHIVLENPSFSPLGVLLKMIHNALRFIPVTSVVLLYHRVHPEEVTFHLYLIPSDCSIRKAIDDLEMKFQFVRIHKPPPLTPLYMGCRYTVSGSGSGMLEILPKELELCYRSPGEDQLFSEFYVGHLGSGIRLQVKDKKDETLVWEALVKPGDLMPATTLIPPARIAVPSPLDAPQLLHFVDQYREQLIARVTSVEVVLDKLHGQVLSQEQYERVLAENTRPSQMRKLFSLSQSWDRKCKDGLYQALKETHPHLIMELWEKGSKKGLLPLSS

SEQ ID NO: 1553 - DNA, 2430 bp, Homo sapien
catttcattggcgtttgagtcagcaaagaagtcaagatggccaaagttccagacatgtttgaagacctgaagaactgttacagtgaaaatgaagaagacagttcctccattgatcatctgtctctgaatcagaaatccttctatcatgtaagctatggcccactccatgaaggctgcatggatcaatctgtgtctctgagtatctctgaaacctctaaaacatccaagcttaccttcaaggagagcatggtggtagtagcaaccaacgggaaggttctgaagaagagacggttgagtttaagccaatccatcactgatgatgacctggaggccatcgccaatgactcagaggaagaaatcatcaagcctaggtcagcaccttttagcttcctgagcaatgtgaaatacaactttatgaggatcatcaaatacgaattcatcctgaatgacgccctcaatcaaagtataattcgagccaatgatcagtacctcacggctgctgcattacataatctggatgaagcagtgaaatttgacatgggtgcttataagtcatcaaaggatgatgctaaaattaccgtgattctaagaatctcaaaaactcaattgtatgtgactgcccaagatgaagaccaaccagtgctgctgaaggagatgcctgagatacccaaaaccatcacaggtagtgagaccaacctcctcttcttctgggaaactcacggcactaagaactatttcacatcagttgcccatccaaacttgtttattgccacaaagcaagactactgggtgtgcttggcaggggggccaccctctatcactgactttcagatactggaaaaccaggcgtaggtctggagtctcacttgtctcacttgtgcagtgttgacagttcatatgtaccatgtacatgaagaagctaaatcctttactgttagtcatttgctgagcatgtactgacccttgtaattctaaatgaatgtttacactctttgtaagagtggaaccaacactaacatataatgttgttatttaaagaacaccctatattttgcatagtaccaatcattttaattattattcttcataacaattttaggaggaccagagctactgactatggctaccaaaaagactctacccatattacagatgggcaaattaaggcataagaaaactaagaaatatgcacaatagcagttgaaacaagaagccacagacctaggatttcatgatttcatttcaactgtttgccttctacttttaagttgctgatgaactcttaatcaaatagcataagtttctgggacctcagttttatcattttcaaaatggagggaataatacctaagccttcctgccgcaacagttttttatgctaatcagggaggtcattttggtaaaatacttcttgaagccgagcctcaagatgaaggcaaagcacgaaatgttattttttaattattatttatatatgtatttataaatatatttaagataattataatatactatatttatgggaaccccttcatcctctgagtgtgaccaggcatcctccacaatagcagacagtgttttctgggataagtaagtttgatttcattaatacagggcattttggtccaagttgtgcttatcccatagccaggaaactctgcattctagtacttgggagacctgtaatcatataataaatgtacattaattaccttgagccagtaattggtccgatctttgactcttttgccattaaacttacctgggcattcttgtttcattcaattccacctgcaatcaagtcctacaagctaaaattagatgaactcaactttgacaaccatgagaccactgttatcaaagttgagttcatctaattttagcttgtagagacgggatttcaccatcttggccgtgctggtctcgaacttctgacctcgtgatccacccgcctcggcctcccaaagtgctgggattacaggcgtgagccatcgcgcccggcctggagtttctactgtgcaccaggcactacctttacatgtattgttttatttaatcctcagtcagccgtgtttggtaggtgcagttagtatatttccattttcatctgcgcaaacagattcaggaactttgtaatttacataaggtcacattcatcctaattcacaaaatcaagatttcacacctattcctttttctttccagtgcctgtgctttttctctcataccaaggagaagtaataagcctaacgttttaaacctcacaaaagtacatacagaaaagtaaatagcctaattttgcaactaatacaaatggcgctgtacttctttggtgatggtagatttataatttttgaagtatggtagattcaaatgaaccactgaaaaggcatttagtttcttgtcccaaataaaaaaaaaaaaaaaaaa

SEQ ID NO: 1554 - protein, 271 aa, Homo sapien
MAKVPDMFEDLKNCYSENEEDSSSIDHLSLNQKSFYHVSYGPLHEGCMDQSVSLSISETSKTSKLTFKESMVVVATNGKVLKKRRLSLSQSITDDDLEAIANDSEEEIIKPRSAPFSFLSNVKYNFMRIIKYEFILNDALNQSIIRANDQYLTAAALHNLDEAVKFDMGAYKSSKDDAKITVILRISKTQLYVTAQDEDQPVLLKEMPEIPKTITGSETNLLFFWETHGTKNYFTSVAHPNLFIATKQDYWVCLAGGPPSITDFQILENQA

SEQ ID NO: 1555 - DNA, 3002 bp, Homo sapien
gccattctctcacatcccgtgcggtcaggaagcccttcctgaactctgacttcagttcttgctgcggtttctgcccatttttttcatatcctctgacagctgcgaggtcatctctgctctggcttttctccaagcagaacaagtgggggctctggaaaggttaagggacctcagtggccaccattatactttgcatctttcctgagaagtgagagttgaaagggaagcaggaaggcccatggtcagattgaaggaaggactttttagtttcttttttttttttttgaaatggagtctcgctctgtcattcaggctggagtgcagtggtgcgatctcagctcactgcagcctccacttcctgggttcacatgattctcctgcctcagcctcccaagtagctgagactacaggcacatgccactacacccagctaacttttgtatttttagtagagacggggtttcaccatgttggccaggctggtctcaaactgctaacatcaagtgatctgctcccctcagcctcccaaagtgctgggattaccggtatgaaccaccacaacctgccaggaatttttagtttttagcttttgcaggagacttcaaggaaaggagacattcctctgtccaggaaacgggtaaggggaccatttctgcattgctggtttcccctcttggcagggtgggcatgaggcatcactgttcctgctccctcactcctgctcctcatgctcagcctgccagctcggcctcaactttgtgtgtctaaagtggaactgaatagtagctgtgagaagataggaaagaggtagtgccaatctccttgcccagatcataaatccagactcagcagggtaaccacatgggcaagcacaaggtaggtgcttggggaaaggggaagtaattggcattctgtgtgataccaaggagaccatttggattttggcttctaccaaagagaatggagaattggttgacctaaatggaaccagtccctttaagtaaggggaggaaagggggtgctggaagatggccctcttcccaccacctagatcatagcttgaactgaagccaaggacagagtgctgcccccttcggcatttactgatgtgccctctttaaatcatgatgttatctaacccaaacccagacccaggacctagtcacagctccaacctacacttcctattaatcttaaaacaaagcgaaacaaacacaaaaagatatcagcattgtagcctccaatctgagcccatttcccttctctggctaccatacctccttctcctatatgataccattcactactttgttcaattatccagtctagacctgcatcttgaggccacacccagccttctcactccccacacccctctttcctctctcactgctccttcctggtctcttctcatctggccccacctctaaggagtcctcctgccttctgggttgccctggaaaacagactatcccccctcctagtgaagggagtgggtaggggtttcagccccaccctcaggaagatgcgtcttccctgtcctctgctctgtggtacttcctctctggctgatttagcaaacagcacctagacctggggccaggcctttggcagtgggacagatccagggataggctacaccaccctgccctgaccctgggattggcatcagcttccaaccagttcctgccaaagcttgtaagtcctcccgacggccatgaacactacatcttctgcagcacccccctcactaggtgtagagttcatctctctgctggctatcatcctgctgtcagtggcgctggctgtggggcttcccggcaacagctttgtggtgtggagtatcctgaaaaggatgcagaagcgctctgtcactgccctgatggtgctgaacctggccctggccgacctggccgtattgctcactgctccctttttccttcacttcctggcccaaggcacctggagttttggactggctggttgccgcctgtgtcactatgtctgcggagtcagcatgtacgccagcgtcctgcttatcacggccatgagtctagaccgctcactggcggtggcccgcccctttgtgtcccagaagctacgcaccaaggcgatggcccggcgggtgctggcaggcatctgggtgttgtcctttctgctggccacacccgtcctcgcgtaccgcacagtagtgccctggaaaacgaacatgagcctgtgcttcccgcggtaccccagcgaagggcaccgggccttccatctaatcttcgaggctgtcacgggcttcctgctgcccttcctggctgtggtggccagctactcggacatagggcgtcggctacaggcccggcgcttccgccgcagccgccgcaccggccgcctggtggtgctcatcatcctgaccttcgccgccttctggctgccctaccacgtggtgaacctggctgaggcgggccgcgcgctggccggccaggccgccgggttagggctcgtggggaagcggctgagcctggcccgcaacgtgctcatcgcactcgccttcctgagcagcagcgtgaaccccgtgctgtacgcgtgcgccggcggcggcctgctgcgctcggcgggcgtgggcttcgtcgccaagctgctggagggcacgggttccgaggcgtccagcacgcgccgcgggggcagcctgggccagaccgctaggagcggccccgccgctctggagcccggcccttccgagagcctcactgcctccagccctctcaagttaaacgaactgaactaggcctggtggaaggaggcgcactttcctcctggcagaatgctagctctgagccagttcagtacctggaggaggagcaggggcgtggagggcgtggagggcgtgggagcgtgggaggcgggagtggagtggaagaagagggagagatggagcaaagtgagggccgagtgagagcgtgctccagcctggctcccacaggcagctttaaccattaaaactgaagtctgaa

SEQ ID NO: 1556 - protein, 352 aa, Homo sapien
MNTTSSAAPPSLGVEFISLLAIILLSVALAVGLPGNSFVVWSILKRMQKRSVTALMVLNLALADLAVLLTAPFFLHFLAQGTWSFGLAGCRLCHYVCGVSMYASVLLITAMSLDRSLAVARPFVSQKLRTKAMARRVLAGIWVLSFLLATPVLAYRTVVPWKTNMSLCFPRYPSEGHRAFHLIFEAVTGFLLPFLAVVASYSDIGRRLQARRFRRSRRTGRLVVLIILTFAAFWLPYHVVNLAEAGRALAGQAAGLGLVGKRLSLARNVLIALAFLSSSVNPVLYACAGGGLLRSAGVGFVAKLLEGTGSEASSTRRGGSLGQTARSGPAALEPGPSESLTASSPLKLNELN

SEQ ID NO: 1557 - DNA, 1806 bp, Homo sapien
agggaacatctcggggagcctggttggaagctgcaggcttagtctgtcggctgcgggtctctgactgccctgtggggagggtcttgccttaacatcccttgcatttggctgcaaagaaatctgcttggaagaaggggttacgctgtttggccgggcagaaactccgctgagcagaacttgccgccagaatgctcctcctgttgctgagtatcatcgtcctccacgtcgcggtgctggtgctgctgttcgtctccacgatcgtcagccaatggatcgtgggcaatggacacgcaactgatctctggcagaactgtagcacctcttcctcaggaaatgtccaccactgtttctcatcatcaccaaacgaatggctgcagtctgtccaggccaccatgatcctgtcgatcatcttcagcattctgtctctgttcctgttcttctgccaactcttcaccctcaccaaggggggcaggttttacatcactggaatcttccaaattcttgctggtctgtgcgtgatgagtgctgcggccatctacacggtgaggcacccggagtggcatctcaactcggattactcctacggtttcgcctacatcctggcctgggtggccttccccctggcccttctcagcggtgtcatctatgtgatcttgcggaaacgcgaatgaggcgcccagacggtctgtctgaggctctgagcgtacatagggaagggaggaagggaaaccagaaagcagacaaagaaaaaagagctagcccaaaatcccaaactcaaaccaaaccaaacagaaagcagtggaggtgggggttgctgttgattgaagatgtatataatatctccggtttataaaacctatttataacactttttacatatatgtacatagtattgtttgctttttatgttgaccatcagcctcgtgttgagccttaaagaagtagctaaggaactttacatggtaacagtataatccagctcagtatttttgttttgttttttgtttgtttgttttgttttacccagaaataagataactccatgtcgccccttccctttcatctgaaagaagatacctccctcccagtccacctcatttagaaaaccaaagtgtgggtagaaaccccaaatgtccaaaagcccttttctggtgggtgacccagtgcatccaacagaaacagccgctgcccgaacctgtgtgaagctttacgcgcacacggacaaaatgcccaaactggagcccttgcaaaaacacggcttgtggcattggcatacttgcccttacaggtggagtatcttcgtcacacatctaaatgagaaatcagtgacaacaagtctttgaaatggtgctatggatttaccattccttattatcactaatcatctaaacaactcactggaaatccaattaacaattttacaacataagatagaatggagacctgaataattctgtgtaatataaatggtttataactgcttttgtacctagctaggctgctattattactataatgagtaaatcataaagccttcatcactcccacattttccttacggtcggagcatcagaacaagcgtctagactccttgggaccgtgagttcctagagcttggctgggtctaggctgttctgtgcctccaaggactgtctggcaatgacttgtattggccaccaactgtagatgtatatatggtgcccttctgatgctaagactccagaccttttgtttttgctttgcattttctgattttataccaactgtgtggactaagatgcattaaaataaacatcagagtaactc

SEQ ID NO: 1558 - protein, 160 aa, Homo sapien
MLLLLLSIIVLHVAVLVLLFVSTIVSQWIVGNGHATDLWQNCSTSSSGNVHHCFSSSPNEWLQSVQATMILSIIFSILSLFLFFCQLFTLTKGGRFYITGIFQILAGLCVMSAAAIYTVRHPEWHLNSDYSYGFAYILAWVAFPLALLSGVIYVILRKRE

SEQ ID NO: 1559 - DNA, 2879 bp, Homo sapien
aaaaagctatttaggtgacactatagaaggtacgcctgcaggtaaccggtccggaattcccgggtcgacccacgcgtccgggggaagccactgctaccctcatcaggaagggcagacacaagaagcaccagttctatttgctgctacatcccggctctcgcaccgagggctcatccatccgcagagcagggcagtgggaggagacgccatgacccccatcgtcacagtcctgatctgtctcgggctgagtctgggccccaggacccgcgtgcagacagggaccatccccaagcccaccctgtgggctgagccagactctgtgatcacccaggggagtcccgtcaccctcagttgtcaggggagccttgaagcccaggagtaccgtctatatagggagaaaaaatcagcatcttggattacacggatacgaccagagcttgtgaagaacggccagttccacatcccatccatcacctgggaacacacagggcgatatggctgtcagtattacagccgcgctcggtggtctgagctcagtgaccccctggtgctggtgatgacaggagcctacccaaaacccaccctctcagcccagcccagccctgtggtgacctcaggaggaagggtgaccctccagtgtgagtcacaggtggcatttggcggcttcattctgtgtaaggaaggagaagatgaacacccacaatgcctgaactcccagccccatgcccgtgggtcgtcccgcgccatcttctccgtgggccccgtgagcccgaatcgcaggtggtcgcacaggtgctatggttatgacttgaactctccctatgtgtggtcttcacccagtgatctcctggagctcctggtcccaggtgtttctaagaagccatcactctcagtgcagccgggtcctgtcatggcccctggggaaagcctgaccctccagtgtgtctctgatgtcggctatgacagatttgttctgtacaaggagggggaacgtgaccttcgccagctccctggccggcagccccaggctgggctctcccaggccaacttcaccctgggccctgtgagccgctcctacgggggccagtacagatgctacggtgcacacaacctctcctctgagtgctcggcccccagcgaccccctggacatcctgatcacaggacagatccgtggcacacccttcatctcagtgcagccaggccccacagtggcctcaggagagaacgtgaccctgctgtgtcagtcatggcggcagttccacactttccttctgaccaaggcgggagcagctgatgccccactccgtctaagatcaatacacgaatatcctaagtaccaggctgaattccccatgagtcctgtgacctcagcccacgcggggacctacaggtgctacggctcactcaactccgacccctacctgctgtctcaccccagtgagcccctggagctcgtggtctcaggaccctccatgggttccagccccccacccaccggtcccatctccacacctggccctgaggaccagcccctcacccccactgggtcggatccccaaagtggtctgggaaggcacctgggggttgtgatcggcatcttggtggccgtcgtcctactgctcctcctcctcctcctcctcttcctcatcctccgacatcgacgtcagggcaaacactggacatcgacccagagaaaggctgatttccaacatcctgcaggggctgtggggccagagcccacagacagaggcctgcagtggaggtccagcccagctgccgacgcccaggaagaaaacctctatgctgccgtgaaggacacacagcctgaagatggggtggagatggacactcgggctgctgcatctgaagccccccaggatgtgacctacgcccagctgcacagcttgaccctcagacggaaggcaactgagcctcctccatcccaggaaagggaacctccagctgagcccagcatctacgccaccctggccatccactagcccggagggtacgcagactccacactcagtagaaggagactcaggactgctgaaggcacgggagctgcccccagtggacaccaatgaaccccagtcagcctggacccctaacaaagaccatgaggagatgctgggaactttgggactcacttgattctgcagtcgaaataactaatatccctacattttttaattaaagcaacagacttctcaataatcaatgagttaaccgagaaaactaaaatcagaagtaagaatgtgctttaaactgaatcacaatataaatattacacatcacacaatgaaattgaaaaagtacaaaccacaaatgaaaaaagtagaaacgaaaaaaaaaaactaggaaatgaatgacgttggctttcgtataaggaatttagaaaaagaataaccaattattccaaatgaaggtgtaagaaagggaataagaagaagaagagttgctcatgaggaaaaaccaaaacttgaaaattcaacaaagccaatgaagctcattcttgaaaatattaattacagtcataaatcctaactacattgagcaagagaaagaaagagcaggcacgcatttccatatgggagtgagccagcagacagcccagcagatcctacacacattttcacaaactaaccccagaacaggctgcaaacctataccaatatactagaaaatgcagattaaatggatgaaatattcaaaactggagtttacataatgaacgtaagagtaatcagagaatctgactcattttaaatgtgtgtgtatgtgtgtgtatatatatgtgtgtgtgtgtgtgtgtgtgtgtgtgtgaaaaacattgactgtaataaaaatgttcccatcgtaaaaaaaaaaaaaaaa

SEQ ID NO: 1560 - protein, 597 aa, Homo sapien
MTPIVTVLICLGLSLGPRTRVQTGTIPKPTLWAEPDSVITQGSPVTLSCQGSLEAQEYRLYREKKSASWITRIRPELVKNGQFHIPSITWEHTGRYGCQYYSRARWSELSDPLVLVMTGAYPKPTLSAQPSPVVTSGGRVTLQCESQVAFGGFILCKEGEDEHPQCLNSQPHARGSSRAIFSVGPVSPNRRWSHRCYGYDLNSPYVWSSPSDLLELLVPGVSKKPSLSVQPGPVMAPGESLTLQCVSDVGYDRFVLYKEGERDLRQLPGRQPQAGLSQANFTLGPVSRSYGGQYRCYGAHNLSSECSAPSDPLDILITGQIRGTPFISVQPGPTVASGENVTLLCQSWRQFHTFLLTKAGAADAPLRLRSIHEYPKYQAEFPMSPVTSAHAGTYRCYGSLNSDPYLLSHPSEPLELVVSGPSMGSSPPPTGPISTPGPEDQPLTPTGSDPQSGLGRHLGVVIGILVAVVLLLLLLLLLFLILRHRRQGKHWTSTQRKADFQHPAGAVGPEPTDRGLQWRSSPAADAQEENLYAAVKDTQPEDGVEMDTRAAASEAPQDVTYAQLHSLTLRRKATEPPPSQEREPPAEPSIYATLAIH

SEQ ID NO: 1561 - DNA, 3736 bp, Homo sapien
atctgcacagctggggcccctgggaggagacgccatgatccccaccttcacggctctgctctgcctcgggctgagtctgggccccaggaccgacatgcaggcagggcccctccccaaacccaccctctgggctgagccaggctctgtgatcagctgggggaactctgtgaccatctggtgtcaggggaccctggaggctcgggagtaccgtctggataaagaggaaagcccagcaccctgggacagacagaacccactggagcccaagaacaaggccagattctccatcccatccatgacagaggactatgcagggagataccgctgttactatcgcagccctgtaggctggtcacagcccagtgaccccctggagctggtgatgacaggagcctacagtaaacccaccctttcagccctgccgagtcctcttgtgacctcaggaaagagcgtgaccctgctgtgtcagtcacggagcccaatggacactttccttctgatcaaggagcgggcagcccatcccctactgcatctgagatcagagcacggagctcagcagcaccaggctgaattccccatgagtcctgtgacctcagtgcacggggggacctacaggtgcttcagctcacacggcttctcccactacctgctgtcacaccccagtgaccccctggagctcatagtctcaggatccttggagggtcccaggccctcacccacaaggtccgtctcaacagctgcaggccctgaggaccagcccctcatgcctacagggtcagtcccccacagtggtctgagaaggcactgggaggtactgatcggggtcttggtggtctccatcctgcttctctccctcctcctcttcctcctcctccaacactggcgtcagggaaaacacaggacattggcccagagacaggctgatttccaacgtcctccaggggctgccgagccagagcccaaggacgggggcctacagaggaggtccagcccagctgctgacgtccagggagaaaacttctgtgctgccgtgaagaacacacagcctgaggacggggtggaaatggacactcggcagagcccacacgatgaagacccccaggcagtgacgtatgccaaggtgaaacactccagacctaggagagaaatggcctctcctccctccccactgtctggggaattcctggacacaaaggacagacaggcagaagaggacagacagatggacactgaggctgctgcatctgaagccccccaggatgtgacctacgcccggctgcacagctttaccctcagacagaaggcaactgagcctcctccatcccaggaaggggcctctccagctgagcccagtgtctatgccactctggccatccactaatccaggggggacccagaccccacaagccatggagactcaggaccccagaaggcatggaagctgcctccagtagacatcactgaaccccagccagcccagacccctgacacagaccactagaagattccgggaacgttgggagtcacctgattctgcaaagataaataatatccctgcattatcaaaataaagtagcagacctctcaattcacaatgagttaactgataaaacaaaacagaagtcagacaatgttttaaattgaatgatcatgtaaatattacacatcaaaccaatgacatgggaaaatgggagcttctaatgaggacaaacaaaaaatagagaaaaattaataaagtcaaaatgtttattcttgaaaacattaatgatacatgaatcttggccacaatgagaaaaataaaaatgaaaaaagagcaggcatccatttccatacaggaacaaaataggaggcagcactacagaccctacacacagctttacagaggtgaaagaaaactgtcagcaattctatgctgacataacagaaaatgtagatgagatagatgaaatacgaaaaattacagtttacttaatgaacataaggataaatagaaaaactgaatcatcatacataaacatatataaaatgcattgatcctgtaatcaaaaatgttcccacaaagtaaatgccacttcagcaaggtttgttggtggttttttcaaactcttatgcactcatgaaacacacagacacacacacacacaaacttgcataaattttccctgagaatattttgtatatatttacacaaatacatttgatcagactaggaacaagttgataccaaaacctgaaaaggaaactacagaatgggaaagtcatagaagatctctcacagaaatataaatcccttaacaaatattaacaagtaagattcatgtctctataaaatagacagtatatcatgaccacactggttttttgttatcctttgattttgtttatgaaaagcaaggatagcttaattttcaaaaactcaatcaatgtaattcagtattttaacaaaaggaatgaaaaattatcatctcaatagacaaagcttttgtctgagcaccttttcatatagctgctgaccatttgtatgtcttcttttgagaaatgcctgttcagctactttgcccatgtttcaagtagtttttggtttcttgctgttgctttgttttagttccttacatatttttgcatattaaccctttatcaggtatacagcttgcaactattttctcccatttctgagttgtctcttcattctgtttgcagaagctgtttagaagccacaccttttgtctatttttgcttttgttgcttgtgttttcagggccatatccaaaaaaaccttgcccggaccaacgtcttgaagcttttctcacacccatttttgtatatgggataagggttcaatttcattcttcttcatatgaatatccccaggatgtgtcatatgcccagctgcacagcttaccctcaaacagaaaataatgaagccttcttcctcccaggaaaggggacgttcagctgagccgagtgtgtatactgctctggccatccactagcccagggaggacccagacctccacactccatggagactcagttctcctaggaccatttattcaaaaggactgccctctcttgttcttggaaactttgttgaggatcaattcaccataaatatgtgtgtttccttctttgctttcatccctgttgcactgatcactatacctgtttctattccagttccatgatgtcttcctggctgtagctttgtaggatatttggggattccatagtgtgatatccccttcttccctttgctcaagattgttttggctatttggggtccttttgtagtcccattcaaattttaggattgtttttctatttctgtggaaaacgaccttggaattttgttaggaattgcattgagtctgcaggtatgaacttttttttaaagttccagggcacatgtacaggacctgcagctttgttacataggtaggcttgtgccatggtggtttgctgcacctatcaacccattacctagttattaagcccagcatgcattagctctttttcctgatgctctccctcccttcatcatccgccctcccactacaagccccagtgtgtgttgttcccctccctgtgtccatgtgttctcattgttatacgaacattttaacaatgttaattcttgcagaccatgaacataagctaccttcccatttatatgcgtcttgttcaatttcattcatcaatgttataaagattttagtgcagaaaaaaaaaaaaaaaa

SEQ ID NO: 1562 - protein, 448 aa, Homo sapien
MIPTFTALLCLGLSLGPRTDMQAGPLPKPTLWAEPGSVISWGNSVTIWCQGTLEAREYRLDKEESPAPWDRQNPLEPKNKARFSIPSMTEDYAGRYRCYYRSPVGWSQPSDPLELVMTGAYSKPTLSALPSPLVTSGKSVTLLCQSRSPMDTFLLIKERAAHPLLHLRSEHGAQQHQAEFPMSPVTSVHGGTYRCFSSHGFSHYLLSHPSDPLELIVSGSLEGPRPSPTRSVSTAAGPEDQPLMPTGSVPHSGLRRHWEVLIGVLVVSILLLSLLLFLLLQHWRQGKHRTLAQRQADFQRPPGAAEPEPKDGGLQRRSSPAADVQGENFCAAVKNTQPEDGVEMDTRQSPHDEDPQAVTYAKVKHSRPRREMASPPSPLSGEFLDTKDRQAEEDRQMDTEAAASEAPQDVTYARLHSFTLRQKATEPPPSQEGASPAEPSVYATLAIH

SEQ ID NO: 1563 - DNA, 3369 bp, Homo sapien
ggttttcaggagcccgagcgagggcgccgcttttgcgtccgggaggagccaaccgtggcgcaggcggcgcggggaggcgtcccagagtctcactctgccgcccaggctggactgcagtgacacaatctcggctgactgcaaccactgcctccagggttcaagcgattctcttgcctcagcctcccaagtagctgggattacagattgatgttcatgttcctggcactactacaagattcatactcctgatgctactgacaacgtggcttctccacagtcaccaaaccagggatgctatactggacttccctactctcatctgctccagccccctgaccttatagttgcccagctttcctggcaattgactttgcccatcaatacacaggatttagcatccagggaagatgtcggagcctcagatgttaattttctaattgagaatgttggcgctgtccgaacctggagacaggaaaacaaaaagtcctttctcctgattcaccaaaaaataaaatactgactaccatcactgtgatgagattcctatagtctcaggaactgaagtctttaaacaaccagggaccctctgcccctagaataagaacatactagaagtcccttctgctaggacaacgaggatcatgggagaccacctggaccttctcctaggagtggtgctcatggccggtcctgtgtttggaattccttcctgctcctttgatggccgaatagccttttatcgtttctgcaacctcacccaggtcccccaggtcctcaacaccactgagaggctcctgctgagcttcaactatatcaggacagtcactgcttcatccttcccctttctggaacagctgcagctgctggagctcgggagccagtatacccccttgactattgacaaggaggccttcagaaacctgcccaaccttagaatcttggacctgggaagtagtaagatatacttcttgcatccagatgcttttcagggactgttccatctgtttgaacttagactgtatttctgtggtctctctgatgctgtattgaaagatggttatttcagaaatttaaaggctttaactcgcttggatctatccaaaaatcagattcgtagcctttaccttcatccttcatttgggaagttgaattccttaaagtccatagatttttcctccaaccaaatattccttgtatgtgaacatgagctcgagcccctacaagggaaaacgctctccttttttagcctcgcagctaatagcttgtatagcagagtctcagtggactggggaaaatgtatgaacccattcagaaacatggtgctggagatactagatgtttctggaaatggctggacagtggacatcacaggaaactttagcaatgccatcagcaaaagccaggccttctctttgattcttgcccaccacatcatgggtgccgggtttggcttccataacatcaaagatcctgaccagaacacatttgctggcctggccagaagttcagtgagacacctggatctttcacatgggtttgtcttctccctgaactcacgagtctttgagacactcaaggatttgaaggttctgaaccttgcctacaacaagataaataagattgcagatgaagcattttacggacttgacaacctccaagttctcaatttgtcatataaccttctgggggaactttacagttcgaatttctatggactacctaaggtagcctacattgatttgcaaaagaatcacattgcaataattcaagaccaaacattcaaattcctggaaaaattacagaccttggatctccgagacaatgctcttacaaccattcattttattccaagcatacccgatatcttcttgagtggcaataaactagtgactttgccaaagatcaaccttacagcgaacctcatccacttatcagaaaacaggctagaaaatctagatattctctactttcttctacgggtacctcatctccagattctcattttaaatcaaaatcgcttctcctcctgtagtggagatcaaaccccttcagagaatcccagcttagaacagcttttccttggagaaaatatgttgcaacttgcctgggaaactgagctctgttgggatgtttttgagggactttctcatcttcaagttctgtatttgaatcataactatcttaattcccttccaccaggagtatttagccatctgactgcattaaggggactaagcctcaactccaacaggctgacagttctttctcacaatgatttacctgctaatttagagatcctggacatatccaggaaccagctcctagctcctaatcctgatgtatttgtatcacttagtgtcttggatataactcataacaagttcatttgtgaatgtgaacttagcacttttatcaattggcttaatcacaccaatgtcactatagctgggcctcctgcagacatatattgtgtgtaccctgactcgttctctggggtttccctcttctctctttccacggaaggttgtgatgaagaggaagtcttaaagtccctaaagttctcccttttcattgtatgcactgtcactctgactctgttcctcatgaccatcctcacagtcacaaagttccggggcttctgttttatctgttataagacagcccagagactggtgttcaaggaccatccccagggcacagaacctgatatgtacaaatatgatgcctatttgtgcttcagcagcaaagacttcacatgggtgcagaatgctttgctcaaacacctggacactcaatacagtgaccaaaacagattcaacctgtgctttgaagaaagagactttgtcccaggagaaaaccgcattgccaatatccaggatgccatctggaacagtagaaagatcgtttgtcttgtgagcagacacttccttagagatggctggtgccttgaagccttcagttatgcccagggcaggtgcttatctgaccttaacagtgctctcatcatggtggtggttgggtccttgtcccagtaccagttgatgaaacatcaatccatcagaggctttgtacagaaacagcagtatttgaggtggcctgaggatctccaggatgttggctggtttcttcataaactctctcaacagatactaaagaaagaaaaagaaaagaagaaagacaataacattccgttgcaaactgtagcaaccatctcctaatcaaaggagcaatttccaacttatctcaagccacaaataactcttcactttgtatttgcaccaagttatcattttggggtcctctctggaggttttttttttctttttgctactatgaaaacaacataaatctctcaattttcgtatcaaa

SEQ ID NO: 1564 - protein, 858 aa, Homo sapien
MGDHLDLLLGVVLMAGPVFGIPSCSFDGRIAFYRFCNLTQVPQVLNTTERLLLSFNYIRTVTASSFPFLEQLQLLELGSQYTPLTIDKEAFRNLPNLRILDLGSSKIYFLHPDAFQGLFHLFELRLYFCGLSDAVLKDGYFRNLKALTRLDLSKNQIRSLYLHPSFGKLNSLKSIDFSSNQIFLVCEHELEPLQGKTLSFFSLAANSLYSRVSVDWGKCMNPFRNMVLEILDVSGNGWTVDITGNFSNAISKSQAFSLILAHHIMGAGFGFHNIKDPDQNTFAGLARSSVRHLDLSHGFVFSLNSRVFETLKDLKVLNLAYNKINKIADEAFYGLDNLQVLNLSYNLLGELYSSNFYGLPKVAYIDLQKNHIAIIQDQTFKFLEKLQTLDLRDNALTTIHFIPSIPDIFLSGNKLVTLPKINLTANLIHLSENRLENLDILYFLLRVPHLQILILNQNRFSSCSGDQTPSENPSLEQLFLGENMLQLAWETELCWDVFEGLSHLQVLYLNHNYLNSLPPGVFSHLTALRGLSLNSNRLTVLSHNDLPANLEILDISRNQLLAPNPDVFVSLSVLDITHNKFICECELSTFINWLNHTNVTIAGPPADIYCVYPDSFSGVSLFSLSTEGCDEEEVLKSLKFSLFIVCTVTLTLFLMTILTVTKFRGFCFICYKTAQRLVFKDHPQGTEPDMYKYDAYLCFSSKDFTWVQNALLKHLDTQYSDQNRFNLCFEERDFVPGENRIANIQDAIWNSRKIVCLVSRHFLRDGWCLEAFSYAQGRCLSDLNSALIMVVVGSLSQYQLMKHQSIRGFVQKQQYLRWPEDLQDVGWFLHKLSQQILKKEKEKKKDNNIPLQTVATIS

SEQ ID NO: 1565 - DNA, 994 bp, Homo sapien
cgttgctgtcgaaatgaagtgcgcgctgcgacacctcccagcccaccgaactccgccgccatttcctcgcttggcctaacggttcggccaatcccagcgcgcatcaagaaggactgaggctccgccaatcggaggccgccgatttcgacccttcgcctcggcccggcccaatccaggccccggccccgccgcccccggcccgcccccgcggtgccctctctcctccctctttgtgcgtctcgcgccgccgccgcccgccgcgtgagaggacgggctccgcgcgctccggcagcgcattcgggtcccctccccccgggaggcttgcgaaggagaagccgccgcagaggaaaagcaggtgccggtgcctgtccccgggggcgccatggcgaccggagcgaacgccacgccgttggacttcccaagtaagaagcggaagaggagccgctggaaccaagacacaatggaacagaagacagtgattccaggaatgcctacagttattccccctggacttactcgagaacaagaaagagcttatataggtaaatatacgttctgcatccaaatgcactttgagattgttacgatttattctgagcaagatctgcattttttgaaagtttgagattgtagttatcttttttgagatgagatactttcacgactttggtatcatctgtcagtttttgcccagtgagttctgcatttgcagctccttgttttggtctgttcgtaactgcagtgttctccatgagtatcaggaaggtagggtttcacttaggagtaagaacagtccccagtccagcagccacccttttcagctgctgttcattgccagttgatgaggtgagtgtcatctgcctctctggacaggccccagtggagaacaccgcaggtactgtaaaccaagtacttttcacagcgtggcctttcaccataattttatatttctccccctaaaatgtggtcttttactttttataggtactttctg

SEQ ID NO: 1566 - protein, 80 aa, Homo sapien
MATGANATPLDFPSKKRKRSRWNQDTMEQKTVIPGMPTVIPPGLTREQERAYIGKYTFCIQMHFEIVTIYSEQDLHFLKV

SEQ ID NO: 1567 - DNA, 1242 bp, Homo sapien
agttacgttcggggcgtggccgggagcacgttggctccgccccctggcggctgcctcagcggcggcggcggcgcaggctcagagcagaccccgcccggcgaggaggagggagggccgccagtgtcgacatgctgctggaggaggttcgcgccggcgaccggctgagtggggcggcggcccggggcgacgtgcaggaggtgcgccgccttctgcaccgcgagctggtgcatcccgacgccctcaaccgcttcggcaagacggcgctgcaggtcatgatgtttggcagcaccgccatcgccctggagctgctgaagcaaggtgccagccccaatgtccaggacacctccggtaccagtccagtccatgacgcagcccgcactggattcctggacaccctgaaggtcctagtggagcacggggctgatgtcaacgtgcctgatggcaccggggcacttccaatccatctggcagttcaagagggtcacactgctgtggtcagctttctggcagctgaatctgatctccatcgcagggacgccaggggtctcacacccttggagctggcactgcagagaggggctcaggacctcgtggacatcctgcagggccacatggtggccccgctgtgatctggggtcaccctctccagcaagagaaccccgtggggttatgtatcagaagagaggggaagaaacactttctcttcttgtttctcctgcccactgctgcagtaggggaggagcacagtttgtggcttataggtgttggttttgggggtgtgagtgtttgggggacgtttctcatttgtttttctcactccttttggtgtgttggacagagaagggctcctgcaggccacagccacctaaacggttcagtttcttctgcgcctcaggctgctggggcctcagacgagacccaagggcagagcatttaagagtgaagtcatgacctccagggagcctagaagctggtggccttggccggctgtgctcagagacctgaagtgtgcacgttgcttcaggcatggggggtggggggagcgtcccaaatcaataagaaggtagaatgagttatgagttattcatattctgttggaagcttgttttccagtctcttgtacagcgttttaaaagaaatggattctatttattatgctttattggaaaaaatgttgtaataatttaatgtttttacccattaaattaagacttgtgcatgatcaaaaaaaaaaaaaaaaaa

SEQ ID NO: 1568 - protein, 166 aa, Homo sapien
MLLEEVRAGDRLSGAAARGDVQEVRRLLHRELVHPDALNRFGKTALQVMMFGSTAIALELLKQGASPNVQDTSGTSPVHDAARTGFLDTLKVLVEHGADVNVPDGTGALPIHLAVQEGHTAVVSFLAAESDLHRRDARGLTPLELALQRGAQDLVDILQGHMVAPL

SEQ ID NO: 1569 - DNA, 2687 bp, Homo sapien
gggcggatggaaggggccggggcagcgtcggggaaaggaagggccggaggcgcggcggcgggcggccgagaggggcggcggcggcggcggcggcggggttcccgcgccgcggagcccggcccgagagccgcgtccacgttcctgcctcctgctcccgccgccctggggcgccgccatgacgcccgatctgctcaacttcaagaagggatggatgtcgatcttggacgagcctggagagcctccctccccctcgctcaccaccacctctacttcgcagtggaagaaacattggtttgtgctgacagattcaagtctcaaatattacagagactccactgctgaggaggcagatgagctggatggtgagatcgacctgcgttcctgcacggatgtcactgagtacgcggtgcagcgcaactatggcttccagatccacaccaaggatgctgtctataccttgtcggccatgacctcaggcatccggcggaactggatcgaggctctgagaaagaccgtacgtccaacttcagccccagatgtcaccaagctctcggactctaacaaggagaacgcgctgcacagctacagcacccagaagggccccctgaaggcaggggagcagcgggcgggctctgaggtcatcagccggggtggccctcggaaggcggacgggcagcgtcaggccttggactacgtggagctctcgccgctgacccaggcttccccgcagcgggcccgcaccccagcccgcactcctgaccgcctggccaagcaggaggagctggagcgggacctggcccagcgctccgaggagcggcgcaagtggtttgaggccacagacagcaggaccccagaggtgcctgctggtgaggggccgcgccggggcctgggtgcccccctgactgaggaccagcaaaaccggcttagtgaggagatcgagaagaagtggcaggagctggagaagctgcccctgcgggagaataagcgggtgcccctcactgccctgctcaaccaaagccgcggagagcgccgagggcccccaagtgacggccacgaggcactggagaaggaggttcaggctcttcgggcccagctggaggcgtggcgtctccaaggggaggctcctcagagtgcactgagatcccaggaggatggccacatccccccgggctacatctcacaggaggcatgtgagcgcagcctggcagagatggagtcctcgcaccagcaggtgatggaggagctgcagcggcaccacgagcgggagctgcagcgcctgcagcaggagaaggagtggctcctggctgaggagacggcagccacggcctcagccattgaagccatgaagaaggcctaccaggaagagctgagccgagagctgagcaaaacacggagtctccagcagggcccggatggcctccggaagcagcaccagtcagatgtggaggcactgaagcgagagctgcaggtgctatcggagcagtactcgcagaagtgcctggagattggggcactcatgcggcaggctgaggagcgcgagcacacgctgcgccgctgccagcaggagggccaggagctgctgcgccacaaccaggagctgcatggccgcctgtcagaggagatagaccagctgcgcggcttcattgcctcgcagggcatgggcaatggctgcgggcgcagcaacgagcggagttcctgcgagctagaggtgctgcttcgcgtaaaagaaaacgaactccagtacctaaagaaggaggtgcagtgcctccgggacgagctccagatgatgcagaaggacaagcgcttcacctcgggaaagtaccaggacgtctatgtggagctgagccacatcaagacacggtctgagcgggagatcgagcagctgaaggagcacctgcgtcttgccatggccgccctccaggagaaggagtcgatgcgcaacagcctggctgagtagaggtcccgcccagctgcagaccctccaggctggaggaccagccgccctccttccctcctggatggaagtaaaaagccaagctttctccccaccctctgtgggccacacgtgcacttgcacccaccacacacacacacacacacacacacacacacacagacacacagacacatacgcacacacgtgcacacatgtacacacggatacacacacacacacacacactgcatatctgagcgcgcccctcgcactgggtctcaccttgcaccttcttcaggattttatatgtgaagagatttttatatagatttttttcctttttttccaaaacactttatactttaaaaaaaaaaaaaaaaagcaattcctggtggctgtgtgcctccaaccctggtccccctctgtctccagccaccctctgcttgggcttctgagctggtggccctggcccagaggtctggcggaggcccaggcagcagccatggcggggtgtctctacaggggagaggcgggagcctgccaccctcttcctgccctacctcctactaacacttcctgccccatttggacccgtaccatggggctcaggacagagggagctagcagctggcctccatggccccacagcctccttcgaggctgtgctgggtgcagaaccgccagagccacccaaaaggtgtttctcttctgctccctgaacctcttaacttaataaaacgttccagcagct

SEQ ID NO: 1570 - protein, 593 aa, Homo sapien
MTPDLLNFKKGWMSILDEPGEPPSPSLTTTSTSQWKKHWFVLTDSSLKYYRDSTAEEADELDGEIDLRSCTDVTEYAVQRNYGFQIHTKDAVYTLSAMTSGIRRNWIEALRKTVRPTSAPDVTKLSDSNKENALHSYSTQKGPLKAGEQRAGSEVISRGGPRKADGQRQALDYVELSPLTQASPQRARTPARTPDRLAKQEELERDLAQRSEERRKWFEATDSRTPEVPAGEGPRRGLGAPLTEDQQNRLSEEIEKKWQELEKLPLRENKRVPLTALLNQSRGERRGPPSDGHEALEKEVQALRAQLEAWRLQGEAPQSALRSQEDGHIPPGYISQEACERSLAEMESSHQQVMEELQRHHERELQRLQQEKEWLLAEETAATASAIEAMKKAYQEELSRELSKTRSLQQGPDGLRKQHQSDVEALKRELQVLSEQYSQKCLEIGALMRQAEEREHTLRRCQQEGQELLRHNQELHGRLSEEIDQLRGFIASQGMGNGCGRSNERSSCELEVLLRVKENELQYLKKEVQCLRDELQMMQKDKRFTSGKYQDVYVELSHIKTRSEREIEQLKEHLRLAMAALQEKESMRNSLAE

SEQ ID NO: 1571 - DNA, 1814 bp, Homo sapien
  Unsure 1562: Unknown base
atgcggcattccaaaagaactcactgtcctgattgggatagcagagaaagctggggacatgaaagctatcgtggaagtcacaagcggaagaggagatctcatagtagcacacaagagaacaggcattgtaaaccacatcaccagtttaaagaatctgattgtcattatttagaagcaaggtccttgaatgagcgagattatcgggaccggagatacgttgacgaatacaggaatgactactgtgaaggatatgttcctagacattatcacagagacattgaaagcgggtatcgaatccactgcagtaaatcttcagtccgcagcaggagaagcagtcctaaaaggaagcgcaatagacactgttcaagtcatcagtcacgttcgaagagccaccgaaggaaaagatccaggagtatagaggatgatgaggagggtcacctgatctgtcaaagtggagacgttctaagagcaagatatgaaatcgtggacactttgggtgaaggagcctttggcaaagttgtagagtgcattgatcatggcatggatggcatgcatgtagcagtgaaaatcgtaaaaaatgtaggccgttaccgtgaagcagctcgttcagaaatccaagtattagagcacttaaatagtactgatcccaatagtgtcttccgatgtgtccagatgctagaatggtttgatcatcatggtcatgtttgtattgtgtttgaactactgggacttagtacttacgatttcattaaagaaaacagctttctgccatttcaaattgaccacatcaggcagatggcgtatcagatctgccagtcaataaattttttacatcataataaattaacccatacagatctgaagcctgaaaatattttgtttgtgaagtctgactatgtagtcaaatataattctaaaatgaaacgtgatgaacgcacactgaaaaacacagatatcaaagttgttgactttggaagtgcaacgtatgatgatgaacatcacagtactttggtgtctacccggcactacagagctcccgaggtcattttggctttaggttggtctcagccttgtgatgtttggagcataggttgcattcttattgaatattaccttggtttcacagtctttcagactcatgatagtaaagagcacctggcaatgatggaacgaatattaggacccataccacaacacatgattcagaaaacaagaaaacgcaagtattttcaccataaccagctagattgggatgaacacagttctgctggtagatatgttaggagacgctgcaaaccgttgaaggaatttatgctttgtcatgatgaagaacatgagaaactgtttgacctggttcgaagaatgttagaatatgatccaactcaaagaattaccttggatgaagcattgcagcatcctttctttgacttattaaaaaagaaatgaaatgggaatcagtggtcttactatatacttctctagaagagattacttaagactgtgtcagtcaactaaacattctaatatttttgtaaacattaaattattttgtacagttaagngtaaatattgtatgttttgtatcaatagcataattaacttgttaagcaagtatggtcttgataatgcattagaaaaattaaaattaatttttctttttgaaattaccatttttaaaaacctttgaaatatcctttgtgtccagtgataaatgtgattgatcttgccttttgtacatggaggtcacctctgaagtgattttttttgagtaaaaggaaatcttgactactttaaaaaaaaaaaaaaaaaaaaaa

SEQ ID NO: 1572 - protein, 481 aa, Homo sapien
MRHSKRTHCPDWDSRESWGHESYRGSHKRKRRSHSSTQENRHCKPHHQFKESDCHYLEARSLNERDYRDRRYVDEYRNDYCEGYVPRHYHRDIESGYRIHCSKSSVRSRRSSPKRKRNRHCSSHQSRSKSHRRKRSRSIEDDEEGHLICQSGDVLRARYEIVDTLGEGAFGKVVECIDHGMDGMHVAVKIVKNVGRYREAARSEIQVLEHLNSTDPNSVFRCVQMLEWFDHHGHVCIVFELLGLSTYDFIKENSFLPFQIDHIRQMAYQICQSINFLHHNKLTHTDLKPENILFVKSDYVVKYNSKMKRDERTLKNTDIKVVDFGSATYDDEHHSTLVSTRHYRAPEVILALGWSQPCDVWSIGCILIEYYLGFTVFQTHDSKEHLAMMERILGPIPQHMIQKTRKRKYFHHNQLDWDEHSSAGRYVRRRCKPLKEFMLCHDEEHEKLFDLVRRMLEYDPTQRITLDEALQHPFFDLLKKK

SEQ ID NO: 1573 - DNA, 2643 bp, Homo sapien
gcctccagctgacctctggctcctgtcctctggctccacctgcaccgccctgctcttcctaaggggccaggaagcccccagaagctctaccatcgacgtgggtggtggcacccggctcaccctgagagcagagggcgtgcagggggctcagttctgagcccagccggcccaccatggcacggcggttccaggaggagctggccgccttcctcttcgagtatgacaccccccgcatggtgctggtgcgtaataagaaggtgggcgttatcttccgactgatccagctggtggtcctggtctacgtcatcgggtgggtgtttctctatgagaagggctaccagacctcgagcggcctcatcagcagtgtctctgtgaaactcaagggcctggccgtgacccagctccctggcctcggcccccaggtctgggatgtggctgactacgtcttcccagcccagggggacaactccttcgtggtcatgaccaatttcatcgtgaccccgaagcagactcaaggctactgcgcagagcacccagaagggggcatatgcaaggaagacagtggctgtacccctgggaaggccaagaggaaggcccaaggcatccgcacgggcaagtgtgtggccttcaacgacactgtgaagacgtgtgagatctttggctggtgccccgtggaggtggatgacgacatcccgcgccctgcccttctccgagaggccgagaacttcactcttttcatcaagaacagcatcagctttccacgcttcaaggtcaacaggcgcaacctggtggaggaggtgaatgctgcccacatgaagacctgcctctttcacaagaccctgcaccccctgtgcccagtcttccagcttggctacgtggtgcaagagtcaggccagaacttcagcaccctggctgagaagggtggagtggttggcatcaccatcgactggcactgtgacctggactggcacgtacggcactgcagacccatctatgagttccatgggctgtacgaagagaaaaatctctccccaggcttcaacttcaggtttgccaggcactttgtggagaacgggaccaactaccgtcacctcttcaaggtgtttgggattcgctttgacatcctggtggacggcaaggccgggaagtttgacatcatccctacaatgaccaccatcggctctggaattggcatctttggggtggccacagttctctgtgacctgctgctgcttcacatcctgcctaagaggcactactacaagcagaagaagttcaaatacgctgaggacatggggccaggggcggctgagcgtgacctcgcagctaccagctccaccctgggcctgcaggagaacatgaggacatcctgatgctcgggccccaactcctgactgggtgcagcgtgaggcttcagcctggagccctggtgggtcccagccagggcagaggggcctccccaggaagtctcctaccctctcagccaggcagagagcagtttgccagaagctcagggtgcatagtaggagagacctgtgcaaatctgagctccggctccgaccccacacaccctgagggaggcctaccctagcctcagccgctcctggtgggggaatggctgggggttgggcaggaccctcccacacacctgcaccctagcttcgtgcttctctctccggactctcattatccaacccgctgcctccatttctctagatctgtgctctccgatgtggcagtcagtaaccataggtgactaaattaaactaaaataaaatagaatgaaacacaaaattcaattcctcggctgaactagccacatttcaactgctcagtagatacgtgtggttagtggctgccatactggacagctcggggcattttcactgtcaaagaaagttctattagacagccctgcttgagccctgtttcttcctggcttcggtttccctggggaacttatcgacaatgcaagctcctgggcccacccccagacctcctgaaccaaaagctccagggctggccgtatgatctgtgtggatggcaaactccccaggccattctgggacctaagtttaagaagtgccgtcctcgaactttctgactctaagctcctgagcgggagtcagacttagccctgagcctgcacttcctgttcaggtgcagacactgaacagggtctcaaacaccttcagcatgtgtgttgtgtgctcacgtgccacacagtgtctcatgcacacaacccagtgtacacaccacctacgtgcacacagcatccttccacactgtgtatgtgaacagcttgggccctgcaaacacaaccatctacacacatctacacccccaagcacacacacatggtccgtgccatgtcacctccatagggaaaggcttctctccaagtgtgccaggccaggacagccctcccagccatgaatccttactcagctacctcgggttggggtgggagccccagccaaatcctgggctccctgcctgtggctcagccccagctcccaaggcctgcctggctctgtctgaacagaaggtctgggggaagcgaggggtggagtacaataaagggaatgaggacaaacaaaaaaaaaaaaaaaaaaaaaaaaaaaaaaaaaaaaaaaaaaaaaa

SEQ ID NO: 1574 - protein, 399 aa, Homo sapien
MARRFQEELAAFLFEYDTPRMVLVRNKKVGVIFRLIQLVVLVYVIGWVFLYEKGYQTSSGLISSVSVKLKGLAVTQLPGLGPQVWDVADYVFPAQGDNSFVVMTNFIVTPKQTQGYCAEHPEGGICKEDSGCTPGKAKRKAQGIRTGKCVAFNDTVKTCEIFGWCPVEVDDDIPRPALLREAENFTLFIKNSISFPRFKVNRRNLVEEVNAAHMKTCLFHKTLHPLCPVFQLGYVVQESGQNFSTLAEKGGVVGITIDWHCDLDWHVRHCRPIYEFHGLYEEKNLSPGFNFRFARHFVENGTNYRHLFKVFGIRFDILVDGKAGKFDIIPTMTTIGSGIGIFGVATVLCDLLLLHILPKRHYYKQKKFKYAEDMGPGAAERDLAATSSTLGLQENMRTS

SEQ ID NO: 1575 - DNA, 2772 bp, Homo sapien
atggagagggggctgccgctcctctgcgccgtgctcgccctcgtcctcgccccggccggcgcttttcgcaacgatgaatgtggcgatactataaaaattgaaagccccgggtaccttacatctcctggttatcctcattcttatcacccaagtgaaaaatgcgaatggctgattcaggctccggacccataccagagaattatgatcaacttcaaccctcacttcgatttggaggacagagactgcaagtatgactacgtggaagtcttcgatggagaaaatgaaaatggacattttaggggaaagttctgtggaaagatagcccctcctcctgttgtgtcttcagggccatttctttttatcaaatttgtctctgactacgaaacacatggtgcaggattttccatacgttatgaaattttcaagagaggtcctgaatgttcccagaactacacaacacctagtggagtgataaagtcccccggattccctgaaaaatatcccaacagccttgaatgcacttatattgtctttgcgccaaagatgtcagagattatcctggaatttgaaagctttgacctggagcctgactcaaatcctccaggggggatgttctgtcgctacgaccggctagaaatctgggatggattccctgatgttggccctcacattgggcgttactgtggacagaaaacaccaggtcgaatccgatcctcatcgggcattctctccatggttttttacaccgacagcgcgatagcaaaagaaggtttctcagcaaactacagtgtcttgcagagcagtgtctcagaagatttcaaatgtatggaagctctgggcatggaatcaggagaaattcattctgaccagatcacagcttcttcccagtatagcaccaactggtctgcagagcgctcccgcctgaactaccctgagaatgggtggactcccggagaggattcctaccgagagtggatacaggtagacttgggccttctgcgctttgtcacggctgtcgggacacagggcgccatttcaaaagaaaccaagaagaaatattatgtcaagacttacaagatcgacgttagctccaacggggaagactggatcaccataaaagaaggaaacaaacctgttctctttcagggaaacaccaaccccacagatgttgtggttgcagtattccccaaaccactgataactcgatttgtccgaatcaagcctgcaacttgggaaactggcatatctatgagatttgaagtatacggttgcaagataacagattatccttgctctggaatgttgggtatggtgtctggacttatttctgactcccagatcacatcatccaaccaaggagacagaaactggatgcctgaaaacatccgcctggtaaccagtcgctctggctgggcacttccacccgcacctcattcctacatcaatgagtggctccaaatagacctgggggaggagaagatcgtgaggggcatcatcattcagggtgggaagcaccgagagaacaaggtgttcatgaggaagttcaagatcgggtacagcaacaacggctcggactggaagatgatcatggatgacagcaaacgcaaggcgaagtcttttgagggcaacaacaactatgatacacctgagctgcggacttttccagctctctccacgcgattcatcaggatctaccccgagagagccactcatggcggactggggctcagaatggagctgctgggctgtgaagtggaagcccctacagctggaccgaccactcccaacgggaacttggtggatgaatgtgatgacgaccaggccaactgccacagtggaacaggtgatgacttccagctcacaggtggcaccactgtgctggccacagaaaagcccacggtcatagacagcaccatacaatcagagtttccaacatatggttttaactgtgaatttggctggggctctcacaagaccttctgccactgggaacatgacaatcacgtgcagctcaagtggagtgtgttgaccagcaagacgggacccattcaggatcacacaggagatggcaacttcatctattcccaagctgacgaaaatcagaagggcaaagtggctcgcctggtgagccctgtggtttattcccagaactctgcccactgcatgaccttctggtatcacatgtctgggtcccacgtcggcacactcagggtcaaactgcgctaccagaagccagaggagtacgatcagctggtctggatggccattggacaccaaggtgaccactggaaggaagggcgtgtcttgctccacaagtctctgaaactttatcaggtgattttcgagggcgaaatcggaaaaggaaaccttggtgggattgctgtggatgacattagtattaataaccacatttcacaagaagattgtgcaaaaccagcagacctggataaaaagaacccagaaattaaaattgatgaaacagggagcacgccaggatacgaaggtgaaggagaaggtgacaagaacatctccaggaagccaggcaatgtgttgaagaccttagaacccatcctcatcaccatcatagccatgagcgccctgggggtcctcctgggggctgtctgtggggtcgtgctgtactgtgcctgttggcataatgggatgtcagaaagaaacttgtctgccctggagaactataactttgaacttgtggatggtgtgaagttgaaaaaagacaaactgaatacacagagtacttattcggaggcatga

SEQ ID NO: 1576 - protein, 923 aa, Homo sapien
MERGLPLLCAVLALVLAPAGAFRNDECGDTIKIESPGYLTSPGYPHSYHPSEKCEWLIQAPDPYQRIMINFNPHFDLEDRDCKYDYVEVFDGENENGHFRGKFCGKIAPPPVVSSGPFLFIKFVSDYETHGAGFSIRYEIFKRGPECSQNYTTPSGVIKSPGFPEKYPNSLECTYIVFAPKMSEIILEFESFDLEPDSNPPGGMFCRYDRLEIWDGFPDVGPHIGRYCGQKTPGRIRSSSGILSMVFYTDSAIAKEGFSANYSVLQSSVSEDFKCMEALGMESGEIHSDQITASSQYSTNWSAERSRLNYPENGWTPGEDSYREWIQVDLGLLRFVTAVGTQGAISKETKKKYYVKTYKIDVSSNGEDWITIKEGNKPVLFQGNTNPTDVVVAVFPKPLITRFVRIKPATWETGISMRFEVYGCKITDYPCSGMLGMVSGLISDSQITSSNQGDRNWMPENIRLVTSRSGWALPPAPHSYINEWLQIDLGEEKIVRGIIIQGGKHRENKVFMRKFKIGYSNNGSDWKMIMDDSKRKAKSFEGNNNYDTPELRTFPALSTRFIRIYPERATHGGLGLRMELLGCEVEAPTAGPTTPNGNLVDECDDDQANCHSGTGDDFQLTGGTTVLATEKPTVIDSTIQSEFPTYGFNCEFGWGSHKTFCHWEHDNHVQLKWSVLTSKTGPIQDHTGDGNFIYSQADENQKGKVARLVSPVVYSQNSAHCMTFWYHMSGSHVGTLRVKLRYQKPEEYDQLVWMAIGHQGDHWKEGRVLLHKSLKLYQVIFEGEIGKGNLGGIAVDDISINNHISQEDCAKPADLDKKNPEIKIDETGSTPGYEGEGEGDKNISRKPGNVLKTLEPILITIIAMSALGVLLGAVCGVVLYCACWHNGMSERNLSALENYNFELVDGVKLKKDKLNTQSTYSEA

SEQ ID NO: 1577 - DNA, 575 bp, Homo sapien
ctggcatcccgagaagccaggaagcagtgagcccaggagtcctcggccagccctgcctgcccaccaggaggatgaaggtctccgtggctgccctctcctgcctcatgcttgttactgcccttggatcccaggcccgggtcacaaaagatgcagagacagagttcatgatgtcaaagcttccattggaaaatccagtacttctggacagattccatgctactagtgctgactgctgcatctcctacaccccacgaagcatcccgtgttcactcctggagagttactttgaaacgaacagcgagtgctccaagccgggtgtcatcttcctcaccaagaaggggcgacgtttctgtgccaaccccagtgataagcaagttcaggtttgcatgagaatgctgaagctggacacacggatcaagaccaggaagaattgaacttgtcaaggtgaagggacacaagttgccagccaccaactttcttgcctcaactaccttcctgaattatttttttaagaagcatttattcttgtgttctggatttagagcaattcatctaataaacagtttctcactttt

SEQ ID NO: 1578 - protein, 120 aa, Homo sapien
MKVSVAALSCLMLVTALGSQARVTKDAETEFMMSKLPLENPVLLDRFHATSADCCISYTPRSIPCSLLESYFETNSECSKPGVIFLTKKGRRFCANPSDKQVQVCMRMLKLDTRIKTRKN

SEQ ID NO: 1579 - DNA, 1823 bp, Homo sapien
cccaagccttcgggtagggtgccttcagccgctacaagagcagaagcagtgggcattggatggagctgagtacaggaccatacaggctaattgcaccggcacagtgaaataagatttcgccgcctatcatctgctaactgctacggactcaggctcagaaaggcctgcgcttcacccaggaatcggatataacatcatctgggtacccatggccagctgtgacttctccatccgcacctacacctatgcagacacccctgatgatttccagttgcacaacttcagcctcccagaggaagataccaagctcaagatacccctgattcaccgagccctgcagttggcccagcgtcccgtttcactccttgccagcccctggacatcacccactcggctcaagaccaggggagcggggaatgggaaggggccactcaagggacagcccagagacatctaccaccagacctgggccagatacattgtgaagttcctggatgcctatgctgagcacaagttacagttctgggcagtgacagctgaaaatgagccttctgctgggctgttgagtggataccccttccagtgcctgggcttcacccctgaacatcagcgagacttcattgcccgtgacctaggtcctacccttgccaacggtactcaccacaatgtccgcctactcatgctggatgaccaacgcttgctgctgccccactgggcaaaggtggtactgacagacccagaagcagctaagtatgttcatggtattgctgtacattggtacctggactttctggctccagccaaagccaccctaagggagacacaccacctgttccccaacaccatgctctttgcctcagaggcctgtgtgggttccaagttctgggagcagagtgtgcggctaggctcctgggatcgagggatgcagtacagccacagcatcatcacaaacctcctgtaccatgtggtcggctggaccgactggaacccatcattgtagacatcaccaagcacacgttttacaaacagcccatgttctaccaccttggccacttcagcaagttcattcctgagggctcccagagagtggggctggttgccagtcagaagaacgacccggacgcagtggcactgatgcatcccgatggctctgctgttgtggtcgtgctaaaccgctcctctaaggatgtgcctcttaccatcaaggatcctgctgtgggcttcctggagacaatctcacctggctactccattcacacctacctgtggcgtcgccagtgatggagcagatactcaaggaggcactgggctcagcctgggcattaaagggacagagtcagctcacacgctgtctgtgactaaagagggcacaacagggccagcgtgacgttacagcgacgtaagcccaggggcaatggtttgggtgactcactttcccctctaggcggtgccaggggctggaggcccctagaaaaagatcagtaagccccagtgtccccccagcccccatgcttatgtgaacatgcgctgtgtgctgcttgctttggaaactgggcctgggtccaggcctagggtgagctcactgtccgtacaaacacaagatcagggctgagggtaaggaaaagaagagactaggaaagctgggcccaaaactggagactgtttgtctttcctggagatgcagaactgggcccgtggagcagcagtgtcagcatcagggcggaagccttaaagcagcagcgggtgtgcccaggcacccagatgattcctatggcaccagccaggaaaaatggcagctcttaaaggagaaaatgtttgagccc

SEQ ID NO: 1580 - protein, 263 aa, Homo sapien
MASCDFSIRTYTYADTPDDFQLHNFSLPEEDTKLKIPLIHRALQLAQRPVSLLASPWTSPTRLKTRGAGNGKGPLKGQPRDIYHQTWARYIVKFLDAYAEHKLQFWAVTAENEPSAGLLSGYPFQCLGFTPEHQRDFIARDLGPTLANGTHHNVRLLMLDDQRLLLPHWAKVVLTDPEAAKYVHGIAVHWYLDFLAPAKATLRETHHLFPNTMLFASEACVGSKFWEQSVRLGSWDRGMQYSHSIITNLLYHVVGWTDWNPSL

SEQ ID NO: 1581 - DNA, 2445 bp, Homo sapien
cgcagctcaacctgagctacacagccagatgcgagatgcttctctgctgatctgagtctgcctgcagcatggaccttggtcttccctgaagcatctccagggctggagggacgactgccatgcacctagggcttatccatccgcagagcagggcagtgggaggagacgctatgacccccatcctcacggtcctgatctgtctcgggctgagtctgggcccccggacccacgtgcaggcagggaccctccccaagcccacactctgggctgagccaggctctgtgatcacccaggggagtcccgtgaccctctggtgtcaggggatcctggagacccaggagtaccgtctgtatagagaaaagaaaacagcaccctggattacacggatcccacaggagattgtgaagaagggccagttccccatcccgtccatcacctgggaacacaccgggcggtatcgctgtttctacggtagccacactgcaggctggtcagagcccagtgaccccctggagctggtggtgacaggagcctacatcaaacccaccctctcggctctacccagccctgtggtgacctcaggagggaacgtgaccctccattgtgtctcacaggtggcatttggcagcttcattctgtgtaaggaaggagaagatgaacacccacaatgcctgaactcacagccccgtacccatgggtggtcccgggccatcttctctgtgggccccgtgagcccgagtcgcaggtggtcgtacaggtgctatgcttatgactcgaactctccccatgtgtggtctctacccagtgatctcctggagctcctggtcccaggagcagctgagaccctcagcccaccacaaaacaagtccgattccaaggctggagcagctaacaccctcagcccatcacaaaacaagactgcctcacacccccaggattacacagtggagaatctcatccgcatgggcatagctggcttggtcctggtggtcctcgggattctgctatttgaggctcagcacagccagagaagcctctgagatgcagccgggaggtgaacagcagagagaagaatgtacccttcagagtggtggagccttgggaacagatctgatgatgccaggaggttccgggagacaatttagggctgatgctatctggactgtctgccaatcatttttagagggaggaatcagtgttggattgcagagacattttctggagtgatccatgaaggaccattaacatgtgatacctttcctctctattaatgttgacttcccttggttggatcctcttctttccccacccccagacagacatgaggctacatcccacatggcagcgttgggtccacacctctgcacatctgtgtgctctggtccatggtgtgtaacacagtcttctttattactcattgccatactccctggtgtgctttactgagcctccatctcttcaattcagagttccaaacgtgcttcagtaactaaatcaatgggagagtatcggatttcaaccaggaaaagataaatccaccctgatgccctgacaccctctctgaaccctacgagcccttccctccttctcacatgctacctgtgcagcttctccttagatcattgtgtaaccatcactgccatcctgttccacacatggtcatcaccctacacccattcagcagccactccccattccctcttccctccagcacctgctaaccacaaatgtgctttctgtctctacggatttgcctattctgtctgaaaacatttcaatctcctttgacctgtgagctcctcacttcgagacttcctgcctttccaggcagaaccaaagtacaccacgtcaaaagcaatgataggcatttgcagtgtgttggtgatccacgaaaggaaaatcacggaagcaggatagaaatccagctgcagacaagacctcaggtcgatgaatcttgacaagcagttgagctgtttttttctactcacctaggacagtcaggcagaagtatgcaaaatgactggggctgattcttttctgaattgtcgcaaacagcaagaggacttgagtcctagcattaaagagttcaacatgtctaggtccaagaccactgttgtgtttgaaggatgtaaaaccctgctgcataggatggaatatttggagggaggatcctgaaaaacatgagggatcaaatagtcctcaactttctaggacaaagggagcagctatttgccatctaccctccagaataaagaaatcttatcattcaccatctaccctctagaataaagaaatcttatcattcgccatctaccctgtagaataaagaaatcttatcattcaccgtctaccctctagagtaaacaaatcttatcattcaccatctaccctctagaataaagaaatcttatcattcgccatctaccctctagaataaagaaatct

SEQ ID NO: 1582 - protein, 289 aa, Homo sapien [sequence omitted]

SEQ ID NO: 1583 - DNA, 1637 bp, Homo sapien
aagaactggcctgtacattttcaaggaattcttgagaggttcttggagagattctgggagccaaacactccattgggatcctagctgttttagagaacaacttgtaatggagccttcatctcttgagctgccggctgacacagtgcagcgcattgcggctgaactcaaatgccacccaacggatgagagggtggctctccacctagatgaggaagataagctgaggcacttcagggagtgcttttatattcccaaaatacaggatctgcctccagttgatttatcattagtgaataaagatgaaaatgccatctatttcttgggaaattctcttggccttcaaccaaaaatggttaaaacatatcttgaagaagaactagataagtgggccaaaatagcagcctatggtcatgaagtggggaagcgtccttggattacaggagatgagagtattgtaggccttatgaaggacattgtaggagccaatgagaaagaaatagccctaatgaatgctttgactgtaaatttacatcttctaatgttatcattttttaagcctacgccaaaacgatataaaattcttctagaagccaaagccttcccttctgatcattatgctattgagtcacaactacaacttcacggacttaacattgaagaaagtatgcggatgataaagccaagagagggggaagaaaccttaagaatagaggatatccttgaagtaattgagaaggaaggagactcaattgcagtgatcctgttcagtggggtgcatttttacactggacagcactttaatattcctgccatcacaaaagctggacaagcgaagggttgttatgttggctttgatctagcacatgcagttggaaatgttgaactctacttacatgactggggagttgattttgcctgctggtgttcctacaagtatttaaatgcaggagcaggaggaattgctggtgccttcattcatgaaaagcatgcccatacgattaaacctgcattagtgggatggtttggccatgaactcagcaccagatttaagatggataacaaactgcagttaatccctggggtctgtggattccgaatttcaaatcctcccattttgttggtctgttccttgcatgctagtttagagatctttaagcaagcgacaatgaaggcattgcggaaaaaatctgttttgctaactggctatctggaatacctgatcaagcataactatggcaaagataaagcagcaaccaagaaaccagttgtgaacataattactccgtctcatgtagaggagcgggggtgccagctaacaataacattttctgttccaaacaaagatgttttccaagaactagaaaaaagaggagtggtttgtgacaagcggaatccaaatggcattcgagtggctccagttcctctctataattctttccatgatgtttataaatttaccaatctgctcacttctatacttgactctgcagaaacaaaaaattagcagtgttttctagaacaacttaagcaaattatactgaaagctgctgtggttatttcagtattattcgatttttaattattgaaagtatgtcaccattgaccacatgtaactaacaataaataatataccttac

SEQ ID NO: 1584 - protein, 465 aa, Homo sapien
MEPSSLELPADTVQRIAAELKCHPTDERVALHLDEEDKLRHFRECFYIPKIQDLPPVDLSLVNKDENAIYFLGNSLGLQPKMVKTYLEEELDKWAKIAAYGHEVGKRPWITGDESIVGLMKDIVGANEKEIALMNALTVNLHLLMLSFFKPTPKRYKILLEAKAFPSDHYAIESQLQLHGLNIEESMRMIKPREGEETLRIEDILEVIEKEGDSIAVILFSGVHFYTGQHFNIPAITKAGQAKGCYVGFDLAHAVGNVELYLHDWGVDFACWCSYKYLNAGAGGIAGAFIHEKHAHTIKPALVGWFGHELSTRFKMDNKLQLIPGVCGFRISNPPILLVCSLHASLEIFKQATMKALRKKSVLLTGYLEYLIKHNYGKDKAATKKPVVNIITPSHVEERGCQLTITFSVPNKDVFQELEKRGVVCDKRNPNGIRVAPVPLYNSFHDVYKFTNLLTSILDSAETKN

SEQ ID NO: 1585 - DNA, 1232 bp, Homo sapien
tttcccgagatcaccaagatgctgggcgccgagtggagcaagctgcagccaacggaaaagcagcggtacctggatgaggccgagagagagaagcagcagtacatgaaggagctgcgggcgtaccagcagtctgaagcctataagatgtgcacggagaagatccaggagaagaagatcaagaaagaagactcgagctctgggctcatgaacactctcctgaatggacacaagggtggggactgcgatggcttctccaccttcgatgttcccatcttcactgaagagttcttggaccaaaacaaagcgcgtgaggcggagcttcggcgcttgcggaagatgaatgtggccttcgaggagcagaacgcggtactgcagaggcaaaacgcagagcatgagcagcgcgcgcgagcgtctggagcaggagctggcgctggaggagcggaggacgctggcgctgcagcagcagctccaggccgtgcgccaggcgctcaccgccagcttcgcctcactgccggtgccgggcacgggcgaaacgcccacgctgggcactctggacttctacatggcccggcttcacggagccatcgagcgcgaccccgcccagcacgagaagctcatcgtccgcatcaaggaaatcctggcccaggtcgccagcgagcacctgtgaggagtgggcgggcccacgatgcagaggagaagctgtgggcgcggccctgccacaccccaccccgtggacgagaggctgggggtccaccctttggggcctggtcccatcctgcacctttgggggctccagcccccctaaaattaaatttctgcagcatccctttagctttcaatctccccagccccctgaacccggaaaaagcactcgctgcgcgatacacccagaagaacctcacagccgagggtgcccctcctcggaggacagccacgcgctacactggctctccgggccacccccaggacacagggcagacgaaacccacccccagcacacggcaggaccccccaaattactcactacggggggctgtgccataggccacacaggaagctgccttgtggggacttacctggggtgtcccccgcatgcctgtaccccagatgggtgggggccggctttgcccatcctgctctcctccagccgagggaccctggtgggggtggctccttctcactgctggatccggactttttaaataaaaacaagtaaaatttgtgttttaaaa

SEQ ID NO: 1586 - protein, 341 aa, Homo sapien
MLGAEWSKLQPTEKQRYLDEAEREKQQYMKELRAYQQSEAYKMCTEKIQEKKIKKEDSSSGLMNTLLNGHKGGDCDGFSTFDVPIFTEEFLDQNKAREAELRRLRKMNVAFEEQNAVLQRQNAEHEQRARASGAGAGAGGAEDAGAAAAAPGRAPGAHRQLRLTAGAGHGRNAHAGHSGLLHGPASRSHRARPRPAREAHRPHQGNPGPGRQRAPVRSGRAHDAEEKLWARPCHTPPRGREAGGPPFGAWSHPAPLGAPAPLKLNFCSIPLAFNLPSPLNPEKALAARYTQKNLTAEGAPPRRTATRYTGSPGHPQDTGQTKPTPSTRQDPPNYSLRGAVP

SEQ ID NO: 1587 - DNA, 2631 bp, Homo sapien
ggcacgaggaacaacctatttgcaaagttggcgcaaacattcctgcctgacaggaccatggacacaggttgtagagatagagatggctctggctgtgcattcagcagattctgtagatagaattaataggacttggatgggattgtggtgagagaaagtgaaatgaaagataagttctagtttggaagttttaacaactgaatgtttaaactcaaatagacacaaaatattggaagagtggcaggtttgggaggatgagacaatcaactgtttggttgagccacgttaggtttgaaatgtctacgggatcccgtggggagaggttatatcagactggagcaccagagagaggccaaggctgatagtttagatgaaaagagagcatgatattttaagccctgagactggataatatcacctatagaaagactatatagagataagagaggtggggaacaagtaaaagctgcgggacactcctaaatttagagtcaaatttagagcagaaaatactagcaaaggggactgaaaagcggtggccaattgagcttcaaatgcaagtgaaagtgtgttgtgtgtacatttatcatctcatggcacaggaaaaacgtgatttaaggagaaggaagcgatccaatgggaagaagagatccaatggatcctctatcacgaagatattgagataagaaccaatatggatttgcacccactgcatttgcagccttgaggtcataagcatcctcaggaaaatgcaccaggtgctgctggcaagatggaaaccaacttctccactcctctgaatgaatatgaagaagtgtcctatgagtctgctggctacactgttctgcggatcctcccattggtggtgcttggggtcacctttgtcctcggggtcctgggcaatgggcttgtgatctgggtggctggattccggatgacacgcacagtcaccaccatctgttacctgaacctggccctggctgacttttctttcacggccacattaccattcctcattgtctccatggccatgggagaaaaatggccttttggctggttcctgtgtaagttaattcacatcgtggtggacatcaacctctttggaagtgtcttcttgattggtttcattgcactggaccgctgcatttgtgtcctgcatccagtctgggcccagaaccaccgcactgtgagtctggccatgaaggtgatcgtcggaccttggattcttgctctagtccttaccttgccagttttcctctttttgactacagtaactattccaaatggggacacatactgtactttcaactttgcatcctggggtggcacccctgaggagaggctgaaggtggccattaccatgctgacagccagagggattatccggtttgtcattggctttagcttgccgatgtccattgttgccatctgctatgggctcattgcagccaagatccacaaaaagggcatgattaaatccagccgtcccttacgggtcctcactgctgtggtggcttctttcttcatctgttggtttccctttcaactggttgcccttctgggcaccgtctggctcaaagagatgttgttctatggcaagtacaaaatcattgacatcctggttaacccaacgagctccctggccttcttcaacagctgcctcaaccccatgctttacgtctttgtgggccaagacttccgagagagactgatccactccctgcccaccagtctggagagggccctgtctgaggactcagccccaactaatgacacggctgccaattctgcttcacctcctgcagagactgagttacaggcaatgtgaggatggggtcagggatattttgagttctgttcatcctaccctaatgccagttccagcttcatctacccttgagtcatattgaggcattcaaggatgcacagctcaagtatttattcaggaaaaatgcttttgtgtccctgatttggggctaagaaatagacagtcaggctactaaaatattagtgttattttttgttttttgacttctgcctataccctggggtaagtggagttgggaaatacaagaagagaaagaccagtggggatttgtaagacttagatgagatagcgcataataaggggaagactttaaagtataaagtaaaatgtttgctgtaggttttttatagctattaaaaaaaatcagattatggaagttttcttctatttttagtttgctaagagttttctgtttctttttcttacatcatgagtggactttgcattttatcaaatgcattttctacatgtattaagatggtcatattattcttcttcttttatgtaaatcattataaataatgttcattaagttctgaatgttaaactactcttgaattcctggaataaaccacacttagtcctgatgtactttaaatatttatatctcacaggagttggttagaatttctgtgtttatgtttatatactgttatttcactttttctactatccttgctaagttttcatagaaaataaggaacaaagagaaacttgtaatggtctctgaaaaggaattgagaagtaattcctctgattctgttttctggtgttatatctttattaaatattcagaaaaattc

SEQ ID NO: 1588 - protein, 351 aa, Homo sapien
METNFSTPLNEYEEVSYESAGYTVLRILPLVVLGVTFVLGVLGNGLVIWVAGFRMTRTVTTICYLNLALADFSFTATLPFLIVSMAMGEKWPFGWFLCKLIHIVVDINLFGSVFLIGFIALDRCICVLHPVWAQNHRTVSLAMKVIVGPWILALVLTLPVFLFLTTVTIPNGDTYCTFNFASWGGTPEERLKVAITMLTARGIIRFVIGFSLPMSIVAICYGLIAAKIHKKGMIKSSRPLRVLTAVVASFFICWFPFQLVALLGTVWLKEMLFYGKYKIIDILVNPTSSLAFFNSCLNPMLYVFVGQDFRERLIHSLPTSLERALSEDSAPTNDTAANSASPPAETELQAM

SEQ ID NO: 1589 - DNA, 1600 bp, Homo sapien
cggagcgaggcagcgcgcccggctcccgcgccatggggcggctggtggctgtgggcttgctggggatcgcgctggcgctcctgggcgagaggcttctggcactcagaaatcgacttaaagcctccagagaagtagaatctgtagaccttccacactgccacctgattaaaggaattgaagctggctctgaagatattgacatacttcccaatggtctggctttttttagtgtgggtctaaaattcccaggactccacagctttgcaccagataagcctggaggaatactaatgatggatctaaaagaagaaaaaccaagggcacgggaattaagaatcagtcgtgggtttgatttggcctcattcaatccacatggcatcagcactttcatagacaacgatgacacagtttatctctttgttgtaaaccacccagaattcaagaatacagtggaaatttttaaatttgaagaagcagaaaattctctgttgcatctgaaaacagtcaaacatgagcttcttccaagtgtgaatgacatcacagctgttggaccggcacatttctatgccacaaatgaccactacttctctgatcctttcttaaagtatttagaaacatacttgaacttacactgggcaaatgttgtttactacagtccaaatgaagttaaagtggtagcagaaggatttgattcagcaaatgggatcaatatttcacctgatgataagtatatctatgttgctgacatattggctcatgaaattcatgttttggaaaaacacactaatatgaatttaactcagttgaaggtacttgagctggatacactggtggataatttatctattgatccttcctcgggggacatctgggtagtctgtcatcctaatggccagaagctcttcgtgtatgacccgaacaatcctccctcgtcagaggttctccgcatccagaacattctatctgagaagcctacagtgactacagtttatgccaacaatgggtctgttctccaaggaagttctgtagcctcagtgtatgatgggaagctgctcataggcactttataccacagagccttgtattgtgaactctaaattgtacttttggcatgaaagtgcgataacttaacaattaattttctatgaaattgctaattctgagggaatttaaccagcaacattgacccagaaatgtatggcatgtgtagttaattttattccagtaaggaacggcccttttagttcttagagcacttttaacaaaaaaggaaaatgaacaggttctttaaaatgccaagcaagggacagaaaagaaagctgctttcgaataaagtgaatacattttgcacaaagtaagcctcacctttgccttccaactgccagaacatggattccactgaaatagagtgaattatatttccttaaaatgtgagtgacctcacttctggcactgtgactactatggctgtttagaactactgataataacgtattttgatgttttgtacttacatctttgtttaccattaaaaagttggagttatattaaagactaactaaaatcccaaaaaaaaaaaaaaaaaaaaaaaaaaaaaaaa

SEQ ID NO: 1590 - protein, 354 aa, Homo sapien
MGRLVAVGLLGIALALLGERLLALRNRLKASREVESVDLPHCHLIKGIEAGSEDIDILPNGLAFFSVGLKFPGLHSFAPDKPGGILMMDLKEEKPRARELRISRGFDLASFNPHGISTFIDNDDTVYLFVVNHPEFKNTVEIFKFEEAENSLLHLKTVKHELLPSVNDITAVGPAHFYATNDHYFSDPFLKYLETYLNLHWANVVYYSPNEVKVVAEGFDSANGINISPDDKYIYVADILAHEIHVLEKHTNMNLTQLKVLELDTLVDNLSIDPSSGDIWVVCHPNGQKLFVYDPNNPPSSEVLRIQNILSEKPTVTTVYANNGSVLQGSSVASVYDGKLLIGTLYHRALYCEL

SEQ ID NO: 1591 - DNA, 1743 bp, Homo sapien
cagtatccctcctgacaaaactaacaaaaatcctgttagccaaataatcagccacattcatatttaccgtcaaagtttttatcctcattttacagcagtggagagcgattgccccgggtcccacgttaggaagagagagaactgggatttgcacccaggcaatctggggacagagctgtgatcacaactccatgagtcagggccgagccagccccttcaccaccagccggccgcgccccgggaaggaagtttgtggcggaggaggttcgtacgggaggagggggaggcgcccacgcatctggggctgactcgctctttcgcaaaacgtctgggaggagtccctggggccacaaaactgcctccttcctgaggccagaaggagagaagacgtgcagggaccccgcgcacaggagctgccctcgcgacatgggtcacccgccgctgctgccgctgctgctgctgctccacacctgcgtcccagcctcttggggcctgcggtgcatgcagtgtaagaccaacggggattgccgtgtggaagagtgcgccctgggacaggacctctgcaggaccacgatcgtgcgcttgtgggaagaaggagaagagctggagctggtggagaaaagctgtacccactcagagaagaccaacaggaccctgagctatcggactggcttgaagatcaccagccttaccgaggttgtgtgtgggttagacttgtgcaaccagggcaactctggccgggctgtcacctattcccgaagccgttacctcgaatgcatttcctgtggctcatcagacatgagctgtgagaggggccggcaccagagcctgcagtgccgcagccctgaagaacagtgcctggatgtggtgacccactggatccaggaaggtgaagaagggcgtccaaaggatgaccgccacctccgtggctgtggctaccttcccggctgcccgggctccaatggtttccacaacaacgacaccttccacttcctgaaatgctgcaacaccaccaaatgcaacgagggcccaatcctggagcttgaaaatctgccgcagaatggccgccagtgttacagctgcaaggggaacagcacccatggatgctcctctgaagagactttcctcattgactgccgaggccccatgaatcaatgtctggtagccaccggcactcacgaaccgaaaaaccaaagctatatggtaagaggctgtgcaaccgcctcaatgtgccaacatgcccacctgggtgacgccttcagcatgaaccacattgatgtctcctgctgtactaaaagtggctgtaaccacccagacctggatgtccagtaccgcagtggggctgctcctcagcctggccctgcccatctcagcctcaccatcaccctgctaatgactgccagactgtggggaggcactctcctctggacctaaacctgaaatccccctctctgccctggctggatccgggggacccctttgcccttccctcggctcccagccctacagacttgctgtgtgacctcaggccagtgtgccgacctctctgggcctcagttttcccagctatgaaaacagctatctcacaaagttgtgtgaagcagaagagaaaagctggaggaaggccgtgggcaatgggagagctcttgttattattaatattgttgccgctgttgtgttgttgttattaattaatattcatattatttattttatacttacataaagattttgtaccagtgg

SEQ ID NO: 1592 - protein, 335 aa, Homo sapien
MGHPPLLPLLLLLHTCVPASWGLRCMQCKTNGDCRVEECALGQDLCRTTIVRLWEEGEELELVEKSCTHSEKTNRTLSYRTGLKITSLTEVVCGLDLCNQGNSGRAVTYSRSRYLECISCGSSDMSCERGRHQSLQCRSPEEQCLDVVTHWIQEGEEGRPKDDRHLRGCGYLPGCPGSNGFHNNDTFHFLKCCNTTKCNEGPILELENLPQNGRQCYSCKGNSTHGCSSEETFLIDCRGPMNQCLVATGTHEPKNQSYMVRGCATASMCQHAHLGDAFSMNHIDVSCCTKSGCNHPDLDVQYRSGAAPQPGPAHLSLTITLLMTARLWGGTLLWT

SEQ ID NO: 1593 - DNA, 1348 bp, Homo sapien
  Unsure 1104: Unknown base
ggatcttaacaccacgccttgagcaagtcgcaagagcgggaggacacagaccaggaaccgagaagggacaagcacatggaagccagcccagcatccgggcccagacacttgatggatccacacatattcacttccaactttaacaatggcattggaaggcataagacctacctgtgctacgaagtggagcgcctggacaatggcacctcggtcaagatggaccagcacaggggctttctacacaaccaggctaagaatcttctctgtggcttttacggccgccatgcggagctgcgcttcttggacctggttccttctttgcagttggacccggcccagatctacagggtcacttggttcatctcctggagcccctgcttctcctggggctgtgccggggaagtgcgtgcgttccttcaggagaacacacacgtgagactgcgcatcttcgctgcccgcatctatgattacgaccccctatataaggaggcgctgcaaatgctgcgggatgctggggcccaagtctccatcatgacctacgatgaatttaagcactgctgggacacctttgtggaccaccagggatgtcccttccagccctgggatggactagatgagcacagccaagccctgagtgggaggctgcgggccattctccagaatcagggaaactgaaggatgggcctcagtctctaaggaaggcagagacctgggttgagcagcagaataaaagatcttcttccaagaaatgcaaacagaccgttcaccaccatctccagctgctcacagacgccagcaaagcagtatgctcccgatcaagtagatttttaaaaaatcagagtgggccgggcgcggctgcacgcctgtaatcccagcactttggaggccaaggcgggtggatcacgaggtcaggagatcgagaccatcctggctaacacggtgaaaccctgtctctactaaaaatacaaaaaattagccaggggtggtgcgggcgcctgtagtcccagctactctggaggctgaggcaggagagtacgtgaacccgggaggcagagcttgcggtgagccgagattgcgctactgcactccagcctgggcgacagnaccagactccatctcaaaaaaaaaaaaaaccagactgaattaattttaactgaaaatttctcttatgttccaaggtacacaataggtaagattatgctcaatattctcagaataattttcaatgtattaatgaaatgaaatgataatttggcttcatatctagactaacacaaaattaagaatcttccataattgcttttgctcagtaactgtgtcatgaattgcaagagtttccacaaacact

SEQ ID NO: 1594 - protein, 199 aa, Homo sapien
MEASPASGPRHLMDPHIFTSNFNNGIGRHKTYLCYEVERLDNGTSVKMDQHRGFLHNQAKNLLCGFYGRHAELRFLDLVPSLQLDPAQIYRVTWFISWSPCFSWGCAGEVRAFLQENTHVRLRIFAARIYDYDPLYKEALQMLRDAGAQVSIMTYDEFKHCWDTFVDHQGCPFQPWDGLDEHSQALSGRLRAILQNQGN

SEQ ID NO: 1595 - DNA, 1287 bp, Homo sapien
ggcacgaggcacaggcgattggttttagtggtaggtgtgtggggatctgttctggtcatctggatgctggtcatcggtgtgcagtattgatcaggacctgcaaacccaaaagcttatgggagctggcacgtcacaaaaagaaaaaaaccaagccacagcctggcagctctgatcaggaaagtgaggaacagcaacaattccggaacattttcaagcagatagcaggagatgacatggagatctgtgcagatgagctcaagaaggtccttaacacagtcgtgaacaaacacaaggacctgaagacacacgggttcacactggagtcctgccgtagcatgattgcgctcatggatacagatggctctggaaagctcaacctgcaggagttccaccacctctggaacaagattaaggcctggcagaaaattttcaaacactatgacacagaccagtccggcaccatcaacagctacgagatgcgaaatgcagtcaacgacgcaggattccacctcaacaaccagctctatgacatcattaccatgcggtacgcagacaaacacatgaacatcgactttgacagtttcatctgctgcttcgttaggctggagggcatgttcagagcttttcatgcatttgacaaggatggagatggtatcatcaagctcaacgttctggagtggctgcagctcaccatgtatgcctgaaccaggctggcctcatccaaagccatgcaggatcactcaggatttcagtttcaccctctattttcaaagccatttacctcaaaggacccagcagctacacccctacaggcttccaggcacctcatcagtcatgttcctcctccattttaccccctacccatccttgatcggtcatgcctagcctgaccctttagtaaagcaatgaggtaggaagaacaaacccttgtccctttgccatgtggaggaaagtgcctgcctctggtccgagccgcctcggttctgaagcgagtgctcctgcttaccttgctctaggctgtctgcagaagcacctgccggtggcactcagcacctccttgtgctagagccctccatcaccttcacgctgtcccaccatgggccaggaaccaaaccagcactgggttctactgctgtggggtaaactaactcagtggaatagggctggttactttgggctgtccaactcataagtttggctgcattttgaaaaaagctgatctaaataaaggcatgtgtatggctggaaaaaaaaaaaaaaaaaaaaaaaaaaaaaaaaaaaaaaaaa

SEQ ID NO: 1596 - protein, 156 aa, Homo sapien
MEICADELKKVLNTVVNKHKDLKTHGFTLESCRSMIALMDTDGSGKLNLQEFHHLWNKIKAWQKIFKHYDTDQSGTINSYEMRNAVNDAGFHLNNQLYDIITMRYADKHMNIDFDSFICCFVRLEGMFRAFHAFDKDGDGIIKLNVLEWLQLTMYA

SEQ ID NO: 1597 - DNA, 3257 bp, Homo sapien
aacaggcgtgacgccagttctaaacttgaaacaaaacaaaacttcaaagtacaccaaaatagaacctccttaaagcataaatctcacggagggtctcggccgccagtggaaggagccaccgcccccgccccgaccatggccgaggagctggtcttagagaggtgtgatctggagctggagaccaatggccgagaccaccacacggccgacctgtgccgggagaagctggtggtgcgacggggccagcccttctggctgaccctgcactttgagggccgcaactaccaggccagtgtagacagtctcaccttcagtgtcgtgaccggcccagcccctagccaggaggccgggaccaaggcccgttttccactaagagatgctgtggaggagggtgactggacagccaccgtggtggaccagcaagactgcaccctctcgctgcagctcaccaccccggccaacgcccccatcggcctgtatcgcctcagcctggaggcctccactggctaccagggatccagctttgtgctgggccacttcattttgctcttcaacgcctggtgcccagcggatgctgtgtacctggactcggaagaggagcggcaggagtatgtcctcacccagcagggctttatctaccagggctcggccaagttcatcaagaacataccttggaattttgggcagtttcaagatgggatcctagacatctgcctgatccttctagatgtcaaccccaagttcctgaagaacgccggccgtgactgctcccggcgcagcagccccgtctacgtgggccgggtgggtagtggcatggtcaactgcaacgatgaccagggtgtgctgctgggacgctgggacaacaactacggggacggcgtcagccccatgtcctggatcggcagcgtggacatcctgcggcgctggaagaaccacggctgccagcgcgtcaagtatggccagtgctgggtcttcgccgccgtggcctgcacagtgctgaggtgcctaggcatccctacccgcgtcgtgaccaactacaactcggcccatgaccagaacagcaaccttctcatcgagtacttccgcaatgagtttggggagatccagggtgacaagagcgagatgatctggaacttccactgctgggtggagtcgtggatgaccaggccggacctgcagccggggtacgagggctggcaggccctggacccaacgccccaggagaagagcgaaggaacgtactgctgtggcccagttccagttcgtgccatcaaggagggcgacctgagcaccaagtacgatgcgccctttgtctttgcggaggtcaatgccgacgtggtagactggatccagcaggacgatgggtctgtgcacaaatccatcaaccgttccctgatcgttgggctgaagatcagcactaagagcgtgggccgagacgagcgggaggatatcacccacacctacaaatacccagaggggtcctcagaggagagggaggccttcacaagggcgaaccacctgaacaaactggccgagaaggaggagacagggatggccatgcggatccgtgtgggccagagcatgaacatgggcagtgactttgacgtctttgcccacatcaccaacaacaccgctgaggagtacgtctgccgcctcctgctctgtgcccgcaccgtcagctacaatgggatcttggggcccgagtgtggcaccaagtacctgctcaacctaaccctggagcctttctctgagaagagcgttcctctttgcatcctctatgagaaataccgtgactgccttacggagtccaacctcatcaaggtgcgggccctcctcgtggagccagttatcaacagctacctgctggctgagagggacctctacctggagaatccagaaatcaagatccggatccttggggagcccaagcagaaacgcaagctggtggctgaggtgtccctgcagaacccgctccctgtggccctggaaggctgcaccttcactgtggagggggccggcctgactgaggagcagaagacggtggagatcccagaccccgtggaggcaggggaggaagttaaggtgagaatggacctcgtgccgctccacatgggcctccacaagctggtggtgaacttcgagagcgacaagctgaaggctgtgaagggcttccggaatgtcatcattggccccgcctaagggacccctgctcccagcctgctgagagcccccaccttgatcccaatccttatcccaagctagtgagcaaaatatgccccttattgggccccagaccccagggcagggtgggcagcctatgggggctctcggaaatggaatgtgcccctggcccatctcagcctcctgagcctgtgggtccccactcaccccctttgctgtgaggaatgctctgtgccagaaacagtgggagccctgacctgtgctgactggggctggggtgagagaggaaagacctacattccctctcctgcccagatgccctttggaaagccattgaccacccaccatattgtttgatctacttcatagctccttggagcaggcaaaaaagggacagcatgcccttggctggatcaggaatccagctccctagactgcatcccgtacctcttcccatgactgcacccagctccaggggcccttgggacacccagagctgggtggggacagtgataggcccaaggtcccctccacatcccagcagcccaagcttaatagccctccccctcaacctcaccattgtgaagcacctactatgtgctgggtgcctcccacacttgctggggctcacggggcctccaacccatttaatcaccatgggaaactgttgtgggcgctgcttccaggataaggagactgaggcttagagagaggaggcagccccctccacaccagtggcctcgtggttataagcaaggctgggtaatgtgaaggcccaagagcagagtctgggcctctgactctgagtccactgctccatttataaccccagcctgacctgagactgtcgcagaggctgtctggggcctttatcaaaaaaagactcagccaagacaaggaggtagagaggggactgggggactgggagtcagagccctggctgggttcaggtcccacgtctggccagcgactgccttctcctctctgggcctttgtttccttgttggtcagaggagtgattgaacctgctcatctccaaggatcctctccactccatgtttgcaatacacaattcc

SEQ ID NO: 1598 - protein, 687 aa, Homo sapien
MAEELVLERCDLELETNGRDHHTADLCREKLVVRRGQPFWLTLHFEGRNYQASVDSLTFSVVTGPAPSQEAGTKARFPLRDAVEEGDWTATVVDQQDCTLSLQLTTPANAPIGLYRLSLEASTGYQGSSFVLGHFILLFNAWCPADAVYLDSEEERQEYVLTQQGFIYQGSAKFIKNIPWNFGQFQDGILDICLILLDVNPKFLKNAGRDCSRRSSPVYVGRVGSGMVNCNDDQGVLLGRWDNNYGDGVSPMSWIGSVDILRRWKNHGCQRVKYGQCWVFAAVACTVLRCLGIPTRVVTNYNSAHDQNSNLLIEYFRNEFGEIQGDKSEMIWNFHCWVESWMTRPDLQPGYEGWQALDPTPQEKSEGTYCCGPVPVRAIKEGDLSTKYDAPFVFAEVNADVVDWIQQDDGSVHKSINRSLIVGLKISTKSVGRDEREDITHTYKYPEGSSEEREAFTRANHLNKLAEKEETGMAMRIRVGQSMNMGSDFDVFAHITNNTAEEYVCRLLLCARTVSYNGILGPECGTKYLLNLTLEPFSEKSVPLCILYEKYRDCLTESNLIKVRALLVEPVINSYLLAERDLYLENPEIKIRILGEPKQKRKLVAEVSLQNPLPVALEGCTFTVEGAGLTEEQKTVEIPDPVEAGEEVKVRMDLVPLHMGLHKLVVNFESDKLKAVKGFRNVIIGPA

SEQ ID NO: 1599 - DNA, 2000 bp, Homo sapien
tgcggccgcacctgcaggcgcagagtaggtatggaagatccctcgagatccattgtgctctaaagccgccgggggtccgtgtcctgtctcggttggccggacccgggcccgagcccgagcagtagccggcgccatgtcggtggtgggcatagacctgggcttccagagctgctacgtcgctgtggcccgcgccggcggcatcgagactatcgctaatgagtatagcgaccgctgcacgccggcttgcatttcttttggtcctaagaatcgttcaattggagcagcagctaaaagccaggtaatttctaatgcaaagaacacagtccaaggatttaaaagattccatggccgagcattctctgatccatttgtggaggcagaaaaatctaaccttgcatatgatattgtgcagtggcctacaggattaacaggtataaaggtgacatatatggaggaagagcgaaattttaccactgagcaagtgactgccatgcttttgtccaaactgaaggagacagccgaaagtgttcttaagaagcctgtagttgactgtgttgtttcggttccttgtttctatactgatgcagaaagacgatcagtgatggatgcaacacagattgctggtcttaattgcttgcgattaatgaatgaaaccactgcagttgctcttgcatatggaatctataagcaggatcttcctcgcttagaagagaaaccaagaaatgtagtttttgtagacatgggccactctgcttatcaagtttctgtatgtgcatttaatagaggaaaactgaaagttctggccactgcatttgacacgacattgggaggtagaaaatttgatgaagtgttagtaaatcacttctgtgaagaatttgggaagaaatacaagctagacattaagtccaaaatccgtgcattattacgactctctcaggagtgtgagaaactcaagaaattgatgagtgcaaatgcttcagatctccctttgagcattgaatgttttatgaatgatgttgatgtatctggaactatgaatagaggcaaatttctggagatgtgcaatgatctcttagctagagtggagccaccacttcgtagtgttttggaacaaaccaagttaaagaaagaagatatttatgcagtggagatagttggtggtgctacacgaatccctgcggtaaaagagaagatcagcaaatttttcggtaaagaacttagtacaacattaaatgctgatgaagctgtcactcgaggctgtgcattgcagtgtgccatcttatcgcctgctttcaaagtcagagaattttctatcactgatgtagtaccatatccaatatctctgagatggaattctccagctgaagaagggtcaagtgactgtgaagtcttttccaaaaatcatgctgctcctttctctaaagttcttacattttatagaaaggaacctttcactcttgaggcctactacagctctcctcaggatttgccctatccagatcctgctatagctcagttttcagttcagaaagtcactcctcagtctgatggctccagttcaaaagtgaaagtcaaagttcgagtaaatgtccatggcattttcagtgtgtccagtgcatctttagtggaggttcacaagtctgaggaaaatgaggagccaatggaaacagatcagaatgcaaaggaggaagagaagatgcaagtggaccaggaggaaccacatgttgaagagcaacagcagcagacaccagcagaaaataaggcagagtctgaagaaatggagacctctcaagctggatccaaggataaaaagatggaccaaccaccccaatgccaagaaggcaaaagtgaagaccagtactgtggacctgccaatcgagaatcagctatatggcagatagacagagagatgctcaacttgtacattgaaaatgagggtaagatgatcatgcaggataaactggagaaggagcggaatgatgctaagaacgcagtggagg

SEQ ID NO: 1600 - protein, 701 aa, Homo sapien [sequence omitted]

SEQ ID NO: 1601 - DNA, 1582 bp, Homo sapien
ggcacgaggcttccccggtgcagacacccggcgaagcccacccggttttcccagcggcatttccgatgacagcttcggggctacgtgtcctgtgctgtcggagacgcacaggaagcaaagtttgtgagaagccttgggggcgactttgccttgggcacccgcatttgtgcgtctgcgaggtgcctcggtgtgcgcggagctagtttcccagtttcccgggcccctcccttctccgagcccctctagcgatttgtttaggaaaagtgatgacatgaactagtagtggagaatcgcagcgccgctccccgccctggggagggaggggagccccggagagcctgccggtgggagctggaagcaggctcccggctgagcgccccagcccgaaaggcagggtctgggtgcgggaagagggctcggagctgccttcctgctgccttggggccgcccagatgagggaacagcccgatttgcctggttctgattctccaggctgtcgtggttgtggaatgcaaacgccagcacataatggaaacaggacctgaagacccttccagcatgccagaggaaagttcccccaggcggaccccgcagagcattccctaccaggacctccctcacctggtcaatgcagacggacagtacctcttctgcaggtactggaaacccacaggcacacccaaggccctcatctttgtgtcccatggagccggagagcacagtggccgctatgaagagctggctcggatgctgatggggctggacctgctggtgttcgcccacgaccatgttggccacggacagagcgaaggggagaggatggtagtgtctgacttccacgttttcgtcagggatgtgttgcagcatgtggattccatgcagaaagactaccctgggcttcctgtcttccttctgggccactccatgggaggcgccatcgccatcctcacggccgcagagaggccgggccacttcgccggcatggtactcatttcgcctctggttcttgccaatcctgaatctgcaacaactttcaaggtccttgctgcgaaagtgctcaaccttgtgctgccaaacttgtccctcgggcccatcgactccagcgtgctctctcggaataagacagaggtcgacatttataactcagaccccctgatctgccgggcagggctgaaggtgtgcttcggcatccaactgctgaatgccgtctcacgggtggagcgcgccctccccaagctgactgtgcccttcctgctgctccagggctctgccgatcgcctatgtgacagcaaaggggcctacctgctcatggagttagccaagagccaggacaagactctcaagatttatgaaggtgcctaccatgttctccacaaggagcttcctgaagtcaccaactccgtcttccatgaaataaacatgtgggtctctcaaaggacagccacggcaggaactgcgtccccaccctgaatgcattggccggtgcccggctcatggtctgggggatgcaggcaggggaagggcagagatggcttctcagatatggcttgcaaaaaaaaaaaaaaaaaaaaaaaaaaaaaaa

SEQ ID NO: 1602 - protein, 313 aa, Homo sapien
METGPEDPSSMPEESSPRRTPQSIPYQDLPHLVNADGQYLFCRYWKPTGTPKALIFVSHGAGEHSGRYEELARMLMGLDLLVFAHDHVGHGQSEGERMVVSDFHVFVRDVLQHVDSMQKDYPGLPVFLLGHSMGGAIAILTAAERPGHFAGMVLISPLVLANPESATTFKVLAAKVLNLVLPNLSLGPIDSSVLSRNKTEVDIYNSDPLICRAGLKVCFGIQLLNAVSRVERALPKLTVPFLLLQGSADRLCDSKGAYLLMELAKSQDKTLKIYEGAYHVLHKELPEVTNSVFHEINMWVSQRTATAGTASPP

SEQ ID NO: 1603 - DNA, 2043 bp, Homo sapien
ggcacgagggacgactccacgctcgcttgccctgattctctccgccctgcacttttgccagctgaaggtccagggagaagagcaacctggcccacagcctgcaggtggcccagcagcaggccgaggagctgccgcaggagcgggagaagctgcaggttgcccaggaggagctgcagcgccagcgggaccggctggaggaagagcaggaagaggcggtgcagaatggcgcacgggttcgccgggagcttgagcgcagccatagacaactagagcagctggaagggaagcgctcagtcctggccaaggagctggtggaggtgagggaggcgctgagccgcgccacgctgcaacgggacatgctgcaggccgagaagaccgaggtggccgaggcgctgaccaaggctgaggctggccgcatggagctcgagctctccgtgaccaagttgagggcagaggaggcctccctgcaggactccctgtccaagctgagcgccctcaatgagagccttgctcaggacaagttggatctgaactgccttgtcacccagctggaggaagaaaaggccacgctgcagggccggcagcggcaggcggagcaggaggccacagtggcgccggcagagcaggagtggctggaggagctgtggttggagcaggaggtggcacggcagggcctggagggctccctatgagtggcggagcaggcccaggaggcgctggagcaacagctccccacactgcaccatgagctcagttggctgcaggagcagctagcacaggggatcatgttcggacccccaggccagcccactgctgctccttggcactttcacggccctggcgtgtccccgtcatagtccttatcagtcccttgtatttacctggtcaccctccatctctgagggtatgggggccagatggctcttgctgccctgatgttttggggggtctgcctgggcccctcctggtgtgtcacacgcgtccagtcctggccccctaggaggcagcatggcgggagctggaggccgagcgggcccagctgcagagtcagctgcagcgtgagcaggaggagctgctggcccggcggaaggctgagaaggaacagctgagtgaggagattgctgccctgcagcaggagcatgacgagggcctcctcctggccgagagcgagaagcagcaggccttgtctctgaaggagtctgagaagatggcgctgtcagagaagttgatgggtacacggcacagcctggccaccatctccctggagatggagcggcagaaaccagatgcccagagccggcaggagcaggaccgggtaggcctgccgtcgtagggaggcttgcggagcaggagcgccctctttccaccgagctatcccgcggtttccagcatcccatctggcggactcctcttcctctctcttctcctactctgggtcttctatcctggtgttccttgaatgcctatcttccttttgtgcctcggaacctctcacgcctgccacaagttactcttttccttggtagttctgaactttaaataaggtaatgcctgtaagaatgccataaatgctcaataattgtcatctgttattattttcatcagtaacatcatctgaatcatcagtattgtctgcttttaacagctgcatttttcattgtccaaatatagtcacatacatttgaccattttataattattgaataataaattcgttctgctattttacaatgaaaaataatgctgcagagagcatttttgcacatgtatcgtggcagatgtaggccagaggctcttctttatccatcctatggccaacctatgaatgtatacacgtttaatgagattttgccagcaatcaaagccttcagggaaaatgtccctagctctttactacatcagatcaaggactctggataattggcataacatcctggaatagctgaaacagagatattattctctgctgtcctctgttgtctttgtcttttcacgtcttaataaaagtgctggtgacaagagtgtaaaaaaaaaaaaaaaaaa

SEQ ID NO: 1604 - protein, 111 aa, Homo sapien
MLQAEKTEVAEALTKAEAGRMELELSVTKLRAEEASLQDSLSKLSALNESLAQDKLDLNCLVTQLEEEKATLQGRQRQAEQEATVAPAEQEWLEELWLEQEVARQGLEGSL

SEQ ID NO: 1605 - DNA, 1947 bp, Homo sapien; identical to SEQ ID NO: 931

SEQ ID NO: 1606 - protein, 377 aa, Homo sapien; identical to SEQ ID NO: 932

SEQ ID NO: 1607 - DNA, 2486 bp, Homo sapien
acccggagcgggaagatggcggcggcgcaggaggcggacggggcccgcagcgccgtggtggcggccgggggaggcagctccggtcaggtgaccagcaatggcagcatcgggagggacccgccagcggagacccagcctcagaacccaccggcccagccggcacccaatgcctggcaggtcatcaaaggtgtgctgtttaggatcttcatcatctgggccatcagcagttggttccgccgagggccggcccctcaggaccaggcgggccccggaggagccccacgcgtcgccagccgcaacctgttccccaaagacactttaatgaacctgcatgtgtacatctcagagcacgagcactttacagacttcaacgccacgtcggcactcttctgggaacagcacgatcttgtgtatggcgactggactagcggcgagaactcagacggctgctacgagcactttgctgagctcgatatcccacagagcgtccagcagaacggctccatctacatccacgtttacttcaccaagagtggcttccacccagacccccggcagaaggccctgtaccgccggcttgccacagtccacatgtcccggatgatcaacaaatacaagcgcagacgatttcagaaaaccaagaacctgctgacaggagagacagaagcggacccagaaatgatcaagagggctgaggactatgggcctgtggaggtgatctcccattggcaccccaacatcaccatcaacatcgtggacgaccacacgccgtgggtgaagggcagtgtgccccctcccctggatcaatatgtgaagttcgacgccgtgagcggtgactactatcccatcatctacttcaatgactactggaacctgcagaaggactactaccccatcaacgagagcctggccagcctgccgctccgcgtctccttctgcccactctcgctttggcgctggcagctctatgctgcccagagcaccaagtcgccctggaacttcctgggcgatgagttgtacgagcagtcagatgaggagcaggactcggtgaaggtggccctgctggagaccaacccctacctgctggcgctcaccatcatcgtgtctatcgttcacagtgtcttcgagttcctggccttcaagaatgatatccagttctggaacagccggcagtccctggagggcctgtccgtgcgctccgtcttcttcggcgttttccagtcattcgtggtcctcctctacatcctggacaacgagaccaacttcgtggtccaggtcagcgtcttcattggggtcctcatcgacctctggaagatcaccaaggtcatggacgtccggctggaccgagagcacagggtggcaggaatcttcccccgcctatccttcaaggacaagtccacgtatatcgagtcctcgaccaaagtgtatgatgatatggcattccggtacctgtcctggatcctcttcccgctcctgggctgctatgccgtctacagtcttctgtacctggagcacaagggctggtactcctgggtgctcagcatgctctacggcttcctgctgaccttcggcttcatcaccatgacgccccagctcttcatcaactacaagctcaagtctgtggcccaccttccctggcgcatgctcacctacaaggccctcaacacattcatcgacgacctgttcgcctttgtcatcaagatgcccgttatgtaccggatcggctgcctgcgggacgatgtggttttcttcatctacctctaccaacggtggatctaccgcgtcgaccccacccgagtcaacgagtttggcatgagtggagaagaccccacagctgccgcccccgtggccgaggttcccacagcagcaggggccctcacgcccacacctgcacccaccacgaccaccgccaccagggaggaggcctccacgtccctgcccaccaagcccacccagggggccagctctgccagcgagccccaggaagcccctccaaagccagcagaggacaagaaaaaggattagtcgagactggtcctcacctgctccggctcctggcgaccactacccctgcgtcccggccccctcgcctcccctccctgtcgccctttccctggacagatcaggccggggcggtgggaggcccgcctcaggtcagggcccagcgtgtgacgtaggggccggggcaggccagggtttgtttgtggaggcgctgtctgtccctctgtccctctgtgtttccagccatctcgccctgccagcccagcaccactgggaatcatggtgaagctgatgcagcgttgccgagggggtgggttgggcgggggtggggccgggcccccctacgggatgcccacggccgttcatcatcttgtccctcgtccccctaccacactccccctcctagaccgccgccctttaacacagtctggatttaataaattcatatgggtgtttaacttaaactcaaaaaaaaaaaaaaaaaa

SEQ ID NO: 1608 - protein, 669 aa, Homo sapien
MAAAQEADGARSAVVAAGGGSSGQVTSNGSIGRDPPAETQPQNPPAQPAPNAWQVIKGVLFRIFIIWAISSWFRRGPAPQDQAGPGGAPRVASRNLFPKDTLMNLHVYISEHEHFTDFNATSALFWEQHDLVYGDWTSGENSDGCYEHFAELDIPQSVQQNGSIYIHVYFTKSGFHPDPRQKALYRRLATVHMSRMINKYKRRRFQKTKNLLTGETEADPEMIKRAEDYGPVEVISHWHPNITINIVDDHTPWVKGSVPPPLDQYVKFDAVSGDYYPIIYFNDYWNLQKDYYPINESLASLPLRVSFCPLSLWRWQLYAAQSTKSPWNFLGDELYEQSDEEQDSVKVALLETNPYLLALTIIVSIVHSVFEFLAFKNDIQFWNSRQSLEGLSVRSVFFGVFQSFVVLLYILDNETNFVVQVSVFIGVLIDLWKITKVMDVRLDREHRVAGIFPRLSFKDKSTYIESSTKVYDDMAFRYLSWILFPLLGCYAVYSLLYLEHKGWYSWVLSMLYGFLLTFGFITMTPQLFINYKLKSVAHLPWRMLTYKALNTFIDDLFAFVIKMPVMYRIGCLRDDVVFFIYLYQRWIYRVDPTRVNEFGMSGEDPTAAAPVAEVPTAAGALTPTPAPTTTTATREEASTSLPTKPTQGASSASEPQEAPPKPAEDKKKD

SEQ ID NO: 1609 - DNA, 4728 bp, Homo sapien
cttcctccctcccgctcgcttcttctcacgccgggagcaggctcgcgcctcgcaccgctgccccgcgagcagctcctcttctcccgaggcgcgcggggcgcccccgcgagccccgcggctgagaccccgcagcctggaggagggctgtccggggctttgggttgcacgttttcaaaaaatacctaatggtgaaaatgagacaatgattcctgtattgacatcaaaaaaagcaagtgaattaccagtcagtgaagttgcaagcattctccaagctgatcttcagaatggtctaaacaaatgtgaagttagtcataggcgagcctttcatggctggaatgagtttgatattagtgaagatgagccactgtggaagaagtatatttctcagtttaaaaatccccttattatgctgcttctggcttctgcagtcatcagtgttttaatgcatcagtttgatgatgccgtcagtatcactgtggcaatacttatcgttgttacagttgcctttgttcaggaatatcgttcagaaaaatctcttgaagaattgagtaaacttgtgccaccagaatgccattgtgtgcgtgaaggaaaattggagcatacacttgcccgagacttggttccaggtgatacagtttgcctttctgttggggatagagttcctgctgacttacgcttgtttgaggctgtggatctttccattgatgagtccagcttgacaggtgagacaacgccttgttctaaggtgacagctcctcagccagctgcaactaatggagatcttgcatcgagaagtaacattgcctttatgggaacactggtcagatgtggcaaagcaaagggtgttgtcattggaacaggagaaaattctgaatttggggaggtttttaaaatgatgcaagcagaagaggcaccaaaaacccctctgcagaagagcatggacctcttaggaaaacaactttccttttactcctttggtataataggaatcatcatgttggttggctggttactgggaaaagatatcctggaaatgtttactattagtgtaagtttggctgtagcagcaattcctgaaggtctccccattgtggtcacagtgacgctagctcttggtgttatgagaatggtgaagaaaagggccattgtgaaaaagctgcctattgttgaaactctgggctgctgtaatgtgatttgttcagataaaactggaacactgacgaagaatgaaatgactgttactcacatatttacttcagatggtctgcatgctgaggttactggagttggctataatcaatttggggaagtgattgttgatggtgatgttgttcatggattctataacccagctgttagcagaattgttgaggcgggctgtgtgtgcaatgatgctgtaattagaaacaatactctaatggggaagccaacagaaggggccttaattgctcttgcaatgaagatgggtcttgatggacttcaacaagactacatcagaaaagctgaatacccttttagctctgagcaaaagtggatggctgttaagtgtgtacaccgaacacagcaggacagaccagagatttgttttatgaaaggtgcttacgaacaagtaattaagtactgtactacataccagagcaaagggcagaccttgacacttactcagcagcagagagatgtgtaccaacaagagaaggcacgcatgggctcagcgggactcagagttcttgctttggcttctggtcctgaactgggacagctgacatttcttggcttggtgggaatcattgatccacctagaactggtgtgaaagaagctgttacaacactcattgcctcaggagtatcaataaaaatgattactggagattcacaggagactgcagttgcaatcgccagtcgtctgggattgtattccaaaacttcccagtcagtctcaggagaagaaatagatgcaatggatgttcagcagctttcacaaatagtaccaaaggttgcagtattttacagagctagcccaaggcacaagatgaaaattattaagtcgctacagaagaacggttcagttgtagccatgacaggagatggagtaaatgatgcagttgctctgaaggctgcagacattggagttgcgatgggccagactggtacagatgtttgcaaagaggcagcagacatgatcctagtggatgatgattttcaaaccataatgtctgcaatcgaagagggtaaagggatttataataacattaaaaatttcgttagattccagctgagcacgagtatagcagcattaactttaatctcattggctacattaatgaactttcctaatcctctcaatgccatgcagattttgtggatcaatattattatggatggacccccagctcagagccttggagtagaaccagtggataaagatgtcattcgtaaacctcctcgcaactggaaagacagcattttgactaaaaacttgatacttaaaatacttgtttcatcaataatcattgtttgtgggactttgtttgtcttctggcgtgagctacgagacaatgtgattacacctcgagacacaacaatgaccttcacatgctttgtgttttttgacatgttcaatgcactaagttccagatcccagaccaagtctgtgtttgagattggactctgcagtaatagaatgttttgctatgcagttcttggatccatcatgggacaattactagttatttactttcctccgcttcagaaggtttttcagactgagagcctaagcatactggatctgttgtttcttttgggtctcacctcatcagtgtgcatagtggcagaaattataaagaaggttgaaaggagcagggaaaagatccagaagcatgttagttcgacatcatcatcttttcttgaagtatgatgcatattgcattattttatttgcaaactaggaattgcagtctgaggatcatttagaagggcaagttcaagaggatatgaagatttgagaactttttaactattcattgactaaaaatgaacattaatgttaaagacttaagactttaacctgctggcagtcccaaatgaaattatgcaactttgatatcatattccttgatttaaattggcttttgtgattgagtgaaactttataaagcatatggtcagttatttaattaaaaaggcaaaacctgaaccaccttctgcacttaaagaagtctacagtacaaatacactatctatcttagatagatatatttttttttatttttaaatattgtactatttatggtggtggggctttcttactaatacacaaataaatttaatcatttcaaaggcattctatttggtttagaagttgattcccaggagtgccatatttcagctactgtatttcctttttcttgtaatgtaagcagctcagataccatgtgctatcatttttgtatcaagttttttgcacaggatgtgaccactgtcagatcactgttcttttctttctttttgtgattgaaaagcctatactacaatttgaagtaaatttttgtttttcttagtaagtgtaaatggttgctttatttttattttaaaaaggtatgtctttggtttggcagaattcatgcagggctatcaagtggtgttctagggtaacagtgtccataattaacgcttagtcatagagtcaaaaacatttaagactgattgggttgaagtttataataaattatattaacatgtcttcctttttgaggtaaagatatatactttgtcaaatatcattttgtcatcctctaaatataaatccaaatacctcagctaagtaattgtattttattatttttactgttatgtatgtttttaatcatatttcttaggaagtataggctactggacttagaataaaaagtccccaaacccaaacaaatggtttatgaaccagagtatatgtggaagattctttgctggtcttgctctgtgtgcatctgaagcttctttggcctagattttagcacaaacctgagtatatctcttctactttcatcatgtgttctgtaccttctttttgtttcattgggcatgctagggaaataggtggattttgtgtgtaatgccatcagtttttatgaaagcttgatgaggtataggtcatttgttttgagtatgtgggccagaaatttaaaattagaaatttgtttttctgttgagtatataaacaaaaattggtcccaattctaacaggtttaatccttcttgaagccaataagttttatcttttataatctgtcaggatgaaccactccttagcttttatccaatattaaactgcaagtgttagcactgaaatattgtcattgatagggaaaatatctattctttgagtcattgttactgaggcagttgagtgtaaggagctggctgcagtttattctacttaaccctttaaggctgaattgtcaaatgtacattgttccatgtcgttagatggaacatggaagccattgtctaatcaactctatcattagtgacttgatgtctcataccttaattttgtaatgatttttattctctgttacaaagacttgaaatacgtattaaatgcacgttaatgttttgctttgcattttaggttcagattatgacttgattgaaataaatgtgcctatacattcatttgctttgtactataaaaataaaaatgatttcttaagttaaaaaaaaaaaaaaaaa

SEQ ID NO: 1610 - protein, 903 aa, Homo sapien
MIPVLTSKKASELPVSEVASILQADLQNGLNKCEVSHRRAFHGWNEFDISEDEPLWKKYISQFKNPLIMLLLASAVISVLMHQFDDAVSITVAILIVVTVAFVQEYRSEKSLEELSKLVPPECHCVREGKLEHTLARDLVPGDTVCLSVGDRVPADLRLFEAVDLSIDESSLTGETTPCSKVTAPQPAATNGDLASRSNIAFMGTLVRCGKAKGVVIGTGENSEFGEVFKMMQAEEAPKTPLQKSMDLLGKQLSFYSFGIIGIIMLVGWLLGKDILEMFTISVSLAVAAIPEGLPIVVTVTLALGVMRMVKKRAIVKKLPIVETLGCCNVICSDKTGTLTKNEMTVTHIFTSDGLHAEVTGVGYNQFGEVIVDGDVVHGFYNPAVSRIVEAGCVCNDAVIRNNTLMGKPTEGALIALAMKMGLDGLQQDYIRKAEYPFSSEQKWMAVKCVHRTQQDRPEICFMKGAYEQVIKYCTTYQSKGQTLTLTQQQRDVYQQEKARMGSAGLRVLALASGPELGQLTFLGLVGIIDPPRTGVKEAVTTLIASGVSIKMITGDSQETAVAIASRLGLYSKTSQSVSGEEIDAMDVQQLSQIVPKVAVFYRASPRHKMKIIKSLQKNGSVVAMTGDGVNDAVALKAADIGVAMGQTGTDVCKEAADMILVDDDFQTIMSAIEEGKGIYNNIKNFVRFQLSTSIAALTLISLATLMNFPNPLNAMQILWINIIMDGPPAQSLGVEPVDKDVIRKPPRNWKDSILTKNLILKILVSSIIIVCGTLFVFWRELRDNVITPRDTTMTFTCFVFFDMFNALSSRSQTKSVFEIGLCSNRMFCYAVLGSIMGQLLVIYFPPLQKVFQTESLSILDLLFLLGLTSSVCIVAEIIKKVERSREKIQKHVSSTSSSFLEV

SEQ ID NO: 1611 - DNA, 660 bp, Homo sapien
cctcctacaccttcagcaccctgcccagctactcctgctggaccaaagggaagggtgtttgttagccctcttgcaaagaagttggcagtagagaaagggattgatcttacacaagtaaaagggacaggaccagatggtagaatcaccaagaaggatatcgactcttttgtgcctagtaaagttgctcctgctccggcagctgttgtgcctcccacaggtcctggaatggcaccagttcctacaggtgtcttcacagatatcccaatcagcaacattcgtcgggttattgcacagcgattaatgcaatcaaagcaaaccatacctcattattacctttctatcgatgtaaatatgggagaagttttgttggtacggaaagaacttaataagatattagaagggagaagcaaaatttctgtcaatgacttcatcataaaacgttcagctttggcatgtttaaaagttcccgaagcaaattcttcttggatggacacagttataagacaaaatcatgttgttgatgtcagtgttgcggtcagtactcctgcaggactcatcacacctattgtgtttaatgcacatataaaaggagtggaaaccattgctaatgatgttgtttctttagcaaccaaagcaagagagggtaaactacagccacat

SEQ ID NO: 1612 - DNA, 5221 bp, Homo sapien
ataaaagggggctgaggaaataccggacacggtcacccgttgccagctctagcctttaaattcccggctcggggacctccacgcaccgcggctagcgccgacaaccagctagcgtgcaaggcgccgcggctcagcgcgtaccggcgggcttcgaaaccgcagtcctccggcgaccccgaactccgctccggagcctcagccccctggaaagtgatcccggcatccgagagccaagatgccggcccacttgctgcaggacgatatctctagctcctataccaccaccaccaccattacagcgcctccctccagggtcctgcagaatggaggagataagttggagacgatgcccctctacttggaagacgacattcgccctgatataaaagatgatatatatgaccccacctacaaggataaggaaggcccaagccccaaggttgaatatgtctggagaaacatcatccttatgtctctgctacacttgggagccctgtatgggatcactttgattcctacctgcaagttctacacctggctttggggggtattctactattttgtcagtgccctgggcataacagcaggagctcatcgtctgtggagccaccgctcttacaaagctcggctgcccctacggctctttctgatcattgccaacacaatggcattccagaatgatgtctatgaatgggctcgtgaccaccgtgcccaccacaagttttcagaaacacatgctgatcctcataattcccgacgtggctttttcttctctcacgtgggttggctgcttgtgcgcaaacacccagctgtcaaagagaaggggagtacgctagacttgtctgacctagaagctgagaaactggtgatgttccagaggaggtactacaaacctggcttgctgctgatgtgcttcatcctgcccacgcttgtgccctggtatttctggggtgaaacttttcaaaacagtgtgttcgttgccactttcttgcgatatgctgtggtgcttaatgccacctggctggtgaacagtgctgcccacctcttcggatatcgtccttatgacaagaacattagcccccgggagaatatcctggtttcacttggagctgtgggtgagggcttccacaactaccaccactcctttccctatgactactctgccagtgagtaccgctggcacatcaacttcaccacattcttcattgattgcatggccgccctcggtctggcctatgaccggaagaaagtctccaaggccgccatcttggccaggattaaaagaaccggagatggaaactacaagagtggctgagtttggggtccctcaggtttcctttttcaaaaaccagccaggcagaggttttaatgtctgtttattaactactgaataatgctaccaggatgctaaagatgatgatgttaacccattccagtacagtattcttttaaaattcaaaagtattgaaagccaacaactctgcctttatgatgctaagctgatattatttcttctcttatcctctctctcttctaggcccattgtcctccttttcactttattgctatcgccctcctttcccttattgcctcccaggcaagcagctggtcagtctttgctcagtgtccagcttccaaagcctagacaacctttctgtagcctaaaacgaatggtctttgctccagataactctctttccttgagctgttgtgagctttgaagtaggtggcttgagctagagataaaacagaatcttctgggtagtcccctgttgattatcttcagcccaggcttttgctagatggaatggaaaagcaacttcatttgacacaaagcttctaaagcaggtaaattgtcgggggagagagttagcatgtatgaatgtaaggatgagggaagcgaagcaagaggaacctctcgccatgatcagacatacagctgcctacctaatgaggacttcaagccccaccacatagcatgcttcctttctctcctggctcggggtaaaaagtggctgcggtgtttggcaatgctaattcaatgccgcaacatatagttgaggccgaggataaagaaaagacattttaagtttgtagtaaaagtggtctctgctggggaagggttttcttttctttttttctttaataacaaggagatttcttagttcatatatcaagaagtcttgaagttgggtgtttccagaattggtaaaaacagcagctcatggaattttgagtattccatgagctgctcattacagttctttcctctttctgctctgccatcttcaggatattggttcttcccctcatagtaataagatggctgtggcatttccaaacatccaaaaaaagggaaggatttaaggaggtgaagtcgggtcaaaaataaaatatatatacatatatacattgcttagaacgttaaactattagagtatttcccttccaaagagggatgtttggaaaaaactctgaaggagaggaggaattagttgggatgccaatttcctctccactgctggacatgagatggagaggctgagggacaggatctataggcagcttctaagagcgaacttcacataggaagggatctgagaacacgttgccaggggcttgagaaggttactgagtgagttattgggagtcttaataaaataaactagatattaggtccattcattaattagttccagtttctccttgaaatgagtaaaaactagaaggcttctctccacagtgttgtgccccttcactcatttttttttgaggagaagggggtctctgttaacatctagcctaaagtatacaactgcctggggggcagggttaggaatctcttcactaccctgattcttgattcctggctctaccctgtctgtcccttttctttgaccagatctttctcttccctgaacgttttcttctttccctggacaggcagcctcctttgtgtgtattcagaggcagtgatgacttgctgtccaggcagctccctcctgcacacagaatgctcagggtcactgaaccactgcttctcttttgaaagtagagctagctgccactttcacgtggcctccgcagtgtctccacctacacccctgtgctcccctgccacactgatggctcaagacaaggctggcaaaccctcccagaaacatctctggcccagaaagcctctctctccctccctctctcatgaggcacagccaagccaagcgctcatgttgagccagtgggccagccacagagcaaaagagggtttattttcagtcccctctctctgggtcagaaccagagggcatgctgaatgccccctgcttacttggtgagggtgccccgcctgagtcagtgctctcagctggcagtgcaatgcttgtagaagtaggaggaaacagttctcactgggaagaagcaagggcaagaacccaagtgcctcacctcgaaaggaggccctgttccctggagtcagggtgaactgcaaagctttggctgagacctgggatttgagataccacaaaccctgctgaacacagtgtctgttcagcaaactaaccagcattccctacagcctagggcagacaatagtatagaagtctggaaaaaaacaaaaacagaatttgagaaccttggaccactcctgtccctgtagctcagtcatcaaagcagaagtctggctttgctctattaagattggaaatgtacactaccaaacactcagtccactgttgagccccagtgctggaagggaggaaggcctttcttctgtgttaattgcgtagaggctacaggggttagcctggactaaaggcatccttgtcttttgagctattcacctcagtagaaaaggatctaagggaagatcactgtagtttagttctgttgacctgtgcacctaccccttggaaatgtctgctggtatttctaattccacaggtcatcagatgcctgcttgataatatataaacaataaaaacaactttcacttcttcctattgtaatcgtgtgccatggatctgatctgtaccatgaccctacataaggctggatggcacctcaggctgagggccccaatgtatgtgtggctgtgggtgtgggtgggagtgtgtctgctgagtaaggaacacgattttcaagattctaaagctcaattcaagtgacacattaatgataaactcagatctgatcaagagtccggatttctaacagtccctgctttggggggtgtgctgacaacttagctcaggtgccttacatcttttctaatcacagtgttgcatatgagcctgccctcactccctctgcagaatccctttgcacctgagaccctactgaagtggctggtagaaaaaggggcctgagtggaggattatcagtatcacgatttgcaggattcccttctgggcttcattctggaaacttttgttagggctgcttttcttaagtgcccacatttgatggagggtggaaataatttgaatgtatttgatttataagtttttttttttttttgggttaaaagatggttgtagcatttaaaatggaaaattttctccttggtttgctagtatcttgggtgtattctctgtaagtgtagctcaaataggtcatcatgaaaggttaaaaaagcgaggtggccatgttatgctggtggttaaggccagggcctctccaaccactgtgccactgacttgctgtgtgaccctgggcaagtcacttaactataaggtgcctcagttttccttctgttaaaatggggataataatactgacctacctcaaagggcagttttgaggcatgactaatgctttttagaaagcattttgggatccttcagcacaggaattctcaagacctgagtattttttataataggaatgtccaccatgaacttgatacgtccgtgtgtcccagatgctgtcattagtctatatggttctccaagaaactgaatgaatccattggagaagcggtggataactagccagacaaaatttgagaatacataaacaacgcattgccacggaaacatacagaggatgccttttctgtgattgggtgggattttttccctttttatgtgggatatagtagttacttgtgacaaaaataattttggaataatttctattaatatcaactctgaagctaattgtactaatctgagattgtgtttgttcataataaaagtgaagtgaatctaaaaaaaaaaaaaaa

SEQ ID NO: 1613 - protein, 359 aa, Homo sapien; identical to SEQ ID NO: 129

SEQ ID NO: 1614 - DNA, 2236 bp, Homo sapien
cgagcggcggcggagcaggcatttccagcagtgaggagacagccagaagcaagctattggagctgaaggaacctgagacagaagctagtcccccctctgaattttactgatgaagaaactgaggccacagagctaaagtgacttttcccaaggtcgcccagcgaggacgtgggacttctcagacgtcaggagagtgatgtgagggagctgtgtgaccatagaaagtgacgtgttaaaaaccagcgctgccctctttgaaagccagggagcatcattcatttagcctgctgagaagaagaaaccaagtgtccgggattcagacctctctgcggccccaagtgttcgtggtgcttccagaggcagggctatgctcacattcatggcctctgacagcgaggaagaagtgtgtgatgagcggacgtccctaatgtcggccgagagccccacgccgcgctcctgccaggagggcaggcagggcccagaggatggagagaacactgcccagtggagaagccaggagaacgaggaggacggtgaggaggaccctgaccgctatgtctgtagtggggttcccgggcggccgccaggcctggaggaagagctgaccctcaaatacggagcgaagcacgtgatcatgctgtttgtgcctgtcactctgtgcatgatcgtggtggtagccaccatcaagtctgtgcgcttctacacagagaagaatggacagctcatctacacgacattcactgaggacacaccctcggtgggccagcgcctcctcaactccgtgctgaacaccctcatcatgatcagcgtcatcgtggttatgaccatcttcttggtggtgctctacaagtaccgctgctacaagttcatccatggctggttgatcatgtcttcactgatgctgctgttcctcttcacctatatctaccttggggaagtgctcaagacctacaatgtggccatggactaccccaccctcttgctgactgtctggaacttcggggcagtgggcatggtgtgcatccactggaagggccctctggtgctgcagcaggcctacctcatcatgatcagtgcgctcatggccctagtgttcatcaagtacctcccagagtggtccgcgtgggtcatcctgggcgccatctctgtgtatgatctcgtggctgtgctgtgtcccaaagggcctctgagaatgctggtagaaactgcccaggagagaaatgagcccatattccctgccctgatatactcatctgccatggtgtggacggttggcatggcgaagctggacccctcctctcagggtgccctccagctcccctacgacccggagatggaagaagactcctatgacagttttggggagccttcataccccgaagtctttgagcctcccttgactggctacccaggggaggagctggaggaagaggaggaaaggggcgtgaagcttggcctcggggacttcatcttctacagtgtgctggtgggcaaggcggctgccacgggcagcggggactggaataccacgctggcctgcttcgtggccatcctcattggcttgtgtctgaccctcctgctgcttgctgtgttcaagaaggcgctgcccgccctccccatctccatcacgttcgggctcatcttttacttctccacggacaacctggtgcggccgttcatggacaccctggcctcccatcagctctacatctgagggacatggtgtgccacaggctgcaagctgcagggaattttcattggatgcagttgtatagttttacactctagtgccatatatttttaagacttttctttccttaaaaaataaagtacgtgtttacttggtgaggaggaggcagaaccagctctttggtgccagctgtttcatcaccagactttggctcccgctttggggagcgcctcgcttcacggacaggaagcacagcaggtttatccagatgaactgagaaggtcagattagggcggggagaagagcatccggcatgagggctgagatgcgcaaagagtgtgctcgggagtggcccctggcacctgggtgctctggctggagaggaaaagccagttccctacgaggagtgttcccaatgctttgtccatgatgtccttgttattttattgcctttagaaactgagtcctgttcttgttacggcagtcacactgctgggaagtggcttaatagtaatatcaataaatagatgagtcctgttagaaaaa

SEQ ID NO: 1615 - protein, 447 aa, Homo sapien
MLTFMASDSEEEVCDERTSLMSAESPTPRSCQEGRQGPEDGENTAQWRSQENEEDGEEDPDRYVCSGVPGRPPGLEEELTLKYGAKHVIMLFVPVTLCMIVVVATIKSVRFYTEKNGQLIYTTFTEDTPSVGQRLLNSVLNTLIMISVIVVMTIFLVVLYKYRCYKFIHGWLIMSSLMLLFLFTYIYLGEVLKTYNVAMDYPTLLLTVWNFGAVGMVCIHWKGPLVLQQAYLIMISALMALVFIKYLPEWSAWVILGAISVYDLVAVLCPKGPLRMLVETAQERNEPIFPALIYSSAMVWTVGMAKLDPSSQGALQLPYDPEMEDSYDSFGEPSYPEVFEPPLTGYPGEELEEEEERGVKLGLGDFIFYSVLVGKAAATGSGDWNTTLACFVAILIGLCLTLLLLAVFKKALPALPISITFGLIFYFSTDNLVRPFMDTLASHQLYI

SEQ ID NO: 1616 - DNA, 2263 bp, Homo sapien
agccagagggacgagctagcccgacgatggcccaggggacattgatccgtgtgaccccagagcagcccacccatgccgtgtgtgtgctgggcaccttgactcagcttgacatctgcagctctgcccctgaggactgcacgtccttcagcatcaacgcctccccaggggtggtcgtggatattgcccacagccctccagccaagaagaaatccacaggttcctccacatggcccctggaccctggggtagaggtgaccctgacgatgaaagcggccagtggtagcacaggcgaccagaaggttcagatttcatactacggacccaagactccaccagtcaaagctctactctacctcaccgcggtggaaatctccctgtgcgcagacatcacccgcaccggcaaagtgaagccaaccagagctgtgaaagatcagaggacctggacctggggcccttgtggacagggtgccatcctgctggtgaactgtgacagagacaatctcgaatcttctgccatggactgcgaggatgatgaagtgcttgacagcgaagacctgcaggacatgtcgctgatgaccctgagcacgaagacccccaaggacttcttcacaaaccatacactggtgctccacgtggccaggtctgagatggacaaagtgagggtgtttcaggccacacggggcaaactgtcctccaagtgcagcgtagtcttgggtcccaagtggccctctcactacctgatggtccccggtggaaagcacaacatggacttctacgtggaggccctcgctttcccggacaccgacttcccggggctcattaccctcaccatctccctgctggacacgtccaacctggagctccccgaggctgtggtgttccaagacagcgtggtcttccgcgtggcgccctggatcatgacccccaacacccagcccccgcaggaggtgtacgcgtgcagtatttttgaaaatgaggacttcctgaagtcagtgactactctggccatgaaagccaagtgcaagctgaccatctgccctgaggaggagaacatggatgaccagtggatgcaggatgaaatggagatcggctacatccaagccccacacaaaacgctgcccgtggtcttcgactctccaaggaacagaggcctgaaggagtttcccatcaaacgagtgatgggtccagattttggctatgtaactcgagggccccaaacagggggtatcagtggactggactcctttgggaacctggaagtgagccccccagtcacagtcaggggcaaggaatacccgctgggcaggattctcttcggggacagctgttatcccagcaatgacagccggcagatgcaccaggccctgcaggacttcctcagtgcccagcaggtgcaggcccctgtgaagctctattctgactggctgtccgtgggccacgtggacgagttcctgagctttgtgccagcacccgacaggaagggcttccggctgctcctggccagccccaggtcctgctacaaactgttccaggagcagcagaatgagggccacggggaggccctgctgttcgaagggatcaagaaaaaaaaacagcagaaaataaagaacattctgtcaaacaagacattgagagaacataattcatttgtggagagatgcatcgactggaaccgcgagctgctgaagcgggagctgggcctggccgagagtgacatcattgacatcccgcagctcttcaagctcaaagagttctctaaggcggaagcttttttccccaacatggtgaacatgctggtgctagggaagcacctgggcatccccaagcccttcgggcccgtcatcaacggccgctgctgcctggaggagaaggtgtgttccctgctggagccactgggcctccagtgcaccttcatcaacgacttcttcacctaccacatcaggcatggggaggtgcactgcggcaccaacgtgcgcagaaagcccttctccttcaagtggtggaacatggtgccctgagcccatcttccctggcgtcctctccctcctggccagatgtcgctgggtcctctgcagtgtggcaagcaagagctcttgtgaatattgtggctccctgggggcggccagccctcccagcagtggcttgctttcttctcctgtgatgtcccagtttcccactctgaagatcccaacatggtcctagcactgcacactcagttctgctctaagaagctgcaataaagtttttttaagtcactttgtac

SEQ ID NO: 1617 - protein, 663 aa, Homo sapien
MAQGTLIRVTPEQPTHAVCVLGTLTQLDICSSAPEDCTSFSINASPGVVVDIAHSPPAKKKSTGSSTWPLDPGVEVTLTMKAASGSTGDQKVQISYYGPKTPPVKALLYLTAVEISLCADITRTGKVKPTRAVKDQRTWTWGPCGQGAILLVNCDRDNLESSAMDCEDDEVLDSEDLQDMSLMTLSTKTPKDFFTNHTLVLHVARSEMDKVRVFQATRGKLSSKCSVVLGPKWPSHYLMVPGGKHNMDFYVEALAFPDTDFPGLITLTISLLDTSNLELPEAVVFQDSVVFRVAPWIMTPNTQPPQEVYACSIFENEDFLKSVTTLAMKAKCKLTICPEEENMDDQWMQDEMEIGYIQAPHKTLPVVFDSPRNRGLKEFPIKRVMGPDFGYVTRGPQTGGISGLDSFGNLEVSPPVTVRGKEYPLGRILFGDSCYPSNDSRQMHQALQDFLSAQQVQAPVKLYSDWLSVGHVDEFLSFVPAPDRKGFRLLLASPRSCYKLFQEQQNEGHGEALLFEGIKKKKQQKIKNILSNKTLREHNSFVERCIDWNRELLKRELGLAESDIIDIPQLFKLKEFSKAEAFFPNMVNMLVLGKHLGIPKPFGPVINGRCCLEEKVCSLLEPLGLQCTFINDFFTYHIRHGEVHCGTNVRRKPFSFKWWNMVP

SEQ ID NO: 1618 - DNA, 2092 bp, Homo sapien
ccacgcgtccggtgcggacgggcgcggaccacctccaggggctaagtgatggatcttgtactccgtgttgcagattactatttttttacaccatacgtgtatccagccacatggccagaagatgacatcttccgacaagctattagtcttctgattgtaacaaatgttggtgcttacatcctttatttcttctgtgcaacactgagctattattttgtcttcgatcatgcattaatgaaacatccacaatttttaaagaatcaagtccgtcgagagattaagtttactgtccaggcattgccatggataagtattcttactgttgcactgttcttgctggagataagaggttacagcaaattacatgatgacctaggagagtttccatatggattgtttgaacttgtcgttagtataatatctttcctctttttcactgacatgttcatctactggattcacagaggccttcatcatagactggtatataagcgcctacataaacctcaccatatttggaagattcctactccatttgcaagtcatgcttttcaccctattgatggctttcttcagagtctaccttaccatatatacccttttatctttccattacacaaggtggtttatttaagtctgtacatcttggttaatatctggacaatttccattcatgacggtgattttcgtgtcccccaaatcttacagccatttattaatggctcagctcatcatacagaccaccatatgttctttgactataattatggacaatatttcactttgtgggataggattggcggctcattcaaaaatccttcatcctttgaggggaagggaccgctcagttatgtgaaggagatgacagagggaaagcgcagcagcccttcaggaaatggctgtaagaatgaaaaattattcaatggagagtttacaaagactgaatagattattgcccagttattcttaagtaaggacaaagaaggaaatatcatcgtatttcttttttttaataaggaaaaaataatctccatacagtcaagatacatagtaaatggtatcatttggaaatcagcatcgtgggcactgctgaggaatgatcctagtggtaggtcagaagaagatgctgtgaacaccaggactttaatcttatgcttaaaatgccagatgttgttcgggccccaacttgtatttctagcagcagatctgtagtttgtatagcctcaacaacaattttaaataagatggagaataaattattgaggggactaggctatatgcatttgccttcatccacccatgtttattaagaatcattgtgcttaataataccaagactaagcaccataaccaagaaatactaatgtaaagattgtttcttgtttcaggaatggttaattcttcaacgttggtatgataatgataacttgttttgacttgaataaagtactacatcagtgtggaaaaaaattctgatacattagcagctatgtaaatgacctaattgatagcaggtgtaataagactatcgtcttcctacacataggaggctcattctctggacacactatcacctattacattttactgattaacaaataaattggaatttaaaaatatcgatatcaccatgatttaatccagatctgggattatgtagctaaacattgtgatgattattatttaaaaccattatttaataagagtaaaaatatgtgaatctggatatatttaaaaaaagaaatttgattgcccagataatatattaggcactactgattttttagttaaattgatgcactacacttttgatgtttgaagttacaacctgtaatttttttgtaaaggaaataattgccaaatacctaggcccattgctgacgattagttctaaaatcttattcctcctcttctcccctcacttttccctacttcctctgcaaaaagatttaacaaatacattcataaggaaatgtgtgttgtaacaaatatattgcaaaaacatagtttgtaaaggcattctataagctatttatgtaaaatcaataaaagttgatcataattaaactgtaaaaaaaaaaaaaaaggcggc

SEQ ID NO: 1619 - protein, 299 aa, Homo sapien
MDLVLRVADYYFFTPYVYPATWPEDDIFRQAISLLIVTNVGAYILYFFCATLSYYFVFDHALMKHPQFLKNQVRREIKFTVQALPWISILTVALFLLEIRGYSKLHDDLGEFPYGLFELVVSIISFLFFTDMFIYWIHRGLHHRLVYKRLHKPHHIWKIPTPFASHAFHPIDGFLQSLPYHIYPFIFPLHKVVYLSLYILVNIWTISIHDGDFRVPQILQPFINGSAHHTDHHMFFDYNYGQYFTLWDRIGGSFKNPSSFEGKGPLSYVKEMTEGKRSSPSGNGCKNEKLFNGEFTKTE

SEQ ID NO: 1620 - DNA, 1645 bp, Homo sapien
tcctgctctggggaagtgggcacacgttaaaagaaatgtttatttcagtcttctgaaatagggaattactctggctaaaatgtagctccagaaagggaaagtggggctgtatgaatccaggtccagtttgttgtttcctccaggataaggcagctgtcggaggggaaaatcatctcccatttctccacagggcagtctgaagatggccaattacacgctggcaccagaggatgaatatgatgtcctcatagaaggtgaactggagagcgatgaggcagagcaatgtgacaagtatgacgcccaggcactctcagcccagctggtgccatcactctgctctgctgtgtttgtgatcggtgtcctggacaatctcctggttgtgcttatcctggtaaaatataaaggactcaaacgcgtggaaaatatctatcttctaaacttggcagtttctaacttgtgtttcttgcttaccctgcccttctgggctcatgctgggggcgatcccatgtgtaaaattctcattggactgtacttcgtgggcctgtacagtgagacatttttcaattgccttctgactgtgcaaaggtacctagtgtttttgcacaagggcaactttttctcagccaggaggagggtgccctgtggcatcattacaagtgtcctggcatgggtaacagccattctggccactttgcctgaatacgtggtttataaacctcagatggaagaccagaaatacaagtgtgcatttagcagaactcccttcctgccagctgatgagacattctggaagcattttctgactttaaaaatgaacatttcggttcttgtcctccccctatttatttttacatttctctatgtgcaaatgagaaaaacactaaggttcagggagcagaggtatagccttttcaagcttgtttttgccataatggtagtcttccttctgatgtgggcgccctacaatattgcatttttcctgtccactttcaaagaacacttctccctgagtgactgcaagagcagctacaatctggacaaaagtgttcacatcactaaactcatcgccaccacccactgctgcatcaaccctctcctgtatgcgtttcttgatgggacatttagcaaatacctctgccgctgtttccatctgcgtagtaacaccccacttcaacccagggggcagtctgcacaaggcacatcgagggaagaacctgaccattccaccgaagtgtaaactagcatccaccaaatgcaagaagaataaacatggattttcatctttctgcattatttcatgtaaattttctacacatttgtatacaaaatcggatacaggaagaaaagggagaggtgagctaacatttgctaagcactgaatttgtctcaggcaccgtgcaaggctctttacaaacgtgagctccttcgcctcctaccacttgtccatagtgtggataggactagtctcatttctctgagaagaaaactaaggcgcggaaatttgtctaagatcacataactaggaagtggcagaactgattctccagccctggtagcatttgctcagagcctacgcttggtccagaacatcaaactccaaaccctggggacaaacgacatgaaataaatgtattttaaaacatct

SEQ ID NO: 1621 - protein, 344 aa, Homo sapien
MANYTLAPEDEYDVLIEGELESDEAEQCDKYDAQALSAQLVPSLCSAVFVIGVLDNLLVVLILVKYKGLKRVENIYLLNLAVSNLCFLLTLPFWAHAGGDPMCKILIGLYFVGLYSETFFNCLLTVQRYLVFLHKGNFFSARRRVPCGIITSVLAWVTAILATLPEYVVYKPQMEDQKYKCAFSRTPFLPADETFWKHFLTLKMNISVLVLPLFIFTFLYVQMRKTLRFREQRYSLFKLVFAIMVVFLLMWAPYNIAFFLSTFKEHFSLSDCKSSYNLDKSVHITKLIATTHCCINPLLYAFLDGTFSKYLCRCFHLRSNTPLQPRGQSAQGTSREEPDHSTEV

SEQ ID NO: 1622 - DNA, 1851 bp, Homo sapien
gaaaagccgccggtatttctccacctggctctcctctacctccaggcaggcgcacccgaggtccccctcccaccccaccttctgccctcccgcacacttggaccagtgctgttgacccggaagcggacatttctgcagctattctaagcacacgtcggcggagggagcgggacgtggccagcggtcagcggcgaaggaggcaggccctgcgcggggatcacggaagccctgtgattcaccatgaagttccagtacaaggaggtccatccctttgagtatcggaaaaaggaaggagaaaagatccggaagaaatatccggacagggtccccttgattgtagagaaggctccaaaagcaagggtgcctgatctggacaggaggaagtacctagtgccctccgaccttaccgatggccagttctaccttttaatccggaagagaatccacctgagacctgaggacgccttattcttctttgtcaacaacactatccctcccactagtgctaccatgggccaactatatgaggacagtcatgaggaagatgattttctgtatgtggcctacagtaatgagagtgtctatgggaaatgagtggttggaagcccagcagatggaagcacctggacttaggggtaggggaggggtgtgtgtgtgacttggggaaagagagggcggctcccaccgtgaggagacagaaggtgaagacatatagaaactttacaccgcacacaccgtcaacgcattttcacatgctcaactgatattttttgttgcttccttggcccagggagaaagcatgtcaggacagagctgttggattggctttgatagaggaatggggatgatgtaattttatggcattcctgagatttaatttttgtgcagtttcatagaaaggtcggtcaggaggtggacaagttggggtcagagatgatggcagtccagcagcaactccctgtgctcccttctctttgggcagagattctgtttttgacagttgcacaagacaggtagggaaaggggacttgtggtagtgggccatacctggggacgaaaagagacccactgtaattgatgcatcgtggcccccgatcttccgtatcccacacttcttttctcccatcccagttgcaatctcactcacaaacatcacagtaccaccccaggggcggcagtagacaccaacccagaaatttagacagggatctcttatctttggaaaataggggttaggcatgagggtggttatgattaagaagataattttgttgttaaatagcattaaactggaattgacagagtgagttgagcatctctgtctaacctgctctttctctctggtgctcctcatctcacccctaccttggaatttaataagcttcaggcatttccaattgcagactaaaaccacttctaccatctcctctagtattttccatgtatcaggacagagatgtcttatgtagggaaggggcaggtatgaagtgaggtagattatctatacctctcactcattcaggattctcgctcccatgctgctgtcccttcattctcacactcacaggaatgctatgtgatggccagctgcttcccttcttggttatccactgcagctgctagttagaaaggtttgcagggatgacttttagtaaatcatggggattttattgatttattatcacttataggattttgtggggtgggagtggggagcaggaattgcactcagacatgacatttcaattcatctctgcaaatgaaaagggttcttcctcttgggggaaatctgtgtgtcagttctgtcagctgcaagttcttgtgtaatgaagtcaatgctgtcaggccaag

SEQ ID NO: 1623 - protein, 117 aa, Homo sapien
MKFQYKEVHPFEYRKKEGEKIRKKYPDRVPLIVEKAPKARVPDLDRRKYLVPSDLTDGQFYLLIRKRIHLRPEDALFFFVNNTIPPTSATMGQLYEDSHEEDDFLYVAYSNESVYGK

SEQ ID NO: 1624 - DNA, 4066 bp, Homo sapien
cctcttgcggccacaggcgcggcgtcctcggcggcgggcggcagctagcgggagccgggacgccggtgcagccgcagcgcgcggaggaacccgggtgtgccgggagctgggcggccacgtccggacgggaccgagacccctcgtagcgcattgcggcgacctcgccttccccggccgcgagcgcgccgctgcttgaaaagccgcggaacccaaggacttttctccggtccgagctcggggcgccccgcaggcgcacggtacccgtgctgcagtcgggcacgccgcggcgccgggggcctccgcagggcgatggagccggtctgcaaggaaagtgaggcgccgccgctgcgttctggaggaggggggcacaaggtctggagaccccgggtggcggacgggagccctccccccgccccgcctccggggcaccagctccggctccattgttcccgcccgggctggaggcgccgagcaccgagcgccgccgggagtcgagcgccggccgcggagctcttgcgaccccgccaggacccgaacagagcccgggggcggcgggccggagccggggacgcgggcacacgcccgctcgcacaagccacggcggactctcccgaggcggaacctccacgccgagcgagggtcagtttgaaaaggaggatcgagctcactgtggagtatccatggagatgtggagccttgtcaccaacctctaactgcagaactgggatgtggagctggaagtgcctcctcttctgggctgtgctggtcacagccacactctgcaccgctaggccgtgcccgaccttgcctgaacaagcccagccctggggagcccctgtggaagtggagtccttcctggtccacccgggtgacctgctgcagttgcgctgtcggctgcgggacgatgtgcagagcatcaactggctgcgggacggggtgcagctggcggaaagcaaccgcacccgcatcacaggggaggaggtggaggtgcaggactccgtgcccgcagactccggcctctatgcttgcgtaaccagcagcccctcgggcagtgacaccacctacttctccgtcaatgtttcagatgctctcccctcctcggaggatgatgatgatgatgatgactcctcttcagaggagaaagaaacagataacaccaaaccaaaccgtatgcccgtagctccatattggacatccccagaaaagatggaaaagaaattgcatgcagtgccggctgccaagacagtgaagttcaaatgcccttccagtgggaccccaaaccccacactgcgctggttgaaaaatggcaaagaattcaaacctgaccacagaattggaggctacaaggtccgttatgccacctggagcatcataatggactctgtggtgccctctgacaagggcaactacacctgcattgtggagaatgagtacggcagcatcaaccacacataccagctggatgtcgtggagcggtcccctcaccggcccatcctgcaagcagggttgcccgccaacaaaacagtggccctgggtagcaacgtggagttcatgtgtaaggtgtacagtgacccgcagccgcacatccagtggctaaagcacatcgaggtgaatgggagcaagattggcccagacaacctgccttatgcccagatcttgaagactgctggagttaataccaccgacaaagagatggaggtgcttcacttaagaaatgtctcctttgaggacgcaggggagtatacgtgcttggcgggtaactctatcggactctcccatcactctgcatggttgaccgttctggaagccctggaagagaggccggcagtgatgacctcgcccctgtacctggagatcatcatctattgcacaggggccttcctcatctcctgcatggtggggtcggtcatcgtctacaagatgaagagtggtaccaagaagagtgacttccacagccagatggctgtgcacaagctggccaagagcatccctctgcgcagacaggtaacagtgtctgctgactccagtgcatccatgaactctggggttcttctggttcggccatcacggctctcctccagtgggactcccatgctagcaggggtctctgagtatgagcttcccgaagaccctcgctgggagctgcctcgggacagactggtcttaggcaaacccctgggagagggctgctttgggcaggtggtgttggcagaggctatcgggctggacaaggacaaacccaaccgtgtgaccaaagtggctgtgaagatgttgaagtcggacgcaacagagaaagacttgtcagacctgatctcagaaatggagatgatgaagatgatcgggaagcataagaatatcatcaacctgctgggggcctgcacgcaggatggtcccttgtatgtcatcgtggagtatgcctccaagggcaacctgcgggagtacctgcaggcccggaggcccccagggctggaatactgctacaaccccagccacaacccagaggagcagctctcctccaaggacctggtgtcctgcgcctaccaggtggcccgaggcatggagtatctggcctccaagaaggtgtggaacctgaaggctcccctggtgcatacaccgagacctggcagccaggaatgtcctggtgacagaggacaatgtgatgaagatagcagactttggcctcgcacgggacattcaccacatcgactactataaaaagacaaccaacggccgactgcctgtgaagtggatggcacccgaggcattatttgaccggatctacacccaccagagtgatgtgtggtctttcggggtgctcctgtgggagatcttcactctgggcggctccccataccccggtgtgcctgtggaggaacttttcaagctgctgaaggagggtcaccgcatggacaagcccagtaactgcaccaacgagctgtacatgatgatgcgggactgctggcatgcagtgccctcacagagacccaccttcaagcagctggtggaagacctggaccgcatcgtggccttgacctccaaccaggagtacctggacctgtccatgcccctggaccagtactcccccagctttcccgacacccggagctctacgtgctcctcaggggaggattcggtcttctctcatgagccgctgcccgaggagccctgcctgccccgacacccagcccagcttgccaatggcggactcaaacgccgctgactgccacccacacgccctccccagactccaccgtcagctgtaaccctcacccacagcctgctgggcccaccacctgtccgtccctgtcccctttcctgctggcaggagccggctgcctaccaggggccttcctgtgtggcctgccttcaccccactcagctcacctctccctccacctcctctccacctgctggtgagaggtgcaaagaggcagatctttgctgccagccacttcatcccctcccagatgttggaccaacacccctccctgccacaggcactgcctggagggcagggagtgggagccaatgaacaggcatgcaagtgagagctttctgagctttctcctgtcggtttggtctgttttgccttcacccataagcccctcgcactctggtggcaggtgcttgtcctcagggctacagcagtagggaggtcagtgcttcgtgcctcgattgaaggtgacctctgccccagataggtggtgccagtggcttattaattccgatactagtttgctttgctgaccaaatgcctggtaccagaggatggtgaggcgaaggccaggttgggggcagtgttgtgccctgtcccagcccaaactgggggctctgtatatagctatgaagaaaacacaaagtgtataaatctgagtatatatttacatgtctttttaaaagggtcgttaccagagatttacccatcgggtaagatgctcctggtggctgggaggcatcagttgctatatattaaaaacaaaaaagaaaaaaaaggaaaatgtttttaaaaaggtcatatattttttgctacttttgctgttttatttttttaaattatgttctaaac

SEQ ID NO: 1625 - protein, 822 aa, Homo sapien [sequence omitted]

SEQ ID NO: 1626 - DNA, 2256 bp, Homo sapien
tcagagtccggctcaggctccggctgcggctccagcccgcgatgccccattccgtgaccctgcgcgggccttcgccctggggcttccgcctggtgggcggccgggacttcagcgcgcccctcaccatctcacgggtccatgctggcagcaaggctgcattggctgccctgtgcccaggagacctgatccaggccatcaatggtgagagcacagagctcatgacacacctggaggcacagaaccgcatcaagggctgccacgatcacctcacactgtctgtgagcaggcctgagggcaggagctggcccagtgcccctgatgacagcaaggctcaggcacacaggatccacatcgatcctgagatccaggacggcagcccaacaaccagcaggcggccctcaggcaccgggactgggccagaagatggcagaccaagcctgggatctccatatggacaaccccctcgctttccagtccctcacaatggcagcagcgaggccaccctgccagcccagatgagcaccctgcatgtgtctccaccccccagcgctgacccagccagaggcctcccgcggagccgggactgcagagtcgacctgggctccgaggtgtacaggatgctgcgggagccagccgagcccgtggccgcggagcccaagcagtcaggctccttccgctacttgcagggcatgctagaggccggcgagggcggggattggcccgggcctggcggcccccggaacctcaagcccacggccagcaagctgggcgctccgctgagcggcctgcaggggctgcccgagtgcacgcgctgcggccacggcatcgtgggcaccatcgtcaaggcacgggacaagctctaccatcccgagtgcttcatgtgcagtgactgcggcctgaacctcaagcagcgtggttacttctttctggacgagcggctctactgtgagagccacgccaaggcgcgcgtgaagccgcccgagggctacgacgtggtggcggtgtaccccaatgccaaggtggaactcgtctgagctgggaccctgctcccacgcctgcttcttaaggtccctgctcggccggtgtaaatatgtttcaccctgtccctctaataaagctcctctgctccaccttgaacctgtcacctggcctgccaccctcctgcgcaggccatgcatggctcccgagtacagtagtatctgcttaggtgccaggcatgtcctaggctctgggtgcagtagtgagcaggacgggtaccatgctgccctgaaggggccacagcctgggtggaaggcagacctgaatcacaacgggccagctctagtaatacgaaggtgaggtctgggatgctgcgtgcggcgcgacgacaggaggtatgacctgggtggggtcagggaaagtcttagctgagaactaagagatgagggaggcacaaactctgcacgggggaactgtgtgtgcaaaggtgagctgggggcgagaaaggcctctgtggccgtcatcggcactagcgggttgggggtggtggtggggtgctggcagcctcaggagcgatcgctcccctggagagggtgattgagtgtggagatcaccggggccgccgcgggccgtctgcacttctgttccaggtttttctggcattttctgttccaggtttcttccacccacgagcactttattctcctccgagacccccttttcttccccttcctctctcccaccagggggcgcgcttaaatttccagacagagaccagaaggaaggtttagaaagaaaagaacacttgcccagggcagctttgccctccaagaggctccctcctgtctctaagtcaattccacccctcctcgaagtcccggcttccacccctctcctcagagtcccggcgtttacctcgtggtgtgtttgccttgggcctttcatgccccggctgcacacatcgtctgtgaattgtggctgttcactcccgaggatgtgtcctagactccgggtcgcgtggatctaccctctagtttacttgctcgggagaagaaactgactcgttttatttagtgcctatttagcgagcccagagtaacgtacatttgtgctgttttcaattttgtgctatcgcaaatcacaaaaaaactgttatcaattcacattcatcatcagcacgagacccatttccttgtgctcctgccagctcaggatattatgtttcttttttcatttttgccagtctgttaagtaaaatgtcatatgcgtttgttttaa

SEQ ID NO: 1627 - protein, 330 aa, Homo sapien
MPHSVTLRGPSPWGFRLVGGRDFSAPLTISRVHAGSKAALAALCPGDLIQAINGESTELMTHLEAQNRIKGCHDHLTLSVSRPEGRSWPSAPDDSKAQAHRIHIDPEIQDGSPTTSRRPSGTGTGPEDGRPSLGSPYGQPPRFPVPHNGSSEATLPAQMSTLHVSPPPSADPARGLPRSRDCRVDLGSEVYRMLREPAEPVAAEPKQSGSFRYLQGMLEAGEGGDWPGPGGPRNLKPTASKLGAPLSGLQGLPECTRCGHGIVGTIVKARDKLYHPECFMCSDCGLNLKQRGYFFLDERLYCESHAKARVKPPEGYDVVAVYPNAKVELV

SEQ ID NO: 1628 - DNA, 1290 bp, Homo sapien
gctaaccaggccagtgacagaaatggattcgaaataccagtgtgtgaagctgaatgatggtcacttcatgcctgtcctgggatttggcacctatgcgcctgcagaggttcctaaaagtaaagctctagaggccgtcaaattggcaatagaagccgggttccaccatattgattctgcacatgtttacaataatgaggagcaggttggactggccatccgaagcaagattgcagatggcagtgtgaagagagaagacatattctacacttcaaagctttggagcaattcccatcgaccagagttggtccgaccagccttggaaaggtcactgaaaaatcttcaattggactatgttgacctctatcttattcattttccagtgtctgtaaagccaggtgaggaagtgatcccaaaagatgaaaatggaaaaatactatttgacacagtggatctctgtgccacatgggaggccatggagaagtgtaaagatgcaggattggccaagtccatcggggtgtccaacttcaaccacaggctgctggagatgatcctcaacaagccagggctcaagtacaagcctgtctgcaaccaggtggaatgtcatccttacttcaaccagagaaaactgctggatttctgcaagtcaaaagacattgttctggttgcctatagtgctctgggatcccatcgagaagaaccatgggtggacccgaactccccggtgctcttggaggacccagtcctttgtgccttggcaaaaaagcacaagcgaaccccagccctgattgccctgcgctaccagctgcagcgtggggttgtggtcctggccaagagctacaatgagcagcgcatcagacagaacgtgcaggtgtttgaattccagttgacttcagaggagatgaaagccatagatggcctaaacagaaatgtgcgatatttgacccttgatatttttgctggcccccctaattatccattttctgatgaatattaacatggagggcattgcatgaggtctgccagaaggccctgcgtgtggatggtgacacagaggatggctctatgctggtgactggacacatcgcctctggttaaatctctcctgcttggcgacttcagtaagctacagctaagcccatcggccggaaaagaaagacaataattttgtttttcattttgaaaaaattaaatgctctctcctaaagattcttcacctaaaaaaaaaaaaaaaaaaaaaaaaaaaaaaaaaaaaaaaaaattaaaaaaaaaaaaaaaaaaaaaaaaaaaaaa

SEQ ID NO: 1629 - protein, 323 aa, Homo sapien
MDSKYQCVKLNDGHFMPVLGFGTYAPAEVPKSKALEAVKLAIEAGFHHIDSAHVYNNEEQVGLAIRSKIADGSVKREDIFYTSKLWSNSHRPELVRPALERSLKNLQLDYVDLYLIHFPVSVKPGEEVIPKDENGKILFDTVDLCATWEAMEKCKDAGLAKSIGVSNFNHRLLEMILNKPGLKYKPVCNQVECHPYFNQRKLLDFCKSKDIVLVAYSALGSHREEPWVDPNSPVLLEDPVLCALAKKHKRTPALIALRYQLQRGVVVLAKSYNEQRIRQNVQVFEFQLTSEEMKAIDGLNRNVRYLTLDIFAGPPNYPFSDEY

SEQ ID NO: 1630 - DNA, 2508 bp, Rattus norvegicus
cacctcgctgctccagcctctggggcgcattccaaccttccagcctgcgacctgcggagaaaaaaaattacttattttcttgccccatacataccttgaggcgagcaaaaaaattaaattttaaccatgagggaaatcgtgcacatccaggctggtcagtgtggcaaccagatcggtgccaagttctgggaggtgatcagtgatgaacatggcatcgaccccaccggcacctaccacggggacagcgacctgcagctggaccgcatctctgtgtactacaatgaagccacaggtggcaaatatgttcctcgtgccatcctggtggatctagaacctgggaccatggactctgttcgctcaggtccttttggccagatctttagaccagacaactttgtatttggtcagtctggggcaggtaacaactgggccaaaggccactacacagagggcgccgagctggttgattctgtcctggatgtggtacggaaggaggcagagagctgtgactgcctgcagggcttccagctgacccactcactgggcgggggcacaggctctggaatgggcactctccttatcagcaagatccgagaagaataccctgatcgcatcatgaataccttcagtgtggtgccttcacccaaagtgtctgacaccgtggtcgagccctacaatgccaccctctccgtccatcagttggtagagaatactgatgagacctattgcattgacaacgaggccctctatgatatctgcttccgcactctgaagctgaccacaccaacctacggggatctgaaccaccttgtctcagccaccatgagtggtgtcaccacctgcctccgtttccctggccagctcaatgctgacctccgcaagttggcagtcaacatggtccccttcccacgtctccatttctttatgcctggctttgcccctctcaccagccgtggaagccagcagtatcgagctctcacagtgccggaactcacccagcaggtcttcgatgccaagaacatgatggctgcctgtgacccccgccacggccgatacctcaccgtggctgctgtcttccgtggtcggatgtccatgaaggaggtcgatgagcagatgcttaacgtgcagaacaagaacagcagctactttgtggaatggatccccaacaatgtcaagacagccgtctgtgacatcccacctcgtggcctcaagatggcagtcaccttcattggcaatagcacagccatccaggagctcttcaagcgcatctcggagcagttcactgccatgttccgccggaaggccttcctccactggtacacaggcgagggcatggacgagatggagttcaccgaggctgagagcaacatgaacgacctcgtctctgagtatcagcagtaccaggatgccaccgcagaagaggaggaggatttcggtgaggaggccgaagaggaggcctaaggcagagcccccatcacctcaggcttctcagttcccttagccgtcttactcaactgcccctttcctctccctcagaatttgtgtttgctgcctctatcttgttttttgttttttcttctggggggggtctagaacagtgcctggcacatagtaggcgctcaataaatacttgtttgttgaatgtctcctctctctttccactctgggaaacctaggtttctgccattctgggtgaccctgtatttctttctggtgcccattccatttgtccagttaatacttcctcttaaaaatctccaagaagctgggtctccagatcccatttagaaccaaccaggtgctgaaaacacatgtagataatggccatcatcctaagcccaaagtagaaaatggtagaaggtagtgggtagaagtcactatataaggaaggggatgggattttccattctaaaagttttggagagggaaatccaggctattaaagtcactaaatttctaagtatgtccatttcccatctcagcttcaagggaggtgtcagcagtattatctccactttcaatctccctccaagctctactctggaggagtctgtcccactctgtcaagtggaatccttccctttccaactctacctccctcactcagctcctttcccctgatcagagaaagggatcaagggggttgggaggggggaaagagaccagccttggtccctaagcctccagaaacgtcttcttaatccccaccttttcttactcccaaaaaagaatgaacacccctgactctggagtggtgtatactgccacatcagtgtttgagtcagtccccagaggagaggggaaccctcctccatcttttttgcaacatctcatttcttccttttgctgttgcttcccccctcacacacttggttttgttctatcctacatttgagatttctattttatgttgaacttgctgctttttttcatattgaaaagatgacatcgccccaagagccaaaaataaatgggaattgaaaaaaaaaaaaaaaaaaaaaaaaaaaa

SEQ ID NO: 1631 - protein, 444 aa, Rattus norvegicus
MREIVHIQAGQCGNQIGAKFWEVISDEHGIDPTGTYHGDSDLQLDRISVYYNEATGGKYVPRAILVDLEPGTMDSVRSGPFGQIFRPDNFVFGQSGAGNNWAKGHYTEGAELVDSVLDVVRKEAESCDCLQGFQLTHSLGGGTGSGMGTLLISKIREEYPDRIMNTFSVVPSPKVSDTVVEPYNATLSVHQLVENTDETYCIDNEALYDICFRTLKLTTPTYGDLNHLVSATMSGVTTCLRFPGQLNADLRKLAVNMVPFPRLHFFMPGFAPLTSRGSQQYRALTVPELTQQVFDAKNMMAACDPRHGRYLTVAAVFRGRMSMKEVDEQMLNVQNKNSSYFVEWIPNNVKTAVCDIPPRGLKMAVTFIGNSTAIQELFKRISEQFTAMFRRKAFLHWYTGEGMDEMEFTEAESNMNDLVSEYQQYQDATAEEEEDFGEEAEEEA

SEQ ID NO: 1632 - DNA, 4083 bp, Homo sapien
atggcgagcgactccccggctcgaagcctggatgaaatagatctctcggctctgagggaccctgcagggatctttgaattggtggaacttgttggaaatggaacatacgggcaagtttataagggtcgtcatgtcaaaacgggccagcttgcagccatcaaggttatggatgtcacaggggatgaagaggaagaaatcaaacaagaaattaacatgttgaagaaatattctcatcaccggaatattgctacatactatggtgcttttatcaaaaagaacccaccaggcatggatgaccaactttggttggtgatggagttttgtggtgctggctctgtcaccgacctgatcaagaacacaaaaggtaacacgttgaaagaggagtggattgcatacatctgcagggaaatcttacgggggctgagtcacctgcaccagcataaagtgattcatcgagatattaaagggcaaaatgtcttgctgactgaaaatgcagaagttaaactagtggactttggagtcagtgctcagcttgatcgaacagtgggcaggaggaatactttcattggaactccctactggatggcaccagaagttattgcctgtgatgaaaacccagatgccacatatgatttcaagagtgacttgtggtctttgggtatcaccgccattgaaatggcagaaggtgctccccctctctgtgacatgcaccccatgagagctctcttcctcatcccccggaatccagcgcctcggctgaagtctaagaagtggtcaaaaaaattccagtcatttattgagagctgcttggtaaagaatcacagccagcgaccagcaacagaacaattgatgaagcatccatttatacgagaccaacctaatgagcgacaggtccgcattcaactcaaggaccatattgatagaacaaagaagaagcgaggagaaaaagatgagacagagtatgagtacagtggaagtgaggaagaagaggaggagaatgactcaggagagcccagctccatcctgaatctgccaggggagtcgacgctgcggagggactttctgaggctgcagctggccaacaaggagcgttctgaggccctacggaggcagcagctggagcagcagcagcgggagaatgaggagcacaagcggcagctgctggccgagcgtcagaagcgcatcgaggagcagaaagagcagaggcggcggctggaggagcaacaaaggcgagagaaggagctgcggaagcagcaggagagggagcagcgccggcactatgaggagcagatgcgccgggaggaggagaggaggcgtgcggagcatgaacaggaatacatcaggcgacagttagaggaggagcagagacagttagagatcttgcagcagcagctactgcatgaacaagctctacttctggaatataagcgcaaacaattggaagaacagagacaagcagaaagactgcagaggcagctaaagcaagaaagagactacttagtttcccttcagcatcagcggcaggagcagaggcctgtggagaagaagccactgtaccattacaaagaaggaatgagtcctagtgagaagccagcatgggccaaggaggtagaagaacggtcaaggctcaaccggcaaagttcccctgccatgcctcacaaggttgccaacaggatatctgaccccaacctgcccccaaggtcggagtccttcagcattagtggagttcagcctgctcgaacaccccccatgctcagaccagtcgatccccagatcccacatctggtagctgtaaaatcccagggacctgccttgaccgcctcccagtcagtgcacgagcagcccacaaagggcctctctgggtttcaggaggctctgaacgtgacctcccaccgcgtggagatgccacgccagaactcagatcccacctcggaaaatcctcctctccccactcgcattgaaaagtttgaccgaagctcttggttacgacaggaagaagacattccaccaaaggtgcctcaaagaacaacttctatatccccagcattagccagaaagaattctcctgggaatggtagtgctctgggacccagactaggatctcaacccatcagagcaagcaaccctgatctccggagaactgagcccatcttggagagccccttgcagaggaccagcagtggcagttcctccagctccagcacccctagctcccagcccagctcccaaggaggctcccagcctggatcacaagcaggatccagtgaacgcaccagagttcgagccaacagtaagtcagaaggatcacctgtgcttccccatgagcctgccaaggtgaaaccagaagaatccagggacattacccggcccagtcgaccagctagctacaaaaaagctatagatgaggatctgacggcattagccaaagaactaagagaactccggattgaagaaacaaaccgcccaatgaagaaggtgactgattactcctcctccagtgaggagtcagaaagtagcgaggaagaggaggaagatggagagagcgagacccatgatgggacagtggctgtcagcgacatacccagactgataccaacaggagctccaggcagcaacgagcagtacaatgtgggaatggtggggacgcatgggctggagacctctcatgcggacagtttcagcggcagtatttcaagagaaggaaccttgatgattagagagacgtctggagagaagaagcgatctggccacagtgacagcaatggctttgctggccacatcaacctccctgacctggtgcagcagagccattctccagctggaaccccgactgagggactggggcgcgtctcaacccattcccaggagatggactctgggactgaatatggcatggggagcagcaccaaagcctccttcaccccctttgtggaccccagagtataccagacgtctcccactgatgaagatgaagaggatgaggaatcatcagccgcagctctgtttactagcgaacttcttaggcaagaacaggccaaactcaatgaagcaagaaagatttcggtggtaaatgtaaacccaaccaacattcggcctcatagcgacacaccagaaatcagaaaatacaagaaacgattcaactcagaaatactttgtgcagctctgtggggtgtaaaccttctggtggggactgaaaatggcctgatgcttttggaccgaagtgggcaaggcaaagtctataatctgatcaaccggaggcgatttcagcagatggatgtgctagagggactgaatgtccttgtgacaatttcaggaaagaagaataagctacgagtttactatctttcatggttaagaaacagaatactacataatgacccagaagtagaaaagaaacaaggctggatcactgttggggacttggaaggctgtatacattataaagttgttaaatatgaaaggatcaaatttttggtgattgccttaaagaatgctgtggaaatatatgcttgggctcctaaaccgtatcataaattcatggcatttaagtcttttgcagatctccagcacaagcctctgctagttgatctcacggtagaagaaggtcaaagattaaaggttatttttggttcacacactggtttccatgtaattgatgttgattcaggaaactcttatgatatctacataccatctcatattcagggcaatatcactcctcatgctattgtcatcttgcctaaaacagatggaatggaaatgcttgtttgctatgaggatgagggggtgtatgtaaacacctatggccggataactaaggatgtggtgctccaatggggagaaatgcccacgtctgtggcctacattcattccaatcagataatgggctggggcgagaaagctattgagatccggtcagtggaaacaggacatttggatggagtatttatgcataagcgagctcaaaggttaaagtttctatgtgaaagaaatgataaggtattttttgcatccgtgcgatctggaggaagtagccaagtgtttttcatgaccctcaacagaaattccatgatgaactggtaa

SEQ ID NO: 1633 - protein, 1360 aa, Homo sapien
MASDSPARSLDEIDLSALRDPAGIFELVELVGNGTYGQVYKGRHVKTGQLAAIKVMDVTGDEEEEIKQEINMLKKYSHHRNIATYYGAFIKKNPPGMDDQLWLVMEFCGAGSVTDLIKNTKGNTLKEEWIAYICREILRGLSHLHQHKVIHRDIKGQNVLLTENAEVKLVDFGVSAQLDRTVGRRNTFIGTPYWMAPEVIACDENPDATYDFKSDLWSLGITAIEMAEGAPPLCDMHPMRALFLIPRNPAPRLKSKKWSKKFQSFIESCLVKNHSQRPATEQLMKHPFIRDQPNERQVRIQLKDHIDRTKKKRGEKDETEYEYSGSEEEEEENDSGEPSSILNLPGESTLRRDFLRLQLANKERSEALRRQQLEQQQRENEEHKRQLLAERQKRIEEQKEQRRRLEEQQRREKELRKQQEREQRRHYEEQMRREEERRRAEHEQEYIRRQLEEEQRQLEILQQQLLHEQALLLEYKRKQLEEQRQAERLQRQLKQERDYLVSLQHQRQEQRPVEKKPLYHYKEGMSPSEKPAWAKEVEERSRLNRQSSPAMPHKVANRISDPNLPPRSESFSISGVQPARTPPMLRPVDPQIPHLVAVKSQGPALTASQSVHEQPTKGLSGFQEALNVTSHRVEMPRQNSDPTSENPPLPTRIEKFDRSSWLRQEEDIPPKVPQRTTSISPALARKNSPGNGSALGPRLGSQPIRASNPDLRRTEPILESPLQRTSSGSSSSSSTPSSQPSSQGGSQPGSQAGSSERTRVRANSKSEGSPVLPHEPAKVKPEESRDITRPSRPASYKKAIDEDLTALAKELRELRIEETNRPMKKVTDYSSSSEESESSEEEEEDGESETHDGTVAVSDIPRLIPTGAPGSNEQYNVGMVGTHGLETSHADSFSGSISREGTLMIRETSGEKKRSGHSDSNGFAGHINLPDLVQQSHSPAGTPTEGLGRVSTHSQEMDSGTEYGMGSSTKASFTPFVDPRVYQTSPTDEDEEDEESSAAALFTSELLRQEQAKLNEARKISVVNVNPTNIRPHSDTPEIRKYKKRFNSEILCAALWGVNLLVGTENGLMLLDRSGQGKVYNLINRRRFQQMDVLEGLNVLVTISGKKNKLRVYYLSWLRNRILHNDPEVEKKQGWITVGDLEGCIHYKVVKYERIKFLVIALKNAVEIYAWAPKPYHKFMAFKSFADLQHKPLLVDLTVEEGQRLKVIFGSHTGFHVIDVDSGNSYDIYIPSHIQGNITPHAIVILPKTDGMEMLVCYEDEGVYVNTYGRITKDVVLQWGEMPTSVAYIHSNQIMGWGEKAIEIRSVETGHLDGVFMHKRAQRLKFLCERNDKVFFASVRSGGSSQVFFMTLNRNSMMNW

SEQ ID NO: 1634 - DNA, 2781 bp, Homo sapien
atggatatgtttcctctcacctgggttttcttagccctctacttttcaagacaccaagtgagaggccaaccagacccaccgtgcggaggtcgtttgaattccaaagatgctggctatatcacctctcccggttacccccaggactacccctcccaccagaactgcgagtggattgtttacgcccccgaacccaaccagaagattgtcctcaacttcaaccctcactttgaaatcgagaagcacgactgcaagtatgactttatcgagattcgggatggggacagtgaatccgcagacctcctgggcaaacactgtgggaacatcgccccgcccaccatcatctcctcgggctccatgctctacatcaagttcacctccgactacgcccggcagggggcaggcttctctctgcgctacgagatcttcaagacaggctctgaagattgctcaaaaaacttcacaagccccaacgggaccatcgaatctcctgggtttcctgagaagtatccacacaacttggactgcacctttaccatcctggccaaacccaagatggagatcatcctgcagttcctgatctttgacctggagcatgaccctttgcaggtgggagagggggactgcaagtacgattggctggacatctgggatggcattccacatgttggccccctgattggcaagtactgtgggaccaaaacaccctctgaacttcgttcatcgacggggatcctctccctgacctttcacacggacatggcggtggccaaggatggcttctctgcgcgttactacctggtccaccaagagccactagagaactttcagtgcaatgttcctctgggcatggagtctggccggattgctaatgaacagatcagtgcctcatctacctactctgatgggaggtggacccctcaacaaagccggctccatggtgatgacaatggctggacccccaacttggattccaacaaggagtatctccaggtggacctgcgctttttaaccatgctcacggccatcgcaacacagggagcgatttccagggaaacacagaatggctactacgtcaaatcctacaagctggaagtcagcactaatggagaggactggatggtgtaccggcatggcaaaaaccacaaggtatttcaagccaacaacgatgcaactgaggtggttctgaacaagctccacgctccactgctgacaaggtttgttagaatccgccctcagacctggcactcaggtatcgccctccggctggagctcttcggctgccgggtcacagatgctccctgctccaacatgctggggatgctctcaggcctcattgcagactcccagatctccgcctcttccacccaggaatacctctggagccccagtgcagcccgcctggtcagcagccgctcgggctggttccctcgaatccctcaggcccagcccggtgaggagtggcttcaggtagatctgggaacacccaagacagtgaaaggtgtcatcatccagggagcccgcggaggagacagtatcactgctgtggaagccagagcatttgtgcgcaagttcaaagtctcctacagcctaaacggcaaggactgggaatacattcaggaccccaggacccagcagccaaagctgttcgaagggaacatgcactatgacacccctgacatccgaaggtttgaccccattccggcacagtatgtgcgggtatacccggagaggtggtcgccggcggggattgggatgcggctggaggtgctgggctgtgactggacagactccaagcccacggtaaaaacgctgggacccactgtgaagagcgaagagacaaccaccccctaccccaccgaagaggaggccacagagtgtggggagaactgcagctttgaggatgacaaagatttgcagctcccttcgggattcaattgcaacttcgatttcctcgaggagccctgtggttggatgtatgaccatgccaagtggctccggaccacctgggccagcagctccagcccaaacgaccggacgtttccagatgacaggaatttcttgcggctgcagagtgacagccagagagagggccagtatgcccggctcatcagcccccctgtccacctgccccgaagcccggtgtgcatggagttccagtaccaggccacgggcggccgcggggtggcgctgcaggtggtgcgggaagccagccaggagagcaagttgctgtgggtcatccgtgaggaccagggcggcgagtggaagcacgggcggatcatcctgcccagctacgacatggagtaccagattgtgttcgagggagtgatagggaaaggacgttccggagagattgccattgatgacattcggataagcactgatgtcccactggagaactgcatggaacccatctcggcttttgcagtggacatcccagaaatacatgagagagaaggatatgaagatgaaattgatgatgaatacgaggtggactggagcaattcttcttctgcaacctcagggtctggcgccccctcgaccgacaaagaaaagagctggctgtacaccctggatcccatcctcatcaccatcatcgccatgagctcactgggcgtcctcctgggggccacctgtgcaggcctcctgctctactgcacctgttcctactcgggcctgagctcccgaagctgcaccacactggagaactacaacttcgagctctacgatggccttaagcacaaggtcaagatgaaccaccaaaagtgctgctccgaggcatga

SEQ ID NO: 1635 - protein, 926 aa, Homo sapien
MDMFPLTWVFLALYFSRHQVRGQPDPPCGGRLNSKDAGYITSPGYPQDYPSHQNCEWIVYAPEPNQKIVLNFNPHFEIEKHDCKYDFIEIRDGDSESADLLGKHCGNIAPPTIISSGSMLYIKFTSDYARQGAGFSLRYEIFKTGSEDCSKNFTSPNGTIESPGFPEKYPHNLDCTFTILAKPKMEIILQFLIFDLEHDPLQVGEGDCKYDWLDIWDGIPHVGPLIGKYCGTKTPSELRSSTGILSLTFHTDMAVAKDGFSARYYLVHQEPLENFQCNVPLGMESGRIANEQISASSTYSDGRWTPQQSRLHGDDNGWTPNLDSNKEYLQVDLRFLTMLTAIATQGAISRETQNGYYVKSYKLEVSTNGEDWMVYRHGKNHKVFQANNDATEVVLNKLHAPLLTRFVRIRPQTWHSGIALRLELFGCRVTDAPCSNMLGMLSGLIADSQISASSTQEYLWSPSAARLVSSRSGWFPRIPQAQPGEEWLQVDLGTPKTVKGVIIQGARGGDSITAVEARAFVRKFKVSYSLNGKDWEYIQDPRTQQPKLFEGNMHYDTPDIRRFDPIPAQYVRVYPERWSPAGIGMRLEVLGCDWTDSKPTVKTLGPTVKSEETTTPYPTEEEATECGENCSFEDDKDLQLPSGFNCNFDFLEEPCGWMYDHAKWLRTTWASSSSPNDRTFPDDRNFLRLQSDSQREGQYARLISPPVHLPRSPVCMEFQYQATGGRGVALQVVREASQESKLLWVIREDQGGEWKHGRIILPSYDMEYQIVFEGVIGKGRSGEIAIDDIRISTDVPLENCMEPISAFAVDIPEIHEREGYEDEIDDEYEVDWSNSSSATSGSGAPSTDKEKSWLYTLDPILITIIAMSSLGVLLGATCAGLLLYCTCSYSGLSSRSCTTLENYNFELYDGLKHKVKMNHQKCCSEA

SEQ ID NO: 1636 - DNA, 2272 bp, Homo sapien
gtgcgggtttcggttggaggactcgttggggaggtggcctgcgcttgtagagactgcatccccgagacgatggcggagggagataatcgcagcaccaacctgctggctgcagagactgcaagtctggaagaacagctgcaaggatggggagaagtgatgctgatggctgataaagtcctccgatgggaaagagcctggtttccacctgccatcatgggtgtggtttctttggtgtttctgattatctactatctagatccatctgttctgtccggcgtttcctgttttgttatgtttttgtgcttggctgactaccttgttcccattctagcgcctagaatttttggctccaataaatggaccactgaacaacagcaaagattccatgaaatttgcagcaatctagtaaaaactcgacgcagagctgtgggttggtggaaacgcctcttcacactaaaggaagaaaaacctaagatgtacttcatgaccatgatcgtttcccttgctgcggttgcttgggtgggacaacaagtccacaacctgcttctcacctacctgatagtgacttccttactattgcttcctggactaaaccaacatggaatcattttgaagtacattggaatggccaagagggagataaacaaacttctcaaacaaaaagaaaagaaaaacgaatgattcatctgctttaatcagtgtgattaatgcagcacccattgccccgggaaccgtttctgctgtactatctggatactaaaatgttacggaagtagctctttgttctccctcactctgcccttagttaatagaaattcagactcgccaagtaaggcttcgtgcatagtgtcttcatgtcgcgtatagttgagcgcgttcttagcagttggcttcatggacaactcattagtgttttgacttttcttacccagcgttaattgaattcttgcttttagacaacttcctttttgtagtggtgaaccttgccctttagtacagttcaagtgaatctggataattgttcatctttgctttagcttagataccatgtagtggtctgtggctacaggaagctggttctgtctgcttccacagtctgcttaaaaaactgtctgacttcgtgaatatagagaccaagtttaccacttctgatgaagagaccaattaagattcattcctcattctgtttctttccagtgggagaagagtccccatgaaataagatgaaactgattccatgcactagtacatgtaggcttctcccttgtgcaaagcttagcaatttgtaggaaactttgatctttttgtccaagaaaaggaatgtctgacaggcttaagctttcgtccccttgcacttagactcgaagttagtaaatccttaaaggctttttaatagcagacttccaaaagattgcatttaggatttctagcatgcttttaatttcagattttcagctgacattagctatagtatacagtaggttaagactcatgtctatgactttcactctaagactggcaaaaggacagcagtcttctatgtttagtcaatattcatttcagtagaagataatcttatctaatttttgagaccagaataagccttttaaggtaaacctcaaaattatcattttatggtaatactgaccattttagtcccctaggtttgacatgggagatagtgactacactggtgtctgacttttttcctagagatttctccctgaaaaatacaagggctgttggtgagagcagacttgaggtgatgatagttggcctctggtctacaaagatttcataactccttggaaagcttcttataatcattcttaacttcttggtagctagaaatttagagtagttgaaatctttaggaatgtacttctgagggccaaaaaatgtgactgacgggaacaattcttaaactgattaactagctgtaatatagttttgtgaatttattgcactgatgttgtaccttgtggtatatctgtccctattaaataagtgttgttttctcctctttaatattgctgtgaacagtggtgcccattgtagcatatgtttgatttttttttattatttcataagaaaactacgttaattttaccttactttcattgtaaataagcctgtcttcctatctggattttttgtgtgcatacatattctactgattaactacttttgcagttttaatcctgtattatttcttctactttgttttgtgtaaaaggggaaaaaataaaaaaagctggaatcttcatgtctc

SEQ ID NO: 1637 - protein, 226 aa, Homo sapien
VRVSVGGLVGEVACACRDCIPETMAEGDNRSTNLLAAETASLEEQLQGWGEVMLMADKVLRWERAWFPPAIMGVVSLVFLIIYYLDPSVLSGVSCFVMFLCLADYLVPILAPRIFGSNKWTTEQQQRFHEICSNLVKTRRRAVGWWKRLFTLKEEKPKMYFMTMIVSLAAVAWVGQQVHNLLLTYLIVTSLLLLPGLNQHGIILKYIGMAKREINKLLKQKEKKNE

SEQ ID NO: 1638 - DNA, 2259 bp, Homo sapien
cagttgcttcagcgtcccggtgtggctgtgccgttggtcctgtgcggtcacttagccaagatgcctgaggaaacccagacccaagaccaaccgatggaggaggaggaggttgagacgttcgcctttcaggcagaaattgcccagttgatgtcattgatcatcaatactttctactcgaacaaagagatctttctgagagagctcatttcaaattcatcagatgcattggacaaaatccggtatgaaagcttgacagatcccagtaaattagactctgggaaagagctgcatattaaccttataccgaacaaacaagatcgaactctcactattgtggatactggaattggaatgaccaaggctgacttgatcaataaccttggtactatcgccaagtctgggaccaaagcgttcatggaagctttgcaggctggtgcagatatctctatgattggccagttcggtgttggtttttattctgcttatttggttgctgagaaagtaactgtgatcaccaaacataacgatgatgagcagtacgcttgggagtcctcagcagggggatcattcacagtgaggacagacacaggtgaacctatgggtcgtggaacaaaagttatcctacacctgaaagaagaccaaactgagtacttggaggaacgaagaataaaggagattgtgaagaaacattctcagtttattggatatcccattactctttttgtggagaaggaacgtgataaagaagtaagcgatgatgaggctgaagaaaaggaagacaaagaagaagaaaaagaaaaagaagagaaagagtcggaagacaaacctgaaattgaagatgttggttctgatgaggaagaagaaaagaaggatggtgacaagaagaagaagaagaagattaaggaaaagtacatcgatcaagaagagctcaacaaaacaaagcccatctggaccagaaatcccgacgatattactaatgaggagtacggagaattctataagagcttgaccaatgactgggaagatcacttggcagtgaagcatttttcagttgaaggacagttggaattcagagcccttctatttgtcccacgacgtgctccttttgatctgtttgaaaacagaaagaaaaagaacaacatcaaattgtatgtacgcagagttttcatcatggataactgtgaggagctaatccctgaatatctgaacttcattagaggggtggtagactcggaggatctccctctaaacatatcccgtgagatgttgcaacaaagcaaaattttgaaagttatcaggaagaatttggtcaaaaaatgcttagaactctttactgaactggcggaagataaagagaactacaagaaattctatgagcagttctctaaaaacataaagcttggaatacacgaagactctcaaaatcggaagaagctttcagagctgttaaggtactacacatctgcctctggtgatgagatggtttctctcaaggactactgcaccagaatgaaggagaaccagaaacatatctattatatcacaggtgagaccaaggaccaggtagctaactcagcctttgtggaacgtcttcggaaacatggcttagaagtgatctatatgattgagcccattgatgagtactgtgtccaacagctgaaggaatttgaggggaagactttagtgtcagtcaccaaagaaggcctggaacttccagaggatgaagaagagaaaaagaagcaggaagagaaaaaaacaaagtttgagaacctctgcaaaatcatgaaagacatattggagaaaaaagttgaaaaggtggttgtgtcaaaccgattggtgacatctccatgctgtattgtcacaagcacatatggctggacagcaaacatggagagaatcatgaaagctcaagccctaagagacaactcaacaatgggttacatggcagcaaagaaacacctggagataaaccctgaccattccattattgagaccttaaggcaaaaggcagaggctgataagaacgacaagtctgtgaaggatctggtcatcttgctttatgaaactgcgctcctgtcttctggcttcagtctggaagatccccagacacatgctaacaggatctacaggatgatcaaacttggtctgggtattgatgaagatgaccctactgctgatgataccagtgctgctgtaactgaagaaatgccaccccttgaaggagatgacgacacatcacgcatggaagaagtagactaa

SEQ ID NO: 1639 - protein, 732 aa, Homo sapien
MPEETQTQDQPMEEEEVETFAFQAEIAQLMSLIINTFYSNKEIFLRELISNSSDALDKIRYESLTDPSKLDSGKELHINLIPNKQDRTLTIVDTGIGMTKADLINNLGTIAKSGTKAFMEALQAGADISMIGQFGVGFYSAYLVAEKVTVITKHNDDEQYAWESSAGGSFTVRTDTGEPMGRGTKVILHLKEDQTEYLEERRIKEIVKKHSQFIGYPITLFVEKERDKEVSDDEAEEKEDKEEEKEKEEKESEDKPEIEDVGSDEEEEKKDGDKKKKKKIKEKYIDQEELNKTKPIWTRNPDDITNEEYGEFYKSLTNDWEDHLAVKHFSVEGQLEFRALLFVPRRAPFDLFENRKKKNNIKLYVRRVFIMDNCEELIPEYLNFIRGVVDSEDLPLNISREMLQQSKILKVIRKNLVKKCLELFTELAEDKENYKKFYEQFSKNIKLGIHEDSQNRKKLSELLRYYTSASGDEMVSLKDYCTRMKENQKHIYYITGETKDQVANSAFVERLRKHGLEVIYMIEPIDEYCVQQLKEFEGKTLVSVTKEGLELPEDEEEKKKQEEKKTKFENLCKIMKDILEKKVEKVVVSNRLVTSPCCIVTSTYGWTANMERIMKAQALRDNSTMGYMAAKKHLEINPDHSIIETLRQKAEADKNDKSVKDLVILLYETALLSSGFSLEDPQTHANRIYRMIKLGLGIDEDDPTADDTSAAVTEEMPPLEGDDDTSRMEEVD

SEQ ID NO: 1640 - DNA, 2113 bp, Homo sapien
gtgcggttgggaacgcggagcggacggattcgattcaacggggttccggaccgcgctgcgctatggagcaggtcaatgagctgaaggagaaaggcaacaaggccctgagcgtgggtaacatcgatgatgccttacagtgctactccgaagctattaagctggatccccacaaccacgtgctgtacagcaaccgttctgctgcctatgccaagaaaggagactaccagaaggcttatgaggatggctgcaagactgtcgacctaaagcctgactggggcaagggctattcacgaaaagcagcagctctagagttcttaaaccgctttgaagaagccaagcgaacctatgaggagggcttaaaacacgaggcaaataaccctcaactgaaagagggtttacagaatatggaggccaggttggcagagagaaaattcatgaaccctttcaacatgcctaatctgtatcagaagttggagagtgatcccaggacaaggacactactcagtgatcctacctaccgggagctgatagagcagctacgaaacaagccttctgacctgggcacgaaactacaagatccccggatcatgaccactctcagcgtcctccttggggtcgatctgggcagtatggatgaggaggaagagattgcaacacctccaccaccaccccctcccaaaaaggagaccaagccagagccaatggaagaagatcttccagagaataagaagcaggcactgaaagaaaaagagctggggaacgatgcctacaagaagaaagactttgacacagccttgaagcattacgacaaagccaaggagctggaccccactaacatgacttacattaccaatcaagcagcggtatactttgaaaagggcgactacaataagtgccgggagctttgtgagaaggccattgaagtggggagagaaaaccgagaagactatcgacagattgccaaagcatatgctcgaattggcaactcctacttcaaagaagaaaagtacaaggatgccatccatttctataacaagtctctggcagagcaccgaaccccagatgtgctcaagaaatgccagcaggcagagaaaatcctgaaggagcaagagcggctggcctacataaaccccgacctggctttggaggagaagaacaaaggcaacgagtgttttcagaaaggggactatccccaggccatgaagcattatacagaagccatcaaaaggaacccgaaagatgccaaattatacagcaatcgagctgcctgctacaccaaactcctggagttccagctggcactcaaggactgtgaggaatgtatccagctggagccgaccttcatcaagggttatacacggaaagccgctgcgctggaagcgatgaaggactacaccaaagccatggatgtgtaccagaaggcgctagacctggactccagctgtaaggaggcggcagacggctaccagcgctgtatgatggcgcagtacaaccggcacgacagccccgaagatgtgaagcgacgagccatggccgaccctgaggtgcagcagatcatgagtgacccagccatgcgccttatcctggaacagatgcagaaggacccccaggcactcagcgaacacttaaagaatcctgtaatagcacagaagatccagaagctgatggatgtgggtctgattgcaattcggtgatgacttgttcatccccccttcccttcgccctcatgtggaaagaggagctgggaccgcggcgagcagcacggagcggaagggagagcaggggagagaaggcctcatctctctatatttatacataaccccggggaagacacagagactcgtacctgcgctgtttgtgccgccgctgcctctgggccctcccagcacacgcatggtctcttcaccgctgccctcgagttccatgtctctttcccctgcccctagttgctgtctcggctgctctcccatagttggttttttttttatttggggcagtgggcatgttatggggaggggagggggttcttccagcctcaggtcccagctgtctcacgttgtttattctgcgtccccttctccaataaaacaagccagttgggcgtggttataac

SEQ ID NO: 1641 - protein, 543 aa, Homo sapien
MEQVNELKEKGNKALSVGNIDDALQCYSEAIKLDPHNHVLYSNRSAAYAKKGDYQKAYEDGCKTVDLKPDWGKGYSRKAAALEFLNRFEEAKRTYEEGLKHEANNPQLKEGLQNMEARLAERKFMNPFNMPNLYQKLESDPRTRTLLSDPTYRELIEQLRNKPSDLGTKLQDPRIMTTLSVLLGVDLGSMDEEEEIATPPPPPPPKKETKPEPMEEDLPENKKQALKEKELGNDAYKKKDFDTALKHYDKAKELDPTNMTYITNQAAVYFEKGDYNKCRELCEKAIEVGRENREDYRQIAKAYARIGNSYFKEEKYKDAIHFYNKSLAEHRTPDVLKKCQQAEKILKEQERLAYINPDLALEEKNKGNECFQKGDYPQAMKHYTEAIKRNPKDAKLYSNRAACYTKLLEFQLALKDCEECIQLEPTFIKGYTRKAAALEAMKDYTKAMDVYQKALDLDSSCKEAADGYQRCMMAQYNRHDSPEDVKRRAMADPEVQQIMSDPAMRLILEQMQKDPQALSEHLKNPVIAQKIQKLMDVGLIAIR

SEQ ID NO: 1642 - DNA, 2617 bp, Homo sapien
aagcagtctcaagcctgccgcagggagaagatggcggtcgccgtgagaactttgcaggaacagctggaaaaggccaaagagagtcttaagaacgtggatgagaacattcgcaagctcaccgggcgggacccgaatgatgtgaggcccatccaagccagattgctggccctttctggtcctggtggaggtagaggacgtggtagtttattgctgaggcgtggattctcagatagtggaggacccccagccaaacagagagaccttgaaggggcagtcagtaggctgggcggggagcgtcggaccagaagagaatcacgccaggaaagcgacccggaggatgatgatgttaaaaagccagcattgcagtcttcagttgtagctacctccaaagagcgcacacgtagagaccttatccaggatcaaaatatggatgaaaagggaaagcaaaggaaccgacgaatatttggcttattgatgggcactcttcagaaatttaaacaagaatccactgttgctactgaaaggcaaaacaggcgccaggaaattgaacaaaaacttgaagtgcaggcggaagaagaaagaaagcaggttgaaaatgaaaggagagaactgtttgaagagaggcgtgctaaacagacagaactgcggcttttagaacagaaggttgagcttgcgcagctgcaagaagaatggaatgaacataatgccaaaataattaaatatataagaactaagacaaagccccatttgttttatattcccggaagaatgtgtccagctacccaaaaactaatagaagagtcacagagaaaaatgaacgctttatttgatggtagacgcatcgaatttgcagaacaaataaataaaatggaggctaggcctagaagacaatcaatgaaggaaaaagagcatcaggtggtgcgtaatgaagaacacaaggcggaacaagaagagggtaaggtggctcagcgagaggaagagttggtggagacaggtaaccagcacaatgatgttgaaatagaggaagcaggagaggaagaggaaaaggaaatagggattgttcatagtgatgcagagaaagagcaggaggaggaggaacaaaaacaggaaatggaggttaagatggaggaggaaactgaggtaagggaaagtgagaagcagcaggatagtcagcctgaagaagttatggatgtgctagagatggttgagaatgtcaaacatgtaattgctgaccaggaggtaatggaaactaatcgagttgaaagtgtagaaccttcagaaaatgaagctagcaaagaattggaaccagaaatggaatttgaaattgagccagataaagaatgtaaatccctttctcctgggaaagagaatgtcagtgctttagacatggaaaaggagtctgacgaaaaagaagaaaaagaatctgagccccaacctgagcctgtggctcaacctcaggctcagtctcagccccagctccagcttcaatcccagtccgagccacagcctcagctacaacctgagcctgctcaacctcagcttcagtctcagccccagcttcagcttcaatcccagtgccatgcagtactccagtcccatcctccctctcaacctgaggatttgtcattagctgttttacagccaacaccccaagttactcaggagcatgggcattttctacctgagaggaaggattttcctgtagagtctgtaaaactgactgaggtaccagtagacccagtcttgacagtacatccagagagcgagagcgaaaccaatactaggagcaggagtagaggtcgaactagaaatagaaccaccaagagtagaagtcgaagcagtagcagtagcagttctagtagcagttcaaccagtagcagcagtggaagtagttccagcagtggaagtagtagcagtcgcagtagttccagtagcagctccagtacaagtggcagcagcagcagagatagcagcagcagcactagtagtagtagtgagagtagaagtcggagtaggggccggggacataatagagatagaaagcacagaaggagcgtggatcggaagagaagggatacttcaggactagaaagaagtcacaaatcttcaaaaggtggtagtagtagagatacaaaaggatcaaaggataagaattcccggtccgacagaaagaggtctatatcagagagtagtcgatcaggcaaaagatcttcaagaagtgaaagagaccgaaaatcagacaggaaagacaaaaggcgttaatggaagaagccaggctttcttagccattctttgcagcagaagatttcttgatgaaaaaggattacctttccttgtaaagaggatgctgccttaagaattgcatgttgtaaaaaatctttttggaagatacagactgtttgtttaccagacattcttgtactttttgcataattttgtaagagttatttatcaaaattatgtgaggttccaaaatatgtaaaaatgataataataaaaaaagattaacatcccttgtcatcttttttaaatatcctatactcttcagtaagaatctgtatattttaataggcaaatctttaagtctgttcccttcaattctgtatcatacattgct

SEQ ID NO: 1643 - protein, 743 aa, Homo sapien
MAVAVRTLQEQLEKAKESLKNVDENIRKLTGRDPNDVRPIQARLLALSGPGGGRGRGSLLLRRGFSDSGGPPAKQRDLEGAVSRLGGERRTRRESRQESDPEDDDVKKPALQSSVVATSKERTRRDLIQDQNMDEKGKQRNRRIFGLLMGTLQKFKQESTVATERQNRRQEIEQKLEVQAEEERKQVENERRELFEERRAKQTELRLLEQKVELAQLQEEWNEHNAKIIKYIRTKTKPHLFYIPGRMCPATQKLIEESQRKMNALFDGRRIEFAEQINKMEARPRRQSMKEKEHQVVRNEEHKAEQEEGKVAQREEELVETGNQHNDVEIEEAGEEEEKEIGIVHSDAEKEQEEEEQKQEMEVKMEEETEVRESEKQQDSQPEEVMDVLEMVENVKHVIADQEVMETNRVESVEPSENEASKELEPEMEFEIEPDKECKSLSPGKENVSALDMEKESDEKEEKESEPQPEPVAQPQAQSQPQLQLQSQSEPQPQLQPEPAQPQLQSQPQLQLQSQCHAVLQSHPPSQPEDLSLAVLQPTPQVTQEHGHFLPERKDFPVESVKLTEVPVDPVLTVHPESESETNTRSRSRGRTRNRTTKSRSRSSSSSSSSSSSTSSSSGSSSSSGSSSSRSSSSSSSSTSGSSSRDSSSSTSSSSESRSRSRGRGHNRDRKHRRSVDRKRRDTSGLERSHKSSKGGSSRDTKGSKDKNSRSDRKRSISESSRSGKRSSRSERDRKSDRKDKRR

SEQ ID NO: 1644 - DNA, 1806 bp, Homo sapien
gccgctcgctcggctccgctccctggctcggctccctgcctccgcgtcgcagcccccgccgtagccgcctccgagcccgccgccacatcctctgagaagatggctgtgccacccacgtatgccgatcttggcaaatctgccagggatgtcttcaccaagggctatggatttggcttaataaagcttgatttgaaaacaaaatctgagaatggattggaatttacaagctcaggctcagccaacactgagaccaccaaagtgacgggcagtctggaaaccaagtacagatggactgagtacggcctgacgtttacagagaaatggaataccgacaatacactaggcaccgagattactgtggaagatcagcttgcacgtggactgaagctgaccttcgattcatccttctcacctaacactgggaaaaaaaatgctaaaatcaagacagggtacaagcgggagcacattaacctgggctgcgacatggatttcgacattgctgggccttccatccggggtgctctggtgctaggttacgagggctggctggccggctaccagatgaattttgagactgcaaaatcccgagtgacccagagcaactttgcagttggctacaagactgatgaattccagcttcacactaatgtgaatgacgggacagagtttggcggctccatttaccagaaagtgaacaagaagttggagaccgctgtcaatcttgcctggacagcaggaaacagtaacacgcgcttcggaatagcagccaagtatcagattgaccctgacgcctgcttctcggctaaagtgaacaactccagcctgataggtttaggatacactcagactctaaagccaggtattaaactgacactgtcagctcttctggatggcaagaacgtcaatgctggtggccacaagcttggtctaggactggaatttcaagcataaatgaatactgtacaattgtttaattttaaactattttgcagcatagctaccttcagaatttagtgtatcttttaatgttgtatgtctgggatgcaagtattgctaaatatgttagccctccaggttaaagttgattcagctttaagatgttacccttccagaggtacagaagaaacctatttccaaaaaaggtcctttcagtggtagactcggggagaacttggtggcccctttgagatgccaggtttcttttttatctagaaatggctgcaagtggaagcggataatatgtaggcactttgtaaattcatattgagtaaatgaatgaaattgtgatttcctgagaatcgaaccttggttccctaaccctaattgatgagaggctcgctgcttgatggtgtgtacaaactcacctgaatgggacttttttagacagatcttcatgacctgttcccaccccagttcatcatcatctcttttacaccaaaaggtctgcagggtgtggtaactgtttcttttgtgccattttggggtggagaaggtggatgtgatgaagccaataattcaggacttattccttcttgtgttgtgtttttttttggcccttgcaccagagtatgaaatagcttccaggagctccagctataagcttggaagtgtctgtgtgattgtaatcacatggtgacaacactcagaatctaaattggacttctgttgtattctcaccactcaatttgttttttagcagtttaatgggtacattttagagtcttccattttgttggaattagatcctccccttcaaatgctgtaattaacaacacttaaaaaacttgaataaaatattgaaacctc

SEQ ID NO: 1645 - protein, 283 aa, Homo sapien
MAVPPTYADLGKSARDVFTKGYGFGLIKLDLKTKSENGLEFTSSGSANTETTKVTGSLETKYRWTEYGLTFTEKWNTDNTLGTEITVEDQLARGLKLTFDSSFSPNTGKKNAKIKTGYKREHINLGCDMDFDIAGPSIRGALVLGYEGWLAGYQMNFETAKSRVTQSNFAVGYKTDEFQLHTNVNDGTEFGGSIYQKVNKKLETAVNLAWTAGNSNTRFGIAAKYQIDPDACFSAKVNNSSLIGLGYTQTLKPGIKLTLSALLDGKNVNAGGHKLGLGLEFQA

SEQ ID NO: 1646 - DNA, 2379 bp, Homo sapien
ggcacgagggggaagcaggggtagcggagccatgggggacgctcccagccctgaagagaaactgcaccttatcacccggaacctgcaggaggttctgggggaagagaagctgaaggagatactgaaggagcgggaacttaaaatttactggggaacggcaaccacgggcaaaccacatgtggcttactttgtgcccatgtcaaagattgcagacttcttaaaggcagggtgtgaggtaacaattctgtttgcggacctccacgcatacctggataacatgaaagccccatgggaacttctagaactccgagtcagttactatgagaatgtgatcaaagcaatgctggagagcattggtgtgcccttggagaagctcaagttcatcaaaggcactgattaccagctcagcaaagagtacacactagatgtgtacagactctcctccgtggtcacacagcacgattccaagaaggctggagctgaggtggtaaagcaggtggagcaccctttgctgagtggcctcttataccccggactgcaggctttggatgaagagtatttaaaagtagatgcccaatttggaggcattgatcagagaaagattttcacctttgcagagaagtacctccctgcacttggctattcaaaacgggtccatctgatgaatcctatggttccaggattaacaggcagcaaaatgagctcttcagaagaggagtccaagattgatctccttgatcggaaggaggatgtgaagaaaaaactgaagaaggccttctgtgagccaggaaatgtggagaacaatggggttctgtccttcatcaagcatgtcctttttccccttaagtccgagtttgtgatcctacgagatgagaaatggggtggaaacaaaacctacacagcttacgtggacctggaaaaggactttgctgctgaggttgtacatcctggagacctgaagaattctgttgaagtcgcactgaacaagttgctggatccaatccgggaaaagtttaatacccctgccctgaaaaaactggccagcgctgcctacccagatccctcaaagcagaagccaatggccaaaggccctgccaagaattcagaaccagaggaggtcatcccatcccggctggatatccgtgtggggaaaatcatcactgtggagaagcacccagatgcagacagcctgtatgtagagaagattgacgtgggggaagctgaaccacggactgtggtgagcggcctggtacagttcgtgcccaaggaggaactgcaggacaggctggtagtggtgctgtgcaacctgaaaccccagaagatgagaggagtcgagtcccaaggcatgcttctgtgtgcttctatagaagggataaaccgccaggttgaacctctggaccctccggcaggctctgctcctggtgagcacgtgtttgtgaagggctatgaaaagggccaaccagatgaggagctcaagcccaagaagaaagtcttcgagaagttgcaggctgacttcaaaatttctgaggagtgcatcgcacagtggaagcaaaccaacttcatgaccaagctgggctccatttcctgtaaatcgctgaaaggggggaacattagctagccagcccagcatcttccccccttcttccaccactgagtcatctgctgtctcttcagtctgctccatccatcacccatttacccatctctcaggacacggaagcagcgggtttggactctttattcggtgcagaactcggcaaggggcagcttaccctccccagaacccaggatcatcctgtctggctgcagtgagagaccaacccctaacaagggctgggccacagcagggagtccagccctaccttcttcccttggcagctggagaaatctggtttcaatataactcatttaaaaatttatgccacagtccttataattggaaaaatactggtgcccaggttttcttggagttatccaagcagctgcgcccctagctgggatctggtacctggactaggctaattacagcttctccccaacaggaaactgtgggatttgaaaaggaaagggaagggaaaacagagaacctagtggtctaccaagtggttggcaactttcccaatgtctgcttactctgaggcttggcactgggggccagggcctgccccagggctcctggaatttcccttgatccagctaggctgggacactccctaaatcagctgcgtgttgttagcatcaggcagaatgaatggcagagagtgattctgtcttcatagagggtggggtacttctccataaggcatctcagtcaaatccccatcactgtcataaattcaaataaaatgtctgaacaagggaaaaaaaaaaaaaaaaaaa

SEQ ID NO: 1647 - protein, 528 aa, Homo sapien
MGDAPSPEEKLHLITRNLQEVLGEEKLKEILKERELKIYWGTATTGKPHVAYFVPMSKIADFLKAGCEVTILFADLHAYLDNMKAPWELLELRVSYYENVIKAMLESIGVPLEKLKFIKGTDYQLSKEYTLDVYRLSSVVTQHDSKKAGAEVVKQVEHPLLSGLLYPGLQALDEEYLKVDAQFGGIDQRKIFTFAEKYLPALGYSKRVHLMNPMVPGLTGSKMSSSEEESKIDLLDRKEDVKKKLKKAFCEPGNVENNGVLSFIKHVLFPLKSEFVILRDEKWGGNKTYTAYVDLEKDFAAEVVHPGDLKNSVEVALNKLLDPIREKFNTPALKKLASAAYPDPSKQKPMAKGPAKNSEPEEVIPSRLDIRVGKIITVEKHPDADSLYVEKIDVGEAEPRTVVSGLVQFVPKEELQDRLVVVLCNLKPQKMRGVESQGMLLCASIEGINRQVEPLDPPAGSAPGEHVFVKGYEKGQPDEELKPKKKVFEKLQADFKISEECIAQWKQTNFMTKLGSISCKSLKGGNIS

SEQ ID NO: 1648 - DNA, 4047 bp, Homo sapien
gcggcggcgcgaggcagtatggtttgaagtggtgaacatggatttttctcggcttcacatgtacagtcctccccagtgtgtgccggagaacacgggctacacgtatgcgctcagttccagctattcttcagatgctctggattttgagacggagcacaaattggaccctgtatttgattctccacggatgtcccgccgtagtttgcgcctggccacgacagcatgcaccctgggggatggtgaggctgtgggtgccgacagcggcaccagcagcgctgtctccctgaagaaccgagcggccagaacaacaaaacagcgcagaagcacaaacaaatcagcttttagtatcaaccacgtgtcaaggcaggtcacgtcctctggcgtcagctacggcggcactgtcagcctgcaggatgctgtgactcgacggcctcctgtattggacgagtcttggattcgtgaacagaccacagtggaccacttctggggtcttgatgatgatggtgatcttaaaggtggaaataaagctgccattcagggaaacggggatgtgggagtcgccgccgccaccgcgcacaacggcttctcctgcagcaactgcagcatgctgtccgagcgcaaggacgtgctcacggcgcaccccgcggcccccgggcccgtgtcgagagtttattctagggacaggaatcaaaaatgcgacgactgtaagggcaagaggcacctcgacgcgcaccccggtcgggcagggaccctctggcacatctgggcatgtgcaggttacttcttgctgcagattctgcgcaggatcggagctgtgggccaggctgtgtccaggacggcgtggtcggccctttggctggccgtggttgctccagggaaggcagcctctggagtgttctggtggctggggattggatggtaccagtttgttactttgatttcttggctgaatgtgtttcttcttaccaggtgccttcgaaacatctgcaagtttttagtcttgctcatcccactcttccttttactagcaggtctctccttacggggccagggcaatttcttttcgttcttgcccgtgttgaactgggcaagcatgcatagaacacagcgggtggatgacccccaggacgtgtttaaacccacgacttctcgcctgaagcagcctctgcagggtgacagtgaggcttttccgtggcattggatgagtggcgtggagcagcaggtggcctctctgtctggacagtgccaccaccatggtgagaatctccgagagctgaccactttgctacagaagctgcaggctcgggtggaccagatggaaggcggcgctgccgggccgtcagcttcggtcagagacgctgtgggacagcccccgagggagactgactttatggcctttcaccaagaacatgaagtgcgtatgtcacacttggaagatattctgggaaaactgagagaaaaatctgaggccatccagaaggaactagaacagaccaagcaaaaaacaatcagtgcggttggtgagcagctcctgcccacagtcgagcacctccagctggagctggatcagctaaagtcagagctgtccagctggcgacacgtgaagaccggctgtgagacagtggatgccgtacaagaaagagtggacgtgcaagtcagagaaatggtgaaactcctgttttccgaagatcagcaaggcggttctctggaacagctgctgcagaggttctcatcacagtttgtgagcaaaggcgacttgcagacgatgctgcgagacctgcagctgcagatcctgcggaacgtcacccaccacgtttccgtgaccaagcagctcccaacctcagaagccgtggtgtctgctgtgagcgaggcgggggcgtctggaataacagaggcgcaagcacgtgccatcgtgaacagcgccttgaagctgtattcccaagataagaccgggatggtggactttgctctggaatctggtggtggcagcatcttgagtactcgctgttctgaaacttacgaaaccaaaacggcgctgatgagtctgtttgggatcccgctgtggtacttctcgcagtccccgcgcgtggtcatccagcctgacatttaccccggtaactgctgggcatttaaaggctcccaggggtacctggtggtgaggctctccatgatgatccacccagccgccttcactctggagcacatccctaagacgctgtcgccaacaggcaacatcagcagcgcccccaaggacttcgccgtctatggattagaaaatgagtatcaggaagaagggcagcttctgggacagttcacgtatgatcaggatggggagtcgctccagatgttccaggccctgaaaagacccgacgacacagctttccaaatagtggaacttcggattttttctaactggggccatcctgagtatacctgtctgtatcggttcagagttcatggcgaacctgtcaagtgaagacactactcattatttttgtacatttttgtatatactgggacagcgtgaaacactggaatccttcatggacgagggcatatacaatgatgggacagtgccacactccttcaataaacgtggctgctggccagaggacgtgagcgtgtgacgggcgccttggcgccacctgttgggtgctcactgcctctgcaggtgcagaggggtcagcagcaggagaagcgtgttgaacacgtggctctcagacactccttgtttttaacgggaagctctttgcatttgcatttcctcaacaaaggagcaaagcagaggaagctgagagtctggcgtgttcttgacgctttggtcttcagccttgcactggctcttctaaaggacttttggagggcagataatttcatctgttaaatccaacacacatttctttcagggaaaaacaatgtcaccaaattttcagagttctaaactcctttccttcaagccggaattttccttttttcagcaccagtaggtactaagtctccagatggggaaataactaaaatgtgtttttctgctttgttcgctcttacttctgaggaaggtttccagtcaggactcgctgtaccaatatccatggaggaatatgggagcgtttcgctctccttgtaggctgaagtcagtctgacttgaaggggcctggtttggatctaagcaaacacccagatggggttctctggtctcagcaaggcttttcctgttgggagtcacagtaaacagaaacccaaaaatctcatcttgggtgttttcagggcttgttttgagttttgctgaatagggagcgcaagacgccctgagcctccctctcactggtggtgataagaggagccgtctggtgtgtcagggtcacgaacccgttacatttcaggacgatcctttttccttcagcagcatttcttactggctgtggctggaatctgccttttatcacagctgtcaccattctcacgtgattcttgtgagactctttttggttataattactatttaatatttagactattttactgagcagactttataaatgagatatctacaaggcacttaaagtgttacagatgttttaccttaagaattatttaagttgtgttgggttaagacagttttcagtgtaccgtaaatgttgtgttttcagaaaaagacaaaacgatggtgctgactggttttctgtatattgcacaacagtcctcaaatacactgatgtatgaaactattcatacatcaagcagcatttttttcactctccttagaattggaactatgcagttaaggcagataaaatgtacagatgtttcatatattacaggttacatatataaatcaaaatttcctatataaaactgatttgggatttggggtggaaatattttgaatattaatttatttttaaagatgcaagataggactttgtgcaatgtatttttgtaaatgcttttcaaaatatctgtctttggtagtgcttctgctgctgccaccaaattgataagatgctattaagaggtttaaataaagagttttaatttttaaaaggg

SEQ ID NO: 1649 - DNA, 2522 bp, Homo sapien
actgctctcagtgagaagcgcacgctggagggcgagctgcatgatctgcggggccaggtggccaagcttgaggcagccctaggtgaggccaagaagcaacttcaggatgagatgctgcggcgggtggatgctgagaacaggctgcagaccatgaaggaggaactggacttccagaagaacatctacagtgaggagctgcgtgagaccaagcgccgtcatgagacccgactggtggagattgacaatgggaagcagcgtgagtttgagagccggctggcggatgcgctgcaggaactgcgggcccagcatgaggaccaggtggagcagtataagaaggagctggagaagacttattctgccaagctggacaatgccaggcagtctgctgagaggaacagcaacctggtgggggctgcccacgaggagctgcagcagtcgcgcatccgcatcgacagcctctctgcccagctcagccagctccagaagcagctggcagccaaggaggcgaagcttcgagacctggaggactcactggcccgtgagcgggacaccagccggcggctgctggcggaaaaggagcgggagatggccgagatgcgggcaaggatgcagcagcagctggacgagtaccaggagcttctggacatcaagctggccctggacatggagatccacgcctaccgcaagctcttggagggcgaggaggagaggctacgcctgtcccccagccctacctcgcagcgcagccgtggccgtgcttcctctcactcatcccagacacagggtgggggcagcgtcaccaaaaagcgcaaactggagtccactgagagccgcagcagcttctcacagcacgcacgcactagcgggcgcgtggccgtggaggaggtggatgaggagggcaagtttgtccggctgcgcaacaagtccaatgaggaccagtccatgggcaattggcagatcaagcgccagaatggagatgatcccttgctgacttaccggttcccaccaaagttcaccctgaaggctgggcaggtggtgacgatctgggctgcaggagctggggccacccacagcccccctaccgacctggtgtggaaggcacagaacacctggggctgcgggaacagcctgcgtacggctctcatcaactccactggggaagaagtggccatgcgcaagctggtgcgctcagtgactgtggttgaggacgacgaggatgaggatggagatgacctgctccatcaccaccacggctcccactgcagcagctcgggggaccccgctgagtacaacctgcgctcgcgcaccgtgctgtgcgggacctgcgggcagcctgccgacaaggcatctgccagcggctcaggagcccaggtgggcggacccatctcctctggctcttctgcctccagtgtcacggtcactcgcagctaccgcagtgtggggggcagtgggggtggcagcttcggggacaatctggtcacccgctcctacctcctgggcaactccagcccccgaacccagagcccccagaactgcagcatcatgtaatctgggacctgccaggcaggggtgggggtggaggcttcctgcgtcctcctcacctcatgcccaccccctgccctgcacgtcatgggagggggcttgaagccaaagaaaaataaccctttggtttttttcttctgtatttttttttctaagagaagttattttctacagtggttttatactgaaggaaaaacacaagcaaaaaaaaaaaaaaagcatctatctcatctatctcaatcctaatttctcctcccttccttttccctgcttccaggaaactccacatctgccttaaaaccaaagagggcttcctctagaagccaagggaaaggggtgcttttatagaggctagcttctgcttttctgccctggctgctgccccaccccggggaccctgtgacatggtgcctgagaggcaggcatagaggcttctccgccagcctcctctggacggcaggctcactgccaggccagcctccgagagggagagagagagagagaggacagcttgagccgggcccctggcttggcctgctgtgattccactacacctggctgaggttcctctgcctgccccgcccccagtccccacccctgcccccagccccggggtgagtccattctcccaggtaccagctgcgcttgcttttctgtattttatttagacaagagatgggaatgaggtgggaggtggaagaagggagaagaaaggtgagtttgagctgccttccctagctttagaccctgggtgggctctgtgcagtcactggaggttgaagccaagtggggtgctgggaggagggagagggaggtcactggaaaggggagagcctgctgcacccaccgtggaggaggaaggcaagagggggtggaggggtgtggcagttggttttggcaaacgcttaaagagcccttgcctccccatttcccatctgcaccccttctctcctccccaaatcaatacactagttgtttct

SEQ ID NO: 1650 - DNA, 4164 bp, Homo sapien
cactctggctgggagcagaaggcagcctcggtctctgggcggcggcggcggccctctctgccctggccgcgctgtgtggtgaccgcaggcccgagacatgagggcggcccgtgctctgctgcccctgctgctgcaggcctgctggacagccgcgcaggatgagccggagaccccgagggccgtggccttccaggactgccccgtggacctgttctttgtgctggacacctctgagagcgtggccctgaggctgaagccctacggggccctcgtggacaaagtcaagtccttcaccaagcgcttcatcgacaacctgagggacaggtactaccgctgtgaccgaaacctggtgtggaacgcaggcgcgctgcactacagtgacgaggtggagatcatccaaggcctcacgcgcatgcctggcggccgcgacgcactcaaaagcagcgtggacgcggtcaagtactttgggaagggcacctacaccgactgcgctatcaagaaggggctggagcagctcctcgtggggggctcccacctgaaggagaataagtacctgattgtggtgaccgacgggcaccccctggagggctacaaggaaccctgtggggggctggaggatgctgtgaacgaggccaagcacctgggcgtcaaagtcttctcggtggccatcacacccgaccacctggagccgcgtctgagcatcatcgccacggaccacacgtaccggcgcaacttcacggcggctgactggggccagagccgcgacgcagaggaggccatcagccagaccatcgacaccatcgtggacatgatcaaaaataacgttgagcaagtgtgctgctccttcgaatgccagcctgcaagaggacctccgggcctccggggcgaccccggctttgagggagaacgaggcaagccggggctcccaggagagaagggagaagccggagatcctggaagacccggggacctcggacctgttgggtaccagggaatgaagggagaaaaagggagccgtggggagaagggctccaggggaccaaagggctacaagggagagaagggcaagcgtggcatcgacggggtggacggcgtgaagggggagatggggtacccaggcctgccaggctgcaagggctcgccgggttttgacggcattcaaggaccccctggccccaagggagaccccggcgcctttggactgaaaggagaaaagggcgagcctggagctgacggggaggccgggagaccaggagctcggggaccatctggagacgaggggccagccggagagcctgggccccccggagagaaaggagaggcgggcgacgaggggaacccaggacctgacggtgcccccggggagcggggtggccctggagagagaggaccacgggggaccccaggcccgcggggaccaagaggagaccctggtgaagctggcccgcagggtgatcagggaagagaagggcccgttggtgtccctggagacccgggcgaggctggccctatcggacctaaaggctaccgaggcgatgagggtcccccagggtccgagggtgccagaggagccccaggacctgccggaccccctggagacccggggctgatgggagaaaggggagaagacggccccgctggaaatggcaccgagggcttccccggcttccccgggtatcccgggaacaggggcgctcccgggataaacggcacgaagggctaccccggcctcaagggggacgagggagaagccggggaccccggagacgataacaacgacattgcaccccgaggagtcaaaggagcaaaggggtaccggggtcccgagggcccccagggacccccaggacaccaaggaccgcctgggccggacgaatgcgagattttggacatcatcatgaaaatgtgctcttgctgtgaatgcaagtgcggccccatcgacctcctgttcgtgctggacagctcagagagcattggcctgcagaacttcgagattgccaaggacttcgtcgtcaaggtcatcgaccggctgagccgggacgagctggtcaagttcgagccagggcagtcgtacgcgggtgtggtgcagtacagccacagccagatgcaggagcacgtgagcctgcgcagccccagcatccggaacgtgcaggagctcaaggaagccatcaagagcctgcagtggatggcgggcggcaccttcacgggggaggccctgcagtacacgcgggaccagctgctgccgcccagcccgaacaaccgcatcgccctggtcatcactgacgggcgctcagacactcagagggacaccacaccgctcaacgtgctctgcagccccggcatccaggtggtctccgtgggcatcaaagacgtgtttgacttcatcccaggctcagaccagctcaatgtcatttcttgccaaggcctggcaccatcccagggccggcccggcctctcgctggtcaaggagaactatgcagagctgctggaggatgccttcctgaagaatgtcaccgcccagatctgcatagacaagaagtgtccagattacacctgccccatcacgttctcctccccggctgacatcaccatcctgctggacggctccgccagcgtgggcagccacaactttgacaccaccaagcgcttcgccaagcgcctggccgagcgcttcctcacagcgggcaggacggaccccgcccacgacgtgcgggtggcggtggtgcagtacagcggcacgggccagcagcgcccagagcgggcgtcgctgcagttcctgcagaactacacggccctggccagtgccgtcgatgccatggactttatcaacgacgccaccgacgtcaacgatgccctgggctatgtgacccgcttctaccgcgaggcctcgtccggcgctgccaagaagaggctgctgctcttctcagatggcaactcgcagggcgccacgcccgctgccatcgagaaggccgtgcaggaagcccagcgggcaggcatcgagatcttcgtggtggtcgtgggccgccaggtgaatgagccccacatccgcgtcctggtcaccggcaagacggccgagtacgacgtggcctacggcgagagccacctgttccgtgtccccagctaccaggccctgctccgcggtgtcttccaccagacagtctccaggaaggtggcgctgggctagcccaccctgcacgccggcaccaaaccctgtcctcccacccctccccactcatcactaaacagagcccaagcttggaaagccaggacacaacgctgctgcctgctttgtgcagggtcctccggggctcagccctgagttggcatcacctgcgcagggccctctggggctcagctctgagctagtgtcacctgcacagggccctctgaggctcagccctgagctggcgtcacctgtgcagggccctctggggctcagccctgagctggcctcacctgggttccccaccccgggctctcctgccctgccctcctgcccgccctccctcctgcctgcgcagctccttccctaggcacctctgtgctgcatcccaccagcctgagcaagacgcctctcggggcctgtgccgcactagcctccctctcctctgtccccatagctggtttttcccaccaatcctcacctaacagttactttacaattaaactcaaagcaagctcttctcctcagcttggggcagccattggcctctgtctcgttttgggaaaccaaggtcaggaggccgttgcagacataaatctcggcgactcggccccgtctcctgagggtcctgctggtgaccggcctggaccttggccctacagccctggaggccgctgctgaccagcactgaccccgacctcagagagtactcgcaggggcgctggctgcactcaagaccctcgagattaacggtgctaaccccgtctgctcctccctcccgcagagactggggcctggactggacatgagagccccttggtgccacagagggctgtgtcttactagaaacaacgcaaacctctccttcctcagaatagtgatgtgttcgacgttttatcaaaggccccctttctatgttcatgttagttttgctccttctgtgtttttttctgaaccatatccatgttgctgacttttccaaataaaggttttcactcctc

SEQ ID NO: 1651 - protein, 1028 aa, Homo sapien
MRAARALLPLLLQACWTAAQDEPETPRAVAFQDCPVDLFFVLDTSESVALRLKPYGALVDKVKSFTKRFIDNLRDRYYRCDRNLVWNAGALHYSDEVEIIQGLTRMPGGRDALKSSVDAVKYFGKGTYTDCAIKKGLEQLLVGGSHLKENKYLIVVTDGHPLEGYKEPCGGLEDAVNEAKHLGVKVFSVAITPDHLEPRLSIIATDHTYRRNFTAADWGQSRDAEEAISQTIDTIVDMIKNNVEQVCCSFECQPARGPPGLRGDPGFEGERGKPGLPGEKGEAGDPGRPGDLGPVGYQGMKGEKGSRGEKGSRGPKGYKGEKGKRGIDGVDGVKGEMGYPGLPGCKGSPGFDGIQGPPGPKGDPGAFGLKGEKGEPGADGEAGRPGARGPSGDEGPAGEPGPPGEKGEAGDEGNPGPDGAPGERGGPGERGPRGTPGPRGPRGDPGEAGPQGDQGREGPVGVPGDPGEAGPIGPKGYRGDEGPPGSEGARGAPGPAGPPGDPGLMGERGEDGPAGNGTEGFPGFPGYPGNRGAPGINGTKGYPGLKGDEGEAGDPGDDNNDIAPRGVKGAKGYRGPEGPQGPPGHQGPPGPDECEILDIIMKMCSCCECKCGPIDLLFVLDSSESIGLQNFEIAKDFVVKVIDRLSRDELVKFEPGQSYAGVVQYSHSQMQEHVSLRSPSIRNVQELKEAIKSLQWMAGGTFTGEALQYTRDQLLPPSPNNRIALVITDGRSDTQRDTTPLNVLCSPGIQVVSVGIKDVFDFIPGSDQLNVISCQGLAPSQGRPGLSLVKENYAELLEDAFLKNVTAQICIDKKCPDYTCPITFSSPADITILLDGSASVGSHNFDTTKRFAKRLAERFLTAGRTDPAHDVRVAVVQYSGTGQQRPERASLQFLQNYTALASAVDAMDFINDATDVNDALGYVTRFYREASSGAAKKRLLLFSDGNSQGATPAAIEKAVQEAQRAGIEIFVVVVGRQVNEPHIRVLVTGKTAEYDVAYGESHLFRVPSYQALLRGVFHQTVSRKVALG

SEQ ID NO: 1652 - DNA, 485 bp, Homo sapien
tttaaatgtcatcatcatagtcttttaatattttacataaaaaactgtatacacagcttatagaacttttatgtaaacatcataagctcaccattttgtcatttgtcagtttatttaaaaaataaaaaacaagacaacaatttagtagaagtaccactgggagggtggggaggggaaaaaaggatatacaggggcaggtgtattctctgtacagaggtgcagagaaaatttcacatagctttagagaatgccttgtggaaaaaaaaaaaaataggccccaatacttgttactgccctttatcaaaactgtgtgcatgacctgcacaaataaaatcacaaaacagtgttgccacattcttcaaggaaacaaagcaaaatttagtgggtttcttttccctctccttgttaaaagtcattttttaaaaacatcagaagtagatgaggttacagcgtacaagtgtggtcagaatgctactgtcgtatgc

SEQ ID NO: 1653 - DNA, 3040 bp, Homo sapien
ggcgcgcggcgagctgagggtggcggcggtcgacatgttccaggtcccggatagcgagggcggccgcgccggctccagggccatgaagcccccaggaggagaatcgagcaatctttttggaagtccagaagaagccactccttccagcaggcctaataggatggcatctaatatttttggaccaacagaagaacctcagaacatacccaagaggacaaatcccccagggggtaaaggaagtggtatctttgacgaatcaacccccgtgcagactcgacagcacctgaacccacctggagggaagaccagcgacatttttgggtctccggtcactgccacttcacgcttggcacacccaaacaaacccaaggatcatgttttcttatgtgaaggagaagaaccaaaatcggatcttaaagctgcaaggagcatcccggctggagcagagccaggtgagaaaggcagcgccagaaaagcaggccccgccaaggagcaggagcccatgcccacagtcgacagccatgagccccggctggggccgcggcctcgctctcacaacaaggtcctgaacccaccgggaggcaaatccagcatctccttctactaagagaagccactgctccacccggagccagaccagaaactcaagagatagggtagccatgttttcatttccttttgcccaaatgagcggggtgggaagagggttagtcttatgtgagcctggctgctcagcgtctcctggccgtcatgacagctgcttggagacccgtgccttccagatggctgggagatgcctctgtggggatgaaatggggcacccctggccatcactcatgtgtagtccaggtttgagaggaactggaaggggggtgagggtggggaggtggggcagggcatggtccttggatcaacagcccgccagctgattggatgtctaggaatgactgaaagaaaccaaaacagcctgtccactgctgctgtgggatggaggaggcgtaagcagaaacactaacagtatattgacctcttagcagaaccgcttccattctggagatcacggctgctaaatccagcatccccacttcattttacccccagcatattgttctgtagtcttttcttgaaacatcttgattgcttttcctcggcagctttcaaaaaaccaaataataatagttatccgtcttctacttcatggaagattgttttggtgccctgaccctctgaagtgcccagttcctgccatctgaaacctcggcctgatctgatctcatgttggaatctgcctgtctttcacacagggctggtcttggtcctttacatgccagttttgcttgtgaattcttgcttttttcctctcatcagccttaagtttaggcgtttgttgttctccagtgatgtagacagttcccttcacaagtcacagttcttcccataaatgaggcccgctgacctctgcgggactttaaaaatctattcagatatttccgagtaagtggcttgtttaaattcttcctgtgtctttctttattccttaattggttggtggaaagaagagatgcttgggaaccttgggttcttaggtttggattctttaataatatctaaaaagctaaattttaaataccagctttacataaatgattgttgactctggtctgtttctgacacctttccagaaaaaagtcaattgttcaggtacaccaaagaggaagaagagctgtggaggccaccctctacaaagctttatagaacttctggatctaactcacaaacaagcttccagaagagactagagaccttaggccaggagatgaaggagttcagtagcaaagtcacacctgtccaattccctgagctttgctcactcagctaatgggatggcaaaggtggtggtgctttcatcttcaggcagaagcctctgcccatccccctcaagggctgcaggcccagttctcatgctgcccttgggtgggcatctgttaacagaggagaacgtctgggtggcggcagcagctttgctctgagtgcctacaaagctaatgcttggtgctagaaacatcatcattattaaacttcagaaaagcagcagccatgttcagtcaggctcatgctgcctcactgcttaagtgcctgcaggagccgcctgccaagctccccttcctacacctggcacactggggtctgcacaaggctttgtcaaccaaagacagcttcccccttttgattgcctgtagactttggagccaagaaacactctgtgtgactctacacacacttcaggtggtttgtgcttcaaagtcattgatgcaacttgaaaggaaacagtttaatggtggaaatgaactaccatttataacttctgtttttttattgagaaaatgattcacgaattccaaatcagattgccaggaagaaataggacgtgacggtactgggccctgtgattctcccagcccttgcagtccgctaggtgagaggaaaagctctttacttccgcccctggcagggacttctgggttatgggagaaaccagagatgggaatgaggaaaatatgaactacagcagaagcccctgggcagctgtgatggagcccctgacattactcttcttgcatctgtcctgccttctttccctctgcgaggcagtggggtgggattcagagtgcttagtctgctcactgggagaagaagagttcctgcgcatgcaagccctgctgtgtggctgtcgtttacatttgggaggtgtcctgtatgtctgtacgttggggactgcctgtatttggaagatttaaaaacctagcatcctgttctcaccctctaagctgcattgagaaatgactcgtctctgtatttgtattaagccttaacacttttcttaagtgcattcggtgccaacattttttagagctgtaccaaaacaaaaagcctgtactcacatcacaatgtcattttgataggagcgttttgttatttttacaaggcagaatggggtgtaacagttgaattaaactagcaatcacgtgctcagagcttt

SEQ ID NO: 1654 - protein, 190 aa, Homo sapien
MFQVPDSEGGRAGSRAMKPPGGESSNLFGSPEEATPSSRPNRMASNIFGPTEEPQNIPKRTNPPGGKGSGIFDESTPVQTRQHLNPPGGKTSDIFGSPVTATSRLAHPNKPKDHVFLCEGEEPKSDLKAARSIPAGAEPGEKGSARKAGPAKEQEPMPTVDSHEPRLGPRPRSHNKVLNPPGGKSSISFY

SEQ ID NO: 1655 - DNA, 2984 bp, Homo sapien
gttttacgctgccgccggcatccgctcggacgcggccacgttgtcttgcgcgctttgcccgcctggccctgggactctgaccctcggctaccctttcctgccccactagcgtggccgcgagcctcggtgagccggccgtattcccgctctcgcttagggggcacaggcgcaggcatcggcccggccactccaagccttcggtgcgcgggcgcgtctgggatacgggcccgggaggcgccgccctccgtccgcccggtgcctctcaggaacagcgaaccggagagagcgccggagagttgggctcagtgcggagctcggcgccggggcccatgcccgtgcgcccccgcaggccggcgccatggcctccgggagtgtggccgagtgcctgcagcaggagaccacctgccccgtgtgcctgcagtacttcgcagagcccatgatgctcgactgcggccataacatctgttgcgcgtgcctcgcccgctgctggggcacggcagagactaacgtgtcgtgcccgcagtgccgggagaccttcccgcagaggcacatgcggcccaaccggcacctggccaacgtgacccaactggtaaagcagctgcgcaccgagcggccgtcggggcccggcggcgagatgggcgtgtgcgagaagcaccgcgagcccctgaagctgtactgcgaggaggaccagatgcccatctgcgtggtgtgcgaccgctcccgcgagcaccgcggccacagcgtgctgccgctcgaggaggcggtggagggcttcaaggagcaaatccagaaccagctcgaccatttaaaaagagtgaaagatttaaagaagagacgtcgggcccagggggaacaggcacgagctgaactcttgagcctaacccagatggagagggagaagattgtttgggagtttgagcagctgtatcactccttaaaggagcatgagtatcgcctcctggcccgccttgaggagctagacttggccatctacaatagcatcaatggtgccatcacccagttctcttgcaacatctcccacctcagcagcctgatcgctcagctagaagagaagcagcagcagcccaccagggagctcctgcaggacattggggacacattgagcagggctgaaagaatcaggattcctgaaccttggatcacacctccagatttgcaagagaaaatccacatttttgcccaaaaatgtctattcttgacggagagtctaaagcagttcacagaaaaaatgcagtcagatatggagaaaatccaagaattaagagaggctcagttatactcagtggacgtgactctggacccagacacggcctaccccagcctgatcctctctgataatctgcggcaagtgcggtacagttacctccaacaggacctgcctgacaaccccgagaggttcaatctgtttccctgtgtcttgggctctccatgcttcatcgccgggagacattattgggaggtagaggtgggagataaagccaagtggaccataggtgtctgtgaagactcagtgtgcagaaaaggtggagtaacctcagccccccagaatggattctgggcagtgtctttgtggtatgggaaagaatattgggctcttacctccccaatgactgccctacccctgcggaccccgctccagcgggtggggattttcttggactatgatgctggtgaggtctccttctacaacgtgacagagaggtgtcacaccttcactttctctcatgctaccttttgtgggcctgtccggccctacttcagtctgagttactcgggagggaaaagtgcagctcctctgatcatctgccccatgagtgggatagatgggttttctggccatgttgggaatcatggtcattccatggagacctccccttgaggaggtgaattcaggccaaaagggctgttggctgtaatcctacgccaggcacaaggcatcttgttgccttgccacgtcctgtcacagctgggtatccttaccatgttccacgcccttgcagtgggagacaggatgtccatgttctctaccatccttttccttcccatgcagattgtgaaatgtaatgagatgtatcaagacatcctagaaataaaaaccagatgtccacctccagtgtttcatactttctggttttacacatcgctggagggataaagagtatggataatctttggatttggagagccgttcaagatacttccagcttcttggctcagcctggcttcctctggttcagccccacataatgattatggctatttgctgtcatttctgggctagggctcctttctaacaacctagactggaataaggccctgtcagcatggctccctttatcccagttttccgtctgggaacagtacctctgcccctgattcccaatgtgccatagttttattaactccattaaagaagcctgtatgtgttttggttagttacagttattttacaataatggtgggtaatggccccacctctgttatgagataatgttctaatcaatgtctctgcctttgtatcttttctgagggctttgtctgttctcttcattctaatgaaaggtgtattctagtgctgggtgcatatcatccaggataatattctgcccaactccatcctctgttactagatcccttaccagtcacatttgtggactggtggccagtcgtataccatccctggaaggattctgggacaatattccagggattcattgacttcttggctccttttctccatttcctttgggggaagggggaattgaccatgcttaagtgcatcctatcaaggggcagctccgtccccatggccattggatcatgagacactcgaagtcagaaggctggggcagatcacttcaagcaagcccccatgatggttctcagtcctgcttctctgtgggtacgtgcccctctgtttaaaaataaactgaatatggatgtttaaaaaaaaaaaaaaaaaa

SEQ ID NO: 1656 - protein, 513 aa, Homo sapien
MASGSVAECLQQETTCPVCLQYFAEPMMLDCGHNICCACLARCWGTAETNVSCPQCRETFPQRHMRPNRHLANVTQLVKQLRTERPSGPGGEMGVCEKHREPLKLYCEEDQMPICVVCDRSREHRGHSVLPLEEAVEGFKEQIQNQLDHLKRVKDLKKRRRAQGEQARAELLSLTQMEREKIVWEFEQLYHSLKEHEYRLLARLEELDLAIYNSINGAITQFSCNISHLSSLIAQLEEKQQQPTRELLQDIGDTLSRAERIRIPEPWITPPDLQEKIHIFAQKCLFLTESLKQFTEKMQSDMEKIQELREAQLYSVDVTLDPDTAYPSLILSDNLRQVRYSYLQQDLPDNPERFNLFPCVLGSPCFIAGRHYWEVEVGDKAKWTIGVCEDSVCRKGGVTSAPQNGFWAVSLWYGKEYWALTSPMTALPLRTPLQRVGIFLDYDAGEVSFYNVTERCHTFTFSHATFCGPVRPYFSLSYSGGKSAAPLIICPMSGIDGFSGHVGNHGHSMETSP

(The sequence listing continues in the following parts.)

What is claimed:

1. Isolated nucleic acid having at least 80% nucleic acid sequence identity to a nucleotide sequence identity to:
(a) the nucleotide sequence shown in any one of the FIGS. 1-2517 (SEQ ID NOS: 1-2517); or
(b) the nucleotide sequence encoding the polypeptide shown in any one of the FIGS. 1-2517 (SEQ ID NOS: 1-2517).

2. A vector comprising the nucleic acid of claim 1.

3. The vector of claim 2 operably linked to control sequences recognized by a host cell transformed with the vector.

4. A host cell comprising the vector of claim 2.

5. The host cell of claim 4, wherein said cell is a CHO cell, an E. coli cell or a yeast cell.

6. A process for producing a PRO polypeptide comprising culturing the host cell of claim 5 under conditions suitable for expression of said PRO polypeptide and recovering said PRO polypeptide from the cell culture.

7. An isolated polypeptide having at least 80% amino acid sequence identity to:
(a) a polypeptide shown in any one of FIGS. 1-2517 (SEQ ID NOS: 1-2517); or
(b) a polypeptide encoded by the full length coding region of the nucleotide sequence shown in any one of FIGS. 1-2517 (SEQ ID NOS: 1-2517).

8. A chimeric molecule comprising a polypeptide according to claim 7 fused to a heterologous amino acid sequence.

9. The chimeric molecule of claim 8, wherein said heterologous amino acid sequence is an epitope tag sequence or an Fc region of an immunoglobulin.

10. An antibody which specifically binds to a polypeptide according to claim 7.

11. The antibody of claim 10, wherein said antibody is a monoclonal antibody, a humanized antibody or a single-chain antibody.

12. A composition of matter comprising (a) a polypeptide of claim 7, (b) an agonist of said polypeptide, (c) an antagonist of said polypeptide, or (d) an antibody that binds to said polypeptide, in combination with a carrier.

13. The composition of matter of claim 12, wherein said carrier is a pharmaceutically acceptable carrier.

14. The composition of matter of claim 13 comprising a therapeutically effective amount of (a), (b), (c) or (d).

15. An article of manufacture, comprising:
a container;
a label on said container; and
a composition of matter comprising (a) a polypeptide of claim 7, (b) an agonist of said polypeptide, (c) an antagonist of said polypeptide, or (d) an antibody that binds to said polypeptide, contained within said container, wherein label on said container indicates that said composition of matter can be used for treating an immune related disease.

16. A method of treating an immune related disorder in a mammal in need thereof comprising administering to said mammal a therapeutically effective amount of (a) a polypeptide of claim 7, (b) an agonist of said polypeptide, (c) an antagonist of said polypeptide, or (d) an antibody that binds to said polypeptide.

17. The method of claim 16, wherein the immune related disorder is systemic lupus erythematosis, rheumatoid arthritis, osteoarthritis, juvenile chronic arthritis, a spondyloarthropathy, systemic sclerosis, an idiopathic inflammatory myopathy, Sjögren's syndrome, systemic vasculitis, sarcoidosis, autoimmune hemolytic anemia, autoimmune thrombocytopenia, thyroiditis, diabetes mellitus, immune-mediated renal disease, a demyelinating disease of the central or peripheral nervous system, idiopathic demyelinating polyneuropathy, Guillain-Barré syndrome, a chronic inflammatory demyelinating polyneuropathy, a hepatobiliary disease, infectious or autoimmune chronic active hepatitis, primary biliary cirrhosis, granulomatous hepatitis, sclerosing cholangitis, inflammatory bowel disease, gluten-sensitive enteropathy, Whipple's disease, an autoimmune or immune-mediated skin disease, a bullous skin disease, erythema multiforme, contact dermatitis, psoriasis, an allergic disease, asthma, allergic rhinitis, atopic dermatitis, food hypersensitivity, urticaria, an immunologic disease of the lung, eosinophilic pneumonias, idiopathic pulmonary fibrosis, hypersensitivity pneumonitis, a transplantation associated disease, graft rejection or graft-versus-host-disease.

18. A method for determining the presence of a PRO polypeptide of the invention as described in FIGS. 1-2517 (SEQ ID NOS: 1-2517), in a sample suspected of containing said polypeptide, said method comprising exposing said sample to an anti-PRO antibody, where the and determining binding of said antibody to a component of said sample.

19. A method of diagnosing an immune related disease in a mammal, said method comprising detecting the level of expression of a gene encoding a PRO polypeptide of the invention as described in FIGS. 1-2517 (SEQ ID NOS: 1-2517), (a) in a test sample of tissue cells obtained from the mammal, and (b) in a control sample of known normal tissue cells of the same cell type, wherein a higher or lower level of expression of said gene in the test sample as compared to the control sample is indicative of the presence of an immune related disease in the mammal from which the test tissue cells were obtained.

20. A method of diagnosing an immune related disease in a mammal, said method comprising (a) contacting a PRO polypeptide of the invention as described in FIGS. 1-2517 (SEQ ID NOS: 1-2517), anti-PRO antibody with a test sample of tissue cells obtained from said mammal and (b) detecting the formation of a complex between the antibody and the polypeptide in the test sample, wherein formation of said complex is indicative of the presence of an immune related disease in the mammal from which the test tissue cells were obtained.

21. A method of identifying a compound that inhibits the activity of a PRO polypeptide of the invention as described in FIGS. 1-2517 (SEQ ID NOS: 1-2517), said method comprising contacting cells which normally respond to said polypeptide with (a) said polypeptide and (b) a candidate compound, and determining the lack responsiveness by said cell to (a).

22. A method of identifying a compound that inhibits the expression of a gene encoding a PRO polypeptide of the invention as described in FIGS. 1-2517 (SEQ ID NOS: 1-2517), said method comprising contacting cells which normally express said polypeptide with a candidate compound, and determining the lack of expression said gene.

23. The method of claim 22, wherein said candidate compound is an antisense nucleic acid.

24. A method of identifying a compound that mimics the activity of a PRO polypeptide of the invention as described in any one of FIGS. 1-2517 (SEQ ID NOS: 1-2517), said method comprising contacting cells which normally respond to said polypeptide with a candidate compound, and determining the responsiveness by said cell to said candidate compound.

25. A method of stimulating the immune response in a mammal, said method comprising administering to said mammal an effective amount of a PRO polypeptide of the invention as described in any one of FIGS. 1-2517 (SEQ ID NOS: 1-2517), antagonist, wherein said immune response is stimulated.

26. A method of diagnosing an inflammatory immune response in a mammal, said method comprising detecting the level of expression of a gene encoding a PRO polypeptide of the invention as described in any one of FIGS. 1-2517 (SEQ ID NOS: 1-2517), (a) in a test sample of tissue cells obtained from the mammal, and (b) in a control sample of known normal tissue cells of the same cell type, wherein a higher or lower level of expression of said gene in the test sample as compared to the control sample is indicative of the presence of an inflammatory immune response in the mammal from which the test tissue cells were obtained.

27. A method of differentiating monocytes comprising;
(a) isolating a population of monocytes;
(b) contacting the monocytes with an effective amount of a PRO polypeptide of the invention as described in any of of FIGS. 1-2517 (SEQ ID NOS: 1-2517); and
(c) determining the differentiation of said monocytes to said PRO polypeptide.
